United States Patent Application Publication US 2005/0228172 A9 - sequence listing, part 119

SEQ ID NO: 552983 - DNA, 1042 bp, Homo sapiens
attagtgagagggatgttttagtgaggtcaccagcctgggccaggtctaggaggaagacagggaagagttaccacaggtctgacatgacccctttgtcccaaagctggggcttatatgttaatcacaacttggctcctgtcctggctcagtgagttgagcttctctggggtcccctgcaccctggccctcctgcctctccartccccggtgctgctcttttcccatcacaggtgggcagggagctgtgtgaacgcccgccccggagacacttttctggtcttctcctctctcccgctcctcttgtgtcctacccttgccccaggtcttctcctgcctgcatctccccggacccccgtctacactaaccttccccaccgcagaggccttgtcatctgccccttatgtgccccctatgctgccttgcattatcaatttcctcgtaacatgtcccttctgtctcccaccacctgagcagcagccctctgggcctaggctgtgggcccgggatggtagggaaggttgtcaagggggcaccaggtaggctggaaccaagaaggctggacagatggccatgatggtgactgcacctgccccaccagggggccctggggcagtggcaattgtagccatgctggtcttttgccaggaggccatatgcagtagacccaggagttggctggtgaggtgagcagacggtagggcatgcagtttgggtggggaggggctctcttttggagaggacgctctgactctacatggacacctgtccctgggtcccttttcctctcatttcacagataaggtcccggggtaggcgatgggggcaggggccagctgaagcctgtctgaccccgggggcccctttcccactgccctgtgctgccttcctcacccccttcgctggtggaagggacgtcatctttcctgttccaaggggagaagtcccagggagctgccacaccgcagcgaggggagaggagggcagatacacgtggctctagagggcgtgagaaatggcattctttattcataaataaaaac

SEQ ID NO: 552984 - DNA, 537 bp, Homo sapiens
cactcagtgaggtattggcagctgttagcaagacagcagggacactgttctctgaacgtggatgtgctgttggatttattgcctcctgttatctgaggattctgtgtatgtgtgtgtgtgtgtgcctttgtccacaaagatttaattgcaacctccaacagggttcattcagacccttagctccctgcgtcaaaggcaggaaggcagggctggagaggataaagagagggcagatattagcctaagcaaaraggcactggactgtactgttttgcatctgtgcttatctatcatcgaactctttaactcttgcctgggtctgaatacaaattggaagccaagatggaaccagtgtgcagttcctgttccttgctacttagtcaaagtggctccatgtaccccaattagcttcctggaaagaaacaatgtatgttgttctcaagccataaaaacccaacatctgtggcctctgtaaaggcttagattatgcactgtgtcttcacatctcaatactggctcagtgcctgatacatggta

SEQ ID NO: 552985 - DNA, 537 bp, Homo sapiens
cactcagtgaggtattggcagctgttagcaagacagcagggacactgttctctgaacgtggatgtgctgttggatttattgcctcctgttatctgaggattctgtgtatgtgtgtgtgtgtgtgcctttgtccacaaagatttaattgcaacctccaacagggttcattcagacccttagctccctgcgtcaaaggcaggaaggcagggctggagaggataaagagagggcagatattagcctaagcaaagaggcactggactgtactgttttgcatctgtgcttatctatcatcgaactctttaactcttgcctgggtctgaatacaaattggaagccaagatggaaccagtgtgcagttcctgttccttgctacttagtcaaagtggctccatgtaccccaattagcttcctggaaagaaacaatgtatgttgttctcaagccataaaaacccaacatctgtggcctctgtaaaggcttagattatgcactgtgtcttcacatctcaatactggctcagtgcctsatacatggta

SEQ ID NO: 552986 - DNA, 607 bp, Homo sapiens
ttcaccttctcagtatgctagccatatttctagtgctcaagagctgcatgtggttggttcctgccatattggacattggacagagcagataaaaaacatttccatccccacacagggatcgattacacagtggtgcctaacctttgaattagaagttgtagtccaataacaattccctgtagaaacattgaaacatctgcatcctacttatagcagtggaatagctgcatcttttttctgcatgcttggggtaggcagttgggaattgttatgacagctgtctgttaaagaaggggtagtgagatttcaaaatatggagctctgcttgagcttatctttcagatagtctgtgcaggcttgcaacagcataaccacgttcttttaaactgtttgacctaatgtgttttaacatgtgctagtcatgtaggtttcaactcaaaatcctcttttttcatggatggaaagattgagtcctagaaarattaaccagaaggcagaataaatctcttattctagaagtttcttaattcacaggaacaatgataaagaaagaactatcaactagaaataaccatcaactagtttgttctcaggaaaataagcattg

SEQ ID NO: 552987 - DNA, 1551 bp, Homo sapiens
agatttatatgttgcgaaaactgtgcagatgacccacttttgcctgagctccagttgtccctttttatttattttccttcctctctgctccttacctcccccaaatactggttgcacagtttcagacactattcaaggcactggggacactggggaacaagagaggaaaggtccctgtccttaagtagccaacagtctaagatgttaaacacattgataaacaagataatttcaggtggtgataagtgcaatagagaaagttagcaaggtatgggtagtgaatgcttaggttggggggttgggagaagggctcctggtctgagaaagtgacatttaaattcagccctgaaggatgagtaatgagtagaagccaggcagtgcaatgatctgtaagaaaaatgtactaggcagaggggatagccagtgccacgccccttcagtgggatgagctttccatttcacactgggctgccttgctgtgtgtcctttgacacctcccatttaactgctccaagattgataccgtctttctttctgacccatcatcataataatggatgatttctctgttttggttaataccgtctctatccaccaccctgaaaaccctaggccagcagtctgaaaactttgtgaggggaaagacagtaaacattttcagctttgagcacagtacagtctgtcacaagtactgaatctgctattgtagcaccaatgtagatatagacagtatgtaaaccaatgagtgtggctgtgctccaatacaactttatgtatggacactgacatttctattttcacttgtaacaaaatatttttcttttttttccaaccatttaaaaatgcgtcagcttattggcgttcaaaatgggcagcggcaggccagatttggctcacaggccaggatctgctgccccctgccttagactaaccctgatctctccctttgcttttgccccaccccacctcctccctaggccctttcagggctccctccctggtattcgtattcagcacctttgccactcrctgtccccactgctgcagccttcctttggctttctttacctgggtgatctatcattgcgcactctatgtccatgtgcagacattatttagctcccactttaagtgagcacatgctgtatttatctttccgtgtctgactactgatcacaagcctttagaagcccctattgcctatagaaaacaatccaaactccaccttagtctgatagtaaaggttccttatgctaaaacctcagtttaactttctagcatactctcctatttctctccttctacactgtcccaaaatagattattcattattttgctttcaatgtttcccatgcttttctgtgttcttgttcatttaatgcacttttcccgtgcttcatgctttccatctgtcagaattccatagctttcaaggccccttcaaatgtccctggtctcttcctctgcccctccctaccccaacaagcggtgtgtatacacatagtcccctggtggtgtgtgatcctctgttccagtacgtcgtgttctggt

SEQ ID NO: 552988 - DNA, 584 bp, Homo sapiens
gaatctgtggatgcaatgcatttaggtcaaccacccagagaacccagcagaatggagctgggcaaagagtagatccgaagtgatgagaagttgttcacatgtccgtctgaatctaaagtggtagccacttccagtgtttttcttttaaaatacaaggtttggggagaaggagaaatgaccaagggatttaaattatagctgttataatccctgcttctgcagctgatgacaaggcgtacattggtactcaaggctaccttyttccacctcccacttctgttctttccgtccatcggcacttcagcaggatgtgttttacctttttccttgtcccaggctacttgtcccatagtaaagatgcttttgcctattttccaaagtagatttggagagacccaaacttcgttgcgtgtaggatatgaggcattgataatcttgtctttattgggtggctgcacttttccattcaccagaacagtgggccaaggaatgctaagaagttgttcattgaatccctgagttctaaacatagctctccctgtctatccccgctaggtagcagcaatctaattactgctgttaag

SEQ ID NO: 552989 - DNA, 584 bp, Homo sapiens
gaatctgtggatgcaatgcatttaggtcaaccacccagagaacccagcagaatggagctgggcaaagagtagatccgaagtgatgagaagttgttcacatgtccgtctgaatctaaagtggtagccacttccagtgtttttcttttaaaatacaaggtttggggagaaggagaaatgaccaagggatttaaattatagctgttataatccctgcttctgcagctgatgacaaggcgtacattggtactcaaggctacctttttccacctcccacttctgttctttccktccatcggcacttcagcaggatgtgttttacctttttccttgtcccaggctacttgtcccatagtaaagatgcttttgcctattttccaaagtagatttggagagacccaaacttcgttgcgtgtaggatatgaggcattgataatcttgtctttattgggtggctgcacttttccattcaccagaacagtgggccaaggaatgctaagaagttgttcattgaatccctgagttctaaacatagctctccctgtctatccccgctaggtagcagcaatctaattactgctgttaag

SEQ ID NO: 552990 - DNA, 532 bp, Homo sapiens
cagctcattagagccaaagtgtagtggagtagaaggaggaggggagaaaacagactggaggcaggactgtttcatagatggataattggttggttaggaaatcattaaagtgacttgctaaagagtgagttttggaagttgtcagtggaataattatacctgggtacacccatctctagccaggatgaygtccaagcctaactggatttgctgtcttttaggggcacctcaccgagtgaatgggaaagtgagtggccacctccacgtgggccatacacccgtgcacttcactgatgtggacctgcatgcgtatatcgtgggcaatgatggcagagcctacacggccatcagccacatcccacagccagcagcccaggccctcctccccctcacaccaattggaggcctgtttggctggctctttgctttagaaaaacctggctctgagaacggcttcagcctcgcaggtgagtagggcctctgagaaggccggtagtcagcattgctttggcagtggtgctccttggggcac

SEQ ID NO: 552991 - DNA, 645 bp, Homo sapiens
tttaaatagtaaaataaaggtttgttgagaatgtcgatgcaattgttccttatctgttttgctttaaattcaccatttttatgctcactaacatcattcttccagtctagaatcatatttggtactttttaatataccttctcatacatatcttctcagaatcatagctgatgctagtcatagatcagcattactaagaagataacaatamtattaaaagagagtcaacaaaataataaaaggtatatatgacaaacacacaaccagcatcatattgaatggggaaaagttgaaaactttctccctaagaatagaaacaagacaaggctgcccactttcatcacttccattcaacacagtactagaagtcctacccagagaaattaggaaagagaaataaataaaggtcttccaaattggaaaagagaaagtcaaaaaatgtcttcttgctgatgatgtgattatttacctagaaaaccctaaaaactcctccaaaagactcgcagatttgataaatgaattcagtaaactctcaggctacaaaatcaatttacacaaatcaggagcactgctatacaccaacagtaaccaagctgagaaccaaatcaataattcaattcctttaacaatagctgcaaaaaataa

SEQ ID NO: 552992 - DNA, 588 bp, Homo sapiens
gtcagctctcctgaaaaagaaaaatctgttccaaaaacttttgctcctaaccaattgccaatttggcaacgagacaaacatatttgggaaaaaaacaacaaacgataaacataagacaatcatgaacacggtgcaaatatcctctttgaaaaatgtcagttacacaaaaaatccaaycgtgtggaaaagcataactttttcccaaagaaagaaagaagtaccagtacttacggtgtcatgagacttatccttgacatcatagactgttagttttattttggtctcctcatagatgggatactcagatgggaatgtgacaccagtcaaaaacagtgggtcccttgttccctgtaacagcacaagcagacaactttgattcaataaggcagcaactgtagttggcagcacgcaagtgacacatgagaatgcagaaagtgtgcctgagtctgtttttcaaggaaatagttctattagaagagatctgaattgtcaaatcctgctcttgggcaacaacatggcccagggccttaaggaagtgatacaactgctgatagtaaatgaacctgcatcattgtcagagctgccttg

SEQ ID NO: 552993 - DNA, 588 bp, Homo sapiens
gtcagctctcctgaaaaagaaaaatctgttccaaaaacttttgctcctaaccaattgccaatttggcaacgagacaaacatatttgggaaaaaaacaacaaacgataaacataagacaatcatgaacacggtgcaaatatcctctttgaaaaatgtcagttacacaaaaaatccaatcgtgtggaaaagcataactttttcccaaagaaagaaagaagtaccagtacttacggtrtcatgagacttatccttgacatcatagactgttagttttattttggtctcctcatagatgggatactcagatgggaatgtgacaccagtcaaaaacagtgggtcccttgttccctgtaacagcacaagcagacaactttgattcaataaggcagcaactgtagttggcagcacgcaagtgacacatgagaatgcagaaagtgtgcctgagtctgtttttcaaggaaatagttctattagaagagatctgaattgtcaaatcctgctcttgggcaacaacatggcccagggccttaaggaagtgatacaactgctgatagtaaatgaacctgcatcattgtcagagctgccttg

SEQ ID NO: 552994 - DNA, 529 bp, Homo sapiens
ccccactgggggaaaaaaaagaaaatggaaaaaaaatcttgtggggaagggaatgatgaaaaaaaaaaaacaaaccccaaaacatcgaagcatccacaccattttacattcccacctgcagtgtgtccacatcttcaacacattattgccrttcttttgtgacgccgtatctcactgtctttgctgtgtatctccctaatgaccaacgatgttgagcatcatttcatgggcttgttggccatttgtgtgtcttctttggaagcatgtctgcttgagtcctctggtgacaagtgacagaaaccaccaggagtcactgtaaatgaaactgaggaagggggagtacgcagagccccagggcaaggatgcttctggctgctggcaggctgtggagtggaaggtggacagaggggagaggctggcagctgtcctcaggctttgtctgtctctctgagtcctggctttcctgctgcccagggaagaagggcagtcctcagagcaggtggagtggcagtcactgatgtccaggtct

SEQ ID NO: 552995 - DNA, 529 bp, Homo sapiens
ccccactgggggaaaaaaaagaaaatggaaaaaaaatcttgtggggaagggaatgatgaaaaaaaaaaaacaaaccccaaaacatcgaagcatccacaccattttacattcccacctgcagtgtgtccacatcttcaacacattattgccattcttttgtgacgccgtatctcactgtctttgctgtgtatctccctaatgaccaacgatgttgagcatcatttcatgggcttgttggccatttgtgtgtcttctttggargcatgtctgcttgagtcctctggtgacaagtgacagaaaccaccaggagtcactgtaaatgaaactgaggaagggggagtacgcagagccccagggcaaggatgcttctggctgctggcaggctgtggagtggaaggtggacagaggggagaggctggcagctgtcctcaggctttgtctgtctctctgagtcctggctttcctgctgcccagggaagaagggcagtcctcagagcaggtggagtggcagtcactgatgtccaggtct

SEQ ID NO: 552996 - DNA, 529 bp, Homo sapiens
ccccactgggggaaaaaaaagaaaatggaaaaaaaatcttgtggggaagggaatgatgaaaaaaaaaaaacaaaccccaaaacatcgaagcatccacaccattttacattcccacctgcagtgtgtccacatcttcaacacattattgccattcttttgtgacgccgtatctcactgtctttgctgtgtatctccctaatgaccaacgatgttgagcatcatttcatgggcttgttggccatttgtgtgtcttctttggaagcatgtctgcttgagtcctctggtgacaagtgacagaaaccaccaggagtcactgtaaatgaaactgaggaagggggagtacgcagagccccagggcaaggatgcttctggctgctggcaggctgtggagtggaaggtggacagaggggagaggctggcrgctgtcctcaggctttgtctgtctctctgagtcctggctttcctgctgcccagggaagaagggcagtcctcagagcaggtggagtggcagtcactgatgtccaggtct

SEQ ID NO: 552997 - DNA, 631 bp, Homo sapiens
ccaccttggcctcccaaaatgctgggattacaagtgtgagccacaatgtcctgcgagcccactttcaaaatgtatgtctactttcaagttattatttctaagaggttatgggctagaaaattagagaatcagatttctttgagttgtgtataaaatcagagttactaggctctaaatgaagccttagggactttctgatgaataaagtgcttcaaataaagtaatgaacattgtgtcatctaattggactatgtagagtcatgttatactcattccyggattcttgggtggctgagtttgctggaaaagtaatttttggataaagtgttacaatttaaaataatttaatagtggttaaaaagttaaattaaaaaacatttcttagaaaatttctgatatgttcctgagacattttatgtaattcaatttttgtatctatttaagggaatcttgcaatgataattttcctgaagtacataagaggtaagaaaacatatgcttgcttttccatatgttaagttgttgagagcaagttatgctggttttttagtttctaagtgtgcagttcaacagagcctacaaagatcaggaagggatttgcatgtccgggaataaggcaaaataggtattc

SEQ ID NO: 552998 - DNA, 1280 bp, Homo sapiens
tgcatacattctcataatcttattgagaataaggtaacaggcatgtcaaatcctatattgatatccacataaaaaaccattgatacttacctcctgaatatggaacaggttattctgcataagaaacctacaggaagatgacagctttggaaaaccgaggcactttgagtctagtgtttctcctattcaactcaaaattttctccacagtatttcaagcgggatgctggccaagtaaaagaaagttaggatcctttttctatgtagttttcatatcacttagcaatttaaatacaaaacactaaatatactctatcaaaacacaagggttagaaatatctgaaattcatgaaatagggctaagaaattcaaatgctgacaagagccaagtcagtctctcttcacaggaaatttcaacaaaataccaaaacaaactaagaagaaaggaaatttcaactttagacatatcaggatcagaattcttggtttgttccctgccttagttatacttttcttctctttccaattctaatttagtttaattaatattccaaaaaaagttatgaaattataatttaattccataatgtcggttggtttgcaaaaattagtggcataaaaagggtttattagatttcatgatgtttttcagattgtcttgggtcagctggacccctcagttccagagagcattacttgaggaaatttaggcaaacatatttagctggaagttggactatagctgcaccatcaagttggcctcagttacatggctgatacctcagctagggtgaatggaacagccagagactggctggtcctctctctccaacaagattcaacttcttacttggtgcttggctttcaaaacagcaaaagtggaaactgtcagatctcttaagctctacacccaaaactgatatagggtcaaagcaagtcacagggccarcacagattaaaagagaggagtcacagaccccatcttttgataaaggagaagcatacatagaataggaatgggaggaattgctggttcccgtttttggagacaatctaccaaaaaattactctctcccattagtttattcatttaatgtaattgtaaaatcaaacacatctccctaccctgttaaagaaattctaaaccttatcaaataagtacgaaaattcatttgtggctataggtgcttccatgaaccatctatttcagatacaggtaaaactgatcgcgcatctagaaaagattcagaaatttctacaatttacagcttaactggcgtt

SEQ ID NO: 552999 - DNA, 1280 bp, Homo sapiens
tgcatacattctcataatcttattgagaataaggtaacaggcatgtcaaatcctatattgatatccacataaaaaaccattgatacttacctcctgaatatggaacaggttattctgcataagaaacctacaggaagatgacagctttggaaaaccgaggcactttgagtctagtgtttctcctattcaactcaaaattttctccacagtatttcaagcgggatgctggccaagtaaaagaaagttaggatcctttttctatgtagttttcatatcacttagcaatttaaatacaaaacactaaatatactctatcaaaacacaagggttagaaatatctgaaattcatgaaatagggctaagaaattcaaatgctgacaagagccaagtcagtctctcttcacaggaaatttcaacaaaataccaaaacaaactaagaagaaaggaaatttcaactttagacatatcaggatcagaattcttggtttgttccctgccttagttatacttttcttctctttccaattctaatttagtttaattaatattccaaaaaaagttatgaaattataatttaattccataatgtcggttggtttgcaaaaattagtggcataaaaagggtttattagatttcatgatgtttttcagattgtcttgggtcagctggacccctcagttccagagagcattacttgaggaaatttaggcaaacatatttagctggaagttggactatagctgcaccatcaagttggcctcagttacatggctgatacctcagctagggtgaatggaacagccagagactggctggtcctctctctccaacaagattcaacttcttacttggtgcttggctttcaaaacagcaaaagtggaaactgtcagatctcttaagctctacacccaaaactgatatagggtcaaagcaagtcacagggccaacacagattaaaagagaggagtcacagaccccatcttttgataaaggagaagcatacatagaataggaatgggaggaattgctggttcccrtttttggagacaatctaccaaaaaattactctctcccattagtttattcatttaatgtaattgtaaaatcaaacacatctccctaccctgttaaagaaattctaaaccttatcaaataagtacgaaaattcatttgtggctataggtgcttccatgaaccatctatttcagatacaggtaaaactgatcgcgcatctagaaaagattcagaaatttctacaatttacagcttaactggcgtt

SEQ ID NO: 553000 - DNA, 525 bp, Homo sapiens
ttttcttcctttggcaacttcctaatcttactaggaagattattagyattagtctgtattcacactgctaataaagacataatggagactgggtaatttataaagaaaaagagatttaatggattcccagttccacgtggctggggaggcctcacaatcatggcagaaggcaaaaggcccattttacatggtagcagaaaagagaaaaatgaggttgggtgtgcggtggttcacgcctgtaattccagcactttgggaagccaaggcaggtggatcactggaggtcaggagttcaagaccagcctggccaacatggtgaaaccccatctctactaaaaaaatacaaaaattagccaggtatggtggcaggcgcctgtaatccaagctacttgggaggctgaggcaggagaattgcttgaacccaggaggcggaggttgcagtaagccaagatcatgccattgcactccagcctgggagacacagcaagactccatctcagaaaaaaaaaaaaaaaagagaaaaat

SEQ ID NO: 553001 - DNA, 525 bp, Homo sapiens
ttttcttcctttggcaacttcctaatcttactaggaagattattagcattagtctgtattcacactgctaataaagacataatggagactgggtaatttataaagaaaaagagatttaatggattcccagttccacgtggctggggaggcctcacaatcatggcagaaggcaaaaggcccattttacatggtagcagaaaagaraaaaatgaggttgggtgtgcggtggttcacgcctgtaattccagcactttgggaagccaaggcaggtggatcactggaggtcaggagttcaagaccagcctggccaacatggtgaaaccccatctctactaaaaaaatacaaaaattagccaggtatggtggcaggcgcctgtaatccaagctacttgggaggctgaggcaggagaattgcttgaacccaggaggcggaggttgcagtaagccaagatcatgccattgcactccagcctgggagacacagcaagactccatctcagaaaaaaaaaaaaaaaagagaaaaat

SEQ ID NO: 553002 - DNA, 525 bp, Homo sapiens
ttttcttcctttggcaacttcctaatcttactaggaagattattagcattagtctgtattcacactgctaataaagacataatggagactgggtaatttataaagaaaaagagatttaatggattcccagttccacgtggctggggaggcctcacaatcatggcagaaggcaaaaggcccattttacatggtagcagaaaagagaaaaatgaggttgggtgtgcggtggttcacgcctgtaattccagcactttgggaagccaaggcaggtggatcactggaggtcaggagttcaagaccagcctggccaacatggtgaaaccccatctctactaaaaaaatacaaaaattagccaggtatggtggcaggcgcctgtaatccaagctacktgggaggctgaggcaggagaattgcttgaacccaggaggcggaggttgcagtaagccaagatcatgccattgcactccagcctgggagacacagcaagactccatctcagaaaaaaaaaaaaaaaagagaaaaat

SEQ ID NO: 553003 - DNA, 950 bp, Homo sapiens
cagctaatcgtgtccaagggcaagtgtgagatgtttcccttccccatgctatcgccctgatgggttctagggacctcttctcctcagagaggctttatgcatgtcctgcaacattaaaagtaagtagaaagggaccaagtcttgggcgcaggcaggtgccactcttggaggacggctagtggatgacagacaacctatcagagaggtcgtggcatatactgatggttttctccttaacagagtagctccatattccttttccattcatccctgtggatgagctacagagtaactccatattccttttccattcatcactttcccctatagagatagaatatgccagatattcctaggctctattgcagctaggggagggcacatgtgacccagttctaaccaatgagatgtaaggggaaatcagttgagagtttctaggaaagattttcctccttgctaaaaggaaagrtgcacaagaatagcactccttctctgccttctggggttctgtctgtggatgaagttacatgagggtgtgatgcttggagctgtggcagccacttgcatccatgaggtaacagcctaggagaaagctcatccctctgagacagcaggagctagagcctgggttcttgatggcagtaagctgctgaaccaaccttaagacctctttttcacaacttcttatgagataagtgtctctgttaagctgtctttagacagaagtgttacttgcagccaaaagcattgtaacaagaagtcagtgggaacgaccttcagaaagctcctctgctctggtggtgtttggtgcccaccaggatggagaatgaggctgctgagttagctcctgaacccatggatctttcaggaataaggtccccttgtcttgggctccattaacctctccctttctcccttcatccctgctgccctcccagtctctacttcca

SEQ ID NO: 553004 - DNA, 1613 bp, Homo sapiens
atgtcactctgccaagctctgccagcctgatgcttagacacttccagatccaggacccttctgaaaagtgcaaaagcaccctgaaatcaccaatgaaacaggaaagaaaaaaaccatctctgctttgcaacacctttagcacacataagtgacttcggtgtgactctttggggtgaaggtttttttaaaagcatgacatttaaactcggcccaacatcattgtttccccattgccatttcccttcctgtgacagacatctcattattaagcatcacattattagcacaaacgctttttgtagaagcataaaggcaaggatgcttattaatcagaaaccaaattttctattcaggcacataatcagggatcttggaaaatgtgaatagcttatttggttggagggactgagagcagcttcctcccatggtacttgatctgccaggataatgatgtcctagggaagtgtactgtgagacccagtagaaactacttgaagctcagcagtcctgtggatgtcaccaaggagagtcttacaggaatggatgagcccctgcaaagtgtgaaataaagagtgctaggagtgctactctgcttaaaaaaaaaaatctccccatcaatttgcctgcattttcaatgtcagagataccttctttcttctcttaaagatttcagatgttaggagaggtaatatagttagtggctaagttcatacgctttgtggtcatgctctctgcatttgaatactagctttgccactgactagcagtatgacttggggtaagttacccaacttctctgggcctcagcttcctcacctatagaattggataataatcattctgcctcatatatttattattgttttgcctcatatatttattatttattattagggttattgtgaagattaaattgaggtgatatatgaaacacacagaactgatctggtaccaaatttctaacttggggttgaagttccactaacagccaatrgtggtggttaggtagtcaggttgagaaggagctatttccaggcttggaaagttctccttgggaaggatttgttctggagtttcctgttgctgtatagcctttttaaggtcttgatcagtcctaaattccccaaagacaactccagagagtcacaactatggtggaatgtggacatgagagaatgaaatgaaaacagagctgttcctttctcctgggggtcctgggctgctacggaaatgctgggcccaatctgaatgaaaactggtttcaaaaggtaaccccttaactcagtttgttaagctcattttctgacttcaaatggtagacagagtttctttcttcaaaagtagaaaacactctgtttaaagtgaaagaccactgaaaagtaaacatgattagttcgccttaatcaagaatgttcaaaaaacttttcagaaattgcaggatctaatcccacagggggcagctggttcccaagcccttttcttttcttttcttttcttttctttttcttttttttttgagactgagtctcagagtctcgctccgtcgcccaggctggagtgcagtggcgctgtcccggctcactgcagcctccgcctcctggattcaagcaatt

SEQ ID NO: 553005 - DNA, 1613 bp, Homo sapiens
atgtcactctgccaagctctgccagcctgatgcttagacacttccagatccaggacccttctgaaaagtgcaaaagcaccctgaaatcaccaatgaaacaggaaagaaaaaaaccatctctgctttgcaacacctttagcacacataagtgacttcggtgtgactctttggggtgaaggtttttttaaaagcatgacatttaaactcggcccaacatcattgtttccccattgccatttcccttcctgtgacagacatctcattattaagcatcacattattagcacaaacgctttttgtagaagcataaaggcaaggatgcttattaatcagaaaccaaattttctattcaggcacataatcagggatcttggaaaatgtgaatagcttatttggttggagggactgagagcagcttcctcccatggtacttgatctgccaggataatgatgtcctagggaagtgtactgtgagacccagtagaaactacttgaagctcagcagtcctgtggatgtcaccaaggagagtcttacaggaatggatgagcccctgcaaagtgtgaaataaagagtgctaggagtgctactctgcttaaaaaaaaaaatctccccatcaatttgcctgcattttcaatgtcagagataccttctttcttctcttaaagatttcagatgttaggagaggtaatatagttagtggctaagttcatacgctttgtggtcatgctctctgcatttgaatactagctttgccactgactagcagtatgacttggggtaagttacccaacttctctgggcctcagcttcctcacctatagaattggataataatcattctgcctcatatatttattattgttttgcctcatatatttattatttattattagggttattgtgaagattaaattgaggtgatatatgaaacacacagaactgatctggtaccaaatttctaacttggggttgaagttccactaacagccaatagtggtggttaggtagtcaggttgagaaggagctatttccaggcttggaaagttctccttgggaaggatttgttctggagtttcctgttgctgtatagcctttttaaggtcttgatcagtcctaaattccccaaagacaactccagagagtcacaactatggtggaatgtrgacatgagagaatgaaatgaaaacagagctgttcctttctcctgggggtcctgggctgctacggaaatgctgggcccaatctgaatgaaaactggtttcaaaaggtaaccccttaactcagtttgttaagctcattttctgacttcaaatggtagacagagtttctttcttcaaaagtagaaaacactctgtttaaagtgaaagaccactgaaaagtaaacatgattagttcgccttaatcaagaatgttcaaaaaacttttcagaaattgcaggatctaatcccacagggggcagctggttcccaagcccttttcttttcttttcttttcttttctttttcttttttttttgagactgagtctcagagtctcgctccgtcgcccaggctggagtgcagtggcgctgtcccggctcactgcagcctccgcctcctggattcaagcaatt

SEQ ID NO: 553006 - DNA, 1613 bp, Homo sapiens
atgtcactctgccaagctctgccagcctgatgcttagacacttccagatccaggacccttctgaaaagtgcaaaagcaccctgaaatcaccaatgaaacaggaaagaaaaaaaccatctctgctttgcaacacctttagcacacataagtgacttcggtgtgactctttggggtgaaggtttttttaaaagcatgacatttaaactcggcccaacatcattgtttccccattgccatttcccttcctgtgacagacatctcattattaagcatcacattattagcacaaacgctttttgtagaagcataaaggcaaggatgcttattaatcagaaaccaaattttctattcaggcacataatcagggatcttggaaaatgtgaatagcttatttggttggagggactgagagcagcttcctcccatggtacttgatctgccaggataatgatgtcctagggaagtgtactgtgagacccagtagaaactacttgaagctcagcagtcctgtggatgtcaccaaggagagtcttacaggaatggatgagcccctgcaaagtgtgaaataaagagtgctaggagtgctactctgcttaaaaaaaaaaatctccccatcaatttgcctgcattttcaatgtcagagataccttctttcttctcttaaagatttcagatgttaggagaggtaatatagttagtggctaagttcatacgctttgtggtcatgctctctgcatttgaatactagctttgccactgactagcagtatgacttggggtaagttacccaacttctctgggcctcagcttcctcacctatagaattggataataatcattctgcctcatatatttattattgttttgcctcatatatttattatttattattagggttattgtgaagattaaattgaggtgatatatgaaacacacagaactgatctggtaccaaatttctaacttggggttgaagttccactaacagccaatagtggtggttaggtagtcaggttgagaaggagctatttccaggcttggaaagttctccttgggaaggatttgttctggagtttcctgttgctgtatagcctttttaaggtcttgatcagtcctaaattccccaaagacaactccagagagtcacaactatggtggaatgtggacatgagagaatgaaatgaaaacagagctgttcctttctcctgggggtcctgggctgctacggaaatgctgggcccaatctgaatgaaaactggtttcaaaaggtaaccccttaactcagtttgttaagctcattttctgacttcaaatggtagacagagtttctttcttcaaaagtagaaaacactctgtttaaagtgaaagaccaytgaaaagtaaacatgattagttcgccttaatcaagaatgttcaaaaaacttttcagaaattgcaggatctaatcccacagggggcagctggttcccaagcccttttcttttcttttcttttcttttctttttcttttttttttgagactgagtctcagagtctcgctccgtcgcccaggctggagtgcagtggcgctgtcccggctcactgcagcctccgcctcctggattcaagcaatt

SEQ ID NO: 553007 - DNA, 1613 bp, Homo sapiens
atgtcactctgccaagctctgccagcctgatgcttagacacttccagatccaggacccttctgaaaagtgcaaaagcaccctgaaatcaccaatgaaacaggaaagaaaaaaaccatctctgctttgcaacacctttagcacacataagtgacttcggtgtgactctttggggtgaaggtttttttaaaagcatgacatttaaactcggcccaacatcattgtttccccattgccatttcccttcctgtgacagacatctcattattaagcatcacattattagcacaaacgctttttgtagaagcataaaggcaaggatgcttattaatcagaaaccaaattttctattcaggcacataatcagggatcttggaaaatgtgaatagcttatttggttggagggactgagagcagcttcctcccatggtacttgatctgccaggataatgatgtcctagggaagtgtactgtgagacccagtagaaactacttgaagctcagcagtcctgtggatgtcaccaaggagagtcttacaggaatggatgagcccctgcaaagtgtgaaataaagagtgctaggagtgctactctgcttaaaaaaaaaaatctccccatcaatttgcctgcattttcaatgtcagagataccttctttcttctcttaaagatttcagatgttaggagaggtaatatagttagtggctaagttcatacgctttgtggtcatgctctctgcatttgaatactagctttgccactgactagcagtatgacttggggtaagttacccaacttctctgggcctcagcttcctcacctatagaattggataataatcattctgcctcatatatttattattgttttgcctcatatatttattatttattattagggttattgtgaagattaaattgaggtgatatatgaaacacacagaactgatctggtaccaaatttctaacttggggttgaagttccactaacagccaatagtggtggttaggtagtcaggttgagaaggagctatttccaggcttggaaagttctccttgggaaggatttgttctggagtttcctgttgctgtatagcctttttaaggtcttgatcagtcctaaattccccaaagacaactccagagagtcacaactatggtggaatgtggacatgagagaatgaaatgaaaacagagctgttcctttctcctgggggtcctgggctgctacggaaatgctgggcccaatctgaatgaaaactggtttcaaaaggtaaccccttaactcagtttgttaagctcattttctgacttcaaatggtagacagagtttctttcttcaaaagtagaaaacactctgtttaaagtgaaagaccactgaaaagtaaacatgattagttcgccttaatcaagaatgttcaaaaaacttttcakaaattgcaggatctaatcccacagggggcagctggttcccaagcccttttcttttcttttcttttcttttctttttcttttttttttgagactgagtctcagagtctcgctccgtcgcccaggctggagtgcagtggcgctgtcccggctcactgcagcctccgcctcctggattcaagcaatt

SEQ ID NO: 553008 - DNA, 633 bp, Homo sapiens
agaaactagaatccctcgtccctagagcaggtcatagaaactagaaccccttgtccccaaagccagccattaaacataaaaatcttactctaactttcmttctgcctttctgtataaaaactggccatagagaaatgacgtgacccatcttgtttgactctaggtcatgggaccctaattccagggaaggccctgtttcataccccttcatacccaggaggaaggaatgacacacagaagccaagaggaatctagactgacaggcctcactgggcttccccaatcagtcctctagcatcagatcataacctttttgtccaaatatatctctacatagctgtccatactttgttgaacctaagcataaaaatgaacagtttctcctttaccattggatcttcattctgtattcattcattctaaatttgtatgccctttctccaattaacctgccttttgcgagttgattgttcagcaaaccttccatagtcaaggaagaggctttcccttggaccctacaagggtgaggaggaatgaaatgacaacataaaacaattcagagtcttccagccaattggccattagaaagctaagttttcatgcccgcctcaccaccacaatacctttccacat

SEQ ID NO: 553009 - DNA, 576 bp, Homo sapiens
tgtgtaaatcactgtcatatgtttgcaaagcactcctgataagcaagagttattttactctctttcttggtagcaagaaaaatgcatccctggtaaattaaatcaatgaatggaaagaacaccaacttttaatcagaacaaacatgacttcaaatctaggcttaactagctgcatgactttgagtatgttactttacttcaccagctctcagttttgccacaaagtgagaattttaaaaatgtttattttcatgcgcgagcatgtgaagagaccaccaaacaggctttgtgtgagcaataaagctttttgatcacctgggtgcaggcgggctgagtcygaaaagagagtcagccaagggagatggggtggggccgttttataggatttgggtaggtaaaggaaaaaggggggttgttctctggtgggcaggaatggggggtcacaaagtgctcagtaggggagcttttgagccaggatgagccaggagaaggaatttcaaaagataatgtctcagttaaggcaggaacaggccattttcacttcttttgtggtggaatgtcatcagttaaggcagg

SEQ ID NO: 553010 - DNA, 512 bp, Homo sapiens
gtggaaaaacaaccttataagcaaagtactcccactcttcccagcagcgtatgatgttgctgctctattaatttcagtgtttagattatgcagaatgagcctccagcagaccattacctggcaacagctagaaatgcaaacacattgctaattgcagattactttccccagccaatcagaaacaacataatcataagctatcaggtacagacatagtaatgcgaatatctgcgaatactactttccaagaaaatctgaattgctgcactggagaatgttatttggctgaaaagaaggtaaccattgcttatttcaaagtacagcatgtcctctgacacacataaaataggatgttaaaaacaataataatgaaatgacttyagtaagctggccctctagttgcaccatgtgacagaaatcccattaacttaaaagggaagattttcatctttcacacctgaactctggaagtaataaagtaggcgtgcaatttctggcacaacacctctttt

SEQ ID NO: 553011 - DNA, 512 bp, Homo sapiens
gtggaaaaacaaccttataagcaaagtactcccactcttcccagcagcgtatgatgttgctgctctattaatttcagtgtttagattatgcagaatgagcctccagcagaccattacctggcaacagctagaaatgcaaacacattgctaattgcagattactttccccagccaatcagaaacaacataatcataagctatcaggtacagacatagtaatgcgaatatctgcgaatactactttccaagaaaatctgaattgctgcactggagaatgttatttggctgaaaagaaggtaaccattgcttatttcaaagtacagcatgtcctctgacacacataaaataggatgttaaaaacaataataatgaaatgacttcagtaagctggccctctagttgcaccatgtgacagaaatcccattaayttaaaagggaagattttcatctttcacacctgaactctggaagtaataaagtaggcgtgcaatttctggcacaacacctctttt

SEQ ID NO: 553012 - DNA, 550 bp, Homo sapiens
cgtccatattttaaaccccacatcatgggacgctgtctggtgaataccctcatctgcggtaaatgccgcatcttacgcagttctggagtgagataaaatggatttaaactttctcagatagaggtagtcagtggagtttctcaaaactcagccagagcaggagcggcatccccgtgcccgtgcatctcctgagcagctctttgtgacgtggaatggggctcaccaatgcctttcagggcctgctgaccctaacactgctcctttccaccggccgatcctgtccacccgctgcctaggcctccaacacaggacacgggcacctcrgctccatcctcctccatgtcccaggccctgctctcccctcctcaccttggacctcttcttttccaagtccaccttcttcctgacccttgaatttgtctctattattttccccttaatcttgacacccacacttgatatttattatcagttttaacttatcacaataaatatactcttttttatctgttagaaaaacaaatgtaaccctgcctttttggggacaaaa

SEQ ID NO: 553013 - DNA, 1209 bp, Homo sapiens
tagggcccctcactttttcaataaagccgttagcttgtcattatattttgaaatgagtgaaattaggcaatgtactgtacataggtcagcttcccctcccaatgtcaagagaagaaagaaagacagagagagaagtcaggaaggatataaccaaagtgttaacggtgaattaattatttctggatggtgggatttcagattactttaatcctttttgtttagcattttatcaatttcatatcatgatgatacattccttttctaatcacatcaaaattaattttattttagaggaaagaatgaattgaaaacagaaataacttggacttcaaagttggcaggagagaatgagttggccactgacataatagaagcaaggtggaggagattttccaggggaggaacactaacttgctggtgttgttgttgttgggaatttcagtccattgaactttatctaaaatggcggtgaacgtgggtttttggtttgagttgttttgttttgttttgttttgttttgttttgttttgttttgttttggctaagtctgtaaagaaagtaggctgctaaatcctagtgcagcttggaaaacagaaatagacaaggtgcctgaactaagaatatcagagttttcaaatgatagaggctgctgatgtagattacagatgctgagcctgaagagacaaagctctccatacccatcctcatgcagacatcactaattgattgctgcattccttccagtgagcccaggcaaatcttcatgatgtttctcaaggagccactcccaccaatggagtcagcactgagttcgcatgcaggatgagaccctaagcctcagggagagcaccagacttgagcagcaagtgctcagctgaggtgaggtgagaacatcagagcaagtagatgtgtttcatgcaccagtgcagayggtctcgggttcaagcctgcatcgaattacctaagagtttgtacacagattgctgggcccacaccaaagttactgattttgcagtcctgggattgggcctgagaatctgcacttccaacaagctcccaggggatgtagatcctgctggtctgggacctcactttcagaatcaatagattagagtaacaagatcaagaattagtaacaagactttgcgattgaggttaattagagaccagtgattctcatcattaactgtgcattcatatcacccaggg

SEQ ID NO: 553014 - DNA, 1209 bp, Homo sapiens
tagggcccctcactttttcaataaagccgttagcttgtcattatattttgaaatgagtgaaattaggcaatgtactgtacataggtcagcttcccctcccaatgtcaagagaagaaagaaagacagagagagaagtcaggaaggatataaccaaagtgttaacggtgaattaattatttctggatggtgggatttcagattactttaatcctttttgtttagcattttatcaatttcatatcatgatgatacattccttttctaatcacatcaaaattaattttattttagaggaaagaatgaattgaaaacagaaataacttggacttcaaagttggcaggagagaatgagttggccactgacataatagaagcaaggtggaggagattttccaggggaggaacactaacttgctggtgttgttgttgttgggaatttcagtccattgaactttatctaaaatggcggtgaacgtgggtttttggtttgagttgttttgttttgttttgttttgttttgttttgttttgttttgttttggctaagtctgtaaagaaagtaggctgctaaatcctagtgcagcttggaaaacagaaatagacaaggtgcctgaactaagaatatcagagttttcaaatgatagaggctgctgatgtagattacagatgctgagcctgaagagacaaagctctccatacccatcctcatgcagacatcactaattgattgctgcattccttccagtgagcccaggcaaatcttcatgatgtttctcaaggagccactcccaccaatggagtcagcactgagttcgcatgcaggatgagaccctaagcctcagggagagcaccagacttgagcagcaagtgctcagctgaggtgaggtgagaacatcagagcaagtagatgtgtttcatgcaccagtgcagatggtctcgggttcaagcctgcatcgaattacctaagagtttgtacacagattgctgggcccacaccaaagttactgattttgcagtcctgggattgggcctgagaatctgcacttccaacaagctcccaggggatgtagatcctgctggtctgggacctcactttsagaatcaatagattagagtaacaagatcaagaattagtaacaagactttgcgattgaggttaattagagaccagtgattctcatcattaactgtgcattcatatcacccaggg

SEQ ID NO: 553015 - DNA, 908 bp, Homo sapiens
ggaggaatgatgccagtgatgttttctttattcttctgtttgaattttatgttgtttttttgaaacagagtctcaatcttgtcacccaggctggattgcattggcatgatcccggctcaccatgacctccgccttccgggttcargccactctcctctctcagcctcccaagtagttgggattacaggcacctgccaccacacctggctaatttttatatttttagtagagacagagtttcaccatgttggccaggctggtctcgaactcctgacctcaaatgatccgcccgcctcagcctcccaaagtgctgagattacaggcatgagccactgcacccggcctgaattttacgatctttcaaaagtaggagaaagatattaacatttaaaaggggatatcatatcaggattaggcttcgttgctaagaacttaaagttgcagaagttttaacaggacagaaataatttctccttcttgttaaagtctgaagttgaatagtttatgactggtacatatctgtgctccacaacgttcttgtggactcggccttctttctgtctttgctgcatataggcatcattctcgaggtcacctcatgatctactatggtatgtctgctctagttccagccatcacttctgtaatgcaaccatcagtaagaaggaagtgaagaaaagcatagctctatgccataaagatacatgctagttcctctcacttcccttggacaaatttagtcagatggccacacttagctacaatgaagggtgggaaatgcaaactttattgtagatatttgtgtttctacctatttggaagttctattagtaaataaaaatgaaacagacacagattgggagacatctagcaaatattgacagatactggtaaccaaattcaaatag

SEQ ID NO: 553016 - DNA, 908 bp, Homo sapiens
ggaggaatgatgccagtgatgttttctttattcttctgtttgaattttatgttgtttttttgaaacagagtctcaatcttgtcacccaggctggattgcattggcatgatcccggctcaccatgacctccgccttccgggttcaggccactctcctctctcagcctcccaagtagttgggattacaggcacctgccaccacacctggctaatttttatatttttagtagagacagagtttcaccatgttggccaggctggtctcgaactcctgacctcaaatgatccgcccgcctcagcctcccaaagtgctgagattacaggcatgagccactgcacccggcctgaattttacgatctttcaaaagtaggagaaagatattaacatttaaaaggggatatcatatcaggattaggcttygttgctaagaacttaaagttgcagaagttttaacaggacagaaataatttctccttcttgttaaagtctgaagttgaatagtttatgactggtacatatctgtgctccacaacgttcttgtggactcggccttctttctgtctttgctgcatataggcatcattctcgaggtcacctcatgatctactatggtatgtctgctctagttccagccatcacttctgtaatgcaaccatcagtaagaaggaagtgaagaaaagcatagctctatgccataaagatacatgctagttcctctcacttcccttggacaaatttagtcagatggccacacttagctacaatgaagggtgggaaatgcaaactttattgtagatatttgtgtttctacctatttggaagttctattagtaaataaaaatgaaacagacacagattgggagacatctagcaaatattgacagatactggtaaccaaattcaaatag

SEQ ID NO: 553017 - DNA, 521 bp, Homo sapiens
atgtttattaactgattgatgagcacatgcagatagtctaaattagttcaagtccttagggtcaaatgaaatacatgctaaaagagcaaaacaaaaaaatccatctatgacttaggagttattgccagttatcttgaagcaattttggatagttgaagcgttaaacgactggagataggaaatgtcccaattttcataatggaggtaagagtrtaatcatagactcacaagcttgaggccacacataatggtgaagcagattattaaacagatggcttgttagcaccttaggaaaaaaatcgaagtatacatgtctattgctatatttgaacccttcctacttctataaaggagatattgattactagtaactggtaagttttgcttaggataagtaaatttatttcaaactcttacctttcttgaaacttactgattaagaatagggcctgtgtattttgtaaggcatttgataatgtctctcatgtgctccctattttagttttatgtgggttagataa

SEQ ID NO: 553018 - DNA, 445 bp, Homo sapiens
tagaagttttctggggaaaaaatagaggagataagatttactggtttattcttcattgatgagagttgcgttctgttctgataaatggaaagctccattgaaattacagatggtcctcaacttaagttggggctacttcccaataaaccatattgaaaatggtttcataaattgaaaatatcaccataaattgaaatatcataaattgaaaatatcaccagtcaaaatgtgtttaacatgcctaccttactgaacatcatactttagtctagcctgtcttaagagtgctcagaacacttatatttgcctayatttgtacaaaatcatctaacagaaaccatattttataatgtgttaaatatctcatgtaacttattgaatactgcaatgaaaatgaaaagcagaatggttgtatgggtactcgaagtacaatttctactgaatg

SEQ ID NO: 553019 - DNA, 1032 bp, Homo sapiens
actggccttacatgaaggcagaatatgtggtcatcttcgtgaaaagcagctcagcacaaaaaacttgagtttgataccaagcccatttggatttgattcctgcttcctgcttcacccctgaccctgattaatcctaggaccttgggcaagttgcttaaattctaatttaatgttttttgttttttgttttgagacatagtctcactctcttgcccaggctggagtgcagtggcaccatctcggctcactgcaacctctgcctcctgggttcaagcaattctcctgtctcagcctcccaactagctggctttacaggcatccaccaccacacctggctatttttttttttggacttttagtagagatgaggtttcatcatgttggccaggctggtctccaactcttggcctcaagtgatccttatcagcctcccaaagtgctgggattacaggcatgagccagtgcacctggcttaaattctataagcctcagtttcttcatctgtaaaagtaatataataatacctacatcaaaatgttcataagtttaaggaaataatgttggaacatgggttcagtgcctgatatgtaatctattgttttaatgatgataattatattcatgaggaaggtctgatttggacttagtgagaaaaagtcggatggccaaacacagcatttcccctgataccatagtaactaatattagattttacatagtcacaagaattaattgtgacaatgctaatttacctagaggaagaaagatataaaattgcaaaactatagcattttagcatgttacttccctattaaatattgaaaatatggaaaaawacaggatttaaaatcaaaagatctggacttgtgaatgggctctacttaataacttgataactttaagattattaggtgaacatagtaagaaaatatgcctcataatgctttcatcattccaacaaacgtgtattgagtctctattaccaaatctgtgactcctttccttatggcgtataatatctgtaagggagat

SEQ ID NO: 553020 - DNA, 660 bp, Homo sapiens
gcacacaaatagacactcaaaacatttttttaaagcaaagcatttacaaacctgtattgaaaaagtgctctttgagacaaaaacatagagagggagatacaatattttgaaaatgtctcaatctttttggataagacttttacaaaaggatatatgaacttggaggtgaagattccacctaaacattagaagtattaaaatattttcacgtatttaaattcccaacttgtttagctctttccttttctaaacaccaactctaagctcaagtgacttcagcaaacattttagaatctggcccatcatcataccactgcaatctctgaataactgsttttggcagccagaagaaatatacaaagaaaaggaatttttagtcagagaacacaggaggcgcctgaaaatcaagaagtaaatggttctcataacgctcttttctttcagtttctcttatttatccagaatgtcttatccttgtcccacattttttaggttaactaccttatcactgacacaagcaattagaaaaaaaaaagaatactgcaagtgtaaattcacaaagcccatattctcacctttaaataattcatgacgccaatatttttcatccggttagcaaaagtattgaaactctccatgttgcttttgggatgataaaat

SEQ ID NO: 553021 - DNA, 574 bp, Homo sapiens
aaagttatgatcacctgttgtgtgcttaacacatttcccatgcatttaaggctcacaatagtgcaatgataagrtaactctgatatactgacggtcactatgagtgatagacttgagattcaaattgagtccttctcactcccaggttgtcttttcattaaattgtgcttatgtgtttcataaaactttgtcatatttgtgagaacaattatgtattgttttctaattttgtttggtagggcttctgaagaccttaagactcatatggttgtggctaatacaatggaagactttcagaagatactagattctggaaaggtcagagagtttggaaaacttttcagtataagaatatttcagtaaattgtattttaaggctcattgaatttatgcatggtattaatacctttttaagccaatcacataaaaagatagtacattactcaacatttatatgtacgtataaatatataatctaattatatagtctttgttttacatttatatgtcatataaatatataatctaaatatatagtctttgttttatatttatatatgtcatatataaatat

SEQ ID NO: 553022 - DNA, 574 bp, Homo sapiens
aaagttatgatcacctgttgtgtgcttaacacatttcccatgcatttaaggctcacaatagtgcaatgataaggtaactctgatatactgayggtcactatgagtgatagacttgagattcaaattgagtccttctcactcccaggttgtcttttcattaaattgtgcttatgtgtttcataaaactttgtcatatttgtgagaacaattatgtattgttttctaattttgtttggtagggcttctgaagaccttaagactcatatggttgtggctaatacaatggaagactttcagaagatactagattctggaaaggtcagagagtttggaaaacttttcagtataagaatatttcagtaaattgtattttaaggctcattgaatttatgcatggtattaatacctttttaagccaatcacataaaaagatagtacattactcaacatttatatgtacgtataaatatataatctaattatatagtctttgttttacatttatatgtcatataaatatataatctaaatatatagtctttgttttatatttatatatgtcatatataaatat

SEQ ID NO: 553023 - DNA, 574 bp, Homo sapiens
aaagttatgatcacctgttgtgtgcttaacacatttcccatgcatttaaggctcacaatagtgcaatgataaggtaactctgatatactgacggtcactatgagtgatagacttgagattcaaattgagtccttctcactcccargttgtcttttcattaaattgtgcttatgtgtttcataaaactttgtcatatttgtgagaacaattatgtattgttttctaattttgtttggtagggcttctgaagaccttaagactcatatggttgtggctaatacaatggaagactttcagaagatactagattctggaaaggtcagagagtttggaaaacttttcagtataagaatatttcagtaaattgtattttaaggctcattgaatttatgcatggtattaatacctttttaagccaatcacataaaaagatagtacattactcaacatttatatgtacgtataaatatataatctaattatatagtctttgttttacatttatatgtcatataaatatataatctaaatatatagtctttgttttatatttatatatgtcatatataaatat

SEQ ID NO: 553024 - DNA, 574 bp, Homo sapiens
aaagttatgatcacctgttgtgtgcttaacacatttcccatgcatttaaggctcacaatagtgcaatgataaggtaactctgatatactgacggtcactatgagtgatagacttgagattcaaattgagtccttctcactcccaggttgtcttttcattaaattgtgcttatgtgtttcataaaactttgtcatatttgtgagaacaattatgtattgttttctaattttgtttggtagggcttctgaagaccttaagactcatatggttgtggctaatacaatggaagactttcagaagatactagattctggaaaggtcagagagtttggaaaacttttcagtataagaatatttcagtaaattgtattttaaggctcattgaatttatgcatggtattaatacctttttaagccaatcacataaaaagatagtacattactcaacatttatatrtacgtataaatatataatctaattatatagtctttgttttacatttatatgtcatataaatatataatctaaatatatagtctttgttttatatttatatatgtcatatataaatat

SEQ ID NO: 553025 - DNA, 940 bp, Homo sapiens
ctcatggtcatgtgaattctgctgcagacaaaaagaaatatctaaagttaaagaaagcacaatttcttattaaataagaatgttagcgggtgaacaaataacaaaacacgactcattttttatgtaagaatatcaaagtgatatgagagacctggtgtcctgtcaggctcgtgtggctgaaatatcaatcccattcattttattcatttaagttgttctatgaaacctctacatattgagatacagtatacataktaaaacactaagatattgccttttgaagttatgcgaagtttgttacttatttaacaaaaaattattaactattcagtgaaagagactattgtatcaaagaactgtaataatatacattggtaagtatcattatgatctttcattgagcacctaacatgccccatctagctcattaactcacttaacaaatattctatggtatgtatatgctataattctgtcctgggcattgaatattcaagcatgagcaaaatatacaagctccctatacttgtggccttacatattggtattctaaagggtaactttagctgaaacatggtgaatacaaagaaaaataaagatcaaatggtatttctgtctttaggtctttgaggaatcaccacgctgacttccacaatgattgaactaatttatactcccactggagaaattctattcaaccctgcaatcccattactggctatatacccaaaggaatacaaatcattccattataaagacacatgcacacatatgttcattgcaacattactcacaatagcaaaaacataaaatcaacctaaatgcccatcagtgatagactggataaagaaaatgtggtacatatacaccatggaatactatacagccataaaaaatgagatcatgtcttctgcatgggcatggatggagctggaggcca

SEQ ID NO: 553026 - DNA, 825 bp, Homo sapiens
ttttaaataacttaaaaatgcaattggattgtttgtaactcaaaggataaatgtttgatggaatggataccccattttcctggatgtgcttattttatattgcatgcgtgtatcaaaacatctcatgacaccayaaatatatatacctactctgtacccacaaaaagtcttaaaaataatttttaaaaaattttaaaagctttgcttcaattactcttgaatgcttggttctggcaccgcctacttcttgtgggcatagtgcccactgcacgtgttcaagtgagctgcactcatccatctttcactagggctgattcatagggtggccagaaccaatttagaaccatagcttgctgcttacataaatcaatgaaatcgtatgaaacacaatataacatggtttcattgaaagagcacaggtgtcaaaaggatgtgagtttacatattacataacttaatatttatttgaacttggactggtcacttagcctggttgaacttcaaatcctttattggtgaaatgagcatccactcataaaatttcattaacttacttcataggattgctaccttgtataattttatacactatgaattctcatacaaaagtcagtgataccagatcgcacaatttaaaatttataggcagacacttcactactttttcttcccttcactgtgaagtaacacatgatatcaccttggtggcactcgcaaggtatttgttggctggctgttttattgtggttcttcctgccactcaagtgctcatgactgagaagaaatcaatgggtgtctgttggcagtgttttgaaagacatattc

SEQ ID NO: 553027 - DNA, 825 bp, Homo sapiens
ttttaaataacttaaaaatgcaattggattgtttgtaactcaaaggataaatgtttgatggaatggataccccattttcctggatgtgcttattttatattgcatgcgtgtatcaaaacatctcatgacaccataaatatatatacctactctgtacccacaaaaagtcttaaaaataatttttaaaaaattttaaaagctttgcttcaattactcttgaatgcttggttctggcaccgcctacttcttgtgggcatagtgcccactgcaygtgttcaagtgagctgcactcatccatctttcactagggctgattcatagggtggccagaaccaatttagaaccatagcttgctgcttacataaatcaatgaaatcgtatgaaacacaatataacatggtttcattgaaagagcacaggtgtcaaaaggatgtgagtttacatattacataacttaatatttatttgaacttggactggtcacttagcctggttgaacttcaaatcctttattggtgaaatgagcatccactcataaaatttcattaacttacttcataggattgctaccttgtataattttatacactatgaattctcatacaaaagtcagtgataccagatcgcacaatttaaaatttataggcagacacttcactactttttcttcccttcactgtgaagtaacacatgatatcaccttggtggcactcgcaaggtatttgttggctggctgttttattgtggttcttcctgccactcaagtgctcatgactgagaagaaatcaatgggtgtctgttggcagtgttttgaaagacatattc

SEQ ID NO: 553028 - DNA, 527 bp, Homo sapiens
gggactacaggcgcccgccactacgcccggctaatttttttgtatttttagtagagacggggtttcaccgttttagccgggatggtctcgatctcctgacctcgtgatccgcccgcctcggcctcccaaagtgctgggattacaggcgtgagccaaagcgcccggcctaaaatattttaatcagcacagaaatgtatgttaatgtctgtcattctaaaagcaaaacaatgaaagaaaatcattatttggtaaatacttgcttcccgttactatccaagttttctactttcctttagtgttaaagttttcaagagttttatacatactctgtacaaaatcccataccccacttacttcttgacaagctgcagggaagcttatactcccacaaatataatgaaatagcttttcattttaccaatgacttctaggtttttaaagtcaggtagtgaggcaggaatattgggtacataagcaagtatrgtggcagacctatctgattcttcttctgaatgaaatgaagttct

SEQ ID NO: 553029 - DNA, 626 bp, Homo sapiens
tattcatggtagaatttasgtcataagtatactggtattcactgtgaaattctttcaagttttctgtgtttgaaatttttcataataaaatgttgggaaatttttaatgaaaaaaggatgaagcaagacatagtctattatgccatgttcaaaacaccagtgaaaattcaaactaatacaagtgatatcaatgtcctttaaactaaccccaagcatcttttatatcaactcagtatttagcatgttatgggataaattttacgtatttgacataattgatatttttatatgactaaagaaaagaatcaaatttttcagttgaagctattttgccaaagattaactacttatgttcaacaaataaacattccctgccatgcctatatcccattctagggacatctatttcttcccccacaggactctctgtccagtggatgccacagaaacatgcagagccaactataatagagtgtgatcactgccttcatggcagaactgaacagtgttgtgaagaaaagaggcattgatcctacttcagtgcgtaaggttttagggatatggggatataaatcgtgtttgatagtgtacctgccagaagtagttcccagagaaatctgggcatc

SEQ ID NO: 553030 - DNA, 626 bp, Homo sapiens
tattcatggtagaatttaggtcataagtatactggtattcactgtgaaattctttcaagttttctgtgtttgaaatttttcataataaaatgttgggaaatttttaatgaaaaaaggatgaagcaagacatagtctattatgccatgttcaaaacaccagtgaaaattcaaactaatacaagtgatatcaatgtcctttaaactaaccccaagcatcttttatatcaactcagtatttagcatgttatgggataaattttaygtatttgacataattgatatttttatatgactaaagaaaagaatcaaatttttcagttgaagctattttgccaaagattaactacttatgttcaacaaataaacattccctgccatgcctatatcccattctagggacatctatttcttcccccacaggactctctgtccagtggatgccacagaaacatgcagagccaactataatagagtgtgatcactgccttcatggcagaactgaacagtgttgtgaagaaaagaggcattgatcctacttcagtgcgtaaggttttagggatatggggatataaatcgtgtttgatagtgtacctgccagaagtagttcccagagaaatctgggcatc

SEQ ID NO: 553031 - DNA, 626 bp, Homo sapiens
tattcatggtagaatttaggtcataagtatactggtattcactgtgaaattctttcaagttttctgtgtttgaaatttttcataataaaatgttgggaaatttttaatgaaaaaaggatgaagcaagacatagtctattatgccatgttcaaaacaccagtgaaaattcaaactaatacaagtgatatcaatgtcctttaaactaaccccaagcatcttttatatcaactcagtatttagcatgttatgggataaattttacgtatttgacataattgatatttttatatgactaaagaaaagaatcaaatttttcagytgaagctattttgccaaagattaactacttatgttcaacaaataaacattccctgccatgcctatatcccattctagggacatctatttcttcccccacaggactctctgtccagtggatgccacagaaacatgcagagccaactataatagagtgtgatcactgccttcatggcagaactgaacagtgttgtgaagaaaagaggcattgatcctacttcagtgcgtaaggttttagggatatggggatataaatcgtgtttgatagtgtacctgccagaagtagttcccagagaaatctgggcatc

SEQ ID NO: 553032 - DNA, 626 bp, Homo sapiens
tattcatggtagaatttaggtcataagtatactggtattcactgtgaaattctttcaagttttctgtgtttgaaatttttcataataaaatgttgggaaatttttaatgaaaaaaggatgaagcaagacatagtctattatgccatgttcaaaacaccagtgaaaattcaaactaatacaagtgatatcaatgtcctttaaactaaccccaagcatcttttatatcaactcagtatttagcatgttatgggataaattttacgtatttgacataattgatatttttatatgactaaagaaaagaatcaaatttttcagttgaagctattttgccaaagattaactacttatgttcaacaaataaacattccctgccatgcctatatcccattctagggacatctatttcttcccccacaggactctctgtccagtggatgccrcagaaacatgcagagccaactataatagagtgtgatcactgccttcatggcagaactgaacagtgttgtgaagaaaagaggcattgatcctacttcagtgcgtaaggttttagggatatggggatataaatcgtgtttgatagtgtacctgccagaagtagttcccagagaaatctgggcatc

SEQ ID NO: 553033 - DNA, 634 bp, Homo sapiens
gagtctccaccacccaaattttctaccatagaatctggtctattccttttcttttttttaattttatttaattttattgatttttctaagacagagtctcactttgtcgcccagactggagtgcagtggcatggtcttggctcactgcaacctctgcctcctggattcaagcaattctcctgcctcagcctcccgaatagctgggattacaggcacgggccaccacgcccccctaattttkgtatttttttgatagagacagggttttgccacgttggccaggctagtctcaaactcctgatcttcctgactcggcgtcccaaagtgctgggattataggcttgagccaccacacctggccaaatctggtctattcttaatagttatagaacattcgaatgctgatttatgaccagaaatttatgataaaacaatatcgaaatttttctgccctgggagatgttttattctaattaaacccaggacaattctaatggctataaatctctcctcactgcacaaaaggaccatctctgtcctcccacacatacctttttatgacgccatccacaccctaggaagaagagagaaaacatcaattaagaaagaaagagtctctcctcacttataaagc

SEQ ID NO: 553034 - DNA, 929 bp, Homo sapiens
tttcttttaaaaataacaacttcaacattctcaaaaaagtgagaagactctagactactaatctctctctctttctgaagaagagaatttatagcttttaatggttgtgaaaaccaggaaataatagagaaatcatgcattctgcaggaattctcctgagtgtattaaattaaactgacagcgttgatatcgctattcatgttgaaataattagcaattctaaggctattaatggtgtattgtatcactgttttagaattggtaggatgaatgcaaaaaccttttggtgacttttgctcctactaaaatttaattagccttagttactgacctcatgttttatgtaacagtacactccaaaatgatctcataaagaattgaagttttggaagaaagtcattcttgctttaaaaactagcatcacataaaagttctctgagtgttttttaactacttttgcaaagtattcttataattgctaacattacctatgggactgactgactttgaatttaattkaagtaaaaatgcgtctctttgacaaggtcactttttaaagtagagctgcactactttgcattacggttctgatttttttcattctaaattaactatgatgtataaaattatcgataaagaataataccttggccatcaaatattaataatgattacaagagaggaaaactacctttaatgcacataaaatttatggttggtaatgatctctactaaatctgcaagactgggtctgtacagtgaagagcaggcaatgtaatagggctcaatggaaggatctaattcagatcttgctccataagagatttgagactatgaagtctaccctagctgaaattaaaccaacccttaaaaacaaaacaaaacatgaagtaccacaaatggtatggtagtggtggtgtcattgaggg

SEQ ID NO: 553035 - DNA, 446 bp, Homo sapiens
ggtcctgctgtattgtcaattaataagtaacaaaaacaatccatttacctttggatgaacgggwtagcttttgtttgttcattcagttatcagacatgtaatgattaatgccttgggtgtgccttgaacattatttatttataaagagcttgctgagaaatggtctatattagcaacaacagtaatgataattaatacttaattagcagtacaggccctgttctaatagttatatactttacatctgtcaactgctataggttcctccttatttttctactataaaatttatactaagcaccctttggcttgcctctttgtttctttagtagcaaaagaaagtatggaaaaaactgctctgaagagtagacggtccatctgtcagcagtttatggggacatgctggcctggcagttttaaaaatggagagggcatgagggaattat

SEQ ID NO: 553036 - DNA, 442 bp, Homo sapiens
aagckgcagaagggaaggatataactttataaaaaaaggtccttgttcacaaggagctaatcacttactggccagagaagaaacgtgttccttctttgcaatggctgtgtttttgggtttagctaactcaattctttatgtcctcaatttatgagaccgcatcaaaaacgtttttgccacatctctgtgggaaagtaggtgagtcagaatgagtgcataatatataagtatatattttaatgataatgaatgtgtagattaacaaacccaaactttgtttttgtttttttgagagtcttgccctgtcgcccaggctggagtgcaatggcatgatcttggctcactgcagcctctgcctcccgggttcacaggattgtcctgcctcagcctccggagtagagtagctgggattacaggtgaccgccaccacgcccgactaatt

SEQ ID NO: 553037 - DNA, 442 bp, Homo sapiens
aagctgsagaagggaaggatataactttataaaaaaaggtccttgttcacaaggagctaatcacttactggccagagaagaaacgtgttccttctttgcaatggctgtgtttttgggtttagctaactcaattctttatgtcctcaatttatgagaccgcatcaaaaacgtttttgccacatctctgtgggaaagtaggtgagtcagaatgagtgcataatatataagtatatattttaatgataatgaatgtgtagattaacaaacccaaactttgtttttgtttttttgagagtcttgccctgtcgcccaggctggagtgcaatggcatgatcttggctcactgcagcctctgcctcccgggttcacaggattgtcctgcctcagcctccggagtagagtagctgggattacaggtgaccgccaccacgcccgactaatt

SEQ ID NO: 553038 - DNA, 572 bp, Homo sapiens
attctttactgtaaattgtgtctccattcctcccatttaaaattcagctttcttgggcctactaatcagtaactattcatccgtgtattttccaacttccaaaattttgttgctattatctcctcttgaaaattctttatttttatatgtttatgccttttttcatccttttactattatttcagtggaatttaaggaggcagtaaacattgaggcatgtgtttagtctgatatctttaataaaaatcctcaatagaatcttctaagctccttaaaaaattctcagcctcttattactcatttttactgkgctgggtctgccttgctcattggtaaggactgccctcatcacctacatgctctttctagtatgtacctcccactgggtatctagcaataatttctttgctaaacatttacacaacattattcactcaacattgtatttgatcctcaaagagcatatctagttggaggagaaaaaacacacagcacaacaaagggttattccaatgtgttaaagaataaaaaactcacagattcgtagtacccccaatttttgaatagtgtat

SEQ ID NO: 553039 - DNA, 2430 bp, Homo sapiens
aatgaataaaacagggaaacaaaagtcccatgaactcatcagggttttcctggcaactccagacgtgaatagaagagctcttccagtttgattgtggccttcacacagttttcttatgcctgtttcagtttaggtattctgttgactttctctaacacctttttctcttagtatcaagaaattatacaacttgaaggaatttagaaaacttttggtctgagggttacaagttcaaatgcttaggtcaggcaacaactcatgtgcagagggtcagatgtatgtcaatagggaatagtggcgactacggcaattggagagcacgtgccctgtctacaggtgcccccacccccactcagtaacaatctattgttgagacaacagtgttgccagaattgcttttcaagagaggccagaaatgtggatttttatgaatatctcttgattataaaatgttgacggctaatttgaagccatttttaaatacatacgaacaagccatttttaaataaatacaagcaaaaccatatctactggccccatatgacttaagagcctccagtttgtggctgctgatagattccaacctcttcattgcgcagatcaggaaactgaggcccagagagtgaatgtgatttgcctaagagtaaaaagtaatagtacaggaggtagaaccttgtctacttggcttctatcctagggcttttccaatacaaacatctgcttctatttgcttgctaagatttaaatgatgttcctaattacatgatttcaaacattgtacattgttaaaaaataacaatattcattggctttggagcacacaatttacaataagtggtttttcagccacatgatcacatagtctaaattgcttctaacatttataaggccaacataattctacttccattcatctactaagaaaactttattcatctctacttccctatacttcttctcccttcaactggttactaaatctggccaaatgtggagaaaaagtcaaatatttaagaagaaccaggttgactactctaccatgaataagaactaagtggggagaaaaagaaaaatacacttgtgaaccagtgactgtaaaaactaagccatgcatttaaaatgtttcagggcagtttgcttattttgccaaagcaaacaaaatacacacagtaatcttgtaagaacctgagcacacttcagcaaagaagtggagataatttttctaagagtttcggtaactgaaaacttccattatatgtctgagattgtttttattttttctttttcagaaaaatttaaaaacagaatagttcagaatagatgataacaaacttccctacagctactattcaggattgtccattgtcctttgtttttcatcggacaaaataaaaaactttacagaaaagctgaagttccctttgttccttattaccaactttattcttatttccaactccccagaagtaaccattatcatgaagtttgtatcaatccttccaaatttttgcatggatatacatacccatgaatatgatatagttttgttatttacatttttaaatgtacatacatggtatcatactatatataacgtaccagagcctgtgtgtttcatctaataacagcctatcaaaaatctatccatctgacctaaatcagatcaagtaaaaaaataagtaaataaataaataaaaattaaaaatctatccaagttgatgaatatggacctagttcattccttttagccactttatgatattttatattttatttgttcatgtcagtagayggctgctaggccattttcaatatatgagtcatttgattttaaaatatttaaagtaggaactaattttccagaaaaggttgacaatcagtattaagccagtagtttattacactatccaaagtgtaaggagaaagatattctatactttcttctagacccaggactcctggccctctagtatgtcaggcagttcattggccccattgtatggaaaatttgttatgaatgataattttctgaaaagagggttgatagctcttatgagattaaaatctatctgtgccaacccccaaaataaagaataactatttttaaatgtcttccactcaccatgggaaataatcatagtgattacttctgcagttctgctttttttccacgatttttgaatgaattgccatcttttattttggcttacaattaaattaaattcaacagttaagcaatgaaaatgcactgaatatcagtacatgggacaagtgccagtagcagggacacgaacaagtcaagaaaagccctgtgtttcactaacacaaaagtctggtgagaaaggtaatgtcaaagccaatgtagagtttctcaaaagggtggctctattgacacttttcctggataacgatttttgctgttggggctgt

SEQ ID NO: 553040 - DNA, 477 bp, Homo sapiens
gcgcacaattcttacgatactccatgttttccttccaaaggctgcatctttaatacattatattgggtttttcccatcacacatttaatgtgtgaaatttctaaactcttccccttcacttatctaaattgaactttggcagccaacagttaactgttggagagttgcttaaaacgatcaaacccttactagatctgattgcaaggagtatcagtgccaagatagaaatttcagtcttcatcatacacaaaatcaatatgtatgcttcgctctggaaagaaagccmccttgaaaataattaataaaacatcaaagctgcacacaacttcaaaagtccacacgagactgaaacatttgaggcaattaaaagaaattactaatttatacaaggtggtacttctcttcgaaaggttttttcatatatatatatatatatatatatatatatatatgcagccaagtgaagacaatctcagt

SEQ ID NO: 553041 - DNA, 1321 bp, Homo sapiens
cataataaaatattttactatatagcaacagtacttgataaagattttttcccacacattttctcattcataaacttaaaactgtgaggaagaagggcagctgttagttattgttacttttttaaaaaggagattgtaactcagaatgctaattgacatttctgtggttacttggtgagaaataaaccctctgttatgcatccatcatctgatacttgttcagtgactctctatacagctacagggttttaaaacatcaattttaatcatgtaaagatcatatgaatatgggatttttaaaaatgcatgcagttttatcatgctattaattcattatttgtactttaagaaaatgatcttgcaagaactctctctcatcttaygcttaagtaaaatgaccttctaagaatggctttctgcgcagccgagccctctgagctgtcaagccgagatgcttgtttcccgtttaatggagagggcttgcatgggtgaaatggttttatccgaatgtaaacccttgccatcaataagtaactggcctgaaggcacaaagtgacagagtaatactttcaaaattaatttccttaactgacgttgctggtctttggagactgttctcctctatgggacattgctccagaagcaaaagtgaacatttttcaatatacaattgtagctagatttctttaatctcatggggtgaagtaaatctgtataaatgttgcagttctgtggctgaatcaacacagtctcagagagtcctatattttgcaaagataaagaaaaaaataattaacaacaacaaaaaaataacagaccaaatcacctatcaggagaagataagactaagggaactcacattttttgagggcccacaaaaattattttgtccttatcctcacagtagccctttgaagctggctattattattcccatttttaagattaaaaacctgaggctcaagaattaagtgacttgaaccaggccatgcaaattaaaagtgatagaatcctgttcaactccaaatgctggggttttcccacttttctgcatagtttcatgaaaagtgtacatagtagcatctttcccaaagccatcatgggcatcaggaggcaaatatcttattttctctgggtaccatagaaccaactctaattcctaattttaaacagctttacaattttaattgtaatattttagaccagtcattgtttctcgtgtgtcttaaaaggctgacctatcctgtcaatgagccacatgcattttctttattttttgcttatcttttttttttttagaatacattctataaacaacatt

SEQ ID NO: 553042 - DNA, 667 bp, Homo sapiens
tgtattatgttttctgttgtgcttcckgggttttgttgttgttgttgttactgttatcttggttttgttcgtttggatatacactctgttttaccctgcttctactttttggattcttctttgtagagatcatcataattttggactatatccttttgtgtcataaataagcaattgtataatgaccttcaaaaattcttactatatctaagttacaatggctataaaataaaataagacctgtttttacctagttttaaaagttttctttgtttttccatgacaatgactcaatttactagtagaatttacctcttctaacaaagtaacattaacattaagtaacattactttaaatggctaaagtataaaaggcagttctctgattttttttttttttaacaggtgatgcagaagatggggaagaatatgatgacccttttgctgggcctccagacactatttcattagcctcagaacgatatgataaagacgatgaagccccctctgatggtatgtgacattttcccacgtaactctgacactcacacaaaacaatgctatatatatgggtggtagttttatgagaaagcagatgaacatagaggcttcggttaacttacctttaccaaaaccttttaaggaacagaagagctctctctagtgg

SEQ ID NO: 553043 - DNA, 1111 bp, Homo sapiens
gacatagctaaataaattaatttgttaggtttttcttagaactaactaatattagaaacaccctctactatttatttcctaaagcccaatttacttttttctccttccttatgaaggaaggaagggcagccctatagccacatggttcttacacaataagaattcttccctcgcatcaagcatggtccgcctcttgaatgttatctcaccgtgtatgtattttgtttcccaatttatttatagaaaacgtaaattctgacctctaggattatttcctgaccacagccttccacttgtgcccttagagttaacaacggaccttattctttcagtattgggcctcatcccccctatttagttatatatgaagagcctgtgctggggctatttcctgggaggaaaaacaacaacaacaaaaaatgtgtgcaaaccacttctccacaatgtttgtcacaaagtctcagctaaaatggtttggattgggtcatgggtcaagtgtatgttgcaattttgtagtcaaactccctgattttttaatttcttacctccaagttatcacagctcatgcctcttactttttgctccccttcatccaaagtagatttttattgctatgcagttaggattatatacctcagtgatggttggttagctaaaagttgcatgatactgtagaaaaagttcagatttagggctagaaaatctgtcatctcatctataaaatgaaaataatggcaacaatagtaacacctaacttacaaggtagttgtaaggaatcaaaaggaattgctacataatcgtgaaagcaattgttggtggtagaattctaaactcactttaatttctgttcacytcacttccttcttttaaatggcaacaactatgatattcctgtgatctctaccattttagcacctcctcatttcccatcacaccgtaaaaatataaaaatgttgccctttctctttccagacaagttccattactcccaacattgggtggtgaaggtaacttttcaggtctttatgtacaggatggtaatgacaaaatctagaattgacatgaggtacagggagataaaaatattgaagatcatatcttgttatggaaa

SEQ ID NO: 553044 - DNA, 385 bp, Homo sapiens
gattgcttgagctcaggaggcgaatgttgtagtgagctcaatacagtgagtacacactactgtactccagcctgggtgaaagggcaagaccctgtctcagaaaaaaaaaaaaaaagaaaagaaaattgcatctagtatgtactactgggctgtctcctgggtcccagagaaatgatactgttgtagaatatttatttatatgtatttagagacaagatctggctctgttgcccaggctggagtagtggcacaatcttggcttactgcagtctctgcctcctgggctcaagctagccatcctcctgcctcagcctcccaagtagctaggactacaggcacatgccaccacacccrgctaatttttgtattttttgtagagatgggg

SEQ ID NO: 553045 - DNA, 542 bp, Homo sapiens
gaatggcttcccatctccccctgaaatagaagtcctctcccacaggctcctgctggcctatccacacctttgcccctgcatcctccacactgtggctgcacttgccattcccaagcactctatgctctgtctcctctactcagcgcaggtgccttcactcgccctggctctccccctgcccaacctcccaactcctctccaattgagaacctccctgggaacactccacaacaccaccccccagaggtttcagagttccttcctacttgctcccatcattcctccagggcatagcctccagggtagccagaactcgccgtattttatagcaggtgtttcttgacctctctccaccacactgaaggcacttagaggacaggcacggasgcttttcacctttcttctgacatataattttgggcttagacataaatgttcaagaagtatttctgaataaatggattaaataaaataatgaacaaacaagccaacaaacgactgaatggcactgatgataataggtattcacctctagggtaaaa

SEQ ID NO: 553046 - DNA, 542 bp, Homo sapiens
gaatggcttcccatctccccctgaaatagaagtcctctcccacaggctcctgctggcctatccacacctttgcccctgcatcctccacactgtggctgcacttgccattcccaagcactctatgctctgtctcctctactcagcgcaggtgccttcactcgccctggctctccccctgcccaacctcccaactcctctccaattgagaacctccctgggaacactccacaacaccaccccccagaggtttcagagttccttcctacttgctcccatcattcctccagggcatagcctccagggtagccagaactcgccgtattttatagcaggtgtttcttgacctctctccaccacactgaaggcacttagaggacaggcacggaggcttttcacctttcttctgacatataattttgggcttagacatmaatgttcaagaagtatttctgaataaatggattaaataaaataatgaacaaacaagccaacaaacgactgaatggcactgatgataataggtattcacctctagggtaaaa

SEQ ID NO: 553047 - DNA, 1250 bp, Homo sapiens
tgattattttcatttcataaatgcattgaaaaaatgtacttcttttttatatgtacgtgtatgtaggtaaatgcaaagaataagttttgaagcaaaattatcttcctttatggaggagaatgggatagggcacattgaaaaggtgcttttgatacaaacatctccacttttcagttttgcaaaagtgatgcattagactgaattttgtctaattgtgtgtaattgactttttttaaagaagaaattccgtggaatagataagaggaaccataattaatccaatcaactcagagggaytgaacacgtgttatgtgtcagtcactatgcttgccgctgaggacacagtagagagcaaagaaacatgctggccctgacctcagggatatagaaactataggaaattgtataagtgtgcaaatttattattatgtaggaaaagtacaggaaattagaaaatcttacagttttctggtcagtgaagttttcctgaggaaggaatttttgcaccaacaactggagcctgaatcaaggttaactatacaaggaggttatttatgaagtcaaaacaattgaaacactaaagagagagttgggtgaataaacatatagagtatacctgagttaagtggaaattttaagaaataggccagattatctcatctatcttattgaattcaactaatctgtaatgccctgcaaatcgcaaaccatccaaaaagatgggtcactgtaactctcactgcacaaacaatgagccaggtaatattgaagccagaatatttttgtttcttcatttttgatttacttacgtagaagtggcccaagtgagtttcaactcaccatcacccacattatttgagtaactaaacatctgccattgcccaagccatacccaaatatcacctgaactaactctccctttctcccttccatcactgtgcttatgcattcatgtgtccaataaaatatttatggaacgttttgtatatgctagatgttggggaaagcaaacatggtccttactctataaatgtgtattctgttggaagaaacagacaaaaattaatagtcacaaaaagtgattaatgttatgaattaaatgattgaggtgccaagatagagaataaagaagagggcttattttagttgtttttttcagtgaaggtctctgaggaagtagcactgagctgagacttcagcattagaaagagccagatatgacagcatttctccccctttttaaagccaaa

SEQ ID NO: 553048 - DNA, 1250 bp, Homo sapiens
tgattattttcatttcataaatgcattgaaaaaatgtacttcttttttatatgtacgtgtatgtaggtaaatgcaaagaataagttttgaagcaaaattatcttcctttatggaggagaatgggatagggcacattgaaaaggtgcttttgatacaaacatctccacttttcagttttgcaaaagtgatgcattagactgaattttgtctaattgtgtgtaattgactttttttaaagaagaaattccgtggaatagataagaggaaccataattaatccaatcaactcagagggactgaacacrtgttatgtgtcagtcactatgcttgccgctgaggacacagtagagagcaaagaaacatgctggccctgacctcagggatatagaaactataggaaattgtataagtgtgcaaatttattattatgtaggaaaagtacaggaaattagaaaatcttacagttttctggtcagtgaagttttcctgaggaaggaatttttgcaccaacaactggagcctgaatcaaggttaactatacaaggaggttatttatgaagtcaaaacaattgaaacactaaagagagagttgggtgaataaacatatagagtatacctgagttaagtggaaattttaagaaataggccagattatctcatctatcttattgaattcaactaatctgtaatgccctgcaaatcgcaaaccatccaaaaagatgggtcactgtaactctcactgcacaaacaatgagccaggtaatattgaagccagaatatttttgtttcttcatttttgatttacttacgtagaagtggcccaagtgagtttcaactcaccatcacccacattatttgagtaactaaacatctgccattgcccaagccatacccaaatatcacctgaactaactctccctttctcccttccatcactgtgcttatgcattcatgtgtccaataaaatatttatggaacgttttgtatatgctagatgttggggaaagcaaacatggtccttactctataaatgtgtattctgttggaagaaacagacaaaaattaatagtcacaaaaagtgattaatgttatgaattaaatgattgaggtgccaagatagagaataaagaagagggcttattttagttgtttttttcagtgaaggtctctgaggaagtagcactgagctgagacttcagcattagaaagagccagatatgacagcatttctccccctttttaaagccaaa

SEQ ID NO: 553049 - DNA, 1250 bp, Homo sapiens
tgattattttcatttcataaatgcattgaaaaaatgtacttcttttttatatgtacgtgtatgtaggtaaatgcaaagaataagttttgaagcaaaattatcttcctttatggaggagaatgggatagggcacattgaaaaggtgcttttgatacaaacatctccacttttcagttttgcaaaagtgatgcattagactgaattttgtctaattgtgtgtaattgactttttttaaagaagaaattccgtggaatagataagaggaaccataattaatccaatcaactcagagggactgaacacgtgttatgtgtcagtcactatgcttgccgctgaggacacagtagagagcaaagaaacatgctggccctgacctcagggatatagaaactataggaaattgtataagtgtgcaaatttattattatgtaggaaaagtacaggaaattagaaaatcttacagttttctggtcagtgaagttttcctgaggaaggaatttttgcaccaacaactggagcctgaatcaaggttaactatacaaggaggttatttatgaagtcaaaacaattgaaacactaaagagagagttgggtgaataaacatatagagtatacctgagttaagtggaaattttaagaaataggccagattatctcatctatcttattgaattcaactaatctgtaatgccctgcaaatcgcaaaccatccaaaaagatgggtcactgtaactctcactgcacaaacaatgagccaggtaatattgaagccagaatatttttgtttcttcatttttgatttacttacgtagaagtggcccaagtgagtttcaactcaccatcacccacattatttgagtaactaaacatctgccattgcccaagccatacccaaatatcacctgaactaactctccctttctcccttccatcactgtgcttatgcattcatgtgtccaataaaatatttatggaacgttttgtatatgctagatgttggggaaagcaaacrtggtccttactctataaatgtgtattctgttggaagaaacagacaaaaattaatagtcacaaaaagtgattaatgttatgaattaaatgattgaggtgccaagatagagaataaagaagagggcttattttagttgtttttttcagtgaaggtctctgaggaagtagcactgagctgagacttcagcattagaaagagccagatatgacagcatttctccccctttttaaagccaaa

SEQ ID NO: 553050 - DNA, 626 bp, Homo sapiens
atagaagatgcccaaggtcacagacctaaccattagaagtgctgccatgtgagcatasgtgtaattgtctacagagctctagaaaacagatgaactagcaggaagggtcactgcaggccgggacaacacccagggaaaggcctcactatggctgggaagagcgcggtgtgtgcgtctagcaggagtccaggtgtggggcaggagaggccgcttgggtaaagggagcgaccacacactgggtcctgcctcatgtgcacctggccatgtgtcggcacttggtgtcgttatcctgcccgctccttacgagaaccctgtgaaacagaaactcctcctgattttacagctgaggccaaggaagctcacacatcacagattaaataatcgattcaaagttactgaaagaataggagagtccaaatctatttgcttaatccccagaccagggctttctgcacgtgcctcagagcctttggtgcagctccaaagggaggcatcgagaaacaccaccggctggaaatgtggctctgctcccgatctttgtctgcgttggcgagacacccgccgctctgggccggaatctctcatctacgaaaaagtgggtagatggagaccaccctcatggtccc

SEQ ID NO: 553051 - DNA, 626 bp, Homo sapiens
atagaagatgcccaaggtcacagacctaaccattagaagtgctgccatgtgagcatacgtgtaattgtctacagagctctagaaaacagatgaactagcaggaagggtcactgcaggccgggacaacacccagggaaaggcctcactatggctgggaagagcgcggtgtgtgcgtctagcaggagtccaggtgtggggcaggagaggccgcttgggkaaagggagcgaccacacactgggtcctgcctcatgtgcacctggccatgtgtcggcacttggtgtcgttatcctgcccgctccttacgagaaccctgtgaaacagaaactcctcctgattttacagctgaggccaaggaagctcacacatcacagattaaataatcgattcaaagttactgaaagaataggagagtccaaatctatttgcttaatccccagaccagggctttctgcacgtgcctcagagcctttggtgcagctccaaagggaggcatcgagaaacaccaccggctggaaatgtggctctgctcccgatctttgtctgcgttggcgagacacccgccgctctgggccggaatctctcatctacgaaaaagtgggtagatggagaccaccctcatggtccc

SEQ ID NO: 553052 - DNA, 536 bp, Homo sapiens
aaaawaaaacaacaaaaacaaactactgtatattttaaatttctatattctatattttggtttgtttccctactgttagcacgctagcttcatgaaggtaaggatttttgtctgttttattcactatactctagtgcctggaataccaccggtatttaataaaatgtgaaatgagtgactgaatgagtgagtggatgtatgaatgaatgattgcaatctgagctcaaggtgctgctccccagtgagtcccagcactcaggcacacccccatcccgtgttgcacctctctgtgtccatgtgtgccacccactggctgcaagtcccccacaggacatgctcatggagtctgtggggtgattggtgacaggcctggtgcaggggcaggtcctggtagaggtaggccccacgctgggctgagagactctacagcccaccacatcccgagagccccttctccctccccacagcctggtgttgatttaaagggactttgctgggcttctgccatgtgccaggtgctctgctgggcctgagga

SEQ ID NO: 553053 - DNA, 536 bp, Homo sapiens
aaaataaaacaacaaaaacaaactactgtatattttaaatttctatattctatattttggtttgtttccctactgttagcamgctagcttcatgaaggtaaggatttttgtctgttttattcactatactctagtgcctggaataccaccggtatttaataaaatgtgaaatgagtgactgaatgagtgagtggatgtatgaatgaatgattgcaatctgagctcaaggtgctgctccccagtgagtcccagcactcaggcacacccccatcccgtgttgcacctctctgtgtccatgtgtgccacccactggctgcaagtcccccacaggacatgctcatggagtctgtggggtgattggtgacaggcctggtgcaggggcaggtcctggtagaggtaggccccacgctgggctgagagactctacagcccaccacatcccgagagccccttctccctccccacagcctggtgttgatttaaagggactttgctgggcttctgccatgtgccaggtgctctgctgggcctgagga

SEQ ID NO: 553054 - DNA, 600 bp, Homo sapiens
ctggggtggaggggccccctcactactggcccagtctctgggcctcaggtttccrtctgtaacctgggcactgacacatgccccaagatctcagcccaggagatgagaaggtgctcagctgaggtggccccacagaatgtgtccctcagtggcaggggtgtgtgaccctgcaccccatgtgagctcccagtctgtgcccccgtatgctgcatgtgctctgaagagggagggcagggccaccctgccgagagtcacataggctaatagatcagccgcgagcccatcagcagagaactgcagtcaccaacacagaagcacaggaagagctgcaaactggagaacggggtctctgtgaacacagagatgcctgtgaacatgactgcacctgctgcctctctctctttttcattctctccttaactcatttgccacaacattagagaaacaaagtccatctcaactcttccaaaaacctcagatcggcccaacagggtcctctaccatcctggtggagcttttgtcagacaaattgaatcactccttcattaacaatgacagttctcacagggagagtcccttgtggaagaccagctggagagg

SEQ ID NO: 553055 - DNA, 600 bp, Homo sapiens
ctggggtggaggggccccctcactactggcccagtctctgggcctcaggtttccgtctgtaacctgggcactgacacatgccccaagatctcagcccaggagatgagaaggtgctcagctgaggtggccccacagaatgtgtccctcagtggcaggggtgtgtgaccctgcaccccatgtgagctcccagtctgtgcccccgtatgctgcatgtgctctgaagagggagggcagggccaccctgccragagtcacataggctaatagatcagccgcgagcccatcagcagagaactgcagtcaccaacacagaagcacaggaagagctgcaaactggagaacggggtctctgtgaacacagagatgcctgtgaacatgactgcacctgctgcctctctctctttttcattctctccttaactcatttgccacaacattagagaaacaaagtccatctcaactcttccaaaaacctcagatcggcccaacagggtcctctaccatcctggtggagcttttgtcagacaaattgaatcactccttcattaacaatgacagttctcacagggagagtcccttgtggaagaccagctggagagg

SEQ ID NO: 553056 - DNA, 600 bp, Homo sapiens
gactctcaactctattccattgttctatatgtctattatcatcccaataccacaccgtattgattactgtarcattgtagtaagttttgagataaataaatctgagtcctccaaatttgcttatctttttcaggaaaaaagttgttcacttttgcagaaatgaaaaaactgatccccaaattcatagttctagaaattgacatttgcttcccaggaaagactcaagagagaaaaaactaatatggaaaagcaataagatgaaatttcaagaaaatgatatcaaaatgaatataagtgtgtaagaaaatatcccaatataatgcaaaatttagttgtggaaataaaatacacattaaaaaattaagcactataaaaattatatatttactcacttagaaatcagtttcttgcgttgtgcattgctttgagcagatcagatacatgtaggcatcttcctgaagaatatcttttagcattgtactgcatgaaaatttggaatgaaatctcccagatttgttttttcttcataaaattgtattttgccaatatagttaagaaatattttccatcagacaattaattctaagttaataatgtttg

SEQ ID NO: 553057 - DNA, 600 bp, Homo sapiens
gactctcaactctattccattgttctatatgtctattatcatcccaataccacaccgtattgattactgtaacattgtagtaagttttgagataaataaatctgagtcctccaaatttgcttatctttttcaggaaaaaagttgttcacttttgcagaaatgaaaaaactgatccccaaattcatagttctagaaattgacatttgcttcccaggaaagactcaagagagaaaaaactaatatggaaaagcaataagatgaaatttcaagaaaatgatatcaaaatgaatataagtgtgtaagaaaatatcccaatataatgcaaaatttagttgtggaaataaaatacacattaaaaaattaagcactataaaaattatatatttactcacttagaaatcagtttcttgcrttgtgcattgctttgagcagatcagatacatgtaggcatcttcctgaagaatatcttttagcattgtactgcatgaaaatttggaatgaaatctcccagatttgttttttcttcataaaattgtattttgccaatatagttaagaaatattttccatcagacaattaattctaagttaataatgtttg

SEQ ID NO: 553058 - DNA, 573 bp, Homo sapiens
ggagcccaaagcatcatcatggcccctctttaagaggccttttggagatcactgtgatgtgatatggcagaaaagtctaggggccttcagatgtccagtgtgtcagcaagagaggccaatgctgagcccctgaaatggcactattccttgagaccaactcatcacttggggcaagtcaaccgcatcaggccctttcaattctggaagggccaatggttcatctctacagggatagagacttattctgggcatgggtttgcctttcctcaccacagagccttagttagcrtcactttccagggatgtacagaatgcctgatccaaaggcatggaattccacacagcacagcacttaactgggggacagtatgatagcaagggtcctattgaactatgtatggtttgcggctgctgcagggcacttgggattcttcgtgctcagaaaccagcagacaagaagagtcatcatactggcagggataactgacccggatcaacaggaaggggcaaggctgcttctggataatgagggcaggaggaatgtgtgtggagcccatgtgatccactgtgcac

SEQ ID NO: 553059 - DNA, 214 bp, Homo sapiens
tgaaattgactgacagtaattacagtcacaggatatgccttttcttaactgagagctatcattatcattacataattactattgtacatttttttcctgaatctcagtggcatacattttacttctggcattccataatgaaaataaaccataaaaaatagaaaattataagaaaatgtatttgacattttatatatatatatatatatayaca

SEQ ID NO: 553060 - DNA, 1146 bp, Homo sapiens
aaacagataaatctgatctcacatctttcccttgcttaattatattaaatggatttctaaacccttaacatggtctatacacctctacacctgggttatcaggtttcacttgtatctctggtgctgtctaacatcaatccatctgctttagccatgtgggacatctctcaattatctgagcacagccatgcattgttctatgccccctcgatcttcctaatggaacatgtccattagaacacttacatatcctctagatttcaggtcaaacatcaatgcttcagggaagtcttccttcagaacccaggccaagttggttgtctcagtaacattttttcatctctttagatattgtaatttttaaacttaattgtttatactgatttatataacatctgtcttctcatctggactttcagctccataaggcagggaccaggtccatgttgtccactatttccaaaacctaggatattgtagaacctcagtaatcctactccctgataaaagacttgaagagtttcacaaaaccatgtgtttttccatatttaagtcatgcctggaatgagggatatcagaaggcattcttttcttctataaattaaataaacattactttctcttgccaccattcttttaccattgtttagctttgagagtgtcttgcctgygtacttgaaacagccaggagtagaaagggcactggatgaggagtcagtaggaatgttgaattctgctctcgggttggcttctaacactgctctgtgaccccagggaaattacttggcctttctgaacttcagttttcaccaacagttggtattaaaagagggttggcctggataatttccaaagacacatctggtcataaaattccatgactcacactcacatcagagccaagtagtccaatcctaaaactgagtactcacattttcaaatcagaggttattcccttagattacaccattagataaatgacacgatatgcagcaaagtaagtcaattttagcttctatacttactgacgtgtaggagagctgcaacatgttttttagaaaagctggttctttattttcttttttttatgtcaaggaaagaaaaatgctggttaaagagaaaatagattcatataactagaagaac

SEQ ID NO: 553061 - DNA, 1386 bp, Homo sapiens
tgcaaagtattacctattggcataattatctaatttccataacaacatatcaacaagcataccagctctgtaccaactaagtgcccaaagtatttataatcacattccattactctagaagggtgcctggaccagatactggggtggctgtgccttctagaaagcaagaatggaatgcagctttatacaaaaatatgaagctgtttacatagatatatattcacccgcacacatgcacacacgaaacatttctggccaattccctcagagggatcccaagccatgccattgtttatgttacatgtacatctgcatgtatattatcagtaaattcccacaaagctcagtataggctgggcgcagtggctcattcctgtaatcccagcattttgggaggccgaggtgggcggatcaactgaggtcaggagttcaagaycagcctggtcagcatggtgaaaccccgtctctattaaaaatacaaaaaattagctgggcgtggtggcgcactcctgtagtcccagctatttgggaggctgaggcaggagaatcacttgaacccaggaggcagaggctgcagtgagccaagatcacgccactacacttttgcctgggtggcagagtgaaactcagtctaaaaaaaaaaaaatgctcggtgtaacataattatacaaataaatttaattttaatgctgaagctgaattctttatttaaaggaagacctctgtgatgatatgtggacgtttaaaaaaatgactttttaaaagttacaagcattacgtagatcaaaattttcaaagaattaatcaactgaggtacaaaataattgtatataatgaggaaatgtggtatggtggaaagagggtgggctttgggttcagacagaccagagggttgacagccaagttccaccactcattatacatatgtccttatcctcacaggtataaaatggggataataatgttgtgggggccatttgtcattttggtgatccagctttccgaatggtatttgaattgttatcatttattatagaagccagagaggggatgatatgctaatcccattaatactttactactggagctggaaaggcattctgtcttcccagaccctggtggctgtagcatgggcatgggacctacgcatgttctgtcagatgctgaccaccacaggtagataggggtgattcacagagctacagtggtggtgcccaatgctgatgacaccagctatggcatccttagcatgttcttagctatgcctggcttcctttagttctttcccaagcttggttcttcagtctaaaatatgttagagtcactcgatagctaattccatgagctaccaagaccctctggtctcagttccatgagctacgaaga

SEQ ID NO: 553062 - DNA, 1372 bp, Homo sapiens
tgttgatctgtgaccttacccccaaccctgtgctcccttctttctttctttctttytctttctttccttccttccttccttctttctttctttctttctttctttcctttctttcttccttccttccttccttccttccttctttctttccttctttccttctctctctctctcattctttctttcttcctctttctttctcagagtcttgctctgttgcccaggctggaatgcagtcgagttgttttcttgatgaatccgtttgtgtacctgggtgttccagttgaagtgctgtatttacttgccccttctatttctttccatgaaggcggcacacactagctgtttttagttggtcaccttggccaacccccctgaattgtatattttaaataagggaattgtatggtgtgtgaattataacttaataagactgttataaaataaaaagaaactatcatagaataacagtgtcctttcatatgtagcatatctgtattgatgggtgaaataaagcctagtaaaagagccagggctggcagttcgttcatttattcattcagcatatatttaataagcatgtgttatgaccagatgtcattctaggcaccagagataaaacaaagaacaaccagataaaaattccttcgtatagggagtatacctctgggtggggtgggggaggtaaaagacaatgttagtaagaaaaaaatactgtgttagaatgtgtattgtactttagaaaaataatgagaacaaggaagttttaaaaagttagggagttacaattttaagtacagtggtcagatcaggcatcactgtgaagatgacatttaagtaaaactcttaaaatcggtgagggagtgaggtgttaggtatttgaatctgagaacaggcagcgggaatcaaaggccctgttaggaaatgtgctcagcatgtttgaggccacagtagacaagtaaaagatgaagtcagatgagtaatgggaagctgaatgctagagcatcttggagataaggatagttggtagagtgagatgaaactttcactttaataagatcatactgaccactgaattcagagtagattgaagggggaaaacagcaaaaacaaaggtaagaaatttattgccgtaattgaggtaaaagttggaacctgaaatagagtggtagtagtagagctgttaagatgtagtcagattctggtacatgtacatatatattcgaagaattggcagctgaatatgaagcttgagaaaaagagaggagtcaaagatacactaaaatttctggactgagcaacttaaaagatgaacttattacatgtgaagtgcttagattataataaatactgagaaaacacttatcttgct

SEQ ID NO: 553063 - DNA, 1372 bp, Homo sapiens
tgttgatctgtgaccttacccccaaccctgtgctcccttctttctttctttctttttctttctttccttccttccttcyttctttctttctttctttctttctttcctttctttcttccttccttccttccttccttccttctttctttccttctttccttctctctctctctcattctttctttcttcctctttctttctcagagtcttgctctgttgcccaggctggaatgcagtcgagttgttttcttgatgaatccgtttgtgtacctgggtgttccagttgaagtgctgtatttacttgccccttctatttctttccatgaaggcggcacacactagctgtttttagttggtcaccttggccaacccccctgaattgtatattttaaataagggaattgtatggtgtgtgaattataacttaataagactgttataaaataaaaagaaactatcatagaataacagtgtcctttcatatgtagcatatctgtattgatgggtgaaataaagcctagtaaaagagccagggctggcagttcgttcatttattcattcagcatatatttaataagcatgtgttatgaccagatgtcattctaggcaccagagataaaacaaagaacaaccagataaaaattccttcgtatagggagtatacctctgggtggggtgggggaggtaaaagacaatgttagtaagaaaaaaatactgtgttagaatgtgtattgtactttagaaaaataatgagaacaaggaagttttaaaaagttagggagttacaattttaagtacagtggtcagatcaggcatcactgtgaagatgacatttaagtaaaactcttaaaatcggtgagggagtgaggtgttaggtatttgaatctgagaacaggcagcgggaatcaaaggccctgttaggaaatgtgctcagcatgtttgaggccacagtagacaagtaaaagatgaagtcagatgagtaatgggaagctgaatgctagagcatcttggagataaggatagttggtagagtgagatgaaactttcactttaataagatcatactgaccactgaattcagagtagattgaagggggaaaacagcaaaaacaaaggtaagaaatttattgccgtaattgaggtaaaagttggaacctgaaatagagtggtagtagtagagctgttaagatgtagtcagattctggtacatgtacatatatattcgaagaattggcagctgaatatgaagcttgagaaaaagagaggagtcaaagatacactaaaatttctggactgagcaacttaaaagatgaacttattacatgtgaagtgcttagattataataaatactgagaaaacacttatcttgct

SEQ ID NO: 553064 - DNA, 1372 bp, Homo sapiens
tgttgatctgtgaccttacccccaaccctgtgctcccttctttctttctttctttttctttctttccttccttccttccttctttctttctttctttctttctttcctttcttycttccttccttccttccttccttccttctttctttccttctttccttctctctctctctcattctttctttcttcctctttctttctcagagtcttgctctgttgcccaggctggaatgcagtcgagttgttttcttgatgaatccgtttgtgtacctgggtgttccagttgaagtgctgtatttacttgccccttctatttctttccatgaaggcggcacacactagctgtttttagttggtcaccttggccaacccccctgaattgtatattttaaataagggaattgtatggtgtgtgaattataacttaataagactgttataaaataaaaagaaactatcatagaataacagtgtcctttcatatgtagcatatctgtattgatgggtgaaataaagcctagtaaaagagccagggctggcagttcgttcatttattcattcagcatatatttaataagcatgtgttatgaccagatgtcattctaggcaccagagataaaacaaagaacaaccagataaaaattccttcgtatagggagtatacctctgggtggggtgggggaggtaaaagacaatgttagtaagaaaaaaatactgtgttagaatgtgtattgtactttagaaaaataatgagaacaaggaagttttaaaaagttagggagttacaattttaagtacagtggtcagatcaggcatcactgtgaagatgacatttaagtaaaactcttaaaatcggtgagggagtgaggtgttaggtatttgaatctgagaacaggcagcgggaatcaaaggccctgttaggaaatgtgctcagcatgtttgaggccacagtagacaagtaaaagatgaagtcagatgagtaatgggaagctgaatgctagagcatcttggagataaggatagttggtagagtgagatgaaactttcactttaataagatcatactgaccactgaattcagagtagattgaagggggaaaacagcaaaaacaaaggtaagaaatttattgccgtaattgaggtaaaagttggaacctgaaatagagtggtagtagtagagctgttaagatgtagtcagattctggtacatgtacatatatattcgaagaattggcagctgaatatgaagcttgagaaaaagagaggagtcaaagatacactaaaatttctggactgagcaacttaaaagatgaacttattacatgtgaagtgcttagattataataaatactgagaaaacacttatcttgct

SEQ ID NO: 553065 - DNA, 1372 bp, Homo sapiens
tgttgatctgtgaccttacccccaaccctgtgctcccttctttctttctttctttttctttctttccttccttccttccttctttctttctttctttctttctttcctttctttcttccttccttccttccttcyttccttctttctttccttctttccttctctctctctctcattctttctttcttcctctttctttctcagagtcttgctctgttgcccaggctggaatgcagtcgagttgttttcttgatgaatccgtttgtgtacctgggtgttccagttgaagtgctgtatttacttgccccttctatttctttccatgaaggcggcacacactagctgtttttagttggtcaccttggccaacccccctgaattgtatattttaaataagggaattgtatggtgtgtgaattataacttaataagactgttataaaataaaaagaaactatcatagaataacagtgtcctttcatatgtagcatatctgtattgatgggtgaaataaagcctagtaaaagagccagggctggcagttcgttcatttattcattcagcatatatttaataagcatgtgttatgaccagatgtcattctaggcaccagagataaaacaaagaacaaccagataaaaattccttcgtatagggagtatacctctgggtggggtgggggaggtaaaagacaatgttagtaagaaaaaaatactgtgttagaatgtgtattgtactttagaaaaataatgagaacaaggaagttttaaaaagttagggagttacaattttaagtacagtggtcagatcaggcatcactgtgaagatgacatttaagtaaaactcttaaaatcggtgagggagtgaggtgttaggtatttgaatctgagaacaggcagcgggaatcaaaggccctgttaggaaatgtgctcagcatgtttgaggccacagtagacaagtaaaagatgaagtcagatgagtaatgggaagctgaatgctagagcatcttggagataaggatagttggtagagtgagatgaaactttcactttaataagatcatactgaccactgaattcagagtagattgaagggggaaaacagcaaaaacaaaggtaagaaatttattgccgtaattgaggtaaaagttggaacctgaaatagagtggtagtagtagagctgttaagatgtagtcagattctggtacatgtacatatatattcgaagaattggcagctgaatatgaagcttgagaaaaagagaggagtcaaagatacactaaaatttctggactgagcaacttaaaagatgaacttattacatgtgaagtgcttagattataataaatactgagaaaacacttatcttgct

SEQ ID NO: 553066 - DNA, 1372 bp, Homo sapiens
tgttgatctgtgaccttacccccaaccctgtgctcccttctttctttctttctttttctttctttccttccttccttccttctttctttctttctttctttctttcctttctttcttccttccttccttccttccttcyttctttctttccttctttccttctctctctctctcattctttctttcttcctctttctttctcagagtcttgctctgttgcccaggctggaatgcagtcgagttgttttcttgatgaatccgtttgtgtacctgggtgttccagttgaagtgctgtatttacttgccccttctatttctttccatgaaggcggcacacactagctgtttttagttggtcaccttggccaacccccctgaattgtatattttaaataagggaattgtatggtgtgtgaattataacttaataagactgttataaaataaaaagaaactatcatagaataacagtgtcctttcatatgtagcatatctgtattgatgggtgaaataaagcctagtaaaagagccagggctggcagttcgttcatttattcattcagcatatatttaataagcatgtgttatgaccagatgtcattctaggcaccagagataaaacaaagaacaaccagataaaaattccttcgtatagggagtatacctctgggtggggtgggggaggtaaaagacaatgttagtaagaaaaaaatactgtgttagaatgtgtattgtactttagaaaaataatgagaacaaggaagttttaaaaagttagggagttacaattttaagtacagtggtcagatcaggcatcactgtgaagatgacatttaagtaaaactcttaaaatcggtgagggagtgaggtgttaggtatttgaatctgagaacaggcagcgggaatcaaaggccctgttaggaaatgtgctcagcatgtttgaggccacagtagacaagtaaaagatgaagtcagatgagtaatgggaagctgaatgctagagcatcttggagataaggatagttggtagagtgagatgaaactttcactttaataagatcatactgaccactgaattcagagtagattgaagggggaaaacagcaaaaacaaaggtaagaaatttattgccgtaattgaggtaaaagttggaacctgaaatagagtggtagtagtagagctgttaagatgtagtcagattctggtacatgtacatatatattcgaagaattggcagctgaatatgaagcttgagaaaaagagaggagtcaaagatacactaaaatttctggactgagcaacttaaaagatgaacttattacatgtgaagtgcttagattataataaatactgagaaaacacttatcttgct

SEQ ID NO: 553067 - DNA, 1109 bp, Homo sapiens
tttggctaagttagtcaayaaatgactgaaatctatgaccttcctgaagagcatttgccacctagtcagcacccaataagtgttagccatataatttttgtttttaaagtctttggtttcacaccatttaggatggctattaaaaaaaatacatgttagcaatgataaggagacattggaatccttgggcattgctgggagaatcgtaaaatggtgcagccagtgtggaaaagaatatgacagtttctcaaaatattaaccatagaataatcatatgattcagtcatcccactttttggtatatacccaaaagaattgaaagcaggatctcaaagaggtatttgtacccctatgtgcatagcagcaccattcacaatagctaaaatgtgaaagcaagtcaagtgcccaacaacagataaatggataaacaaaatgtgctatttgcacacaatggaatattatttagttttaaaaggaagaaaattctgacacatgctgcaaacatagatgaaccttgaaaacattacggtaagtaaagcaagcccatcacagaaggacaaatactgtatgattacactaatatgaagggcctaaagtagtcaaattcatagagacagaaagtaaaatgctagttgccagggactgggagagaagggtatggaaagtttttgcttaatgggtacagaacttcagtttgggatgaagttctagagatggatagtggcgatggtttcacaataatgtgactatagttaatgccactaaattgtatccttaaatatgattaaaaatggtaaactttgtgttatatatattttactacaataaaattgttttaaaattaagtcttctagccttcctattgaggctgaaataacatgcaccaaaagaatgaaatgctttttaattagcatctttttctgtttgtccacataagcatttcctccacaaagatcctaaactagccctagcctaatcaggggagacctctggccacagcagttatttccatttttcacatcattggtggttattttgccatcactcttccaacctagaccaacatatacacaatatatataatttgagattcctttatcttgtaatcc

SEQ ID NO: 553068 - DNA, 550 bp, Homo sapiens
taataataataaaattaaaaaaaaaaagaataagaaaaaaattaagacgacatcaaatgtggcagggaacacagattgagaatttaagtatgcctgtaggtttattgtgagagaatgagagatactttccctaggtccatctcaaggagaaagcaaggctctgtgacctagatgtctgagacttgactcactccaaggaagagagttttcagaagcttaggctcccaaaggagatagttgtattattcaagaggaaagctcagaagtttctaaaagatatgayctttttatcccagtggaccttaaggccccatcctatgcagggctactaatgaggtgatggaggcctaggtctaaatcctgaaacctgtggtccaggaaggataaaaaatccccagggccaagttagatgtgcagggtgtggcaccagatacaccctctttccagcgagccccttcagcagcaagaccagaggcccttcctcagattttctgaaaggtataagaccctctgttcccttgaatggcgaaacgaaagtgtggggcagaaa

SEQ ID NO: 553069 - DNA, 568 bp, Homo sapiens
tatttaaatcatakgttgttgtttgttttcaggtcaaccagtacaattatgcaacataaattcttttaaagcatctgggacttcagttcaatttaagatcctgtgggttttattaccagaatgaatgattataaaatacatgcatgcaaatgaagagataaaaaaattaaagggcatatgaaatttaatggatgctacttgtaattccatgccaaattgttgcaaaagacagtggctaggccaccatgtgaaaatgtggtttatggtatttataacttgagaatgcgattttaatagtctattgccatggatatatattataaaacagagtagagaattaagtttctggtattaacatgtgggggagggggaagtttttacctaagtctgtcattggttttattgccaaaatagcttgttttgactaaggtgattcactccaacagcacaccacagtaaaaactttgtgaaaaatggagattctttatttttgagtgtttttattctaagagctcatttgggactaatctaattcagtcaatatttattaactgccaaaaatgtgaaa

SEQ ID NO: 553070 - DNA, 521 bp, Homo sapiens
tgtattcttgggaggaagacagaaacaaatagacacacagatcaataaatgaatgagaatgtaaacatttgcaccatgaagaaaaggaayggggaactgtgatagggatgcctaagatttattaagtgactgatgacaattatgacgtcaatctttattttcttttgataggaaaagatgtccgtccacaacttttcagtggaaaaagcagattaccattttatatgcatagcttcatctcatttttgcatcaacatgcacataaacaaacatttgcaagtgtatacattagaatattattaatatttatctctgggtggtggttttaaacttttcccctgtatttaatttttatttatttatttattttgagatggagtctctctctgttgtccaggctggagtgcagtggcgcaatctcggctcactgcaacctctgtctccctggttcaagcgattctcctgcctcagcctcccaagtagctgggactacgggcatgagccatggtgcccagccgtta

SEQ ID NO: 553071 - DNA, 600 bp, Homo sapiens
atgcagagctgaagggtcagagagttaggggacttgctctgagttacacaaccgggatttgaacccaggactttggatcccagactcttcttcccaggatagggtgcaatgatgggcatgctctttggagtcaagtcaccrttttggtgctcactagccgtgtggccttgagcaaattgctcatttctctaaaccttagtctccctatttgtgaagtggaaacaatattaacaccaatcttttgggctattttgaggaaaaggaagtagcacctataaactgcttagttccatgcatagcacagagcaagtgcttagcgaatgttgctattttaatgggtgctgatactttcgttacctttctcatcattgtgtctcattagaatataagcagagggaactgcatttggtttacatacagaaggagaaagaaaacaaaacatggagattctttgaaatacagggagagaaggtctttggaggagttctcagcaatatcagtcaggctgtctgacttcccccactgaggtttctttgatgagatcattagacgagggatcagggagcctgacttgaatgtcccagtgaggttggtgtccca

SEQ ID NO: 553072 - DNA, 600 bp, Homo sapiens
atgcagagctgaagggtcagagagttaggggacttgctctgagttacacaaccgggatttgaacccaggactttggatcccagactcttcttcccaggatagggtgcaatgatgggcatgctctttggagtcaagtcaccgttttggtgctcactagccgtgtggccttgagcaaattgctcatttctctaaaccttagtctccctatttgtgaagtggaaacaatattaacaccaatcttttgggctattttgaggaaaaggaagtagcacctataaactgcttagttccatgcatagcacagagcaagtgcttagcgaatgttgctattttaatgggtgctgatactttcgttacctttctcaycattgtgtctcattagaatataagcagagggaactgcatttggtttacatacagaaggagaaagaaaacaaaacatggagattctttgaaatacagggagagaaggtctttggaggagttctcagcaatatcagtcaggctgtctgacttcccccactgaggtttctttgatgagatcattagacgagggatcagggagcctgacttgaatgtcccagtgaggttggtgtccca

SEQ ID NO: 553073 - DNA, 621 bp, Homo sapiens
tatctacataaggatgaaggtaatccggagtgagcaatggagtggctgccatggaaggaagaaaagctgccatttcccttctggacactgagagggcaatctttgcctttatctctgaggctatggagggtcctcctccatctttctacagagattactttgctgccttaatgacattcccctcccacctctccttttgaggcttctccttctccttcccatttctctacactaaggggtatgttccctcttgtccctttccctacctttatatttggggtccttttttatacaggaaaaacaaaacaaagaaataatggtcttttttttttttttaatgtttcttcctctgtttggctttgccattgtgcgatttggaaaaaccacttggaagaagggactktcctgcaaaaccttaaagactggttaaattacagggcctaggaagtcagtggagccccttgactgacaaagcttagaaaggaactgaaattgcttctttgaatatggattttaggcggggcgtggtggctcacgcctataatcccagcacgttgggaggccaacgcgggtggatcacctgaggtcaggagttcgagaccagcctgactaacatggtga

SEQ ID NO: 553074 - DNA, 621 bp, Homo sapiens
tatctacataaggatgaaggtaatccggagtgagcaatggagtggctgccatggaaggaagaaaagctgccatttcccttctggacactgagagggcaatctttgcctttatctctgaggctatggagggtcctcctccatctttctacagagattactttgctgccttaatgacattcccctcccacctctccttttgaggcttctccttctccttcccatttctctacactaaggggtatgttccctcttgtccctttccctacctttatatttggggtccttttttatacaggaaaaacaaaacaaagaaataatggtcttttttttttttttaatgtttcttcctctgtttggctttgccattgtgcgatttggaaaaaccacttggaagaagggactttcctgcaaaaccttaaagactggttaaattacagggcctaggaagtcagtggagccccttgactgasaaagcttagaaaggaactgaaattgcttctttgaatatggattttaggcggggcgtggtggctcacgcctataatcccagcacgttgggaggccaacgcgggtggatcacctgaggtcaggagttcgagaccagcctgactaacatggtga

SEQ ID NO: 553075 - DNA, 1062 bp, Homo sapiens
ttttaaacacaattataacaagtttaattcatttcatacctggccaatgatatttgagatgtcaaataatgcattatgtgtccgatttatgtaggaaagtttagcattcctatcagtgaacccatatgcaaggaataagccatgggcctctatgaaaacagtggccaacagaaatgcttatatattttaggttaaaataaaatatatattgtatgtatataccatttttacaaggcctattttagcaatttttaattaataatcaaccatcttgcctaatattagacaaaaaggacttccactgaattactggaatcagctatactgacaatagcaaaaaagcaaagttgaagatctaagaatgggggaaaagggcaatggaaaatctttaaataatatcctcaaaatattaatacactcaaagcatagaagtcaggcaaatgggttgttggagcacctggttgtattactgcatttccatgtgatgcaacaactgacttttrtaataataaacctgagttgcaaaaaccaaaaacaaaaattgagctagggctttcctatatactaaagaaacagaaatacagttctaagagattttcagtaaaacaagcaaaataaataaatgttgatgcttcaaagatatttgattattagataattttcataaaaattctgaaaatgaaaaataactagaaaatatttgtatcagctattgacaatacaacctcagtgccagaatgagactttgccttcatatttgcaattgcaagatgcttagaatcaatttctgagcttatttttccataaactgcaccccaccccccaaaaaaagccatctttacttttacaaaagaatatttgtagacttgaagtaacacatttttcaaacccatattttacactaagagaaactagcataatatgtcagtgaatatttgttaaggggttttgtagacattaataattattttttaattattttcttttcttctcagttttaatagaattcattgaaagcttttaacctctctggaatatttcaactatattgaagttatttgt

SEQ ID NO: 553076 - DNA, 560 bp, Homo sapiens
cacgttagaagccaaaagtcaagatacatatttgaaaaccatcaataaaatgatagatgatgctacaaaagtaaatgtagtgaaagaactgcgtaggtgctatagactaggtcttgaggagaatacttgtggcaatctggcaggaagagagagataaaggtgaagactgagttctattcatcttcgattccagtgccagccaaggactaagcactccataatgtttgtggaatgaatgaatggtaactaggggagaaaggaacaaggaaataaccatctcatacaaactaagcaattacagaacatccactttgccacctagaatacttttgaccagagattcccaaactttctaggttcatggcacctctaagccaaaagaaatgcctaatgattctgtcagatccaagacaacttaataagtatttatgttctaacaacttagtagccatttgaaaaaataatacaattaaactgaaagaaatatttgtacttttttattcttaytaaatacatttactttctttctttctttttttttttttggagacagaatctcg

SEQ ID NO: 553077 - DNA, 2279 bp, Homo sapiens
ttttgtgcaagattatttaaaatttattttggcttgcaaattcataattctcaaaaaggtttttctcctgaggacaatgcttgctgacatagtttgtaactgaagctgtcatctatgaatgccatcttcaatcagttcttagttagtaatgaattctcattttacattttcccaccaagaaattctgtaagtcatctaaaatgtacatggcagtaagattttcctatctttattcaagtgaaattgaaagaaacctaggaaaatgaaattcccctttcagacaaaaaaagaacaacttacatgggcaacagtgaggagactctgattggatgcttcagggagatgttctgctataaactcctctagatgatctaggagaaatagggtaagtgtcactgcatggattccgctgagggaatccctcgggttgtattgggtggtgtggacatgaggctggcatgtgtgaagaaggttggctaccccagacggagccgcaggccctttctccttggtggtgcaggcaggcaaatgagacaacgaggaaagccatgggaactagagcgttggtcctctggctaacgcaagctcatcaatggcactcagctgatctcaaagatggcacaccataggggcaggctgtgcttccctacaacgtctcaggttcctccttcctaatctgacctgagctaacttgccctccctttgtgatcccttctgaggtcatttccccctcaggatccacatgtgctgctgctgttcatcatccctcctaaaacattttgtactgcataaaagcaacctttcttcaaaaaaatttaacctttggtgatcaagcctggcaactactctgtgtctggcctgaccctgaagtcaaaaaaacttatgacttcactgaacctttgagtcaaacagaattaaaccaagatttgaaaatactcaattatcctaccatttaaaaatgacccgcacttagcttatttgtccttccactcttccttttcaacacgatgtatgtgtccatggagtcagttgctgttcatgctcatgctgactccagcactaggacagatcatcatggggggcagtaggtgggggcgctaacactctccaaactagctgtgcaggaaatcccactggggtgatggacaccagaataacaccccaattcttccttgagctcttattctgcactgtgtattggatgtgtgggctgaataagggcatgtggaacacttgtggccatcatgttattaaacatagcagaatatgtccctgattgttctctgcattttttttttttgagatgaaatctcactgtgttgcccaggctagaatgcagtgccatgatcaaggcttaggtgcagcaaaccaccatgacacatttataccratgtaacaaagctgcatgttctacacatgcatcctagaattgcaagcaaaataaaaacaataaaaagagtaaacccagaatacataccttctgatggaaagcatacccttttctgcaaatagagaaaagaaaaacattatgagagtcagaccacactgtggcctgtgtgcacaggtcttttctgcattgttgacattatagaaaacccaatggaaatagtgaaaatagtcaacacaagggctccaaattaaagcctagagggcacgtggaaaggcacaaattttctgtgcatgatttccaagtttattttcattgcatgttcaccattagtttcaagaaggaagcacttctcctatggaaaatgcttactgccctagagtttttaagtgaacctgtcatcttgaattcattcttgctggtaattgactctgactttacagctgcccaccaagacattctgtaagtcatctataatgtacatggtaagatgatcatctcttatctcaatttctatggaaactaagagaaataaaattcccacctcagataaacaaaaaagactttaccttcacagagcctggcaacgtctccgagagtatctcgggtggacacaatggcttgcccaaggagccttcgtcacgctctaggaaacacagagtaattgtcagcacgttgggtgcactgaaggaatccgtcaggcagacttgtgtgctaaaaacacggggctggcacatgtagacaaggggggttaactacaaaaaaggacctcctgccagaacatcctccttggtgatgaagaaaggtcaatgagaccatcaggaaaccacggaagacagagccttggcagcacagacatgcactgctgatgccatggcagtgtctcatcatt

SEQ ID NO: 553078 - DNA, 2279 bp, Homo sapiens
ttttgtgcaagattatttaaaatttattttggcttgcaaattcataattctcaaaaaggtttttctcctgaggacaatgcttgctgacatagtttgtaactgaagctgtcatctatgaatgccatcttcaatcagttcttagttagtaatgaattctcattttacattttcccaccaagaaattctgtaagtcatctaaaatgtacatggcagtaagattttcctatctttattcaagtgaaattgaaagaaacctaggaaaatgaaattcccctttcagacaaaaaaagaacaacttacatgggcaacagtgaggagactctgattggatgcttcagggagatgttctgctataaactcctctagatgatctaggagaaatagggtaagtgtcactgcatggattccgctgagggaatccctcgggttgtattgggtggtgtggacatgaggctggcatgtgtgaagaaggttggctaccccagacggagccgcaggccctttctccttggtggtgcaggcaggcaaatgagacaacgaggaaagccatgggaactagagcgttggtcctctggctaacgcaagctcatcaatggcactcagctgatctcaaagatggcacaccataggggcaggctgtgcttccctacaacgtctcaggttcctccttcctaatctgacctgagctaacttgccctccctttgtgatcccttctgaggtcatttccccctcaggatccacatgtgctgctgctgttcatcatccctcctaaaacattttgtactgcataaaagcaacctttcttcaaaaaaatttaacctttggtgatcaagcctggcaactactctgtgtctggcctgaccctgaagtcaaaaaaacttatgacttcactgaacctttgagtcaaacagaattaaaccaagatttgaaaatactcaattatcctaccatttaaaaatgacccgcacttagcttatttgtccttccactcttccttttcaacacgatgtatgtgtccatggagtcagttgctgttcatgctcatgctgactccagcactaggacagatcatcatggggggcagtaggtgggggcgctaacactctccaaactagctgtgcaggaaatcccactggggtgatggacaccagaataacaccccaattcttccttgagctcttattctgcactgtgtattggatgtgtgggctgaataagggcatgtggaacacttgtggccatcatgttattaaacatagcagaatatgtccctgattgttctctgcattttttttttttgagatgaaatctcactgtgttgcccaggctagaatgcagtgccatgatcaaggcttaggtgcagcaaaccaccatgacacatttataccaatgtaacaaagctgcatgttctacacatgcatcctagaattgcaagcaaaataaaaacaataaaaagagtaaacccagaatacataccttctgatggaaagcatacccttttctgcaaatagagaaaagaaaaacattatgagagtcagaccacactgtggcctgtgtgcacaggtcttttctgcattgttgacattatagaaaacccaatggaaatagtgaaaatagtcaacacaagggctccaaattaaagcctagagggcacgtggaaaggcacaarttttctgtgcatgatttccaagtttattttcattgcatgttcaccattagtttcaagaaggaagcacttctcctatggaaaatgcttactgccctagagtttttaagtgaacctgtcatcttgaattcattcttgctggtaattgactctgactttacagctgcccaccaagacattctgtaagtcatctataatgtacatggtaagatgatcatctcttatctcaatttctatggaaactaagagaaataaaattcccacctcagataaacaaaaaagactttaccttcacagagcctggcaacgtctccgagagtatctcgggtggacacaatggcttgcccaaggagccttcgtcacgctctaggaaacacagagtaattgtcagcacgttgggtgcactgaaggaatccgtcaggcagacttgtgtgctaaaaacacggggctggcacatgtagacaaggggggttaactacaaaaaaggacctcctgccagaacatcctccttggtgatgaagaaaggtcaatgagaccatcaggaaaccacggaagacagagccttggcagcacagacatgcactgctgatgccatggcagtgtctcatcatt

SEQ ID NO: 553079 - DNA, 2279 bp, Homo sapiens
ttttgtgcaagattatttaaaatttattttggcttgcaaattcataattctcaaaaaggtttttctcctgaggacaatgcttgctgacatagtttgtaactgaagctgtcatctatgaatgccatcttcaatcagttcttagttagtaatgaattctcattttacattttcccaccaagaaattctgtaagtcatctaaaatgtacatggcagtaagattttcctatctttattcaagtgaaattgaaagaaacctaggaaaatgaaattcccctttcagacaaaaaaagaacaacttacatgggcaacagtgaggagactctgattggatgcttcagggagatgttctgctataaactcctctagatgatctaggagaaatagggtaagtgtcactgcatggattccgctgagggaatccctcgggttgtattgggtggtgtggacatgaggctggcatgtgtgaagaaggttggctaccccagacggagccgcaggccctttctccttggtggtgcaggcaggcaaatgagacaacgaggaaagccatgggaactagagcgttggtcctctggctaacgcaagctcatcaatggcactcagctgatctcaaagatggcacaccataggggcaggctgtgcttccctacaacgtctcaggttcctccttcctaatctgacctgagctaacttgccctccctttgtgatcccttctgaggtcatttccccctcaggatccacatgtgctgctgctgttcatcatccctcctaaaacattttgtactgcataaaagcaacctttcttcaaaaaaatttaacctttggtgatcaagcctggcaactactctgtgtctggcctgaccctgaagtcaaaaaaacttatgacttcactgaacctttgagtcaaacagaattaaaccaagatttgaaaatactcaattatcctaccatttaaaaatgacccgcacttagcttatttgtccttccactcttccttttcaacacgatgtatgtgtccatggagtcagttgctgttcatgctcatgctgactccagcactaggacagatcatcatggggggcagtaggtgggggcgctaacactctccaaactagctgtgcaggaaatcccactggggtgatggacaccagaataacaccccaattcttccttgagctcttattctgcactgtgtattggatgtgtgggctgaataagggcatgtggaacacttgtggccatcatgttattaaacatagcagaatatgtccctgattgttctctgcattttttttttttgagatgaaatctcactgtgttgcccaggctagaatgcagtgccatgatcaaggcttaggtgcagcaaaccaccatgacacatttataccaatgtaacaaagctgcatgttctacacatgcatcctagaattgcaagcaaaataaaaacaataaaaagagtaaacccagaatacataccttctgatggaaagcatacccttttctgcaaatagagaaaagaaaaacattatgagagtcagaccacactgtggcctgtgtgcacaggtcttttctgcattgttgacattatagaaaacccaatggaaatagtgaaaatagtcaacacaagggctccaaattaaagcctagagggcacgtggaaaggcacaaattttctgtgcatgatttccaagtttattttcattgcatgttcaccattagtttcaagaaggaagcacttctcctatggaaaatgcttactgccctagagtttttaagtgaacctgtcatcttgaattcattcttgctggtaattgactctgactttacagctgcccaccaagacattctgtaagtcatctataatgtacatggtaagatgatcatctcttatctcaatttctatggaaactaagagaaataaaattcccacctcagataaacaaaaaagactttaccttcacagagcctggcaacgtctccgagagtatctcgggtggacacaatggcttgcccaaggagccttcgtcacgctctaggaaacacagagtaattgtcagcacgttgggtgcactgaaggaatccgtcaggcagacttgtgtgctaaaaacacggggctggcacatgtagacaaggggggttaactrcaaaaaaggacctcctgccagaacatcctccttggtgatgaagaaaggtcaatgagaccatcaggaaaccacggaagacagagccttggcagcacagacatgcactgctgatgccatggcagtgtctcatcatt

SEQ ID NO: 553080 - DNA, 2279 bp, Homo sapiens
ttttgtgcaagattatttaaaatttattttggcttgcaaattcataattctcaaaaaggtttttctcctgaggacaatgcttgctgacatagtttgtaactgaagctgtcatctatgaatgccatcttcaatcagttcttagttagtaatgaattctcattttacattttcccaccaagaaattctgtaagtcatctaaaatgtacatggcagtaagattttcctatctttattcaagtgaaattgaaagaaacctaggaaaatgaaattcccctttcagacaaaaaaagaacaacttacatgggcaacagtgaggagactctgattggatgcttcagggagatgttctgctataaactcctctagatgatctaggagaaatagggtaagtgtcactgcatggattccgctgagggaatccctcgggttgtattgggtggtgtggacatgaggctggcatgtgtgaagaaggttggctaccccagacggagccgcaggccctttctccttggtggtgcaggcaggcaaatgagacaacgaggaaagccatgggaactagagcgttggtcctctggctaacgcaagctcatcaatggcactcagctgatctcaaagatggcacaccataggggcaggctgtgcttccctacaacgtctcaggttcctccttcctaatctgacctgagctaacttgccctccctttgtgatcccttctgaggtcatttccccctcaggatccacatgtgctgctgctgttcatcatccctcctaaaacattttgtactgcataaaagcaacctttcttcaaaaaaatttaacctttggtgatcaagcctggcaactactctgtgtctggcctgaccctgaagtcaaaaaaacttatgacttcactgaacctttgagtcaaacagaattaaaccaagatttgaaaatactcaattatcctaccatttaaaaatgacccgcacttagcttatttgtccttccactcttccttttcaacacgatgtatgtgtccatggagtcagttgctgttcatgctcatgctgactccagcactaggacagatcatcatggggggcagtaggtgggggcgctaacactctccaaactagctgtgcaggaaatcccactggggtgatggacaccagaataacaccccaattcttccttgagctcttattctgcactgtgtattggatgtgtgggctgaataagggcatgtggaacacttgtggccatcatgttattaaacatagcagaatatgtccctgattgttctctgcattttttttttttgagatgaaatctcactgtgttgcccaggctagaatgcagtgccatgatcaaggcttaggtgcagcaaaccaccatgacacatttataccaatgtaacaaagctgcatgttctacacatgcatcctagaattgcaagcaaaataaaaacaataaaaagagtaaacccagaatacataccttctgatggaaagcatacccttttctgcaaatagagaaaagaaaaacattatgagagtcagaccacactgtggcctgtgtgcacaggtcttttctgcattgttgacattatagaaaacccaatggaaatagtgaaaatagtcaacacaagggctccaaattaaagcctagagggcacgtggaaaggcacaaattttctgtgcatgatttccaagtttattttcattgcatgttcaccattagtttcaagaaggaagcacttctcctatggaaaatgcttactgccctagagtttttaagtgaacctgtcatcttgaattcattcttgctggtaattgactctgactttacagctgcccaccaagacattctgtaagtcatctataatgtacatggtaagatgatcatctcttatctcaatttctatggaaactaagagaaataaaattcccacctcagataaacaaaaaagactttaccttcacagagcctggcaacgtctccgagagtatctcgggtggacacaatggcttgcccaaggagccttcgtcacgctctaggaaacacagagtaattgtcagcacgttgggtgcactgaaggaatccgtcaggcagacttgtgtgctaaaaacacggggctggcacatgtagacaaggggggttaactacaaaaamggacctcctgccagaacatcctccttggtgatgaagaaaggtcaatgagaccatcaggaaaccacggaagacagagccttggcagcacagacatgcactgctgatgccatggcagtgtctcatcatt

SEQ ID NO: 553081 - DNA, 617 bp, Homo sapiens
gcaattgatctggcattgttggctttggactctggcattgtaatagaactcaacttgtgatatggtttggctgtgttcccacccaaatctcatcttgaattgtagctcctataatccccgtgtgttgtgggagggacccagtaggagatgattgaatcatgggggacagtttcccccatrctattctcatggtagtgaagaagtctcatgagagctgatggttttataaggggtttcccctttcgcttgattctcattttctgtgctgcctgctgccaagtaagacgtgccttttgccttctgccgtgattgtgaggcctccccagccacgtggaactgtgagtccattaaacctctttttctttataaattacccagttgcgggtatgtttttatcagcagcgtgaaaatggactaatacaactagggtctgctttcctggcacagtaagaccagctgtctccccagagtttttgcagtggtaaaaaggaaacagtttatttgcaaggctccaagccaggaggactgggcagctaatgcttcaagcctgacctcctcaatggcttataggtaatgttctgtccaacaggttcaccttgccctctgcctagacaaac

SEQ ID NO: 553082 - DNA, 2674 bp, Homo sapiens
caccacgtgcttttcagccaatcgccgcggccgcttgattcaaagtgaactcctcaaagcagcagccacgccgcctcctctcctagcgattaagcctccatcaccttctcctgttttttatcgctcggtggtgttagtttggagttcagtaaagaaatggcccagcacacacacacgtttaatagtcccgcgtgtcaggagaagggaaggcgattcgaaaaataatctcgcgtggtgatcacttttacgaatcccatttatctttgcaactagaggcttgtctttccactgggagttaaaatatctgtcttttattcggtatttggagctaagtctataaatgaacgggatagatgaccggtccagcccccttgttttacaggtggggaaccgaggcccagggagatgtgaattgcctggctcgtagtcacttagcaacaatgtcccagctctgcagctcgagagtgagggccccacgacagagtttattccgtccccgggtccccgcgtccccaagcgcccgcgcttcgcctcccagcttgctttaaaacactaggcgcaggagcgatttaaactggctaaggaggccccacatggcgcttccagagtccagactgctgaaaccaagactgtcagttcttcattctaatttcattttcctttatccttgttccttcctggtatttgcgccgagaaatttcgctccttgcaaacaaagaaagacagtgccctctgaagtcctttgttagcattaactcggcagcctcaccacgaacctttcaatatatatattttttaatgcagagtctcggcttgaggctgattcacagagacagcccggatcaattcatgtcaagaaccacgtatggagagccaggggggctgcgaggttaggagagggctggcaagcagcacccaggttctgaagcaaagaccagacagatggaaactctgtagactccagagataggtgctgaaaagatgggaggcggaaatgtgtaactattgcacatatgtctttttaaaacatgtttctgtagcctgtggcaaggtgtgggggagctcatcaaggcagccaccaacgcaccttttagacacctcctagacccactctgtctgcttcctttgtgagtcaaatctacctaaaacrgcacctagatgaccttgcctagaaatggactatgtacatagctcagctggttggttggggattttgccacaggaagcgacagaactagggacaggtatgtatctttaccacctagaaattgcgggatgtccttaaccaagggaacagcaaagttcagatccctttgcaaagaactttgctaagcaggcagggctgagaaaggaaagaaatccgctggccattgtgtcaccatccgctggtgccactttcctgtatcttttctacctaatgttgccactttctatgcttcaatagaagaaagggaaaaaaagctgtagactggaaaatcttgaaatgcattcagtgaccgtatacattcgcttcatctgcctcggggagataagcaatacaagagaaaagaaattagcttatgtaagtcctaaaaactggaaaacattttcctgctgaaagtcacaagaactaaacttgcaagtttggaaatcatgggtgctactgatgacctcctacaaactgtactctggtttgcttgagccaatctatgactagttttcgggcagttgggcagtttttaatgcttatctcagctgaaaatgatttgcaagttagcaaatttatgatcatagcaattcaaacggtgtaatcccacagcatctctcagccaatcctaaaggtaactcttatcaccccactcacacaaagaaaagctgagcaagtcttcattttgtacaggaagaaacttctaaacagggctgtcatcaaaactggacgaccatagacatagcagatatctgagtcacaaacaagtcaggaaatgctgcttacactgtatccgcattacacaatagccaacacttcacacaagacattaggccagtcctgtaggcccttgggagcaggtctttgcctctgtcttgtgacatcaaaccaaagtctcattttttaatgctattaagaagctgtgcccaaggctttgggcttgttatctcccctaacaatgttattttgttaggccgcaaaataagcagcatgcggttaaatgtattagctgccttcaaacctaatttatcttcattccttcctaatttacacttgggctgaattaatgagaatgatttaattaacacggtgcgatcatggtaccagggacaggacagctcagggaattagaccaaacagtaggctaagcagctgccatcctgcctccggtggtctcctgaagccccacccaaattcagacatgttccctgctggtattccaaaagcgccctctttgttttatgaggacactttctgaatctgtgcaaggaagatagcacagctttccttccccgagttatttgctagatggacttcaaggctgtgtcctggagacagagtgtggcagaggggccaactgcccaccaaagatttgtgctccccttccatagtgtcaagttcgtgttgggaagtggacgcccagtcagggaccacacctcccagtagcacatatgttgcggataacatcctgaaaggggaagggaggga

SEQ ID NO: 553083 - DNA, 667 bp, Homo sapiens
caaggtgatatttggcaatatctggagacatttatgttttttaccactgaggctcaggggttgggggtggtgctactgacgaccagtgagtagagcccagttgctactaaacatcacgtaatgcacaggacagctccccagaacaaaaaaccatctagccaaaaatgtcactagtgctgaggttgagaaaccctgatttaaaatataacccaagctgggtgtattggtataggcctgtagtactaactattcaggaggctgagacatgattgcttgagcccaagcccaagtccaccctgagtaacatagtgagaccccatttctaaaaaataaaatctaacccaaccatgagtatgttaatattgttcccgtgttatagcacccttttaaataatgagtcagagttaataacrgggtgcaataaaaaagagatctgatagtttcacaagatctcagggcttggtgaatgtaactccaaatcttcctgaaaccaccctccatcaccctaattcctaaatgcccacagtcattcccaccgataatttatctcttcctagtcttctagccttcaatttccttgcatctgagatccactcttaaactcttcggtgacttacttctaaggaatataatgtggtagcagtgatgcatgtcacttacaagatta

SEQ ID NO: 553084 - DNA, 1108 bp, Homo sapiens
caaacctgcgctccacgcacatgtagcaggtgggcggcggcgcgggcgtgtgggccagcttgtgcaggtccagctcgcccaggctgcggaagcgctggaagcacactttgcacttgtaggaggcccgcctgcccttggccggccggcctctgccttgggccctccctgcccctgcagcctcctctgtccttcggctctgtggcccctgtgagctcgccgtgccctcgaagtctaagaagctggggccggggagacccacggggtcttcaaagggtcccagaaagcacaggtcttgcatctcaaacttggtgctgagcacctcaaagtccgtggcacggagcggcagcaggtgggtgttcccgggaagcccaccgtcacagcgttctctctccaggctggggggctcggggctcacatctccgagagaagaggaggagtcatcggcaggggccggcatctccaggcctcgccaagccgctgggaccatgtgcagctcaggaatggcctccggccgatcgtcctcggggcagtgggagggcagcttctctgcaccagcttccctgctgggctccagggcccacaggctgaggccgggggcccaggggtcaatgccaggcaccctgctattgaggaacccatccaggaggaaggactcgggcagacctgcgggatcctcgtcctcccacgggtcctcatggcagaggcagagggagctggagtcgctgaggtccgtgggcaggcgggctgggcccagcgtggggtcaccgccctcctcaaagctgggctgggttggcagcgggagcaccggcttctcacagcgcttcccgtagacaygcgggttcctctttctagtcaagcgaccgcctggagggaagagctgggagaaagagacctcatcatcaaacaagcttggaggatccttggcactggagccagaggcatcaggagtggggccttcaggcccctggactccaccctgggtgtctgggttgtccgggaggccctggaggcagctgctggtggtgctgtccgccggagagctggaagtctcgggaaaacccagggggcccaaggggggcgtgttctcctcccagacaccttcctctga

SEQ ID NO: 553085 - DNA, 849 bp, Homo sapiens
cttacgcagatagctgccccacatggctccctggaccaaagaaagatcattagtatctcagagattggcagcaactccaatgcgagagagtaaaactctgaagaccctgcgtcgtcagtaggcaggggaaaatgcgtcagattaaacaagaatctgtactgctgtttagtagccagtggcatagaagccggggacttctagtgtatttcaggctctgtagaggcaggtgatgtagcccagtcaagtgggttttcatgccagttctgctgagtgatggtcaccaggtaagcacagctgatggagacttgaaaacagctctcgaatgctaagtgtggaaatatttgagatagaaatggaggagccgtggtcagagtcgatrctgttaatgaacgatcagaaaaaaacccacaaaactgtcatagtctagaattaagaggaagaacattctggctaaaggccagggctccttctgaatctcagatccttggggatctgtgttggctgccccagggctgtggctggggccggctccccagggctcaccgagaatgaacaggaagaacagccagaccaagtgagagtgatcggcagcttgctaacccagcctgctggtgtccctctctgctgccccaggagagaccccgcatcttccccacacactgctgtgggactcaggacacctcgggttcagatccacatctgccctcggcagccctgaccctgggcctgtggctgaatatgtctgagtccctttgtcctaaaatgaggtcgagccaggtgttcctggggtctttcccagcccccaactgaaactgaatgccgcgaggcagccagccggccttgggaggc

SEQ ID NO: 553086 - DNA, 633 bp, Homo sapiens
ggggacagttctagaaccttctccttgagtcaaggagctgtcccctgtcactgttcaggattctaggccacctgtgggcccttggtgtcccacgggcaacagagcaggatccaggaaagaccctgacacggtagacatctccccacttggtctcctgtgcccccagagagaacaacctggaagaatgtggcctggagctgtacttcatccaggacatggagatactgggcaaggtgacgacccacgagctgaaggagggcggcgagagcatccgggtcacrgaggagaacaaggaagagtacatcatgtgagtctcaggcgccgggggctccgctccaggggtggcgtggagatctagtgggttgcagagaaagatgggcccccacctgtggcccatcggtcactgtggatgccatttgcatttgccttgatggtggctgctggtgggcggtcatgtgatggcgcgagctgggggaaccaaagccgaggtccttagttaccgactcccagctgtgctttttcgccatgtgggagacttcaagcctgcagcgtggaatttctttgaagtggcatcaagctgagacatctgcatctttctccgggccgaaaggatctctgtggcctgtgtgccta

SEQ ID NO: 553087 - DNA, 633 bp, Homo sapiens
ggggacagttctagaaccttctccttgagtcaaggagctgtcccctgtcactgttcaggattctaggccacctgtgggcccttggtgtcccacgggcaacagagcaggatccaggaaagaccctgacacggtagacatctccccacttggtctcctgtgcccccagagagaacaacctggaagaatgtggcctggagctgtacttcatccaggacatggagatactgggcaaggtgacgacccacgagctgaaggagggcggcgagagcatccgggtcacagaggagaacaaggaagagtacatcatgtgagtctcaggcgcygggggctccgctccaggggtggcgtggagatctagtgggttgcagagaaagatgggcccccacctgtggcccatcggtcactgtggatgccatttgcatttgccttgatggtggctgctggtgggcggtcatgtgatggcgcgagctgggggaaccaaagccgaggtccttagttaccgactcccagctgtgctttttcgccatgtgggagacttcaagcctgcagcgtggaatttctttgaagtggcatcaagctgagacatctgcatctttctccgggccgaaaggatctctgtggcctgtgtgccta

SEQ ID NO: 553088 - DNA, 633 bp, Homo sapiens
ggggacagttctagaaccttctccttgagtcaaggagctgtcccctgtcactgttcaggattctaggccacctgtgggcccttggtgtcccacgggcaacagagcaggatccaggaaagaccctgacacggtagacatctccccacttggtctcctgtgcccccagagagaacaacctggaagaatgtggcctggagctgtacttcatccaggacatggagatactgggcaaggtgacgacccacgagctgaaggagggcggcgagagcatccgggtcacagaggagaacaaggaagagtacatcatgtgagtctcaggcgccgggggctccgctccaggggtggcgtggagatctagtgggttgcagagaaagatgggcccccacctgtggcccatcggtcactgtggatgccatttgcatttgccttgatggtggctgctggtgggcggtcatgtgatggcgcgagctgggggaaccaragccgaggtccttagttaccgactcccagctgtgctttttcgccatgtgggagacttcaagcctgcagcgtggaatttctttgaagtggcatcaagctgagacatctgcatctttctccgggccgaaaggatctctgtggcctgtgtgccta

SEQ ID NO: 553089 - DNA, 674 bp, Homo sapiens
agaatgcatgacagggagctggggtggagagcaggggagagaggaccggaagcatgctctgcgaagcctaactgccctggaagggcgaggtggcacagagcgccttgcctgggcctggctggctgctttgtctcatcagggctgactggaagtgggatgtgggcaggggcaccagaagagggaacagccaatcagggagcacctctgaagggaggccgctgggtgtttgggtgggagggaggagcctgaaggcatcccatggcctggagcctatggtcagtcccacaagaagatgagtgggaaacattcaagaagtgttttagaaaaaaacgtcccgaaaatggttaaaatgggaactgaggaatgtgctcaattacttggaaggtttgttctggtgggaagaagaatgccccatgggtgcagaggaaacggtgctccagcccctgccgctgtcatcgtgggcacatcctggcgaggccctttgagatggtgcagccgtgcacaccccctctgcatatggtctctgtttctgccaaaccacatctcgaaaggctcaggatgaaaatgtaggtgatagactcggggcctcaggtggaaggaacccctccttgaaacccccaggacaccatgcccgtgaagagtttcactgattgtctgcccarggttctgagcag

SEQ ID NO: 553090 - DNA, 571 bp, Homo sapiens
acctcagcatagtcaccggtaatgtagtggggaggagcaaggaggtgctcagggcctcagtgatgagctcacagccctcctttaggaggcctgcagagcacactcccagggagcagtgctcagatgggcagacaggccaaccagcaccgaggactcagaaccccyccttgccccacctgccgcccggccacatgaggctctgtcccactttcagggcttctgcacaggccagtccccactgcttctgtggcgagatatcagagttgaagtgaatgttgaagtgagtgttgaaggccgtgcagctgatggagcttactgccttgcacacactgtaaatcacctcctggctccaagggtctgctgtggaagagacacagcctgatgggatgtagccccactccaccaccagtggggcttggctgtcctgagctgcagcccgcagctccttgcagagatgtctacctgcttctctctggagctggggcatgagccatccctggcaaggaccggctgccaggacaggctgggaactctcccccagcatcctcaggagccccacctgtgctggcat

SEQ ID NO: 553091 - DNA, 571 bp, Homo sapiens
acctcagcatagtcaccggtaatgtagtggggaggagcaaggaggtgctcagggcctcagtgatgagctcacagccctcctttaggaggcctgcagagcacactcccagggagcagtgctcagatgggcagacaggccaaccagcaccgaggactcagaacccccccttgccccacctgccgcccggccacatgaggctctgtcccactttcagggcttctgcacaggccagtccccactgcttctgtggcgagatatcagagttgaagtgaatgttgaagtgagtgytgaaggccgtgcagctgatggagcttactgccttgcacacactgtaaatcacctcctggctccaagggtctgctgtggaagagacacagcctgatgggatgtagccccactccaccaccagtggggcttggctgtcctgagctgcagcccgcagctccttgcagagatgtctacctgcttctctctggagctggggcatgagccatccctggcaaggaccggctgccaggacaggctgggaactctcccccagcatcctcaggagccccacctgtgctggcat

SEQ ID NO: 553092 - DNA, 571 bp, Homo sapiens
acctcagcatagtcaccggtaatgtagtggggaggagcaaggaggtgctcagggcctcagtgatgagctcacagccctcctttaggaggcctgcagagcacactcccagggagcagtgctcagatgggcagacaggccaaccagcaccgaggactcagaacccccccttgccccacctgccgcccggccacatgaggctctgtcccactttcagggcttctgcacaggccagtccccactgcttctgtggcgagatatcagagttgaagtgaatgttgaagtgagtgttgaaggccrtgcagctgatggagcttactgccttgcacacactgtaaatcacctcctggctccaagggtctgctgtggaagagacacagcctgatgggatgtagccccactccaccaccagtggggcttggctgtcctgagctgcagcccgcagctccttgcagagatgtctacctgcttctctctggagctggggcatgagccatccctggcaaggaccggctgccaggacaggctgggaactctcccccagcatcctcaggagccccacctgtgctggcat

SEQ ID NO: 553093 - DNA, 681 bp, Homo sapiens
ctttgggagggtgaggcaggaggatcccttgagcccgggagtttgagaccagcctgggcaacatagggagactgtctctaaaaaacaaacaacaagaacaaaacagactcaaacacttgggcttagaaaggtacttggctgacaatatgcttgaggcaaaattaaacatggatgagactggggagagaaagagaagacttcctagaaaattcattttgttgaattttaattctctttccctttctttaacctggtaaggcaaattatccaatatgatrtaatacacagtttggcataaatgcaaaatgctagaaagcattatggcagtgtttctgaactttccaccactcctttcagcatcaccactgaatagccaattaacttgataaagttttttcactgtattgctcttggctcaaatcagttgtgtaaacagtggctttagagtgcaacccttcttcccttagtttcacttggagaccacctcaatacatatcaagaacacagcaaaagctggagatagaaaccgccgttctttacctacacacatacgcatgaggagatgacaccatgagtcttctcagtaacttctaaacctctcagtcagatcaagaattagaaacaaagagttttcagagatctgagaaggaggttggaaaacaggtttctttggagacagcg

SEQ ID NO: 553094 - DNA, 640 bp, Homo sapiens
ctgccaaattcagaagagagtaagaaattatacagatcctcaacaacgatgcttgactgatcaaatgatgcttaattacatggttttatgttgctaattgagaaacattcttattagctactgaagcctctatttcaaccatcagttctctagatcttttgcaatcatttcctttaatttgtaagagtgataaaatttctatcttattaatagaaaatatatttgagcaaacagttttatatgccttggttacctctgggggaattaataaaccatgttataagttaycttaaaatctaatggagtggaggacattactcccagttgtaaaggagtaactaagatagacttgtccacccatcataaagaactagaaaaatggactacatatgtgaaacaactgtttttgctaattggaacatatatttcaaagaactatgatccctaagttaagataaataatcaaaatggacaatacaatcactctggctttcttcctgctggtactttacaatccatgctggaagaaagaacccgggcagagcataggagagtcactaagtttgtgaagggaagattggaattcagggacgctcatgtggttggaatctgtaggaaagaaccagagatgaggggacta

SEQ ID NO: 553095 - DNA, 430 bp, Homo sapiens
gacttgccccagacctggactcaggctgcgctgctgtctgcccagggcctggcgattgctgcgcccatggtgggtcccacaggcaggccctgccctcccatcgctggcttctgagcaggggctttggggctgctggaccttggaggcagatcgggggcttctggtgtccctatgtcttgggggcctggtgtcctgagggccagcgccccccggcctgcactgggaccctccatggaagcaactcctctttcatctcaggcactgggtgtcccagggccagggaaggggctgcgcagcacctcaggagcccagaagagctgccagccaaggaggaggasctggggggagcagaggcctggaccagctgggatgttcccatccgcgtgtccctcccgcccaggccacatgggcaggggaggaagaggggagg

SEQ ID NO: 553096 - DNA, 633 bp, Homo sapiens
taaatataaatacatgtaaatatacaaatgaatacatgaaaacaatttttaaatttaacatcactgagggcatcctatccatttcatttcatgattccattacgtcatttcacttagatgaaatgataatatgacttgagatgagatgaaatgactaaatgatgagatgagatgaaatgatgagatgaaattttgagatgaaatggtgagtagaaatgatgagattaaatgatgagacaaaatgacaaaattgaaaagaaattgaaaggagatgagatgagatgaaatgagatgaaatgatgagatgatggatgaaatgatgagatgaaaygagatgaaatgatgagaagaaatgatgagatgaaatgaaatgaaaaaatgaaatgatatgaaataatgaaattgaaatgagatgagatgatataatgagataaaatgatgagatgaaatgagatgaatgatgagatgaaatgatgagatgataaaatgaaatgatgagatgaaatgagatgaaaaatgatgagatgaaaaatgagatgaaatgagatgaaataatgaaatgagatgcaatgaaataatgaaattatgaaatgtaatgatgaaattgaaatgagatgagatgaaatgatgaag

SEQ ID NO: 553097 - DNA, 879 bp, Homo sapiens
cccagggccctgtggccccgtcaccctgttggaccatggctcacagcctgttctctgccggatccaggggcctctgtcccggaagcgcctggcttgcctgtgacattcaggatggctaagactgtgactgtagcctggcttggctttgccttccttcaggtctagaatgcggctctcctgagtttgtttccatgtttctagggagctcttctctctgctcattctttatgtcctggaagtctgtgtggtttcacccataactatggcatattctgcccagtcttcttgagttttctcccctcttgctcccacagacctacgattgctgcttcagcatatatgatgtaagcactttcaactctggatctcccattcacatctctggttggaggtgcagtgcatgcaaatcatcagatgtccgaaattcagctggctggctttctctagtagctgccgtttcccatcgtggtgaataaaactgtctgccagttagttgagccagtgtccgagcrgcacctgcggccctccttccttcccaccccatgctctctgtgctgcttctgcggcctctgctatcagataagccttgggcattgctgcgatcttcatcagttaaagagctagtggggctgacagattctctcagaggagtcttagaagaagagtggaagcggctgaaacttcagcaacttggggaacatttgatcatattaatagtagctaacatggttctaaccgtgttaaacccattgaatcctgcgtcctatcaagttaggtgcctggagagcagggaaggaagacccaggaggcagaagatgcttacccagaagcaccgagtgtaactctgggaaaggcaagcccttcgtcacggacagtgtg

SEQ ID NO: 553098 - DNA, 629 bp, Homo sapiens
gcctcattgggcttgaggcccttgtgagtgctcagggtctctcctttagaaaggcacatatttaattctccatcttgaaatttggactagggcccccacaaattgtgcagcccattctgttctggaggaaccattcttatcagaacttggtgctggattgacttggagaagagcctgaccataatcttcaggatgaaataaaggcctggatgactgaaataaagactggagccttcggcattcagaagaggaattcagactgtgcaagatctgaggccaggctccagctcccccagtcccttggtgagcaggagctccctgaacccaccrtgggtctttgctagggttgtcttgcccatgtgtgctttagatagcagcacctcttcttccatggtgtatatggagaatcctcaacaaagtcttcccaagaatctgatcatcacatcttgagctcagcctccctgcagctttttctatattgacagccacttcagagagagtcctctctgatccttacaagaaatatcctggtgcgaaaaacgaccaaaaccacatagccagcctccacgctgttcagagaaagctggcttagcaatgttgtatggtttttggatgcgctgcgttactca

SEQ ID NO: 553099 - DNA, 629 bp, Homo sapiens
gcctcattgggcttgaggcccttgtgagtgctcagggtctctcctttagaaaggcacatatttaattctccatcttgaaatttggactagggcccccacaaattgtgcagcccattctgttctggaggaaccattcttatcagaacttggtgctggattgacttggagaagagcctgaccataatcttcaggatgaaataaaggcctggatgactgaaataaagactggagccttcggcattcagaagaggaattcagactgtgcaagatctgaggccaggctccagctcccccagtcccttggtgagcaggagctccctgaacccaccatgggtcyttgctagggttgtcttgcccatgtgtgctttagatagcagcacctcttcttccatggtgtatatggagaatcctcaacaaagtcttcccaagaatctgatcatcacatcttgagctcagcctccctgcagctttttctatattgacagccacttcagagagagtcctctctgatccttacaagaaatatcctggtgcgaaaaacgaccaaaaccacatagccagcctccacgctgttcagagaaagctggcttagcaatgttgtatggtttttggatgcgctgcgttactca

SEQ ID NO: 553100 - DNA, 530 bp, Homo sapiens
taactgggttcatggtatgtaaatatgtctataattagactgcagtgttcttaagaaaggagttctcaagtcatagtttgtgtatatctttttwaaaaatctgatttgcacacatatttaaatatttaagaccatatagactattgaaagaaacagtattttttaaagaaaagcttatttgttcatgaggcggtttattagtaagtatttaggaaatagatttagtatgaaagtagtcttcatctccttgtcccttaattaaatatttacacttttccaaactagttaaatgagacaaaattagattttaagacaaaaacaactcattgcctttaatatcactatttaaaatgctaattacattgcagataaaaagaattaaaacttttgtaacttaaaaataaatgtaattccagagtcaatatcatataaataggtgcccatctggccaacctcaggattgccaaatttcttctccctcaattgtttccttgttaacaagagtttaaacagctccctcttgtggtcta

SEQ ID NO: 553101 - DNA, 975 bp, Homo sapiens
aggaaaaagatggagagggtgaccaaagattacaaaaatctccgaagcttatccacttgagagagagtccctgaagatactggcctttcattcccgctatgtatatccaatgtgackgaactctgaataacatatacaggttataataatgtagtagttggccctcaaactaggacacaaacatgttagagggtaaggtagtgagaggcatgtttgggggtggtggtgatgagcaagtatgtgaaggagagatagtgcctacacttgaaaatcaaaaagtgataatatctatttagacataaggagataaataactaaatacttgcttctatgtgatgaaactctgggagtacacaaggggactgctgttttactaaacaaattttcaagtctatgtaactttgataaagtatccaaataaaaaaattcctttcccatatatgtatgtgtgtatatatgtatttgtatacacatatatatttgcatttttgtattttgaatgtaaatttttatacagcccctgtgaacccctcttttcatttaaggatttgagtttgatgtcatgcatgcaatgtgatccccactgtgtgactacagaaatgttggcaaaagtaagttcagaggaaatggtaggcaagtacttcccagttttggccagaagatggagaaaaaaagaattctcatagaatattaaaagtgtgacttgttacagcttcttttcatagtaatttggatagaaattagcaaattcagaaatgtataaatactttggtctgacaattccatctccagttatctacggagaaatagacaagtgatgcacgacagatacatgtgtcagtctggtccctgcagttgtatttgtaataatacacattggagcaatttcatggccatcggttagagaatgtttgaagaatgacccattaatatcaggaaggacgtttcaaagatcaaagcctgatggaaatgctg

SEQ ID NO: 553102 - DNA, 975 bp, Homo sapiens
aggaaaaagatggagagggtgaccaaagattacaaaaatctccgaagcttatccacttgagagagagtccctgaagatactggcctttcattcccgctatgtatatccaatgtgactgaactctgaataacatatacaggttataataatgtagtagttggccctcaaactaggacacaaacatgttagagggtaaggtagtgagaggcatgtttgggggtggtggtgatgagcaagtatgtgaaggagagatagtgcctacacttgaaaatcaaaaagtgataatatctatttagacataaggagataaataactaaatacttgcttctatgtgatgaaactctgggagtacacaaggggactgctgttttactaaacaaattttcaagtctatgtaactttgataaagtatccaaataaaaaaattcctttcccatatatgtatgtgtgtatatatgtatttgtatacacatatatatttgcatttttgtattttgaatgtaaatttttatacagcccctgtgaacccctcttttcatttaaggatttgagtttgatgtcatgcatgcaatgtgatccccactgtgtgactacagaaatgttggcaaaagtaagttcagaggaaatggtaggcaagtacttcccagttttggccagaagatggagaaaaaaagaattctcatagaatattaaaagtgtgacttgttacagcttcttttcatagtaatttggrtagaaattagcaaattcagaaatgtataaatactttggtctgacaattccatctccagttatctacggagaaatagacaagtgatgcacgacagatacatgtgtcagtctggtccctgcagttgtatttgtaataatacacattggagcaatttcatggccatcggttagagaatgtttgaagaatgacccattaatatcaggaaggacgtttcaaagatcaaagcctgatggaaatgctg

SEQ ID NO: 553103 - DNA, 975 bp, Homo sapiens
aggaaaaagatggagagggtgaccaaagattacaaaaatctccgaagcttatccacttgagagagagtccctgaagatactggcctttcattcccgctatgtatatccaatgtgactgaactctgaataacatatacaggttataataatgtagtagttggccctcaaactaggacacaaacatgttagagggtaaggtagtgagaggcatgtttgggggtggtggtgatgagcaagtatgtgaaggagagatagtgcctacacttgaaaatcaaaaagtgataatatctatttagacataaggagataaataactaaatacttgcttctatgtgatgaaactctgggagtacacaaggggactgctgttttactaaacaaattttcaagtctatgtaactttgataaagtatccaaataaaaaaattcctttcccatatatgtatgtgtgtatatatgtatttgtatacacatatatatttgcatttttgtattttgaatgtaaatttttatacagcccctgtgaacccctcttttcatttaaggatttgagtttgatgtcatgcatgcaatgtgatccccactgtgtgactacagaaatgttggcaaaagtaagttcagaggaaatggtaggcaagtacttcccagttttggccagaagatggagaaaaaaagaattctcatagaatattaaaagtgtgacttgttacagcttcttttcatagtaatttggatagaaattagcaaattcagaaatgtataaatactttggtctgacaattccatctccagttatctacggagaaatagacaagtgatgcacgacagatacatgtgtcagtctggtccctgcagttgtatytgtaataatacacattggagcaatttcatggccatcggttagagaatgtttgaagaatgacccattaatatcaggaaggacgtttcaaagatcaaagcctgatggaaatgctg

SEQ ID NO: 553104 - DNA, 975 bp, Homo sapiens
aggaaaaagatggagagggtgaccaaagattacaaaaatctccgaagcttatccacttgagagagagtccctgaagatactggcctttcattcccgctatgtatatccaatgtgactgaactctgaataacatatacaggttataataatgtagtagttggccctcaaactaggacacaaacatgttagagggtaaggtagtgagaggcatgtttgggggtggtggtgatgagcaagtatgtgaaggagagatagtgcctacacttgaaaatcaaaaagtgataatatctatttagacataaggagataaataactaaatacttgcttctatgtgatgaaactctgggagtacacaaggggactgctgttttactaaacaaattttcaagtctatgtaactttgataaagtatccaaataaaaaaattcctttcccatatatgtatgtgtgtatatatgtatttgtatacacatatatatttgcatttttgtattttgaatgtaaatttttatacagcccctgtgaacccctcttttcatttaaggatttgagtttgatgtcatgcatgcaatgtgatccccactgtgtgactacagaaatgttggcaaaagtaagttcagaggaaatggtaggcaagtacttcccagttttggccagaagatggagaaaaaaagaattctcatagaatattaaaagtgtgacttgttacagcttcttttcatagtaatttggatagaaattagcaaattcagaaatgtataaatactttggtctgacaattccatctccagttatctacggagaaatagacaagtgatgcacgacagatacatgtgtcagtctggtccctgcagttgtatttgtaataatacacatwggagcaatttcatggccatcggttagagaatgtttgaagaatgacccattaatatcaggaaggacgtttcaaagatcaaagcctgatggaaatgctg

SEQ ID NO: 553105 - DNA, 579 bp, Homo sapiens
ggaacatcatgagggaagatttgattttcagagttaaataaattgtatgtgcttttccagccatctggctcactcatttctgggtaatgcacatgactttgtttgcactggaggaagatggaagcttgcgtgtgtkcggtgtgtgtgtgtgtgtaagtgtgaggtaccttgtgtgtgacaagagacctcacttacgagaaagttggtggatcaggacattccagcctcaggcggcttggagcaggatcattcctcagcaggcattccttccacatgctatggatgaaccatgcacaagattttcggtttttttttttttttctgttacagtgtctttagaaacaagtagaagtgttttgatatataaaaggaatgcttcatttcttatcattatcccaaaattgatccctcccacatttttgctttaaaaagaaacctttttggttttgtattttatacaggaacacaaaatgcaaacaagttgtgcatattttggactctcaaataacttctctgtcctttaataaagtaataataaggaatagatgtgcacatagttagaaaagtatgagtggttaa

SEQ ID NO: 553106 - DNA, 1029 bp, Homo sapiens
gaggcacgccacaccagatcacgccacacgcaggctgctcccaactggcagggcctgacccagccaggaagggccaggtcctaggattccacagtgccaggagtgcccgaaggggccaggtcccaggattcccacagccccaggtgtgcctggaagacccgggtyccaggattcccacagccccagctatgcttgggggggccgagtcccaggattcccacagccccaggtgtgcctggaagacccgggtcccaggattcccacagccccaagagttcccggaagagctgggtcccaggattcccacagccccagctatgcttgggggggccgggtcccaggattcccacagccccaggtgtgcctggaagacccaggtcccaggattcccacagccctggatgtgcctggaggggctgtgccacctctgcagagatggaagggctcgtgttgaagcctgaggatttcgccctcaggtccaggtcagaacatcccagcaccactttcaggccatgtctgccctgcagttttgaccactgaattggtcttaagagtggccacccattcccctccaagtgagggggcaagacacaagtaggggacgggtcactttctgtcaccctgaaaatacgctgggcacgacacaagtaggggatgggtcactttctgtcaccctgaaaatacgctgggcacgacacaaggggggctgatgaagtcaggcccgcccctccaagtccacctcgaaatcaccgtctggcttcctcgcacttcccaccacctgacaccgccaagccccttgcttcagattttctgtggtctgtattcatacccttgcttcagattttctgtagtctatattcatgcctgcttaggcccctacaaaagtcctcataaaaccagcaccacctttatctgcctccaaaacacacactgctttcccatcaggaagatcagcaatgtggtttccggcctggttcttagtcaaaaagttagtgtctggtggtttctggcctttttgcaggacggggc

SEQ ID NO: 553107 - DNA, 1029 bp, Homo sapiens
gaggcacgccacaccagatcacgccacacgcaggctgctcccaactggcagggcctgacccagccaggaagggccaggtcctaggattccacagtgccaggagtgcccgaaggggccaggtcccaggattcccacagccccaggtgtgcctggaagacccgggtcccaggattcccacagccccagctatgcttgggggggccgrgtcccaggattcccacagccccaggtgtgcctggaagacccgggtcccaggattcccacagccccaagagttcccggaagagctgggtcccaggattcccacagccccagctatgcttgggggggccgggtcccaggattcccacagccccaggtgtgcctggaagacccaggtcccaggattcccacagccctggatgtgcctggaggggctgtgccacctctgcagagatggaagggctcgtgttgaagcctgaggatttcgccctcaggtccaggtcagaacatcccagcaccactttcaggccatgtctgccctgcagttttgaccactgaattggtcttaagagtggccacccattcccctccaagtgagggggcaagacacaagtaggggacgggtcactttctgtcaccctgaaaatacgctgggcacgacacaagtaggggatgggtcactttctgtcaccctgaaaatacgctgggcacgacacaaggggggctgatgaagtcaggcccgcccctccaagtccacctcgaaatcaccgtctggcttcctcgcacttcccaccacctgacaccgccaagccccttgcttcagattttctgtggtctgtattcatacccttgcttcagattttctgtagtctatattcatgcctgcttaggcccctacaaaagtcctcataaaaccagcaccacctttatctgcctccaaaacacacactgctttcccatcaggaagatcagcaatgtggtttccggcctggttcttagtcaaaaagttagtgtctggtggtttctggcctttttgcaggacggggc

SEQ ID NO: 553108 - DNA, 1029 bp, Homo sapiens
gaggcacgccacaccagatcacgccacacgcaggctgctcccaactggcagggcctgacccagccaggaagggccaggtcctaggattccacagtgccaggagtgcccgaaggggccaggtcccaggattcccacagccccaggtgtgcctggaagacccgggtcccaggattcccacagccccagctatgcttgggggggccgagtcccaggattcccacagccccaggtgtgcctggaagacccgggtcccaggattcccacagccccaagagttcccggaagagctgggtcccaggattcccacagccccagctatgcttgggggggccgggtcccaggattcccacagccccaggtgtgcctggaagacccaggtcccaggattcccacagccctggatgtgcctggaggggctgtgccacctctgcagagatggaagggctcgtgttgaagcctgaggatttcgccctcaggtccaggtcagaacatcccagcaccactttcaggccatgtctgccctgcagttttgaccactgaattggtcttaagagtggccacccattcccctccaagtgagggggcaagacacaagtaggggacgggtcactttctgtcaccctgaaaatacgctgggcacgacacaagtaggggatgggtcactttctgtcaccctgaaaatacgctgggcacgacacaaggggggctgatgaagtcaggcccgcccctccaagtccacctcgaaatcaccgtctggcttccycgcacttcccaccacctgacaccgccaagccccttgcttcagattttctgtggtctgtattcatacccttgcttcagattttctgtagtctatattcatgcctgcttaggcccctacaaaagtcctcataaaaccagcaccacctttatctgcctccaaaacacacactgctttcccatcaggaagatcagcaatgtggtttccggcctggttcttagtcaaaaagttagtgtctggtggtttctggcctttttgcaggacggggc

SEQ ID NO: 553109 - DNA, 1045 bp, Homo sapiens
aaagagtgcaggagccacttggcaaacaggtgaaaatcctctcctttctggggcagaggttttctccgtttcccccacatatctgcctgattctgccacaggcaggcccttcagagagctctcccactccagcaagggaggctgactcaaagacctggtgttctgcaggcccagcatgaggctggcggtgattcggaaacccacccccccgcttcccgctgttcctgtgaaaggccaggagtcgcctcctgtcagtgtgtccttcacaaaaccctcccaagaccactcccggggctttctagggcacctcgcagctgccaagggactcttcatccttgcagctggctgtgtgccaggcagcccgggcaggccccaggtaacgtggggaagtagaggcttggggaggctcgggtctctgaggacatctgggctgtggggaatcctggtgcgaagccggcccagtactcgcggagtaacctggcagcctctggagggtgtggagggcccggggccctgggttccgaagacccgctctggccacgtgaccttggcgccccccgcccctcctcgcccacctggctcttcctcagcatcgcctcctgtgggcggccaggtgggcaggtgggcaggtgggcggccaggtgggcaggtggggcctcttgggtgagcccaacactagtgattctgttttcagaactccttcagacaccgctgtgaaaacagcaccatcacacaatcacgaattcacatcaggacctggcctattgctatatgcagagagatgctgaaacctttcattttttctttttaaaatcgtaggactttgcccattaaatcctaaattgccactagccaacatggatgaagtctgcgagggatggcaccgccgggcacacctgtgtctggcctggtggtgggaaggagggtggagggcccccgggamgggggttcttaccgctgaggagaggccggttgtgccggtaggaggcgggcagctggccgacaccctccatgcggtggctcatgacgcgtgcgaggtggcccg

SEQ ID NO: 553110 - DNA, 595 bp, Homo sapiens
tctttgcagattggccaagatttgctgatacaattctatcttcgcagcctagaatcttcagggacaaactcaaatccaaggtcagaaccgtggaagactctgcagactcagctccagctcccgtctgccttgtgcccccgccctggggtgtgtgcatcaggctgagcagatctccgggctgcgttttagcgtttctggaagtggaacttgatcctgtccgagggggcctcatggggcaactagtatggtggttcacaaaccatttttagttgtaatcaagtatgacttcggtatacttcgtgagttggtcttttgtaaaagccaattcacaaagtataccgaagttgtacttcattattatgaaaatgtatttaataaatgccatttttaaagccggtcaatgtggatagggaggctgctctgaggaacacacacctctggccctgctggtgtcactccccgcattcaaggctgkgtaaccttggacaactgtcttaacttctctgtgactgagtttcctcatttctaaaatgggggtgatgatagtgtctacctccatgagttgtggaggagattaaatgtgatgacacagtta

SEQ ID NO: 553111 - DNA, 1240 bp, Homo sapiens
attatttgattcatctatattcctagtaccagcaaagctaacatgatgaaaaaaaacccagaacattggttgtcactggttgtttggtggtaactgggatagatttgaaatggacacatgagtgctacctaggatgatgggagggttctatgttttgacagggatgtgggttacacagatacttgtatttatcaaagttgactaaattgtacatctggtatctatgtattttattgtatgaaaactgtattacaatgaaaagaaaagaaaaatggaggaaaaaacgaggcagggagaaaaggagagagatgaagaagaggtagaaggaacagagggagagagaaaaaataatggtcctaggaactggggaggatgtgagccaggagcttggggttactgttgccaacagctgagaaaataggcgagcagagctctgaagggtcagtgtctcagttagaattttgtaattctttaaatggttaaactaaatcttgatacaaaaggaaagcatattttggggatgcaagatggaaaagatwagctctgacccctgacttctgctctattggctttaaatagcagttggatttataaaagcctattctcagagattcgtttgtatagttttcttgttcagtttctttaacttggaatataaaagttgttccaaattgcccactgtatatctgccaaacttttatgtgaagaattgggtggcaggtgtttcattctgtagtcattcttagaagggtttgttcccatgtttgaatggagtcagttgtgcacttaccccttcccccaagctctcattgcagccttgcctgaaatctattcttctgaagtacagtggaatgttaacccatttataattgcaatgatcattcatttctctttctattgctttgctgtgccaagcacatgggagctaaattcttggcaaaagtctttttttgcttgtagtagtaggaagcagaacttactctgccctgaaatgtgcacagtggagggagatgaggaaagccctgtagtaacggaggaaggaatttctcaattcaacaattgttatataaaagtaaactttcactgcagctacactgaggtacctccagggtgtggcagcaaaatcagaaaaaaaaattaccttgagaacaagaaactccagaaactcaatatcaaatatatcaattcagactcataactgccctactgggcagttatcattaatcctttctatttcata

SEQ ID NO: 553112 - DNA, 612 bp, Homo sapiens
tgaaaagtcttagagatgaaacctttttactgaataatttgttaaaagaaatattcaaaattgaaggaggttgctgcccccctaatattttcccagtcagacttaatttcaagagccctcttatcctccaaatacttaatttttaaataaacagaaatgactgttttctgattacaaaataacataattgtattgtaaaaatgcagggcatgcatgaagatataaagaagatcattaaaatcgccccatattcctaacccacagtgatatccactgttagtatctactgggggkggtcacagcaagtactaacaatgaccgatgagacaatgtccttgaatgtccacttccagcgataaggaaactctatcacaaggtggcccacacactatttcaacagctttagttgttagaatactccttttggaagatagatggatatacttgacatgcatgtatccattctttctttctacatcttggcagatcctactaattgatcattgcgctttatcgttgagcttctaggcagttattaccaagctttggagatggcatacaaaatgaaacctcttttccatccctgctccatgctgactctgagccattaat

SEQ ID NO: 553113 - DNA, 612 bp, Homo sapiens
tgaaaagtcttagagatgaaacctttttactgaataatttgttaaaagaaatattcaaaattgaaggaggttgctgcccccctaatattttcccagtcagacttaatttcaagagccctcttatcctccaaatacttaatttttaaataaacagaaatgactgttttctgattacaaaataacataattgtattgtaaaaatgcagggcatgcatgaagatataaagaagatcattaaaatcgccccatattcctaacccacagtgatatccactgttagtatctactggggggggtcacagcaagtactaacaatgaccgatgagacaaygtccttgaatgtccacttccagcgataaggaaactctatcacaaggtggcccacacactatttcaacagctttagttgttagaatactccttttggaagatagatggatatacttgacatgcatgtatccattctttctttctacatcttggcagatcctactaattgatcattgcgctttatcgttgagcttctaggcagttattaccaagctttggagatggcatacaaaatgaaacctcttttccatccctgctccatgctgactctgagccattaat

SEQ ID NO: 553114 - DNA, 1975 bp, Homo sapiens
gaaagggagaagaagaaaaagagaaggcaatgagaaatgactgayaaaaacagaagttaaatcaaatgatgatattaatttaaaaaatttaaactaaaatcatttaaaaattaaaatatttaaaaaatcattttagtttaatttcacatacttccattaattcgtttctggcttgtatctgattttattgcaaaactagaaaattactactaaatgttctaacatcaactggaggataggaaatttgaggagggtaagaaatctcagattggagtttatgttagttggtttatcactataagcttctgaggacatttgccatgatatcacatgatgcaatatgaatcaattctctaatttataaattatcttctaataattagaagtaattctagattggccactccctggtaacaggttggaagtccctttaaactaatggctaaacccttctgagcccctattacaggcatgggttactgtgagcagttgatctagaaaacagtgtaaatgaagctttcgaggagatttgctgcacagtggccctaatcaagaaagctttctcgtagagagttaatcctattcatgatgaatgaagtgaaacagtcacagatgcttggagatgaagaccacccagtccaatccaagcctcttgcccaatgcaggaatctcatctacagctttccatccagccattgctagaacatttccagtgaagagagctctttgcgtctgggtgcaattctattttctaggaaatgcttcctcacagtggattgaattcaggccccttactacttctacccactggtcgcagttctgcattgtgagtagtacagaaaagttctaaccctattttccaagttttgaagatggcactgttgccaccacttgtctgcctctacctgttcttcttcaggttaaatcatgccatctctttctcaattgtcctctttggattggaaccctatattactggtcctggtcaccctcccttgggtatgttctagtttatgaaggcctttcttaaaataagcacctaagaatggaacatgatgtagtctgaccagcaaaacataagaggactatgctcagaaccctacctttctactaagacattccacaattagattcactttttaaaccttttttcatactagtggtttttactgaaggtcagttccaattttctgaccatttttaggtgaatttcagagtattaagatcagctattcaagtctgtctgttcaacagatttttttttaaggaactgccatcaagcttagatgtggtttccaaattatacccaccttccattttgaaaacatggacatttgtccatctttagtcttacagtttttcaatcaattggcacatttgtactgtgtgtctatcctgggccagatgttgtgctgtgaggtgggtcagtgaataagacacaatttctgctctcaaggagcctctattcagtgaggagagtcacatgaatgcacagaaggttacaggagctcagaaacaagatgcctctgagaacatattcatccacactaaagaggcatcgttccctggggtgctgggctcaacctgcacacaatgagtgttggtgggaagcccaacttcatcttaaatgcctgggtccttcatcttctcacctagccagggctgcagaggcctcttttcgctgttgtttacaccctttctcatgtgaagagcaatttccatccaggaaaagacagaatacaagaggaaacagctcttgtttccctttgacattgttaacattattcttggggcctaaggaagaagcctggtcctctactctgtacctacttattctaaaggatgatgatgatgaagataatgggaaaagaagtagcttctgtttaaaaaaatattcattctgtgtaaggtacattatatagtataaaatacataattacatatatttatataaatttataaatgcatatttccc

SEQ ID NO: 553115 - DNA, 1975 bp, Homo sapiens
gaaagggagaagaagaaaaagagaaggcaatgagaaatgactgataaaaacagaagttaaatcaaatgatgatattaattwaaaaaatttaaactaaaatcatttaaaaattaaaatatttaaaaaatcattttagtttaatttcacatacttccattaattcgtttctggcttgtatctgattttattgcaaaactagaaaattactactaaatgttctaacatcaactggaggataggaaatttgaggagggtaagaaatctcagattggagtttatgttagttggtttatcactataagcttctgaggacatttgccatgatatcacatgatgcaatatgaatcaattctctaatttataaattatcttctaataattagaagtaattctagattggccactccctggtaacaggttggaagtccctttaaactaatggctaaacccttctgagcccctattacaggcatgggttactgtgagcagttgatctagaaaacagtgtaaatgaagctttcgaggagatttgctgcacagtggccctaatcaagaaagctttctcgtagagagttaatcctattcatgatgaatgaagtgaaacagtcacagatgcttggagatgaagaccacccagtccaatccaagcctcttgcccaatgcaggaatctcatctacagctttccatccagccattgctagaacatttccagtgaagagagctctttgcgtctgggtgcaattctattttctaggaaatgcttcctcacagtggattgaattcaggccccttactacttctacccactggtcgcagttctgcattgtgagtagtacagaaaagttctaaccctattttccaagttttgaagatggcactgttgccaccacttgtctgcctctacctgttcttcttcaggttaaatcatgccatctctttctcaattgtcctctttggattggaaccctatattactggtcctggtcaccctcccttgggtatgttctagtttatgaaggcctttcttaaaataagcacctaagaatggaacatgatgtagtctgaccagcaaaacataagaggactatgctcagaaccctacctttctactaagacattccacaattagattcactttttaaaccttttttcatactagtggtttttactgaaggtcagttccaattttctgaccatttttaggtgaatttcagagtattaagatcagctattcaagtctgtctgttcaacagatttttttttaaggaactgccatcaagcttagatgtggtttccaaattatacccaccttccattttgaaaacatggacatttgtccatctttagtcttacagtttttcaatcaattggcacatttgtactgtgtgtctatcctgggccagatgttgtgctgtgaggtgggtcagtgaataagacacaatttctgctctcaaggagcctctattcagtgaggagagtcacatgaatgcacagaaggttacaggagctcagaaacaagatgcctctgagaacatattcatccacactaaagaggcatcgttccctggggtgctgggctcaacctgcacacaatgagtgttggtgggaagcccaacttcatcttaaatgcctgggtccttcatcttctcacctagccagggctgcagaggcctcttttcgctgttgtttacaccctttctcatgtgaagagcaatttccatccaggaaaagacagaatacaagaggaaacagctcttgtttccctttgacattgttaacattattcttggggcctaaggaagaagcctggtcctctactctgtacctacttattctaaaggatgatgatgatgaagataatgggaaaagaagtagcttctgtttaaaaaaatattcattctgtgtaaggtacattatatagtataaaatacataattacatatatttatataaatttataaatgcatatttccc

SEQ ID NO: 553116 - DNA, 1975 bp, Homo sapiens
gaaagggagaagaagaaaaagagaaggcaatgagaaatgactgataaaaacagaagttaaatcaaatgatgatattaatttaaaaaatttaaactaaaatcatttaaaaattaaaatatttaaaaaatcattttagtttaatttcacatacttccattaattcgtttctggcttgtatctgattttattgcaaaactagaaaattactaytaaatgttctaacatcaactggaggataggaaatttgaggagggtaagaaatctcagattggagtttatgttagttggtttatcactataagcttctgaggacatttgccatgatatcacatgatgcaatatgaatcaattctctaatttataaattatcttctaataattagaagtaattctagattggccactccctggtaacaggttggaagtccctttaaactaatggctaaacccttctgagcccctattacaggcatgggttactgtgagcagttgatctagaaaacagtgtaaatgaagctttcgaggagatttgctgcacagtggccctaatcaagaaagctttctcgtagagagttaatcctattcatgatgaatgaagtgaaacagtcacagatgcttggagatgaagaccacccagtccaatccaagcctcttgcccaatgcaggaatctcatctacagctttccatccagccattgctagaacatttccagtgaagagagctctttgcgtctgggtgcaattctattttctaggaaatgcttcctcacagtggattgaattcaggccccttactacttctacccactggtcgcagttctgcattgtgagtagtacagaaaagttctaaccctattttccaagttttgaagatggcactgttgccaccacttgtctgcctctacctgttcttcttcaggttaaatcatgccatctctttctcaattgtcctctttggattggaaccctatattactggtcctggtcaccctcccttgggtatgttctagtttatgaaggcctttcttaaaataagcacctaagaatggaacatgatgtagtctgaccagcaaaacataagaggactatgctcagaaccctacctttctactaagacattccacaattagattcactttttaaaccttttttcatactagtggtttttactgaaggtcagttccaattttctgaccatttttaggtgaatttcagagtattaagatcagctattcaagtctgtctgttcaacagatttttttttaaggaactgccatcaagcttagatgtggtttccaaattatacccaccttccattttgaaaacatggacatttgtccatctttagtcttacagtttttcaatcaattggcacatttgtactgtgtgtctatcctgggccagatgttgtgctgtgaggtgggtcagtgaataagacacaatttctgctctcaaggagcctctattcagtgaggagagtcacatgaatgcacagaaggttacaggagctcagaaacaagatgcctctgagaacatattcatccacactaaagaggcatcgttccctggggtgctgggctcaacctgcacacaatgagtgttggtgggaagcccaacttcatcttaaatgcctgggtccttcatcttctcacctagccagggctgcagaggcctcttttcgctgttgtttacaccctttctcatgtgaagagcaatttccatccaggaaaagacagaatacaagaggaaacagctcttgtttccctttgacattgttaacattattcttggggcctaaggaagaagcctggtcctctactctgtacctacttattctaaaggatgatgatgatgaagataatgggaaaagaagtagcttctgtttaaaaaaatattcattctgtgtaaggtacattatatagtataaaatacataattacatatatttatataaatttataaatgcatatttccc

SEQ ID NO: 553117 - DNA, 1975 bp, Homo sapiens
gaaagggagaagaagaaaaagagaaggcaatgagaaatgactgataaaaacagaagttaaatcaaatgatgatattaatttaaaaaatttaaactaaaatcatttaaaaattaaaatatttaaaaaatcattttagtttaatttcacatacttccattaattcgtttctggcttgtatctgattttattgcaaaactagaaaattactactaaatgttctaacatcaactggaggataggaaatttgaggagggtaagaaatctcagattggaktttatgttagttggtttatcactataagcttctgaggacatttgccatgatatcacatgatgcaatatgaatcaattctctaatttataaattatcttctaataattagaagtaattctagattggccactccctggtaacaggttggaagtccctttaaactaatggctaaacccttctgagcccctattacaggcatgggttactgtgagcagttgatctagaaaacagtgtaaatgaagctttcgaggagatttgctgcacagtggccctaatcaagaaagctttctcgtagagagttaatcctattcatgatgaatgaagtgaaacagtcacagatgcttggagatgaagaccacccagtccaatccaagcctcttgcccaatgcaggaatctcatctacagctttccatccagccattgctagaacatttccagtgaagagagctctttgcgtctgggtgcaattctattttctaggaaatgcttcctcacagtggattgaattcaggccccttactacttctacccactggtcgcagttctgcattgtgagtagtacagaaaagttctaaccctattttccaagttttgaagatggcactgttgccaccacttgtctgcctctacctgttcttcttcaggttaaatcatgccatctctttctcaattgtcctctttggattggaaccctatattactggtcctggtcaccctcccttgggtatgttctagtttatgaaggcctttcttaaaataagcacctaagaatggaacatgatgtagtctgaccagcaaaacataagaggactatgctcagaaccctacctttctactaagacattccacaattagattcactttttaaaccttttttcatactagtggtttttactgaaggtcagttccaattttctgaccatttttaggtgaatttcagagtattaagatcagctattcaagtctgtctgttcaacagatttttttttaaggaactgccatcaagcttagatgtggtttccaaattatacccaccttccattttgaaaacatggacatttgtccatctttagtcttacagtttttcaatcaattggcacatttgtactgtgtgtctatcctgggccagatgttgtgctgtgaggtgggtcagtgaataagacacaatttctgctctcaaggagcctctattcagtgaggagagtcacatgaatgcacagaaggttacaggagctcagaaacaagatgcctctgagaacatattcatccacactaaagaggcatcgttccctggggtgctgggctcaacctgcacacaatgagtgttggtgggaagcccaacttcatcttaaatgcctgggtccttcatcttctcacctagccagggctgcagaggcctcttttcgctgttgtttacaccctttctcatgtgaagagcaatttccatccaggaaaagacagaatacaagaggaaacagctcttgtttccctttgacattgttaacattattcttggggcctaaggaagaagcctggtcctctactctgtacctacttattctaaaggatgatgatgatgaagataatgggaaaagaagtagcttctgtttaaaaaaatattcattctgtgtaaggtacattatatagtataaaatacataattacatatatttatataaatttataaatgcatatttccc

SEQ ID NO: 553118 - DNA, 1975 bp, Homo sapiens
gaaagggagaagaagaaaaagagaaggcaatgagaaatgactgataaaaacagaagttaaatcaaatgatgatattaatttaaaaaatttaaactaaaatcatttaaaaattaaaatatttaaaaaatcattttagtttaatttcacatacttccattaattcgtttctggcttgtatctgattttattgcaaaactagaaaattactactaaatgttctaacatcaactggaggataggaaatttgaggagggtaagaaatctcagattggagtttatgttagttggtttatcactmtaagcttctgaggacatttgccatgatatcacatgatgcaatatgaatcaattctctaatttataaattatcttctaataattagaagtaattctagattggccactccctggtaacaggttggaagtccctttaaactaatggctaaacccttctgagcccctattacaggcatgggttactgtgagcagttgatctagaaaacagtgtaaatgaagctttcgaggagatttgctgcacagtggccctaatcaagaaagctttctcgtagagagttaatcctattcatgatgaatgaagtgaaacagtcacagatgcttggagatgaagaccacccagtccaatccaagcctcttgcccaatgcaggaatctcatctacagctttccatccagccattgctagaacatttccagtgaagagagctctttgcgtctgggtgcaattctattttctaggaaatgcttcctcacagtggattgaattcaggccccttactacttctacccactggtcgcagttctgcattgtgagtagtacagaaaagttctaaccctattttccaagttttgaagatggcactgttgccaccacttgtctgcctctacctgttcttcttcaggttaaatcatgccatctctttctcaattgtcctctttggattggaaccctatattactggtcctggtcaccctcccttgggtatgttctagtttatgaaggcctttcttaaaataagcacctaagaatggaacatgatgtagtctgaccagcaaaacataagaggactatgctcagaaccctacctttctactaagacattccacaattagattcactttttaaaccttttttcatactagtggtttttactgaaggtcagttccaattttctgaccatttttaggtgaatttcagagtattaagatcagctattcaagtctgtctgttcaacagatttttttttaaggaactgccatcaagcttagatgtggtttccaaattatacccaccttccattttgaaaacatggacatttgtccatctttagtcttacagtttttcaatcaattggcacatttgtactgtgtgtctatcctgggccagatgttgtgctgtgaggtgggtcagtgaataagacacaatttctgctctcaaggagcctctattcagtgaggagagtcacatgaatgcacagaaggttacaggagctcagaaacaagatgcctctgagaacatattcatccacactaaagaggcatcgttccctggggtgctgggctcaacctgcacacaatgagtgttggtgggaagcccaacttcatcttaaatgcctgggtccttcatcttctcacctagccagggctgcagaggcctcttttcgctgttgtttacaccctttctcatgtgaagagcaatttccatccaggaaaagacagaatacaagaggaaacagctcttgtttccctttgacattgttaacattattcttggggcctaaggaagaagcctggtcctctactctgtacctacttattctaaaggatgatgatgatgaagataatgggaaaagaagtagcttctgtttaaaaaaatattcattctgtgtaaggtacattatatagtataaaatacataattacatatatttatataaatttataaatgcatatttccc

SEQ ID NO: 553119 - DNA, 1975 bp, Homo sapiens
gaaagggagaagaagaaaaagagaaggcaatgagaaatgactgataaaaacagaagttaaatcaaatgatgatattaatttaaaaaatttaaactaaaatcatttaaaaattaaaatatttaaaaaatcattttagtttaatttcacatacttccattaattcgtttctggcttgtatctgattttattgcaaaactagaaaattactactaaatgttctaacatcaactggaggataggaaatttgaggagggtaagaaatctcagattggagtttatgttagttggtttatcactataagcttctgaggacatttgccatgatatcacatgatgcaatatgaatcaattctctaatttataaattatcttctaataattagaagtaattctagattggccactccctggtaacaggttggaagtccctttaaactaatggctaaacccttctgagcccctattacaggcatgggttactgtgagcagttgatctagaaaacagtgtaaatgaagctttcgaggagatttgctgcacagtggccctaatcaagaaagctttctcgtagagagttaatcctattcatgatgaatgaagtgaaacagtcacagatgcttggagatgaagaccacccagtccaatccaagcctcttgcccaatgcaggaatctcatctacagctttccatccagccattgctagaacatttccagtgaagagagctctttgcgtctgggtgcaattctattttctaggaaatgcttcctcacagtggattgaattcaggccccttactacttctacccactggtcgcagttctgcattgtgagtagtacagaaaagttctaaccctattttccaagttttgaagatggcactgttgccaccacttgtctgcctctacctgttcttcttcaggttaaatcatgccatctctttctcaattgtcctctttggattggaaccctatattactggtcctggtcaccctcccttgggtatgttctagtttatgaaggcctttcttaaaataagcacctaagaatggaacatgatgtagtctgaccagcaaaacataagaggactatgctcagaaccctacctttctactaagacattccacaattagattcactttttaaaccttttttcatactagtggtttttactgaaggtcagttccaaytttctgaccatttttaggtgaatttcagagtattaagatcagctattcaagtctgtctgttcaacagatttttttttaaggaactgccatcaagcttagatgtggtttccaaattatacccaccttccattttgaaaacatggacatttgtccatctttagtcttacagtttttcaatcaattggcacatttgtactgtgtgtctatcctgggccagatgttgtgctgtgaggtgggtcagtgaataagacacaatttctgctctcaaggagcctctattcagtgaggagagtcacatgaatgcacagaaggttacaggagctcagaaacaagatgcctctgagaacatattcatccacactaaagaggcatcgttccctggggtgctgggctcaacctgcacacaatgagtgttggtgggaagcccaacttcatcttaaatgcctgggtccttcatcttctcacctagccagggctgcagaggcctcttttcgctgttgtttacaccctttctcatgtgaagagcaatttccatccaggaaaagacagaatacaagaggaaacagctcttgtttccctttgacattgttaacattattcttggggcctaaggaagaagcctggtcctctactctgtacctacttattctaaaggatgatgatgatgaagataatgggaaaagaagtagcttctgtttaaaaaaatattcattctgtgtaaggtacattatatagtataaaatacataattacatatatttatataaatttataaatgcatatttccc

SEQ ID NO: 553120 - DNA, 636 bp, Homo sapiens
cttcctttggcttttttatcatcggataaaatggattgctagcaatataaccttgatgaagggatttaatgtttcagagcctcagtttccttaacttcaatgggaataaaacatccattgaacagcaacttctcatttccccctcttcatattgattaggtttttgtgagggtcaattgtaaatttaaaattgtttgacaaataaaattgttaatctgcattgtttgagagagtcaaggattctcatccattccatctgagaacattatctgaatcaagggcaacttgaagaggatcttaataaaatttggaaagatttgactaggaaatcatgttgttttcctttctatgttcaacaaaatatttctgataaattggggatgatgaggagtagagaggtggactggctaaaggtgagattgcagggtgcatgatggaccacagagggagagtttattttatgggtggcaaagtgagctggcatggagcatgagggctggttttaagttaaacatgtggtaggcagaataatgaccctccaagaatgtccacatgtcaatccccagcacctgmaaatatgttaccttacatggaaaaagggactttgcagatgtaactaaattaagaacattgaca

SEQ ID NO: 553121 - DNA, 548 bp, Homo sapiens
tctaatcctgactatggtctgtgccccttgctagcaggaagaagctagagtgatcttcagctaattcccaccatattagttctcacctcaggactgaggtatgatcaagcccaggggggactaaactgtccttataaactttataaaattaataacgtaagaagggagagatggggaaataaaaataaaccaagcttgcagcacattcaacattaatcatyaggtagcttgctctctggcccacttccacattgttgtttgtggcctattgtgtgtgaatcaagtaaatccaagcagttcctaagattataatttcccttaactgctctgtctacagagcaagaaattttcagtgtcttgctttaaataactaagctacattaactacataagtacttaaatgtaaaattaaaatatgaggaaagaaataagtatagcaactataacaaggaaagatgttatacttacttctttccgcaaggaaaggagtataacaactaaaacaagttcaacattatgaaacattaaattttccctttgagataccc

SEQ ID NO: 553122 - DNA, 609 bp, Homo sapiens
gtcaattatatctcaataaaactactactaaaaaaataaacatatgttttgattcctctctcctctgcaatagcttccttgtttttctctcagtttttctgtttcactctaaagataacgccagaataatcttcctaatactgccatcaaataatttctacggtcaagaacccaccatgccttacctcacaccatataaaacatcaacacaaaatggaccaaagacctaattgcaagggcaaaaactataaaactcttactagaaaatatagagataaatttttatgacttggcaatggcttcttggatataacaacaaaagcacaatcaacaaaagaaaaaataaatcatttgactttaccaaaattgaaaacttttctgcatcgaaagacacaatcaagaaaatgaaaagacaacccacagaataggagaaaatatttgcaaatcatataacatatacrggtctagtatctaggatatataaagagtgcaacctgcagaatgggagaaaatatttgcaaatcatatataagagtctaatatccggaatatatagagtgctaaacaattcaacaacaaaaagacaaacacaactttaaaatgggcaaa

SEQ ID NO: 553123 - DNA, 563 bp, Homo sapiens
gagggtagagaggaaagaggggcatggaggtaactgggtggctgcaggtgcaccttcctagggaaaaaattatgtcactatttacaatagcaaagacttggaatcaacccaaatgcccatcaatgacagtctggataaagaaaatgtggcatatatacaccatggaatactatgcagtcatgaaaaagaatgagttcatgtcttttgcagggacatggatgaagctagaaaccatcatcctcaataaactaacacaggaacagaaaccaaacactgcattttctcactcataggtgggagttgaacaataagaacacatggacacagggtggggaacatcacacactgtggcctgtagggggygggggtcaaggggaggaagagcattaggacaaatacctaatgtatgtggggcttaaaacctagatcatgggttgatagtacagcaaaccaccatggcacatgcatacctatttaacaaacctgcatattctgcacatttgtcccagaacttaaagtaaaataaaatattttttaaaatatgattgtgaaaaagcaaaaaa

SEQ ID NO: 553124 - DNA, 542 bp, Homo sapiens
tatgataaaattacatgacatcacaaactaaaaaggctaccttgttctttttgaaattatttgtgttcatgaaaattaattggttatkgttattggatatatatgcttataataaatgtctgagtttttaaaaagcataagacatgttttgtaaaagagatgtgaaaagtatacaaggtattggtgctaatggaataaaagaaatactaaaaagtaacttctcagtgaattttatagggcaataacaatttatagagaagtttcttatttagccaaataagataaatgtgcatgagcatgtttcaaaatgacaaaacccctctctcaaatgttagctaattaagacttatttttatctactgaaacttcagttgcatttcaactaaaaaccattctgaaatattgaagataaaatttgaagattgaaaagtggctgactactggtgactaaagtgtggtcattattacatctaaaatggcgttctgttctacaggaacgcgtgtgtgcatatctttaatgtcagcccttgcctctgggatga

SEQ ID NO: 553125 - DNA, 2275 bp, Homo sapiens
ctgtgccccaaaagttgtcatgtgacaatgttgcatcttcatgggaaagatgaaaactccatgtaatcctattacgaatatttccattagccaccaagtctcaccttggtaatctgtttcaattgaaagtcctgtcaktccccaaaacccaatttagaaggtgcagggacaaaatataagtttgtgccaatttctcaaagatgagcaaaaatcatcacttgagttcatctgggattcttttttcccttaatctcttaactccggggcactaaaagaattatttcccaatgttcaccaaggtaaccttgtcctctcaggcctccttaaaaattccataggcactctagcttctatctatgaagtgtggagggtggagatatggggatcttaacaagcaaatgcccagctacctggatatccaaggttcttgtgcttttgcatgctctgggaaggttagtaggaaggggtgactgggactggtgccacagtatatacaaaaagagtcaagatcagccagactgttcaaacagcccacccagcaccagaatcttttaaaaaaatctttgttaaaatttcagtagcttttggggtacaagtggtttttggttgcatgtatgtattatacagtgacaaattctgagattttagtgtacctgtcatctgaatagtgtatgttgtacccaatatgtagtttttaatcccacactcccttctcccattctccccattccgagtctccaaagcctattatatcactctgtatgcctttgcgtattcatagcttagctcccacttgtaagtgagaatatatggtgtttggtttccattcctgagttacttaataatggcctccagcttcatccaagttgctgcaaaagacatgatttagttcatttttatggacgagtagtattccatggtgtatatataccacattttctttattcactcattggtcaatggacacttaggttggttccgtgtcttggcaattgtgaattggcccgcaccagaatcctgaccttgtgtcagtccttatgcagtcccctcaccaacgtggaagctatcacatcatgttgagcacactgaaggtgggtgggaatagctggccccattttccatcaaggaaatgggtttaactcaaaccctagaggcagcacatggtggatgtcgccctccctccaagaccaaaacccaaacgttttgttttcatgcccttttatttttcatcagatcaccccagcctcttgctcaaacagaagctcaaatgcttctgttgcttacacccatggaaccctgggcaaataacatttcctggagtctgatctgtaaaacagtgacaatcacattctcctctcaggttgcaagcatccaatagcgtaaagtatgtataatgtgctcagcacactgcatagcacctgacaaggctcaactatccacttttcttatcacaattactcatccaggagagtcaggatacattaggctttggtgtccctcactgcatatcccccagttggcaccatttgctccaactcaattgagctatttgaagttttgcaaatgtgacctcttttttctgccaccttcttgcttctgtctatgctgttccttataccaagaacacccttcctctaatccccatttcttccaaaatgtcttattccacaagaaacagcccatttcaccactcagtcagtccctttctctgaattctcttcatgccctttgcacacctctgtttcaacacttccttccctgtataatgattcctgaattcctatcttccccatggctgagaggctactgaggacaagcatgtcttataaagccccgcagctccagtacctactacctcctggctatgtttgatgaatgactggacaagtgaatgaatggatacacaaattattaacaaagttatttctgaacattttgatcacgggacacagatcttgatcctctaccactaagaaagaatcttcaaagtcgatacacatgtcaccagtattgggcccaacgaaacatcttctctgtcaaaattaggagctaaatatcaaggctttcagatgcaatttcgtgaattatttcaaccaggcagcctggaagaattagactatggattttattggttctccatattatatgttaatactcttttggcagcctgaaaatgacatttctctttccagccaatatcacctctttctctacttagcaaacattgatatatttttttcctgagttgtcaatttcaggttgcaatttccatccc

SEQ ID NO: 553126 - DNA, 2275 bp, Homo sapiens
ctgtgccccaaaagttgtcatgtgacaatgttgcatcttcatgggaaagatgaaaactccatgtaatcctattacgaatatttccattagccaccaagtctcaccttggtaatctgtttcaattgaaagtcctgtcattccccaaaacccaatttagaaggtgcagggacaaaatataagtttgtgccaatttctcaaagatgagcaaaaatcatcacttgagttcatctgggattcttttttcccttaatctcttaactccggggcactaaaagaattatttcccaatgttcaccaaggtaaccttgtcctctcaggcctccttaaaaattccataggcactctagcttctatctatgaagtgtggagggtggagatatggggatcttaacaagcaaatgcccagctacctggatatccaaggttcttgtgcttttrcatgctctgggaaggttagtaggaaggggtgactgggactggtgccacagtatatacaaaaagagtcaagatcagccagactgttcaaacagcccacccagcaccagaatcttttaaaaaaatctttgttaaaatttcagtagcttttggggtacaagtggtttttggttgcatgtatgtattatacagtgacaaattctgagattttagtgtacctgtcatctgaatagtgtatgttgtacccaatatgtagtttttaatcccacactcccttctcccattctccccattccgagtctccaaagcctattatatcactctgtatgcctttgcgtattcatagcttagctcccacttgtaagtgagaatatatggtgtttggtttccattcctgagttacttaataatggcctccagcttcatccaagttgctgcaaaagacatgatttagttcatttttatggacgagtagtattccatggtgtatatataccacattttctttattcactcattggtcaatggacacttaggttggttccgtgtcttggcaattgtgaattggcccgcaccagaatcctgaccttgtgtcagtccttatgcagtcccctcaccaacgtggaagctatcacatcatgttgagcacactgaaggtgggtgggaatagctggccccattttccatcaaggaaatgggtttaactcaaaccctagaggcagcacatggtggatgtcgccctccctccaagaccaaaacccaaacgttttgttttcatgcccttttatttttcatcagatcaccccagcctcttgctcaaacagaagctcaaatgcttctgttgcttacacccatggaaccctgggcaaataacatttcctggagtctgatctgtaaaacagtgacaatcacattctcctctcaggttgcaagcatccaatagcgtaaagtatgtataatgtgctcagcacactgcatagcacctgacaaggctcaactatccacttttcttatcacaattactcatccaggagagtcaggatacattaggctttggtgtccctcactgcatatcccccagttggcaccatttgctccaactcaattgagctatttgaagttttgcaaatgtgacctcttttttctgccaccttcttgcttctgtctatgctgttccttataccaagaacacccttcctctaatccccatttcttccaaaatgtcttattccacaagaaacagcccatttcaccactcagtcagtccctttctctgaattctcttcatgccctttgcacacctctgtttcaacacttccttccctgtataatgattcctgaattcctatcttccccatggctgagaggctactgaggacaagcatgtcttataaagccccgcagctccagtacctactacctcctggctatgtttgatgaatgactggacaagtgaatgaatggatacacaaattattaacaaagttatttctgaacattttgatcacgggacacagatcttgatcctctaccactaagaaagaatcttcaaagtcgatacacatgtcaccagtattgggcccaacgaaacatcttctctgtcaaaattaggagctaaatatcaaggctttcagatgcaatttcgtgaattatttcaaccaggcagcctggaagaattagactatggattttattggttctccatattatatgttaatactcttttggcagcctgaaaatgacatttctctttccagccaatatcacctctttctctacttagcaaacattgatatatttttttcctgagttgtcaatttcaggttgcaatttccatccc

SEQ ID NO: 553127 - DNA, 2275 bp, Homo sapiens
ctgtgccccaaaagttgtcatgtgacaatgttgcatcttcatgggaaagatgaaaactccatgtaatcctattacgaatatttccattagccaccaagtctcaccttggtaatctgtttcaattgaaagtcctgtcattccccaaaacccaatttagaaggtgcagggacaaaatataagtttgtgccaatttctcaaagatgagcaaaaatcatcacttgagttcatctgggattcttttttcccttaatctcttaactccggggcactaaaagaattatttcccaatgttcaccaaggtaaccttgtcctctcaggcctccttaaaaattccataggcactctagcttctatctatgaagtgtggagggtggagatatggggatcttaacaagcaaatgcccagctacctggatatccaaggttcttgtgcttttgsatgctctgggaaggttagtaggaaggggtgactgggactggtgccacagtatatacaaaaagagtcaagatcagccagactgttcaaacagcccacccagcaccagaatcttttaaaaaaatctttgttaaaatttcagtagcttttggggtacaagtggtttttggttgcatgtatgtattatacagtgacaaattctgagattttagtgtacctgtcatctgaatagtgtatgttgtacccaatatgtagtttttaatcccacactcccttctcccattctccccattccgagtctccaaagcctattatatcactctgtatgcctttgcgtattcatagcttagctcccacttgtaagtgagaatatatggtgtttggtttccattcctgagttacttaataatggcctccagcttcatccaagttgctgcaaaagacatgatttagttcatttttatggacgagtagtattccatggtgtatatataccacattttctttattcactcattggtcaatggacacttaggttggttccgtgtcttggcaattgtgaattggcccgcaccagaatcctgaccttgtgtcagtccttatgcagtcccctcaccaacgtggaagctatcacatcatgttgagcacactgaaggtgggtgggaatagctggccccattttccatcaaggaaatgggtttaactcaaaccctagaggcagcacatggtggatgtcgccctccctccaagaccaaaacccaaacgttttgttttcatgcccttttatttttcatcagatcaccccagcctcttgctcaaacagaagctcaaatgcttctgttgcttacacccatggaaccctgggcaaataacatttcctggagtctgatctgtaaaacagtgacaatcacattctcctctcaggttgcaagcatccaatagcgtaaagtatgtataatgtgctcagcacactgcatagcacctgacaaggctcaactatccacttttcttatcacaattactcatccaggagagtcaggatacattaggctttggtgtccctcactgcatatcccccagttggcaccatttgctccaactcaattgagctatttgaagttttgcaaatgtgacctcttttttctgccaccttcttgcttctgtctatgctgttccttataccaagaacacccttcctctaatccccatttcttccaaaatgtcttattccacaagaaacagcccatttcaccactcagtcagtccctttctctgaattctcttcatgccctttgcacacctctgtttcaacacttccttccctgtataatgattcctgaattcctatcttccccatggctgagaggctactgaggacaagcatgtcttataaagccccgcagctccagtacctactacctcctggctatgtttgatgaatgactggacaagtgaatgaatggatacacaaattattaacaaagttatttctgaacattttgatcacgggacacagatcttgatcctctaccactaagaaagaatcttcaaagtcgatacacatgtcaccagtattgggcccaacgaaacatcttctctgtcaaaattaggagctaaatatcaaggctttcagatgcaatttcgtgaattatttcaaccaggcagcctggaagaattagactatggattttattggttctccatattatatgttaatactcttttggcagcctgaaaatgacatttctctttccagccaatatcacctctttctctacttagcaaacattgatatatttttttcctgagttgtcaatttcaggttgcaatttccatccc

SEQ ID NO: 553128 - DNA, 797 bp, Homo sapiens
gaagtgagtttaattcgaattcctgtgatggggacttaaaggcaaatgaccccactttctttgtgaatgttagaacctattgtacagagctttcgtgagagttatattaagtaatatagatatagttattctaaagtgctgtataaaagtaaggcattattatcaggcagctaagcaaagtgaaaagctttaataaaacctatcctttactgactctaaggaggctttttaaaaaaccaacgtgcaaacatgacattattcgccgttaaaaagttaaggtttgcggaccaaatggctcaggaagcaataagatgatctaatatgtcaaggaagacattttaaaaaaggaataagtatattgtagagagaggtaggagacaatctacttcttttaaagagctgtatctattcataacatatttggaaaagtattgaattcaggaaaatgaaacctagaaaggtgctctaaaaaatcaggatgtaattcagtaaaaaatgtttagtcaggcgaattaagattaatgacaggatattaaaccatggcmgtctttgatggaagagtgtgcacagaacagggtgtgtgtcctgtttaaccctgaatccctatcaccttgatctgtgcctggctcagaataggttctcaaatgatttttggtagaatgaatgtaaaagttcaggagtatcgctaatgggagatgtctcaaccaagctgaaattaatgtctgaattatgcaaagagatacttacttcatggttcagatttattatcaagatatatgccaaggcttttcagcttc

SEQ ID NO: 553129 - DNA, 797 bp, Homo sapiens
gaagtgagtttaattcgaattcctgtgatggggacttaaaggcaaatgaccccactttctttgtgaatgttagaacctattgtacagagctttcgtgagagttatattaagtaatatagatatagttattctaaagtgctgtataaaagtaaggcattattatcaggcagctaagcaaagtgaaaagctttaataaaacctatcctttactgactctaaggaggctttttaaaaaaccaacgtgcaaacatgacattattcgccgttaaaaagttaaggtttgcggaccaaatggctcaggaagcaataagatgatctaatatgtcaaggaagacattttaaaaaaggaataagtatattgtagagagaggtaggagacaatctacttcttttaaagagctgtatctattcataacatatttggaaaagtattgaattcaggaaaatgaaacctagaaaggtgctctaaaaaatcaggatgtaattcagtaaaaaatgtttagtcaggcgaattaagattaatgacaggatattaaaccatggcagtctttgatggaagagtgtgcacaraacagggtgtgtgtcctgtttaaccctgaatccctatcaccttgatctgtgcctggctcagaataggttctcaaatgatttttggtagaatgaatgtaaaagttcaggagtatcgctaatgggagatgtctcaaccaagctgaaattaatgtctgaattatgcaaagagatacttacttcatggttcagatttattatcaagatatatgccaaggcttttcagcttc

SEQ ID NO: 553130 - DNA, 601 bp, Homo sapiens
caagtagccgggactacaagcgcccgccaccacgcccggctaattttctgtatttttagtagagacggggtttcaccgtgttagccaggatggtcttgatctcctgacctggtgatctgtccgcctcggcctcccaaagtgctgggattacagacgtgagtcactgcgcccagccaaaaattattcctttgataatctttataaagtcactggtatagcaaattttttaattaatatgaatcataaaaataaaaatattatttaaaatatccttatattatttgatgggcaaccgattcaaggactttattaatcctaattccctcaacacgtattttttcaatgtctgtccatcttatttgtgacaatttcctcatttataagagaacagaaattttttttttttttttttttttttttttgagatggagtctcgccctgtcgcccaggctggagtgcaatggtgcatctcggctcactgcaacctccgcctccygggctcaagcaattctcctgcctcagcctcccgagtagctgggattataggcacctgccaccacgcctggctaatttttgtatttttagtagagatggggtttca

SEQ ID NO: 553131 - DNA, 601 bp, Homo sapiens
caagtagccgggactacaagcgcccgccaccacgcccggctaattttctgtatttttagtagagacggggtttcaccgtgttagccaggatggtcttgatctcctgacctggtgatctgtccgcctcggcctcccaaagtgctgggattacagacgtgagtcactgcgcccagccaaaaattattcctttgataatctttataaagtcactggtatagcaaattttttaattaatatgaatcataaaaataaaaatattatttaaaatatccttatattatttgatgggcaaccgattcaaggactttattaatcctaattccctcaacacgtattttttcaatgtctgtccatcttatttgtgacaatttcctcatttataagagaacagaaattttttttttttttttttttttttttttgagatggagtctcgccctgtcgcccaggctggagtgcaatggtgcatctcggctcactgcaacctccgcctcctgggctcaagcaattctcytgcctcagcctcccgagtagctgggattataggcacctgccaccacgcctggctaatttttgtatttttagtagagatggggtttca

SEQ ID NO: 553132 - DNA, 623 bp, Homo sapiens
tggctgctccaagacacacagagggaataacccccattcacatcaccaggaaatccttgcatggaggctaaatgaacagttggtaagagtggaccctgaggtgtcattccatctcccccagacttcctgcttgaccacacaatattcccagaagccagtgacccagaaggctcttcttggctttctgtccttttacctgtgaaaaattcgaagaactataaagtttagggcccatcacagtttactacccttctttggaggcctctttaaacccttgagtcttaccaattaccagtagcactaggagctttgcaagcctggccttaagtccctgctttgctactgaatagttggtgacctttggcaggttacttcccaacttgtgtctcagttttcctttttttaaaaaaggagacacagttgcaagtgtttaatgasacaaaaaacagaagcattcatcaccacgcctggcagtgaacactgcttttcttgctcaagaggtttgagccatacgcttctctaggtctgtgactctcccagagtttctgggagttcctctgtgagcaacagacccactgcagtctccatactttaggggtaagcctggatgcccttcacacatc

SEQ ID NO: 553133 - DNA, 1254 bp, Homo sapiens
gaaggaaggtgggacctggcgttcccataaggggggagagctgggcacctcatctcatccgtaagatccctctggcttcagagcgccctcctagcttctgcccaaaagcaccatgctgactggtgcacacacgaggctccctagaagatgatctcctcgtgaacgaaatgtcttccatttttttcggtaataatggagcccttctccccgctccgtgtctactgcctttccttcacaaaacagaagagaaaggtcagaactaatttgggccactgcccctctaaaggagagaagatggtcctgcatgctgccatgttttgggacattccaaatgccttgttggaggcgggcgctgaaggaaacccactcatttaattcacctcgtcattrgctctgccaaggagacagaatcagctctatgtcttcattttgcaaacatggaaatgatgttccgaaggctcagcatacctgattagggcaagaatgtggagaatgaaagcaccgtgggccctggttccagggttttccctgaacagaacattaatagaagatcgtgattcaggcggtgctgggtcagctcagggcctcagctgatagagcagtgttctcccgggagcaggggtcctgcaggggaagttatttttatgtggagttagacacatcatgattaataagaaccacgattttccataacctactatgcccaaccctgggaggggtaagcttattcccactttgcatgtagtgacattgaggtgcagaaggtttgatttgctgtccaaggccatgggagctggggaggggttttgaacactttcctgccagcctctccaagggaggattgctgttttgaaatctaacctacctgtcaaaaagtgacagtgccatcgtgatggaaaagaagttactcactgtaagggaaggattgctggggtttctttccattttcaggtcatggtctggacatggctgtacctcacccgcccacacaagggtagagacagcgttcagcaccaagggagcctgtccagctcctttctggaaggtgatcatttagcagtcttcaaaacgttttcaatcacctcttaattgttcacccaatcctctgacttctgggtgtgcaattaccccagcctcaaactatctgactgtccgtgaacatatttataaaatggggaaagcagtgaaaagccaatacttttcccgagttactagttagccacttttacatgtaagattcgctgagggaaacca

SEQ ID NO: 553134 - DNA, 1254 bp, Homo sapiens
gaaggaaggtgggacctggcgttcccataaggggggagagctgggcacctcatctcatccgtaagatccctctggcttcagagcgccctcctagcttctgcccaaaagcaccatgctgactggtgcacacacgaggctccctagaagatgatctcctcgtgaacgaaatgtcttccatttttttcggtaataatggagcccttctccccgctccgtgtctactgcctttccttcacaaaacagaagagaaaggtcagaactaatttgggccactgcccctctaaaggagagaagatggtcctgcatgctgccatgttttgggacattccaaatgccttgttggaggcgggcgctgaaggaaacccactcatttaattcacctcgtcattggctctgccaaggagacagaatcagctctatgtcttcattttgcaaacatggaaatgatgttccgaaggctcagcatacctgattagggcaagaatgtgragaatgaaagcaccgtgggccctggttccagggttttccctgaacagaacattaatagaagatcgtgattcaggcggtgctgggtcagctcagggcctcagctgatagagcagtgttctcccgggagcaggggtcctgcaggggaagttatttttatgtggagttagacacatcatgattaataagaaccacgattttccataacctactatgcccaaccctgggaggggtaagcttattcccactttgcatgtagtgacattgaggtgcagaaggtttgatttgctgtccaaggccatgggagctggggaggggttttgaacactttcctgccagcctctccaagggaggattgctgttttgaaatctaacctacctgtcaaaaagtgacagtgccatcgtgatggaaaagaagttactcactgtaagggaaggattgctggggtttctttccattttcaggtcatggtctggacatggctgtacctcacccgcccacacaagggtagagacagcgttcagcaccaagggagcctgtccagctcctttctggaaggtgatcatttagcagtcttcaaaacgttttcaatcacctcttaattgttcacccaatcctctgacttctgggtgtgcaattaccccagcctcaaactatctgactgtccgtgaacatatttataaaatggggaaagcagtgaaaagccaatacttttcccgagttactagttagccacttttacatgtaagattcgctgagggaaacca

SEQ ID NO: 553135 - DNA, 616 bp, Homo sapiens
agtaaaaatgcgctcttttgcgtcctttgacgaatgctgcctcctttcaaccgtctgtctgaggatcaatagtgggtctgtaaggagcgccagcatttgctagagcaggcagtgagatgatggattttaatcattcacatgattttataaccacgaaacaaagaaggcggatctggcttccacatgcataatctcagttttgctgtttttgattttgccagtcctacatgcaattcctgtctggaaggcgcatgtcccgtttccaaattccattccacacctccatgctttgcttctcagtgaccgatacgggcaacttgtgtgtttcattggggcccttttcyccattagccccagacctggagaggggtggcactgggaagtcctgagctgagcctcctggctggcgttgaggtgagtggggcatctcaggcgtaatcacctacagtaagcaagcttcagagtgagcggctctaacaatgggaggccaggcaatctgtgacagttgataggattattattattacagagcgcaaaaagcttctgctttcttttctgctcctttgcagacctcataaggcctctctgtgatttctgcatagttaatttgtcagtt

SEQ ID NO: 553136 - DNA, 2812 bp, Homo sapiens
caaatgacatacttattttagaagcagtgtgtatagattacttatttagaaaactaatagtaaaaggagagaaaaataggacagttgttaaaggggataccagaacatttgaatttttccccacatgaaagagaaactgcctattgtgtaagggggcactaggcttaagatcttatgggtaaattagtaacggaaagaaaagattctgagtaccagtgaccatggaggtaggtggctgctgacatggacagatagaaatacaataaaatatatatctaatgaaatgacacatgctgtttcatcacctgcttttttgacttcacactgattgtttttctatgtgtttgttccacatgtttacttgctaactgttaactgtagtattctgtgtaccatagctatgtaatcagtattttcagtttttcctcttttttttgctggtatcgatgcttgtagtgaatacttatatagatgtgttacatgtctttttacacaacacttggtttcctagaagtgcaacttaggttaaagattatgaactctaggctttttgcttgttccctccaccaccataacctcactagaggctattagagggttcatttccttgtccccttaccagtttcactatgcatgaaagaatctgtcaattcaataggttaaaaaaaaaaaaccacctttttttttttttagttactggtttatcctttttgactggactaatcatgtttgtttttctgtggtaggattgtcttttactgattctataagtgcttttatatagtaagtttattatagagatctttcctagttcacttacattttaattttatgtctttattattttaagtatttaggcagaatgatcaatattgatggtttttttttccttaaattttttgctaagaacggccttcctgagtgcttaattggccttgaaatagtctaaattaggaaacttgaaatcttgaagtcatctaaattatgcaggtaattcaggtgagaggatcacttgaaatacttgtatgtgactagggccaaatctagttaaatggaaaaaaaccaaagtggccgttattttatttaggcagttgaatatagtcttggataaaaataagacagccgtattcagaatttgtttttaaacacccacatctcaggaacaagttaattataggttataaactagatcaacaaattgtaagttttagtagagatacaaacttgtacttttgatgtgtgcattgtggagttttgrtgtaatttccaatttcacaattttcaattaacagtttccataatagagatatccttatatctcaaattccctttcacaattatatggatatcttatttgagaattcttctggaatggatcatctctaaagtctggtcatttaaagggcaccagtttaataaaagatgttcctttatttattagcggcagggtcttgctctgtcacccagggctgtagtgtggtggtgtggtcatagctcactgcaggctctaactcctgggctcaagtattcctgcctcagcctcctgagtaactaggactacaggcccacgccaccatgcctggcttttttttttttttgtagagacaagttctcgctatgttgcccaggctcgtcttgaactcttgggctgaagggatcctcctgcctcggcttcccaaagtgctgggattacaggcatgagccaccacgcctggtcaagatgttcctttagactgaaatttatatccagcatagttacctttaattatacaatgttacaggcaaaaatccttcttacttcagaaggtaaaagaagtaagtgattcctacaggctgtatccaaaaccaaatcaagttggagggagaaaatactccaaattaagttggagggaaaaaaatactttccctttccgtttttttttttttttttgtccctcccttccccccgcccaccatcccaattctgttctcaggaggggaaaggtttcattctcccccaaactcagacttctcaatccttatccattaccaatttaccaactaactgagactgtgtagaatcttcctctggaaaaaagggaagtgtatgaattctgagtagtgagttggttggtcagtggcgtgtgaagtaacctgatgaagcttagcgtgggttttttattttactgggggcagcatattggggaagagaaggataaccttactaaaccgcttgggtacgccaaccctgtgcaatagatattagcaacatagctaaccatacatggttagtaaatacaacccacacctaactgatgcatgtaaacattccacattacagtgaaatatattggtgtattaatgcattttaataattatggtattattttgatacctttcaaagtgtttggaataattgtgcagatagtcagatcaaccaaaacctaccagttaaatactatcctttaactgctttcttaacctaaaccaatcttggaaaggtaggattagaggccagaaagttaggattaaagtgtgttggatggatagatcagcacaatttcatccatgttggtggtaaggcttttcattaagtgtgttgatgcttcccttttaaattgtttccgcttaaataatctaactgtcctttctcaagcatattggtcaagatgatcaataccagatatcttaagtggcagctgaagagaattaaagagattaaaaaaaaaacctgatattcagtccaaccgaattctgctactgtattagctgaggaggcttgagccaaccacttgaccacttggagtctgaatcgccttatctataaaaacgg

SEQ ID NO: 553137 - DNA, 1374 bp, Homo sapiens
gctaaatgtggtcatcattggataccctggtaaatgataaacttaattatctcatgatagcatccaacagtcatgaaagctgatatagtttggagatttgtccccacccaaatcgtatgtggaaatgtaatttccagtgttggaggtgggtcctgktgggaggtgtttggatcatgggggtggatccctcatgaatggcttggaccatctctttggtgataagtgagctctagctctgagttctcgtgacatatggtcatttaaaagtacctcccactctctctctctctcttccccgccacccaggctgccttgctcctgctctggccatggccatgtgatgcgcctgctcctgctttaccttctgccatgagtaaattctccctcagacctccccagaagcagatgctcgtatgctccctgaacaactagtggaaccataagccaattaaataatctcttctcttataaattacctactttcaggtatttcttttttcttttcttttcttttctttttttttcttttcttttttttttttttttttgagactgggtcttgctctgttgcccacttggagtgcagaggtgcaatctcagctcactgcaaactccacctcccaggttcaagtgattctcctgcctcagcctcctgagtagctgggattacaggtgagcaccaccacacccggctaagttttgtatttttagtagagacagggtttcaccctgttggacaggctggtctcaaactcctgacctcgtgatctgcccgccttggcctcccaaagtgctgggattacaggtgtgagccatcgcacccagccaggtatatctttatagcaatacaagaatggcctaatacaaaagtatttgacattctaccaggggtgaggttggcatgatggtggccagaatctgtggttctcttttttcttctgattcaaattaattagggtgtatagtattatttaaaagggaaagagaacatggataatgtggaacaaaataaaagtctacaagaaaaaatgatgcctttaaaataggaacagttgtcagatatggcagcagtcaagcagaggaaataaggacacgcaaagtataatatatgcaggtgagattttaaaagcttaataaaatgaagaaagagcgaaagacagagcactagcaaacagtgcaggcttttttcaaaataaggtagcatcagcttcagatctgaggattttaaaaattgcttttcatctggtaacgtgaaaattagcataaggttttgaactacatgatctctcctatttcttccaagtctaagatcctctgtgaaattcaaaatagccatgtcatgatatattattttaaacagcaataaaaaagttt

SEQ ID NO: 553138 - DNA, 526 bp, Homo sapiens
gccctatggagacattgaataggaactacaagtgaagcccagaagaaaaacagattcttcagccagaagagcagcagagacccccactgacaattgtgttcatgactcatgtggagccaaggggatgctagctggtgccagcccttcacggggcaggaaattctatgttgaccctggctcaggggcaccttggctggagccctrcccctgtccagaggtcgctggcactctgtcctctaggagatggggagacagacacagagaaagagacagcatgcattccctacctggagtctgtctggagccttaagtgaaatgaggggtaactaaatgcaaacctacttagaacatctccctgccttggtttcctttcctcctccttttaccttcctctatcttggctttgctcttgttttgaggagatggtgaagacgagtcatatattagcaagagaaactgaatatatgactcaagagtcttctgaggtggaccaccagtgcccaaatttgatcttgtggtatatctg

SEQ ID NO: 553139 - DNA, 717 bp, Homo sapiens
ttcttgatagatagcatatgcattgaagttcagagcaatggcattttatttatgtcccaaggtactcaactggttaattaaaaaacaaataattgccgaaatcactaagtgacacggatatggtttggatctgtgttcctgcccaaatctcatgtcraattgtatttccaaatattggaggtggtgcctaggggaaggtaattaaatcgtggaggcagatttctcccttgattctgttctcatgagatctggtcatttgaaagtgcatagttcctccccactctcttctcccttgctactgctccagccacataagacatacttgcttgcccttcactttctgtgatgactgtaaaggcctctccagaagccaaacaaatgccagcatcatgcttcctatacagcctgcagaaactttagccaactaaacctcttttctttataaattaccagggttcagacttttttttataacaggacaagaatggacttatagaaaactgataccaaggagtgaggcatttctaaaaagatacctgaacatatggaagcaattttgaaactaggtaatgggaagaggttggaagagtttggagggctcagatgaagacaggaaaataagggaaactggaacttcctagagactggttgaatgatcaaggccaaaatgctggtagtgataaaaatggtgaaggcctggcagaggaagacacagat

SEQ ID NO: 553140 - DNA, 717 bp, Homo sapiens
ttcttgatagatagcatatgcattgaagttcagagcaatggcattttatttatgtcccaaggtactcaactggttaattaaaaaacaaataattgccgaaatcactaagtgacacggatatggtttggatctgtgttcctgcccaaatctcatgtcaaattgtatttccaaatattggaggtggtgcctaggggaaggtaattaaatcgtggaggcagatttctcccttgattctgttctcatgagatctggtcatttgaaagtgcrtagttcctccccactctcttctcccttgctactgctccagccacataagacatacttgcttgcccttcactttctgtgatgactgtaaaggcctctccagaagccaaacaaatgccagcatcatgcttcctatacagcctgcagaaactttagccaactaaacctcttttctttataaattaccagggttcagacttttttttataacaggacaagaatggacttatagaaaactgataccaaggagtgaggcatttctaaaaagatacctgaacatatggaagcaattttgaaactaggtaatgggaagaggttggaagagtttggagggctcagatgaagacaggaaaataagggaaactggaacttcctagagactggttgaatgatcaaggccaaaatgctggtagtgataaaaatggtgaaggcctggcagaggaagacacagat

SEQ ID NO: 553141 - DNA, 1102 bp, Homo sapiens
agaaattccccagaaggatccctgtcccctcccagcccctgcctgcccctccggtgtaaccgctctattgccatggagtcattttctgttcttcagagctttcctccgattcctggtcattcctcaatctccctggctttcctctttctctacaaatcctccaaatgctgatatttctagaagcccatctctggatttcttcttatgcccacactctccccagcggattattcttttgtgctagtgacttccagagtcacttctgagcaacacacctgcccctcccctccaagctgcctgctgggtatggccgcttggctggyctgctggcatggctaggtctcacctaatgtcaaactcctgggctccagtgattctcccaccttagcctcctgagtagctgggacgacaggcatgcactaccatgcctggctaattttaaaattttttgtagagatggggtttcactgtgctgtccaggctggcctcaacctcccaaagtgctgggattacaggcatgagccaccacactagggataggttttgcctgggacatccttggggagtctgggcaacctcacctcttcacatcccagtgttgtcatctataggatgggagtggcagctagaggaagaacagctagactctgctgacttctgagaggaggatgtggtcagatacccacaaatgagaacttgaaaattagagcaaccaaaatagagactcagcagccacggttggagaagccatggctgctgagaggcctgagtattggggaaggtgggctggaggacggggaaaggcttggcaggatctggacacaggggcaggaaagaagccagggatagtgcagtggctcagaagagaggacttggcccagaggtgggcatcaagaaggccgtctgggctggagctaaaggcatgggtagaaggaggaccattgattaagagaggcctgaattatcccaggaaattttaaaaaggggtggcttaatctggcccttaatagggggttagcagagaggctgccccacctctccactggagccatccccgtgtgcttctgacaggcctgtgcccagcctggctcaggaaccagcc

SEQ ID NO: 553142 - DNA, 569 bp, Homo sapiens
ccaggtaaaaactctgtgtcctcawcacaggaaaggcagcttgaccatttgaggtaatgctgattctgtcatatgcccatgtaaaacatatacccagaccagcattctctagcatacccagatggataaccttaaaaagtacttcagacactaaaaacactagaacaaagactaaaggattaatgaagatcaaagcaggaagcccaaagtttgactaaaacgagttcccaaaagagagaacaaagaaaatggagaggtacaaattgcctaaaacaatggataaatgtatttcaatgttaaagaaagacaagtgtcttcaagaaaaggcccaccaagctaaaaatataaaagaagaagatacaaattgaccttcatctaaagataatatcataacaaaaatattctaaaaatcttttgaagagaaaacaagaagggaagctataagaaattatacaaagcttgtcatttgagagaaaagccacatttttagttggaaagttttaactgttaaaagtcagctgtcttgaagttaacccaaaactttcatacaagcacaataaaattgaaag

SEQ ID NO: 553143 - DNA, 646 bp, Homo sapiens
cgcccgagttaaggtcatgctgcaccttgtgcaggaggatggaattcttcttgccgatgcggtccaggcggtcgatggccaccgtctcgaaggcgcgccgcatcatggggtactcctccagcacctcgttgaagttgtccacgctcagcgaaaggaggcggcaataggtgttggcccgcacgctcgccatgcggtggccccgggtgagcaggcagatctctccgaagtaggagccatcgaacagcttcatctccttgttgcccttagcgagcacgctgaccacgccgtgctgratgaagtacatcttcccgatggtgccttcgcggatgaggtagtcacccggctggaagacctcgaacttgagcttggtcagcatggccgtgacgaagttggggtcagcattggcgaacagcggcatggaggtcaccagcttccggcagttgaagttgacaatctcctcccgcaggggcccgttgagctcgcccaggatgctgtcctcgtcgaacatcttgccctggtaacggtgctcgtagtagtcgtggatcttctggcggaagtcggccggcagcttgtggaaggacatgtactgctccacctgcttgtacttctggtattggcgccgcgaggagtccagcgactggatgag

SEQ ID NO: 553144 - DNA, 471 bp, Homo sapiens
acctcccaccccctccacccccacccagcctcggcaaaagcagagccagcagggtcgtggatcaacaaagccagaaggactttgggtcatctaaaccaagctttcacttcacatacaagaaaactgaggtccacagtggcgtgcgacttgcctaaggtcacacagcaagtctagggtaaacctcggtcccggccatggggtcctgggagtccccctccaggttgagccagtccctttgccactccttccacctgggtgtagacatgccttcagccactcactccagggacatctggccttacccctctctgcttctcagttggtcccttcctagaaggttcggggaatggagtaaaaggcccattttatcataaccagaggtgtggcagagagyggggaagggagaaccaaaggaaaacaggtgtgagattattggaaagtcaagcagtctctctgtttcccatgaagttt

SEQ ID NO: 553145 - DNA, 585 bp, Homo sapiens
catgtaagtcattttctcaaatatgaagaaactggattcctagaacatcattgctatgattccatcacctttccccaaaggtagatctttcatccttgttgggttgagatgagaatgtgtcagctgctaagggaacccatatagctcaggctgtcacctccatctcccagtgtaccaggaggagtggctcccctggtcctctgcccacagctgccccgcagcaccagccacttccagcacactgccagcagaccctgggagaactggcatacgaaagaagtgctaactccagaggtagcactaggacccacaggtgcaaattgcaaaagaaaaagttcagttgcactctgacccttggaattttccaaacccggacaaggaggtctctgcagctgataagccccatctcaggagtgggcattgcttagagcccgcacagctctatggcctgagcctagtgttcatggcattatcaacaaccaaggctggcggcaggcatgaatgtgggggtggtgactatacaaggcttaagaaagagaaacgttctgtattytcaccagtactgtaaatggtatccttgtttcc

SEQ ID NO: 553146 - DNA, 627 bp, Homo sapiens
atttacaatgttattgtacaattcagctaagcttatccttgtaaaagtctcgagtaaaaagtataaaaactgtgtgtcatttatcaatcggcattattgggatgtgaatagcacactgcatgtgggctcagagaatatgggctaactatgggcctttccaagagaagtgggaatcactcacgacctttccctccttctgcaaaggcaaatttacaagtcttcttttaagcatgtcatattgatatatgcataaaattttggttttttaattgaacttattattgagataactgttgatttatatgcagttgcaaacaataatacagggaaatcctaggtayatttaactcaccttcccccagcaataaccattttagtatatcacaccagaatattgacatggatacaattcactgattttgttcagatttctccagtgttacttatacttatctgtgtgtctgtgtatgtatttaggcgcgtttagttctagataaatttaccacccatgttaagttcatgtatgcaccaccaaagttaagattcttaagagtactgatcaataaatacctacattaaaagagaagatgggcccaaataaatagcctaacattacacctcaaggag

SEQ ID NO: 553147 - DNA, 627 bp, Homo sapiens
atttacaatgttattgtacaattcagctaagcttatccttgtaaaagtctcgagtaaaaagtataaaaactgtgtgtcatttatcaatcggcattattgggatgtgaatagcacactgcatgtgggctcagagaatatgggctaactatgggcctttccaagagaagtgggaatcactcacgacctttccctccttctgcaaaggcaaatttacaagtcttcttttaagcatgtcatattgatatatgcataaaattttggttttttaattgaacttattattgagataactgttgatttatatgcagttgcaaacaataatacagggaaatcctaggtatatttaactcaccttcccccagcaataaccattttagtatatcacaccagaatattgacatggatacaattcactgattttgttcagatttctccagtgttacttatacttatctgtgtgtctgtgtatgtatttaggcgcgtttagttctagataaatttaccacccatgttaagttcatgtatgcaccaccaaagttaagattcttaagagtactgatcaataratacctacattaaaagagaagatgggcccaaataaatagcctaacattacacctcaaggag

SEQ ID NO: 553148 - DNA, 512 bp, Homo sapiens
gcctgaatctgcagtgtgcaatttttaggcgccccatatgatcagtcctggtggtgtttcaacttttagccttgatacttcagttacactttctcttgcacttggcaatgtagccacatttgccacaggttgacttctgaaggtggtaggcttcagagccacagcggtggcacatcgtgtgcatcttattgcgatgctttccagacgatgacgttctctttgtcatttggcttctgcagctgagaccaaagagtgtgtgtagctttagagaaatgtctgttcagactctttacctatctttaagttgggttatttgtcttattcattattgagttgtaggagttctttatatattctagatacaaggctattatcaaatatacatctgcaaatatttyctctcattttgtaagttgtctttcctttcttaatggtgtcctttgagaaataaagcttcccattttgacaaaggacaatttcattattttttcttttattgctgtgtttatcat

SEQ ID NO: 553149 - DNA, 625 bp, Homo sapiens
atgcttgacctctgtgaaggctttagcttaattaaacttgcagccaggggggacgaaacatagaagaggtggaaacaaatgacaatacaatggaaatttctcatcatgtaggcgtgtgcatagatatccatgtagactggcagctaattccactattgtgtggcaaaaaagaaaatacaataagattctaagatgccataatagcttttctgacaacaaaaagagaaaaagattaaggtgacagcatcgtcttctgcattacaaaactgagtatttctgctataaccatcattacaactaatggcgaaatattagacagcttcttctttattttgttattctgaagaggagggctgaaaaaaaatttaacattaactatataagttttactttctatttattctgaaactattttcaggtgtaatctccaaatattaattgttaaatctagaatctacttaggaagcctgacttccaaatgaacagggaggtgaagggggcaagaggggcaaaaatcaatgaggcagaatgttattcaaaagtcatgggcaacagttttaatgtataygtaaaataccacaggatacatttttaaaaccaattgatgaccctgtgatcccacaga

SEQ ID NO: 553150 - DNA, 543 bp, Homo sapiens
ctctggcttgtgataaacgttttaggatgttgtgaaagatagcagctcagtgtctgaaaaagaagaaataaccgaaatatttcatgtaccccataaacatatatacctactatatacccacaacaattttttaaaaataattttaaaaattctgaagctagaaataaaataaaacagaattgtaaagcaagtctggagaaaaaaaaatcctctaccatcttcagaactcccctgatgtaacctcatattaagtgctcaagacttgaatctaaatgaayggcaattgggaattatgaaagaaacaaaaataaaaagtggtgcaacattgtaagttctaactactgcaaaggtgactgtttacaaagaggttctttctacggggaagaatctactcccacaatcctgcttaattagaaaagactacttaaaatgcttgactggtactgactatatttcagatacgtattgggagaacacacctgcctggatgctaaatataccagatgtatctttatatttcatggaatagagattggtaatgga

SEQ ID NO: 553151 - DNA, 543 bp, Homo sapiens
ctctggcttgtgataaacgttttaggatgttgtgaaagatagcagctcagtgtctgaaaaagaagaaataaccgaaatatttcatgtaccccataaacatatatacctactatatacccacaacaattttttaaaaataattttaaaaattctgaagctagaaataaaataaaacagaattgtaaagcaagtctggagaaaaaaaaatcctctaccatcttcagaactcccctgatgtaacctcatattaagtgctcaagacttgaatctaaatgaatggcaattgggaattatgaaagaaacaaaaataaaaagtggtgcaacattgtaagttctaactactgcaaaggtgactgtttacaaagaggttctttctacggggaagaatctactcccamaatcctgcttaattagaaaagactacttaaaatgcttgactggtactgactatatttcagatacgtattgggagaacacacctgcctggatgctaaatataccagatgtatctttatatttcatggaatagagattggtaatgga

SEQ ID NO: 553152 - DNA, 493 bp, Homo sapiens
tactctgcacctttctgcctgaggccgcagctgctatccctgtgttcagatcctctctctcctttgccccttcccacacaggctggactgcagctcctggagtgctgcaccatcatttgctcccctttggaccctgcccagcaccctcagacagggtccctgctgcactcgccccaggtggcacttggggctaggctccgtggaaaagcagattccacaatggggccgtggtttcccaggccaggtagaaaggcagtgcttgctgaggggacttgcagaatggctgcctgagaggctcaggggttgatgggctcttccttctgactcctgaatctccaccagagccctgcacacctcagaaaggctagagctccagcatgcagacygcaagtgttgtgggcaggcctggtgaggcagctcggggtggtgggaagagctagaccccagctctgccatttgctggctatttcaagttccctctaccctctcagtt

SEQ ID NO: 553153 - DNA, 2587 bp, Homo sapiens
cagatttttgcctctcatctctaatctaacacagtctatgtcaaatagttacagcatcataacttctgtcccctttattcagaattagcaaagtctgaactgacttacctgaacaggaagaactagttgagtaatttcttttagtagcatggtagtggaaaattttagaatcatataaacttaggttgaaaattctgctcctttactctcccgccctgtgacttcaggtaagcttgttgatctttccaacttcagtttcttcttctgtaaaatagagatagtaggacctgccttatatattaaatatacatataaaccatagagatgcctctgaaattagcataagctcctttggaaattgaaaatggcaatatttgggataactttcactgtttatgtgtttgctgaaggtaaaaatatcagttaaaaatatctttcactgaaacaagaggaaatttactcttaaataggaatactttaygcatcgagcagagataaagagaatttacatgtgtctctaggttccttggcttccagtagtatctttatttgtgcaagttttgtgttttgtaaaagctagaaggtcaataatcaaaatggcatttgattgcttattcattatttggtggtgcaaacatgtagaacattttctgtttctatttctggcaaacggaagggatggtaaaactagacgcaatattggacgaacattagcggcccaggactggcctcagtcattgaaactttcattaagaactctgggcatgatggataatttttgtgtcaaattcacttagacatgaggtgcccagactaaacatgggtcctggttatgcctgtgaggctgtttctgtatgagattagcgtttgaatcagcagactgagtaaagcaggtggccctccaccgtgtgagtgggcattatccgattcactgagacccgaatagaacagaaagcacaggaagggtgacttcaccctctgcctaactgcttgagctgacacatcagccccctgtgctgttcttgactgggtcttataccatcgacactttggttctctcaactacatcactgcctctcctgggtctccagctgcagatggcagatcgtgagactttcagcccccataatcacatgagccaatttcttataataaactccctctctctccttctttccctctctctctgtctatatatatatatacacacacacacacacacacgtattaaatatatacgtgtatatatatacacacacacacacatgcgcgcacacgcacacacatactcttgattctgtttctataaagaaccctgattaatacaaagggcaatttcaaggatttgattatatatataaaatattaaatcacttatacatataacatcgtgtgtgtgtgtgtgtgtgtgtctccttttactgagttacctcctgatttttatgactttaggatgagaaccagggctatttttctaataacacagatacctttcctgagaaaaatcatcctagccatccacaatggcaaagatcacatatgtgtatgcatgttcatgtggtcacatatgtgtgcatgcatgtatacatgtctgcatgaccacatatgtgtatgcatgtgtattagggttctctagagggacagaactgatagaatagatgtacatataaaagggggtttattaaagagaatcaactcacatgattacaagataaattcccatgataggccatttgcacgttgaggagcaaggaagccagtggtgcatcagtccgagtcccaaaacctcgaaagttgggaagtaaacaatgcagtcttcagtctgtggccaaaggcccgagagcccctgaaaaatcactggtgtaagtccaagagtctaaaagctgaagaacttggagtctgatgttcgagaccaggatgcttccagcacaggagaaagatgaaagccagaagactcagcaagtctgttcttccatcttcttctgcctgctttattctagctgtgctgacagctgattagatggtgcccacccagatagaaggagggtctgcctctcccaatccactgacttaaatgttaatctcctttggcaacaccctcacagacatgcccaggaacaatactttgcatccttcaatccaatcaggttgacactcaacatcaactatcacagcatatatgtatatatgtttgtttaaaaacacagcaagatatcggaataagctttgtacactaggactatttgcaaagttattgtgtgaatataaagagctaatatatatcttaaaattttctgtagaggtagttgtatacacaggctgtaaaagtcagcatttttcctcatattattccagaacacataaaaaagcaacaaggaaaatggagaaaaaaagaaccaaatatatccttagtgaaactagaaaaagttagaatccaaagatttcaaaacgtatgtagagatgaccaaatctagttggaatcaggcacaagccacatgggagtaaatgaagtatggaggtagtgaggccaatggctgataatctcagaaaacaccaacaaaatgtactccctgaaaatttgggagtt

SEQ ID NO: 553154 - DNA, 2587 bp, Homo sapiens
cagatttttgcctctcatctctaatctaacacagtctatgtcaaatagttacagcatcataacttctgtcccctttattcagaattagcaaagtctgaactgacttacctgaacaggaagaactagttgagtaatttcttttagtagcatggtagtggaaaattttagaatcatataaacttaggttgaaaattctgctcctttactctcccgccctgtgacttcaggtaagcttgttgatctttccaacttcagtttcttcttctgtaaaatagagatagtaggacctgccttatatattaaatatacatataaaccatagagatgcctctgaaattagcataagctcctttggaaattgaaaatggcaatatttgggataactttcactgtttatgtgtttgctgaaggtaaaaatatcagttaaaaatatctttcactgaaacaagaggaaatttactcttaaataggaatactttacgcatcgagcagagataaagagaatttacatgtgtctctaggttccttggcttccagtagtatctttatttgtgcaagttttgtgttttgtaaaagctagaaggtcaataatcaaaatggcatttgattgcttattcattatttggtggtgcaaacatgtagaacattttctgtttctatttctggcaaacggaagggatggtaaaactagacgcaatattggacgaacattagcggcccaggactggcctcagtcattgaaactttcattaagaactctgggcatgatggataatttttgtgtcaaattcacttagacatgaggtgcccagactaaacatgggtcctggttatgcctgtgaggctgtttctgtatgagattagcgtttgaatcagcagactgagtaaagcaggtggccctccaccgtgtgagtgggcattatccgattcactgagacccgaatagaacagaaagcacaggaagggtgacttcaccctctgcctaactgcttgagctgacacatcagccccctgtgctgttcttgactgggtcttataccatcgacactttggttctctcaactacatcactgcctctcctgggtctccagctgcagatggcagatcgtgagactttcagcccccataatcacatgagccaatttcttataataaactccctctctctccttctttccctctctctctgtctatatatatatatacacacacacacacacacacgtattaaatatatacgtgtatatatatacacacacacacacatgcgcgcacacgcacacacatactcttgattctgtttctataaagaaccctgattaatacaaagggcaatttcaaggatttgattatatatataaaatattaaatcacttatacatataacatcgtgtgtgtgtgtgtgtgtgtgtctccttttactgagttacctcctgatttttatgactttaggatgagaaccagggctatttttctaataacacagatacctttcctgagaaaaatcatcctagccatccacaatggcaaagatcacatatgtgtatgcatgttcatgtggtcacatatgtgtgcatgcatgtatacatgtctgcatgaccacatatgtgtatgcatgtgtattagggttctctagagggacagaactgatagaatagatgtacatataaaagggggtttattaaagagaatcaactcacatgattacaagataaattcccatgataggccatttgcacgttgaggagcaaggaagccagtggtgcatcagtccgagtcccaaaacctcgaaagttgggaagtaaacaatgcagtcttcagtctgtggccaaaggcccgagagcccctgaaaaatcactggtgtaagtccaagagtctaaaagctgaagaacttggagtctgatgttcgagaccaggatgcttccagcacaggagaaagatgaaagccagaagactcagcaagtctgttcttccatcttcttctgcctgctttattctagctgtgctgacagctgattagatggtgcccacccagatagaaggagggtctgcctctcccaatccactgacttaaatgttaatctcctttggcaacaccctcacagacatgcccaggaacaatactttgcatccttcaatccaatcaggttgacactcaacatcaactatcacagcatatatgtatatatgtttgtttaaaaacacagcaagatatcggaataagctttgtacactaggactatttgcaaagttattgtgtgaatataaagarctaatatatatcttaaaattttctgtagaggtagttgtatacacaggctgtaaaagtcagcatttttcctcatattattccagaacacataaaaaagcaacaaggaaaatggagaaaaaaagaaccaaatatatccttagtgaaactagaaaaagttagaatccaaagatttcaaaacgtatgtagagatgaccaaatctagttggaatcaggcacaagccacatgggagtaaatgaagtatggaggtagtgaggccaatggctgataatctcagaaaacaccaacaaaatgtactccctgaaaatttgggagtt

SEQ ID NO: 553155 - DNA, 1086 bp, Homo sapiens
caaaaaaaaaaaaaaaaagaaaaaagaaactgttattaacagctctataccaacaaattggataacctagagtaaatggataaattcttagaaacacacaacctaccaggattgaatcaagaagaaaccgaaagcctgaacgaccaataacaaataaaaggactgaagaacctcccaacaaagagaagctcaggaccaaatggcctcacagctcaactcttccaaacattcaaaaaagaaccgggcgcggtggctcacgcttgtaatcccagcacttcgggagtccaaggtgggcagattacctgaggtcaggagttggagaccaccctgatcaacatagtaaaaccctgtctctactaaaaaaatacaaaaattaaccgggggtggcggtgcgtccgtgtaatcccagctactttggacgctgaggcaggagaatcgccttgcagtgagccgagatggcgccactgcactccagcctgggagacggagcgagagtctgtctggggaaaaaaaaaaaaaaaagaaagaaaaaaaagaaaacgaaaaccactgcaaatcataatgcattttgtccactttctgagaatgtgatttcctcttcctgtggaaacagcaataatttttatgagggggtgctgcccggaccccactggaggagtgggtaagatgaggattgtgctcggtgttgcctccctacagaaccacacatactgatctgtaatacctgtggcccctaagtgtccgtgaagggactggtccctttacaacattgcgtatggctgcggaaacccactatgtggcaacaagatgtatatgtgtgggttggtggtaaaaccattataggcaacggaaattcaaaatgttccagaactcttaaaagttcgcctcatgtagtatttggtttcttgcagggggmcccaagcccccggggctgtggtcagctacctgtcctgggcctgttaggcaccaggccgcacagcaggatatgagtggcccgcaagcgagcattccagcctgagccccgcctcctgtcagatcagcggtggcattagattctcatagaagcacaaaccctattgtgaactg

SEQ ID NO: 553156 - DNA, 650 bp, Homo sapiens
gagctgtgactccttgtgtgttagcctgtgtttctcatttttaaggtggcagttttccctgtgacctcaattctctgatccaccctagaagggttgactttcagtttgttcagcttttttctagctgtgaggacaagtgatgactgcctagctctttccatgttgaaatagaaaccyaaaagtttgtttaaagaattacttgttataaaagtcccccattgttaatgtacaactcaatgatgtaagttgatttatcgaattgtgcagccatcagcagagttctacttcagcatattttgtcacttcccaaattcccttgaacctgtttgtagtcatttcctaatccctggtccccatgactgggtctgaatagaataaacatttggaaagcagatttcattatatttacattttcctgtgtttgggactttatatagtggactattgtgttcgttttgtgacaagtagagaagagattgcattctagggatggtttttggggaaacataatagtagtcctgtttatggctctccttgaattggttcatctgtgctggtgactggtatttgttaccaaaccttgtctggtgagcacaagaaaaggaattttttaaaatctgctattaaaattgagatgatacattttcaca

SEQ ID NO: 553157 - DNA, 650 bp, Homo sapiens
gagctgtgactccttgtgtgttagcctgtgtttctcatttttaaggtggcagttttccctgtgacctcaattctctgatccaccctagaagggttgactttcagtttgttcagcttttttctagctgtgaggacaagtgatgactgcctagctctttccatgttgaaatagaaacctaaaagtttgtttaaagaattacttgttataaaagtcccccattgttaatgtacaacycaatgatgtaagttgatttatcgaattgtgcagccatcagcagagttctacttcagcatattttgtcacttcccaaattcccttgaacctgtttgtagtcatttcctaatccctggtccccatgactgggtctgaatagaataaacatttggaaagcagatttcattatatttacattttcctgtgtttgggactttatatagtggactattgtgttcgttttgtgacaagtagagaagagattgcattctagggatggtttttggggaaacataatagtagtcctgtttatggctctccttgaattggttcatctgtgctggtgactggtatttgttaccaaaccttgtctggtgagcacaagaaaaggaattttttaaaatctgctattaaaattgagatgatacattttcaca

SEQ ID NO: 553158 - DNA, 650 bp, Homo sapiens
gagctgtgactccttgtgtgttagcctgtgtttctcatttttaaggtggcagttttccctgtgacctcaattctctgatccaccctagaagggttgactttcagtttgttcagcttttttctagctgtgaggacaagtgatgactgcctagctctttccatgttgaaatagaaacctaaaagtttgtttaaagaattacttgttataaaagtcccccattgttaatgtacaactcaatgatgtaagttgatttatcgaattgtgcagccatcagcagagttctacttcagcatattttgtcacttcccaaattcccttgaacctgtttgtagtcatttcctaatccctggtccccatgactgggtctgaataraataaacatttggaaagcagatttcattatatttacattttcctgtgtttgggactttatatagtggactattgtgttcgttttgtgacaagtagagaagagattgcattctagggatggtttttggggaaacataatagtagtcctgtttatggctctccttgaattggttcatctgtgctggtgactggtatttgttaccaaaccttgtctggtgagcacaagaaaaggaattttttaaaatctgctattaaaattgagatgatacattttcaca

SEQ ID NO: 553159 - DNA, 559 bp, Homo sapiens
ggtgagaacactgaaaaagaataagaggatgaggacaggacagaaaggaagggagggtagtacacttatctaactttgtcctatatagctttgccttgtagaataatttctctaacttttctggaagaaagtacagttaaaattaaagtttaatataattatacttttaatatgagtttcctacatggttttaaagaaaaaaatatgaattatttttctgcaccttgtagttatccatgaataaactcagcttaaccactgattacactactctaaagtggtaacggtggtggctactgaggaaggcttaacctctgattttagccttatagaatttaacctaattactcsgtggaaataataatgattaataaatacaattgcaagatattttatgactgtaaaatatcaacatgtataattagttcactgggctaactcagattattttttctgtctgtgagactatcttctaagttacctgcccttctcctactcttatctcaggctccttcatatgctcttggtactataaaacttgtgcttttgaatcacattc

SEQ ID NO: 553160 - DNA, 877 bp, Homo sapiens
ttctaagattaaccttcttcagtactttaagaattggatatattctgtatgctgtgattattaaggaaattcataaaaaaaagggagaatggaaaaatattgatagtcataattagactttatcaatacaacctaataattatttgatgttctagtgaacagtagctcgtaggcttattgtttcctattatttactgccagagttggtaaggttagatgttaacttaatacaaaattcacaagttaccaataatttttgccactgagtatgaaaatgacttctatgtggtggaaatgattaccccaaagtkgcattttttcccattgaatgtgtgcatgtgcatttgtatgcatcctcatatcctcctttgaaagagctttgccatgcttcgtgtattagttttctccttaatgagttaaataaatgtgatcttttgacacattcttaatatatgagggtcaggtgttcagaggtttgaaaactaagctttgatataaaggaaaaaagaggatttagcacatgtggggctgtgagccttcacatagagctagcatggagaggattggcctcaggccagcctgtggccattctgctctaaggggcaacattagcccatatgcttgctaatgcttttatttatatttattgtgtatccgttatatatacagaatgtgctaggagttgcaactgtaattttggttactttaataagaatatcttctgttaaaatttttctctctctcttttttttttgcttctcctggacaactctgattcatgggcttaaattatcttagtatgctaattatactggaggactgggagcatatactagactgtgacatcctgaaaattcgtgagtgtccctgttgagtg

SEQ ID NO: 553161 - DNA, 981 bp, Homo sapiens
  misc_feature 881, 882, 883, 884, 885, 886, 887, 888, 889, 890, 891, 892,893, 894, 895, 896, 897, 898, 899, 900, 901, 902, 903, 904,905, 906, 907, 908, 909, 910, 911, 912, 913, 914, 915, 916,917, 918, 919, 920, 921, 922, 923, 924, 925, 926, 927: n = A,T,C or G
  misc_feature 928, 929, 930, 931, 932, 933, 934, 935, 936, 937, 938, 939,940, 941, 942, 943, 944, 945, 946, 947, 948, 949, 950, 951,952, 953, 954, 955, 956, 957, 958, 959, 960, 961, 962, 963,964, 965, 966, 967, 968, 969, 970, 971, 972, 973, 974: n = A,T,C or G
  misc_feature 975, 976, 977, 978, 979, 980: n = A,T,C or G
tgaaccacatggatggtttaaaattttctttgacaatttttaaatgtttttgaaaataacataaaattgcaataaaataagagcacccaatttactacatacaaaagaaaacaatgactaaataccaaaatcataaagcaaacttaagtagcctaatgtaaaggcacatccacagtttagaatattatagaaataaaaatataaatatatagacatataatgtctggtgtgttgaaaataccatgagaagatttttggtataatgttatgataaaaaaatatgattwaaaaaatctatctgtaggatagattttcttttaaaaggcatatactaacttgtgaacagccaatcatattctctggagatagaaatattaataggtcaacattattttcttttttttctctctgatattcaaccctgaggatagtactttgataactggggaggggaccaggagaggaagagtgaactttgttcaaaagaataaaagcagaaatgataaataggtttttaaaaagcttaaaagagaatggttatttttaattaagaaataaaaactaaatggattataatttaagaaaaaaacaaattaaatggcagtgtcatgttttaacaatgtcaagcaaaggaatccaagtgccagccttttgaagcaaagtttcagtagctgtcacctctcccctatattgttcccctaggttgtaaaagactgccaagaagttttcctttgaatgtctttcaataaaaaaggactgttaatcatctggacttctaaatctcttatactaatcagcatgtgtgctttagcagccttcaaattgaattagttggatttcccaggagagggtctaaagaacaaaaaaatccctcttccctnnnnnnnnnnnnnnnnnnnnnnnnnnnnnnnnnnnnnnnnnnnnnnnnnnnnnnnnnnnnnnnnnnnnnnnnnnnnnnnnnnnnnnnnnnnnnnnnnnnnt

SEQ ID NO: 553162 - DNA, 981 bp, Homo sapiens
  misc_feature 881, 882, 883, 884, 885, 886, 887, 888, 889, 890, 891, 892,893, 894, 895, 896, 897, 898, 899, 900, 901, 902, 903, 904,905, 906, 907, 908, 909, 910, 911, 912, 913, 914, 915, 916,917, 918, 919, 920, 921, 922, 923, 924, 925, 926, 927: n = A,T,C or G
  misc_feature 928, 929, 930, 931, 932, 933, 934, 935, 936, 937, 938, 939,940, 941, 942, 943, 944, 945, 946, 947, 948, 949, 950, 951,952, 953, 954, 955, 956, 957, 958, 959, 960, 961, 962, 963,964, 965, 966, 967, 968, 969, 970, 971, 972, 973, 974: n = A,T,C or G
  misc_feature 975, 976, 977, 978, 979, 980: n = A,T,C or G
tgaaccacatggatggtttaaaattttctttgacaatttttaaatgtttttgaaaataacataaaattgcaataaaataagagcacccaatttactacatacaaaagaaaacaatgactaaataccaaaatcataaagcaaacttaagtagcctaatgtaaaggcacatccacagtttagaatattatagaaataaaaatataaatatatagacatataatgtctggtgtgttgaaaataccatgagaagatttttggtataatgttatgataaaaaaatatgattaaaaaaatctatctgtaggrtagattttcttttaaaaggcatatactaacttgtgaacagccaatcatattctctggagatagaaatattaataggtcaacattattttcttttttttctctctgatattcaaccctgaggatagtactttgataactggggaggggaccaggagaggaagagtgaactttgttcaaaagaataaaagcagaaatgataaataggtttttaaaaagcttaaaagagaatggttatttttaattaagaaataaaaactaaatggattataatttaagaaaaaaacaaattaaatggcagtgtcatgttttaacaatgtcaagcaaaggaatccaagtgccagccttttgaagcaaagtttcagtagctgtcacctctcccctatattgttcccctaggttgtaaaagactgccaagaagttttcctttgaatgtctttcaataaaaaaggactgttaatcatctggacttctaaatctcttatactaatcagcatgtgtgctttagcagccttcaaattgaattagttggatttcccaggagagggtctaaagaacaaaaaaatccctcttccctnnnnnnnnnnnnnnnnnnnnnnnnnnnnnnnnnnnnnnnnnnnnnnnnnnnnnnnnnnnnnnnnnnnnnnnnnnnnnnnnnnnnnnnnnnnnnnnnnnnnt

SEQ ID NO: 553163 - DNA, 558 bp, Homo sapiens
tgagggtccattattggagcttaatttctttgggtggtgtcatatttctctgatttttcataatatgtctctgcattggtgcctgcacgttgaggaaatgaccatgtcttccagcctttgcaggtattctttggtggtgatcaactttcagaattttgtctagtctgggattctgggcctagctgttgtgacctagaacaggcagattttgatgttgggtcctttagctgggctgggctgctccctgtgctcagaggtcaaatgggtgtgccgggagtgccttgtggtccagtgagacaactggctgaactctgtggttaggtggagttgctggctaggtctgcagttacctctgatcrggcagggttgaaggctgtcttccctgactgggcagtactattgtttggaatctgtagtttgacagggttgtgtgctggggtctgaggttgagtgaggtctctggattctccgctctgccatttggggtgagcagggtcagacactgtgctccatagataggcatggacttgagcttgcctcctggtttagggtagcctt

SEQ ID NO: 553164 - DNA, 671 bp, Homo sapiens
tgtgcctggaaggaggcaaggatagacctgttctagttggaaaagaacggaggacctctgcccttaaggacagcctctggagagaacctgtgacaacagtagacaccgtctgtgtgcttaatggtccatgaagagttttacttaaaccaactcatgtgagccttacaataatcctaaaaggcctacaatgctgttgtcctcattaacacattctgtcattttttcgttcgacccatatttactgaacactgtctatgtgcaggcactgacggtaaaaatggtacacacagtttccaccttcacggtgctcttaatctactaggaaagwtccacaaccaacaaataaaccaataagcaaacatttaatcagggaaaatatttggctggtacatactggccaggctgattgttaaatatttgaataccatccccatatatacttacaagttgtaattaatgcagtgaaagcaatgaatttaacactgcagtggagaatcatggatatggggaactattttatataaggaggacaaggaagatgctctgaggagctgccatgaaagccagaacacaaaggacaacccacctgaaatatcagagcagttatgacttctctttcttggttgagaaagactgggccactccaaaagttaagtacgaaaatgacagga

SEQ ID NO: 553165 - DNA, 534 bp, Homo sapiens
cacaaagtgttgggattacaggcgtgagccaccgcacctggctgacttctgtctttacatttgtttattcttacgtcttggagcatggttattatagctgcttttgtctgcttttgccaatatttttgtcgtctcggagtagcatatgttgtttttctcttttcttgtagtaaagattttcctggtcatttgtgtaccaagtaatttggattgaatcctggacatttggaatattacgttatcagactctatgtcttatcataaggagaatattgattttgtttgttttatcaggcaatctacatagctaggttcaggcttcaagttctgaccctttcagggatgtggttccaaagttgagtctgttttcagagctttcgcwatgctatttggatccttctatagcttacgcaccactcagtggcaagcctgggacctggatgatagctagtcctatagttctataatcaaagcctttggtgtactgtttagggttagattcgtgcatgcacagctcagaggtgagccagaaga

SEQ ID NO: 553166 - DNA, 1840 bp, Homo sapiens
tggggaagacaagtgagtcacaaacattctgttgaagggaaatctagtcagttgcttgaaagagcacagcccaaataaaacaaggactgactaggtgtaatgaaataacctgtgatttaaaagaagagctgcagctttgacagtgcttatttaaagaaaaatactgctggaaaatttccaatttctactacgttcaccatctctagtaagatctgacatatgctgaagttatgttttgatttggcacacagcatgttcaatgatggttactcgcctagtacaagacatggagaagaaacctttggacacagagcagatgacacctccttctgttttgtagtgtatcctggtgtcattttctgtgaatgtggtcaggtagagttgtttttgttgttgttgttgggcttttttttctttttttttttttggtctcttttggtggggtgggggtgggctaaagccataggaagaaaaatgtgatgtatgtgtccagtatgtactattttgtttttgttttgcaagaagagttgaactatttttgataacaagagtaaatggtggaaaatgcttcttagttgtcttgtctttatttgctttccaagatttggaattttatttaattcctttaagtgttagcagtgtcttatgaaacrtgtatttacctaacgtttgtaacagttttgtgttgaacccagatgccctgctatataaagttgtaaatctgttctttattcactaatgatcactgcaaaaatgattagaaatgagattgtacacatggatgaggatatattttgcaaatcgaccaaactttcctaatattatgatcttaaaattcatagagtactttattgcttcccaagtttgataatcttgtgggtttttttttttttttgatgcatgggaggttggcaatatagacaaagtggaaatcattagtatgtgagggccttgattgttatgtaatattgccaatgatgaattcaggttgtttttagcacaagtttctcttttttatgctggtattctcactgccacatttttggaaacctgtattacaccttaaatctatcaataaatgatagttttctaattctatgttgtagaatactgaagagtttgggatagcatgctctgaatggtctgtattatatacatctggggaagagtaatcacagtgccttgatttttatattatttttctttataccacgagttacttaggaatgctgacaaatggctaacgagggatgattgagagattattactgaagtaactggatttacttcatcaggatttgaaaccaccaaagaacagcagcatttaataagacacatcctgaattgttgagtccttgttattaatataaatgatcaaatgatcttttaccttaggtaatagttttagagctgacaattttatctttttggttagccttattaagtctgcatttccgggaggaggtgtagtatggtcctagggataaagaattccttttatttcattgtattcttagttaaaacaatttattggtgaccttgttgaagaagagtaaaagttttatgggaatcagatgaaaaataaattgtccataaccatatcatagataaaaaacagaaatgctttagaaaatactaagttcaaagtatggtattttatacttttctctttttaaaaaaattaaaagctaggcacagtggtgtgtgcctgtaatctcagctacttaggaggctgaggtgggaggatcacttaagctcaggagttcgaactcagcctgggcaacatagaccttgcctctgaaataaaatttaggtaccccaaaacatgccgttacacatt

SEQ ID NO: 553167 - DNA, 621 bp, Homo sapiens
ggtgttcatcagaatgccaaaggatagagtggagacttaactgagtttgctgtatgacagttgtatgcctatttgcattgacatgtgttataggtagcaaaaaaataatatgtggaatcagtggcttttatacctatgtcaaacaattccctataataggcaacacttgaaatgtgcatgacctgtggagggaaaaaaatgttaaaactctgctgaagaacacaaaagaagacatgaacaaatggaaagatgtatcatggttttggataggaaaactcatagcattatagtgtctattctttctaaatacatttataagtatttataaaatatacatttgacttcaaacatatttttaaaaatatccagaagtttgaaaaagtagagcaacaaaaaggacctagcccaccagatattaaaacattctgtacaacttccagaataagaaacaacrtggctctggatactccagaagccataaaggaaaataatgataatttacataaaaagaaaagacttctgtatgttaaaaaaccataaacaaagtcaaaagaccaatgaccaggacaaaaatctacagttcactttggaaaggactaatttttatatataaataattat

SEQ ID NO: 553168 - DNA, 2138 bp, Homo sapiens
ttcatacagcaccctgaggacaatgtggcttccctgattcacacctactgagccaaggccccctctgaagttaggtcaagagggcccaccctagccgggccaactcattcctttgaggacctgatactcaatgaactgcttactaccaaaaaaatgcaaaggattcagcaaaaagtgcaatttccatttgagaagtaagattctccccaaaacatgacaccaccttttcatcctttcagtacctcaaagggaaagggaaataaaaggcatacagcactaaccctccgaaccacagccggggctttaaaagtgtggttcaccctttagaaccctaaaagacccattaacacgtccagtcagttatcgaagtgccagtgaggtgaggggcgtggcagagtcaggagggaccaggaggctggaagagcccgctcacattctcaacaggacacacctgtcctgtttacagcaggacacattactgtggcaacagccacaggactccagggacttggttattccttcataaaaccttgtcaacttcattgcctattggaggataaactcaaaacatcttcaaaatataacctgagccacaatataaaataaaaagaaaaaatcttttcatgttaatgccttaagaagtttacagattatgtaccaataaaataaatccacataaatttgaaattcttggtggatacacacctgaagcaaaaaaaaaaaaattaatctacattttaaaaatcaaagtaattacagcagcagtatagtgaaaaggttttaaaaataataattacatctttgatacaaattcaaactttgtacacctcaattcataggaatgactgtttttgagagcttagtgyatatatatatatatatatatatatatatatatatatatatatatatacacagtagattccgatatgtgtcacggcagagagagacgaaagccagtggactttggggaaggagggattaatctgacactgaattcacgctgaagtgttcacagattgccacgcttctgaacatacacacacacatacagacacagacacataaaatgccaacctgagtaaaacgttactaaaaacctagaacatcatgaatcactaattcacatattgcacctttaaataatccttcataccaaatacagacatgagaaaaaggataatacagggacaagaaaaggatttctgccactgtaggattcctctgcttctcccattcccacccacagaaattctcaaggtgatatttgagtcgccattctcacccaaccaatgggttgaaaatgttgccaacagaagagtctttggagaaaactgggagggaaaagggaagaaaaaatggagcacaaatgtacagggggcaggggaagcggagtcggggcaaagaggcctcccctgatcaaatgagaacagaaatgttactgaggaagcaaacctctgatgctaagctactgtttaaatattccgtatattccaattatgagattcagtacaaaaatatagatctctactgagttttgcctgtggaagcataattcagaaaaggcacatgttcaaatagaaaacccattcggaagaggtgccacgtacccctccctgcgcaatcatcatccacaattaggtattttccatcggctagattccaagacacagtaggtaaaaatagacctctgatacttaaaatatattcaacccaacacaatcctggctttagcatgtgaatcatataaaatagtcttttttaaaaaagaaattgttttggaaaaaaaaatcatagctcccttttcctggttttccacaatcctcaagggggaaaaaaaaaaaaagtgacctcatcccattggtcatcaggaatgcagatgatttgctccccacccatccacagcccccgacagccccaatttgtcatctatcatatgcagcttcatgccctcaaaattagttctcacaaaacagaacaaagaattaagatattagacatataaaaacatgtcgacatcggggcatgtgccttcgctgtgggtgcgacggtctggttcactccagaaaggttattcctttggaattaggcgatgtaaccattggtctttccaaatgtggtcacgggcgcaaggtttt

SEQ ID NO: 553169 - DNA, 961 bp, Homo sapiens
tgattttttttttcccagggtatttttttttctcatgtatatgtctatgcatttgtacatttctgttttaactttattttaggtaatatagcttatttatacatttcattagctggcttggcaggtcatcccctctccctaaatgattattcttcaaaaagcagtttcttatctatcttgtttttattccctatgaatcctcaaatcattttgtaaagaaaatttaaagttgctatttgctttttggttacaattacattaaaacgttagataaatttggaatttgacatctttatagggttttccattttgtttgtctttctcctaagtctgtgtgtgtgtgtrtatatatatatatgtattaagtaaaactgtatgaaattataatttttgtcagtccaacataattaacaacttattcaatctaatattaatatgtatgtttttatgcattattgctttggctagagcttcagaacattgttaaataagagtgatgaaaaagcaggcatccttatgtttttctgtttttttaagagaaaaataccttaagtgtttcattgtgtagtatgattggggtagttggttgaagttagatgttcttaataataggaaatttcttatatttttaaagagttttagttttaagagttattagggacagctactacattttatcccatggagttattttatgacctttttaccttaagctgtaggagcagtcctcttagctgcactgaactctcttggtgaatttatacccatgtctgttttccctctagtaaactcgtccagggatacccattggacttgggctgcctgcagctgccaggctatactcacacacttccacatttgctccatttagttaatgtgcatatttttatattgtggttttgtttttaactaaaactctttttaaaaagctattatatcgatatgatccctcatgagtatt

SEQ ID NO: 553170 - DNA, 631 bp, Homo sapiens
gctcatctcttctgtttcatcatacatgtttcacattataaacactccttgctttctgaaattattaatgacrcttcttcatgcccatagaggcccatgccaatgatctctacagacaaaatgtgttgcagaaatcacagccacaggtactcgaggctgacttatatttgcagcggtgctacaaggcaatgtgagctactgtaaacagcattcactccagaaggcctttctgaattgtgtggctcaaaggttgaagtcatttttttgaggcttttgtaaaagcaaacctagaattgcagttctgcttcatgcactcagtcttaggaatcatctcatatgttagtgtccagcgacagtctagccattctttacgaggaatgtggcacagtgtctgtatataatagcgattgcattctcgctccagaatgatcatctgctttgtatgttgatctttaaatcaccactttaaaattgtcataattttgtaagaaattggaaaataaatggaattctcaagggtatgaaggttttccatttaattttagagcattttttgaaaatgctgtcaaaagtatcttgttaatcatctctgaaggcagaagaaagattcatcacttgtaaatgtacatac

SEQ ID NO: 553171 - DNA, 644 bp, Homo sapiens
ccatgcagggtcctgcttactctccaagatgcaaactactatggcatgactttattttgagaacagagacactgttatggggcattgtaacctgggatcccctgcatctccacattcccaagaccctccttttatttcactatgcccatgccaaaggccagaacaccatgaccccagctagatcagtggtacaaatgtgaccacagcacttaaggccacacagtgccctgcatccccaaaaagaagtggtccagtacagctgggaggtcatttccaagacccaagtaactgasaagacatcccctagaacccaagaactgaccacccagcacccacaacagcctccacaaccagataagctgttgtatgtgccccctagagtccaaggactgttctgcccagcatctgccaccattggtcgccccaatcccttgaccagggagtcttccagagccaaagaactggcttgctcagcagtcctattccttagcaaagccacactgctgcctcaacaaacacccacaatctagatcactgaagcatttacagttaccactgatgttgattacagctgaagaaatcatgaagagacaaaaaaaaaagaatgaataaaacctttgggacttagggatcaccatattcgc

SEQ ID NO: 553172 - DNA, 644 bp, Homo sapiens
ccatgcagggtcctgcttactctccaagatgcaaactactatggcatgactttattttgagaacagagacactgttatggggcattgtaacctgggatcccctgcatctccacattcccaagaccctccttttatttcactatgcccatgccaaaggccagaacaccatgaccccagctagatcagtggtacaaatgtgaccacagcacttaaggccacacagtgccctgcatccccaaaaagaagtggtccagtacagctgggaggtcatttccaagacccaagtaactgagaagacatcccctagaacccaagaactgaccacccagcacccacaacagcctccacaaccagawaagctgttgtatgtgccccctagagtccaaggactgttctgcccagcatctgccaccattggtcgccccaatcccttgaccagggagtcttccagagccaaagaactggcttgctcagcagtcctattccttagcaaagccacactgctgcctcaacaaacacccacaatctagatcactgaagcatttacagttaccactgatgttgattacagctgaagaaatcatgaagagacaaaaaaaaaagaatgaataaaacctttgggacttagggatcaccatattcgc

SEQ ID NO: 553173 - DNA, 644 bp, Homo sapiens
ccatgcagggtcctgcttactctccaagatgcaaactactatggcatgactttattttgagaacagagacactgttatggggcattgtaacctgggatcccctgcatctccacattcccaagaccctccttttatttcactatgcccatgccaaaggccagaacaccatgaccccagctagatcagtggtacaaatgtgaccacagcacttaaggccacacagtgccctgcatccccaaaaagaagtggtccagtacagctgggaggtcatttccaagacccaagtaactgagaagacatcccctagaacccaagaactgaccacccagcacccacaacagcctccacaaccagataagctgttgtatgtgccccctagagtccaaggactgttctgcccagcatctgccaccattggtcgccccamtcccttgaccagggagtcttccagagccaaagaactggcttgctcagcagtcctattccttagcaaagccacactgctgcctcaacaaacacccacaatctagatcactgaagcatttacagttaccactgatgttgattacagctgaagaaatcatgaagagacaaaaaaaaaagaatgaataaaacctttgggacttagggatcaccatattcgc

SEQ ID NO: 553174 - DNA, 653 bp, Homo sapiens
gcagcctggtaaccaatgaaagaaggaatgctgcatatgctgtggtaaccttttcagaggtaatagaagtaaggacttcaccaatatgaacctctgcacagaaagcagaactgattatctttactacagccctgcagctagctgtcccaagtaaacaasgctcttggagtaaattggaaactcacacagcatggaaaccacaaccttctggacagactgaaaggatgaatcaaacacgaaaacagtgccaaactgtgccaactaaaatggattcaggtactcagcattgtactgctttgggtaagtgacccctagaagtgggatgaggttaaatccctataaaattataaatgggagaccctttgctgctaatctgtcttgggttacttgggtacctcttaatagaaagccaactattaaacactatgctactcacttgggacaaatacttaatgttttgcataagcttgcttgcaacaggagtatcgtaaactcagcgaaactgtgtcacttgtaccagcctggtgatcaagtgctgctgaaagaataaagagaaatgagcccaagtcagcagctacaggagaaatagaaagggccccatgacatgctgctgactaccaatttggcaatgaaactggctggcatcaagccat

SEQ ID NO: 553175 - DNA, 613 bp, Homo sapiens
tttgtcttctaaactaggatctatttcaacccagaccatgcatccatccacatccgtctaaccaggaaactctcaggcactgtgcttggtggtggagagacagagtcaataagacattatagaaacagatgcgagtgtaatgctgccattataattacagggccatggacttattgcttcactttctaagcctcagtttcctcagcttaaaattgtagctgaagataggtacttttgacagttgtattggggattagaaataatgtaagtaaattccctggaatgctcaataagtaacacattactattatgaaagactgctagaggagragacctaactgaaggttttggtgtagtgcaattagtgccacgacataagaaagcatgggatgttacagaagaagggaaggtttctaaatcaatatttagggaaggtgtaaaatgaagttccagaatttgaaggatgagtaggatttggctaaacggggaggggaggaagagcatttctggccaagagaaagcaacgtgtactaaggcatggaggtgtgaagtgccattacgtgtggttttggaagatccatacaaatggaaataaagaatgggtttaaaggtt

SEQ ID NO: 553176 - DNA, 680 bp, Homo sapiens
aaacataaagagatgacatgtttattatgcacatcaatttacccaattttctcaatgtatatggacaatatatttaattcatataccttataaaacacaataccttataaaagtacaatataaaagtacattagtactttttaaaagaayatatgtagatcttgtgtatgtacaattccatcatacactcatatacatactcatacgtatatacttgtatatgcacagaacatatctgagaagctatttaagaagctgttaactaccctaagaatgtacctgaggtatctgatagtggagagggagcaacacttttatttctgaactatattaaaatacattattttataattaaaattatttttaaatcctccataaggtggattattaacaaatattttattaatttgttcaatttattcacatttcttaacttattctttctataataagtaactggaaaacaagtggttatatttcccaatgattttatttttgattaaaactaagaaaaaatatatatactatactgactaaaatgtactctcaaaaagatttataatagtgtaattgtgaaaccccaaaaggcaaatatattaatagaacactgcatgctagtcaacaaccatgctacatcatttcttaacaaataccattaaagcatttccaaatgttagcaa

SEQ ID NO: 553177 - DNA, 539 bp, Homo sapiens
tgcagaaacaagtatagatttttcagatctttgtgcaagactcatgatttactgagaattcatcttcaaatgaagcttttctttcaagccactgcttgttaaggcagactttaaacatgtgctctggatcaaagtgtggccaatgttagccactacagtaagaattaagctctgctctccttttgtttcacataacaagctatattaactgctacagaaaaatcaggaatccccaagttctgattggctattttgttacttccttgtctgtttatgctcataagccatctatcaacttgaattgtgtaggcacttgccattgtgcctatagtcatgaattgttcacttgtttagacttactgagaattcaactttagggtcattcaattcctgacctctctgtacagtatcacatctagggcccagttgagatgaagcagcaacaaatgaagcattttaaatgacacagcataagccacaattatcaaaatgagtccaatgtaagtcatgcttatggatgttattctagtcctgyaaat

SEQ ID NO: 553178 - DNA, 425 bp, Homo sapiens
  misc_feature 392: n = A,T,C or G
atccaagaggcagttgctgagtttatctayagtgtctctaggaccctagggcatctcatacaagcagaaaagggggagaagcaggtcctaaaactgtggctgcaggaacaatttgcttttgcatttgaagtggactgctcccttaccaggcagaaacagagctgtctcacacaaagaaagagttggttcacaaaagagataattaataaatgagctgtgctgggttttgtgttttgattgttgtttcttgggcttaataccgtttgaagcaataagcaatggtgaaagaattctatgcggacaggtcattctcatctttggccacactcctgttcattggttggagggtatacaacacctatctctgatggttatcacaggaatcagactangcaacatatggatttgctcactggccacatgca

SEQ ID NO: 553179 - DNA, 425 bp, Homo sapiens
  misc_feature 392: n = A,T,C or G
atccaagaggcagttgctgagtttatctacagtgtctctaggaccctagggcatctcatacaagcagaaaagggggagaagcaggtcctaaaactgtggctgcaggaacaatttgcttttgcatttgaagtggactgctcccttaccaggcagaaacagagctgtctcacacaaagaaagagttggttcacaaaagagataattaataaatgagctgtgctgggttttgtgttttgattgttgtttcttgggcttaataccgtttgaagcaataagcaatggtgaaagaattctatgyggacaggtcattctcatctttggccacactcctgttcattggttggagggtatacaacacctatctctgatggttatcacaggaatcagactangcaacatatggatttgctcactggccacatgca

SEQ ID NO: 553180 - DNA, 520 bp, Homo sapiens
gtttttaaggccttttaatttattggatcaggytcaccccaattatttggaacagtttccccttagattcaactgatggtagatgttaatcccatctataaaatacattcacagcaacatctagatgagtgttgggttgagtaattagagactatagtggaaatacaataaaagaaggtgaagcagagaaaagaataagtactctagcctggggatcaggaaggtttcacagtggaatctcacatgagctggacttcagaacatcagtggtactttcctgagaacaaaagcagagttgggcatggcaagcctaaggaatagcatatatgaagaggcacaagcacaatgtccctagagtccagggtgaaaggagcataggagtgtgtggcagggaagagaggtggagggaggtaggggaggtggagatgtgagagggtggtaagatgtaaagccatcttctgaaagccgatatggcatgctcccaagtttggcctttatcctgaaggcagtgagaggcaga

SEQ ID NO: 553181 - DNA, 520 bp, Homo sapiens
gtttttaaggccttttaatttattggatcaggctcaccccaattatttggaacagtttccccttagattcaactgatggtagatgttaatcccatctataaaatacattcacagcaacatctagatgagtgttgggttgagtaattagagactatartggaaatacaataaaagaaggtgaagcagagaaaagaataagtactctagcctggggatcaggaaggtttcacagtggaatctcacatgagctggacttcagaacatcagtggtactttcctgagaacaaaagcagagttgggcatggcaagcctaaggaatagcatatatgaagaggcacaagcacaatgtccctagagtccagggtgaaaggagcataggagtgtgtggcagggaagagaggtggagggaggtaggggaggtggagatgtgagagggtggtaagatgtaaagccatcttctgaaagccgatatggcatgctcccaagtttggcctttatcctgaaggcagtgagaggcaga

SEQ ID NO: 553182 - DNA, 559 bp, Homo sapiens
atggtacacatctatgttttcccacattataatgatatgttaatgtatgcatggatatggttaacttgttagagacaataatttaattatagactcagacattccacaacataaacaacttatcatggaaggaagacataagaatggctcaaacattcagatttagtatgagtataattatgaaataatatgccaattaggaaatgcaaataccttttaagaaaaacaaacattttagaatatgttatgtcttctcctagaaagcatacattagtgaatcagagaggaaaaagaatatacaatctttsggttcatggcaagttagtttctgtttctctctcttcgaattacatctatctgtcttggtctcttgctatctctgatttattttctttgctttatatgaactagggctcaaactccctgtgaagagtcaactttttgcttttccttagtttagactacccattcaatataaatcttgtaatcctgatagaaagtctgtgagaattctaagaattctaagaatggcccccaataacccctcacccttgcaaaa

SEQ ID NO: 553183 - DNA, 903 bp, Homo sapiens
atggaaaattttataaattgtaaattaaatttacttacttaacaggtataaagctattcaaattatctwtttaatctttggtgaattattttagtttgtattttttaaggaatttttccatttcatctaattcatgaaaattatgttgtagggctgtttgtagtattcttctcttacggaatgaatatttgtttttcctgctcacaaatttatatgtaaagtcgtaacctctcaatgtgattgtatttggagctgtgacatttggaggtcattgggttttgataaggtcatgaggatagtgtgctcaggatagaattagtgtccttataagaggaggaagataccacctctctctctctttctcctccacgtgaggatgcagagagaagacagcactctccaaggtagaaagagggccctcaccaaaatctgaatattctggcacctcgatcttggacttctcagtctccagaattgtgagaaattaatgtctgttgttttagccacccagactatggtattttgttgtagcagcctgcattgaacaacatatctattatccttttgacatttgtaggttttctagttttatctctcattttaaaaagtatttttagtaggccgggcatggtgactcactcctgtaatcccagcactttgggaggccaacgcaagcagatcatctgaggtcaggagtttgagaccagcctggccaacatggtgaaaccctgtctctactaaaaatataaaaattatctgggtgtggtggcgggcacctgtaatgccagctactcgggaggctgaggcaggagaatcacttgaacccaggaggtagaggttgcagtgagccaagatcatgcccctacactcagccagggtgtcagagtgagactccatctcaaa

SEQ ID NO: 553184 - DNA, 903 bp, Homo sapiens
atggaaaattttataaattgtaaattaaatttacttacttaacaggtataaagctattcaaattatctatttaatctttggtgaattattttagtttgtawtttttaaggaatttttccatttcatctaattcatgaaaattatgttgtagggctgtttgtagtattcttctcttacggaatgaatatttgtttttcctgctcacaaatttatatgtaaagtcgtaacctctcaatgtgattgtatttggagctgtgacatttggaggtcattgggttttgataaggtcatgaggatagtgtgctcaggatagaattagtgtccttataagaggaggaagataccacctctctctctctttctcctccacgtgaggatgcagagagaagacagcactctccaaggtagaaagagggccctcaccaaaatctgaatattctggcacctcgatcttggacttctcagtctccagaattgtgagaaattaatgtctgttgttttagccacccagactatggtattttgttgtagcagcctgcattgaacaacatatctattatccttttgacatttgtaggttttctagttttatctctcattttaaaaagtatttttagtaggccgggcatggtgactcactcctgtaatcccagcactttgggaggccaacgcaagcagatcatctgaggtcaggagtttgagaccagcctggccaacatggtgaaaccctgtctctactaaaaatataaaaattatctgggtgtggtggcgggcacctgtaatgccagctactcgggaggctgaggcaggagaatcacttgaacccaggaggtagaggttgcagtgagccaagatcatgcccctacactcagccagggtgtcagagtgagactccatctcaaa

SEQ ID NO: 553185 - DNA, 600 bp, Homo sapiens
ttttgagacagagtcatgctctgtcacccaggctggagtacaatgatgggatctcagctcactgcaacctcctcctccctggttcaaacaattctcctgcctcagcctcccaagtagctgggattacaggctcccgccaattttttaatatttttagtagagatggggtttcaccatgttggccaggctggtcttgaactcctgaccttaggtgatccacccaccttagccacccaaagtgctgagattacaggcgtgagccaccatgcctggcccctataagcttcttttaaagggcagttaacaaatagcaasgaagctaccaaagcactggagctcataacaagctgcctgtccttggccacctcgcttacctttcttgagactcactttcttcatctaaaggatgaagatgataatatctcctcaggctgcctcacagatcaaaggaaataatcttgaaagtactttgtaagctgtggtgttttagacaaacatactgcaggagttttagacaacataccctcaggattagcttgttccaggccgggctaccccatcccaatccttgtagccatggagaggagatggggtggagcc

SEQ ID NO: 553186 - DNA, 570 bp, Homo sapiens
catatccatagaggtggcatcctcatttgattcccccaaaattcagtattgtagggacaattattatccccattgcatagatgaggaaatcaaggatgggaggccagaatttaccyagcaaagagtcagtgttctatccaagtggctttggagcaggaagtaagcgagagaaggaaaaacagctttgtatcacatgagaaagagcagacactaagaggctctgtgcagtgggctttcctgctctaaacagaagacagcgagaggggtccggtagagtgcaccaacctgggggccgggaggcccaggggagcctagcgagccttgcatgcacggggactgcgaggtctccagttccagcatgagattcttcatgtctggggagagaagcttcagtacaaagcaacacagagttagaggtcaggcgtaggggacagaggaagggtcaccatcctggacacagacctgctccgggatcaggtctctaagcctggcagttccctgacaccccaatgactgccccaagaagatgacaccttgggctaccagtttctgttctctcatctgctcttg

SEQ ID NO: 553187 - DNA, 656 bp, Homo sapiens
ttttttgagacacagtctcacgctatcactctatcatccagactggagtgcagtgacacaatcatggctcactgcagcctcggcctcccaggctcaggtatcctcccgcctcagcctcccaagtagctgagactacaggaatgtcccaccacaccaagctaattttttttttaaaaattttacagagacgaagtttcgccatgttgcccaggctggtctcaaactcctgggctcaagtgatccgcctgccgcccaaagcgctgcaattacaagcatgagccaccacgcccagccgtgaaaaattaattcttaaaaaaggtaaggatcagcgttgagtgtgcatttacagaacagaattcaacagatacctttgtttctttttttctttttctttctttctttttttttttgagagagtctcactctctcacccaggctggagtgcagtggcgcgatctcagctcactgcarcctccaagttcaagtgattctcctgcctcagcctctcgagcagctgggactacaggcgcatgccaccacgctcagctaatttttgtattttttggtagagacagggtttcaccacattggccaggtgggtctcagaattcctggcctcaagtgatcctcaagcctcagcctcccaaagtgctggg

SEQ ID NO: 553188 - DNA, 652 bp, Homo sapiens
ctgagccatttgagtgtgtcaccatagtgctttgcccttaaatacttcaggatgcagstcctaaaaataaagatgttttccaacctattcacaacactgctatcacacctagaaaaataacagcaattccataatatataatctcaaagaaccagagtaagaggttagcggtcaacacagcgaggctgagcactgctcctgcttgagaggagctggagtggggctctggagaggaagtttggagcaagattgttgtgttgacacagcgtcaaactctgtaaaacatttggagatttattttgagccaaatgtgagtgaccatggcctgtgacacagtcctgggaggtcctgagaatatgtgcctgagagggttggactacagcttggttttatacattttagggagacatgagacattgatccacacttgtgagatgcacatcccttcagtctagaaaggtgggacaacttgaaggaggactttcaggtcataggtagattcaaagattttcggatgggttgaaagagtttatctaaagccctgagatcaacagaagggagtatctgggttaagatatggggttgtggagaccaaggttctccaggtagcaggctccagagagaatagattgtaaacatttcttatcagact

SEQ ID NO: 553189 - DNA, 652 bp, Homo sapiens
ctgagccatttgagtgtgtcaccatagtgctttgcccttaaatacttcaggatgcagctcctaaaaataaagatgttttccaacctattcacaacactgctatcacacctagaaaaataacagcaattccataatatataatctcaaagaaccagagtaagaggttagcggtcaacacagcgaggctgagcactgctcctgcttgagaggagctggagtggggctctrgagaggaagtttggagcaagattgttgtgttgacacagcgtcaaactctgtaaaacatttggagatttattttgagccaaatgtgagtgaccatggcctgtgacacagtcctgggaggtcctgagaatatgtgcctgagagggttggactacagcttggttttatacattttagggagacatgagacattgatccacacttgtgagatgcacatcccttcagtctagaaaggtgggacaacttgaaggaggactttcaggtcataggtagattcaaagattttcggatgggttgaaagagtttatctaaagccctgagatcaacagaagggagtatctgggttaagatatggggttgtggagaccaaggttctccaggtagcaggctccagagagaatagattgtaaacatttcttatcagact

SEQ ID NO: 553190 - DNA, 637 bp, Homo sapiens
tgctgagctcaggaggcgggtcagactacctggtggaggggaggcgcaaaccctcgcaagagggatgcctggtagaggagtgcgagtggggctgggtgcaccggcgacggtattggtgcctggtacttccctgattctgtgccgtgggagctgttcgggatgttaaactcctgggagatcaggctgaggacgacagtcactacttgtgcctgcgcagcatcctctttgccataacaacgaccccagtttcctctggagaccaccctgttggcagccatgtgttcatggggcctaggagtggaacacgtggccgggaccatcagccagcacagtccctttcctgtgaccacagccccggctctcagcagactgccagcaccttgagggcagggtctgcatgccactcagctctgggtgyggcacaatggtggctcccagacctggcctacctgacaaacccccaggggcccctgcccagggctggtcccaggcatttatatttttaataagctctgtagggaatatgaataattagttttgggaatggttgctgcatggtgtttgtatacagtaagtgctttatagttgctggtgtaatgggaaagactggagtcagcttcccaggagtgatcatcct

SEQ ID NO: 553191 - DNA, 1121 bp, Homo sapiens
gagttggtgaggaacaagacaaacacaaagaggaatttcttacaagaatatgccaagtattccatagtctctttctttattggaaatagggaaattagttgagattactgcattatccaggtaaatattgttcagactagagtgatagttgtggatagggaaagaggtgaacagatactctggagacagaattgacaggacttactgaaaggttggaagtgattgtgaggaagaggcaagaaggagagctgaccccagagtttctggctagagaagaagatcagaacagtcctgagaagggagatcaagaatttaattctgaaaaggggaactagaagaaatcacccatgtacacttttgcacttatatggcaagactggartacagaggagattggcacgaacccttagcatgaatgatacatacatttacaaaatgtttcataattttaatcacattcctaaaaagtataaagaaaaaacaaactaaaatattattactatgaaagattaatggagtaaaatcaagtgtactacttcatacagtaaagcaaattaatataatcctcttatggaagagcagaatgacaaatttttttaaaaattttaaaggattttaaaaagttatcgattattttcaataatcataatgctataaataaaattagaaaacatggagatggtcaaagggatgctaaaacattcaaattaaaaaatcaggagttgcagtaacatcattcagggtgaaatacaaggataaggaacttagtaggaccaaaagacaatatgtatgattaaaagcattgttatgaagaaaatatagcagttataagttcatgcatcaaacaacatggtcactcaactcaggttaagtgaatatcagaaatatttatcacaaaaatatgataaaatacctttatgctttcatgctgagactttaatatacctctttcagaatctcacatacctagaagataaataaacaatgtcaattattaataatactattaaaaatcttcattttacgttggttaagattgagatatctccatatggagatgttgggtaggcagcccagggctcagaacagcacattacaatacaacatataatgctttaatg

SEQ ID NO: 553192 - DNA, 631 bp, Homo sapiens
atttagctttaaaagccttttgcgttctagtctgagaaagtagccttgttttcagaatcttaccaatgtaaaagtgtgtacccaatggaaacagatatttggaccacaatacatccctgccctgctctgattccttccaaacgatcccttctagatcatgcctgaagacacaccatctccattttctgtcatttctttgatcatccttgtctctcctgtttgaattgttcaacatcactgcataaagattgaaaaccagactgacagtgatggtgacgaatcttccaatagcctgatggccaaattaccaaagatctgggacaatcctgtagcatatatgtcacacctttcatcatcttttcaaaaatcctgtcagcaacaactttctgcagacccctgtgacttagaaaatcaccattctataaactacagaaatgaataccagatgtgtgctagctgccctgggaaattcagaagtgtcagtttaatatcctgggtgttgctgcccaatcctgaaaagtcaattccagttataaaactttcagtagactgccacaaatccctgaatgttctcttcagttcaagtagagcaaaggtaatgggccmctggagaaaagcagggaaaaataat

SEQ ID NO: 553193 - DNA, 981 bp, Homo sapiens
gaatacggatgtgtttcatccactcataatyccttctcaattattcaaagttctgtttccactacaatctttcagatcctcttgtgtatcattcatctgtaagaatgttggcggtatttctgcgtactccaaggcgacagctgttagtatgaatctcttctttttttcctctccccaactagaatcagaagccctttcaggtcaggactttcttgttcacttgttcaacctatattcctaccacctggcactgggctctatctagaggaattggaaaatgcatttaataataagggtggaaatatttctgagggcacattttctaagtgaggaaacgaataagacttttttttctctcactctttggaaagactatgatcataaggctaaaatatgcattacctaatctactatgtctatctcttagcaatgttttttaacagaaagccaccatatatctctgtaattatgttgttagagtatgtagaaaagacccaaattatattatttcttttaaatcttagagatattattacatattaatcattttttctttatggtctccaagacattttttagaggtgtctacataatgttaagtgagaagttttatacaggggtagcaaacacaatgcatcacaccatctttaagagtgaagttacatgaggttttttccaaaagtaaagaccaccatttgtttgcttgctcatttattcagcaagcattcattctagactctggaacgtagcagtgaataaaagcacttctgcaaaataaaatacatacaatgtaaattttttttaatctctggggaaaaatataaagccaggtaagggatataggaagcttctatagaggggctgtaattttaaacagggggagcaaagaaggctttactgagaaggtgacattttattcgagacctgaagagcttaggattcagtcctctgcggggggatgagcatcccatgcagtagaac

SEQ ID NO: 553194 - DNA, 1060 bp, Homo sapiens
tggaaataaagaattaaaactttttatttgcagactacatgatttyctaatagtgaatactaaagtatctgtaagtaaggtatcacttgacagttttagaaccacaaaaattatgttttatcttaacagtaacagaatctacttcaaagaaagcatcaccgtaatcaattgacaagtttgaatatgttcataaatacaacatttatcactgggtgtttcaaggaagcgatctgcaagtattagctaatagatttttgaagtaaatgaaatttttatgcccacaaaaggtggaaatggcaacacaatgcaatttaaaatagaaaaagtgatagaactgctgagaagataaagaaatataagaaatgtaatattgtggcagtttctgttagctttctttagaaaaataacctctgagagatgagttaaaacttcgactctgagttttctagcaattgatactaaaaaagaagcttgtactgtcatcatctgtttatcaatactcataccactttaaaacatttttcctcataaaagtgagggtaaaaaaaaaaaagtgagggtaaaatgatggttagcagagcctgggggtgggaagggaagacagggaattaggagttattaatcaaacaatacaacatttaagacagattggaagactaggcattgagatctgttgcacagcaaggtgactatagttacaataataatggattgcatatttgtacataactatgagagtcagctgcagataccttatcctaaaaaaaatggaaaataatcaaggagatagatatgttaaagtagcttgacctagtcattcaccattgtgtgtgtgtgtgtgtgtgtgtgtatgtgtgtgtgtttatagtcaaaacatcaacttgcaaaacataaatgtatacaattgttttttcagtcaaaataatattaattatacattttaggggcatggcttaaacaacagaaactttatttctctcagttttggagtctggaaatttgagatcaaggtgctggcagcgttgattctcctaaggcctctctccttgccttgtagaca

SEQ ID NO: 553195 - DNA, 1060 bp, Homo sapiens
tggaaataaagaattaaaactttttatttgcagactacatgatttcctaatagtgaatactaaagtatctrtaagtaaggtatcacttgacagttttagaaccacaaaaattatgttttatcttaacagtaacagaatctacttcaaagaaagcatcaccgtaatcaattgacaagtttgaatatgttcataaatacaacatttatcactgggtgtttcaaggaagcgatctgcaagtattagctaatagatttttgaagtaaatgaaatttttatgcccacaaaaggtggaaatggcaacacaatgcaatttaaaatagaaaaagtgatagaactgctgagaagataaagaaatataagaaatgtaatattgtggcagtttctgttagctttctttagaaaaataacctctgagagatgagttaaaacttcgactctgagttttctagcaattgatactaaaaaagaagcttgtactgtcatcatctgtttatcaatactcataccactttaaaacatttttcctcataaaagtgagggtaaaaaaaaaaaagtgagggtaaaatgatggttagcagagcctgggggtgggaagggaagacagggaattaggagttattaatcaaacaatacaacatttaagacagattggaagactaggcattgagatctgttgcacagcaaggtgactatagttacaataataatggattgcatatttgtacataactatgagagtcagctgcagataccttatcctaaaaaaaatggaaaataatcaaggagatagatatgttaaagtagcttgacctagtcattcaccattgtgtgtgtgtgtgtgtgtgtgtgtatgtgtgtgtgtttatagtcaaaacatcaacttgcaaaacataaatgtatacaattgttttttcagtcaaaataatattaattatacattttaggggcatggcttaaacaacagaaactttatttctctcagttttggagtctggaaatttgagatcaaggtgctggcagcgttgattctcctaaggcctctctccttgccttgtagaca

SEQ ID NO: 553196 - DNA, 1060 bp, Homo sapiens
tggaaataaagaattaaaactttttatttgcagactacatgatttcctaatagtgaatactaaagtatctgtaagtaaggtatcacttgacagttttagaaccacaaaaattatgttttatcttaacagtaacagaatctacttcaaagaaagcatcaccgtaatcaattgacaagtttgaatatgttcataaatacaacatttatcactgggtgtttcaaggaagcgatctgcaagtattagctaatagatttttgaagtaaatgaaatttttatgcccacaaaaggtggaaatggcaacacaatgcaatttaaaatagaaaaagtgatagaactgctgagaagataaagaaatataagaaatgtaatattgtggcagtttctgttagctttctttagaaaaataacctctgagagatgagttaaaacttcgactctgagttttctagcaattgatactaaaaaagaagcttgtactgtcatcatctgtttatcaatactcataccactttaaaacatttttcctcataaaagtgagggtaaaaaaaaaaaagtgagggtaaaatgatggttagcagagcctgggggtgggaagggaagacagggaattaggagttattaatcaaacaatacaacatttaagacagattggaagactaggcattgagatctgttgcacagcaaggtgactatagttacaataataatggattgcatatttgtacataactatgagagtcagctgcagataccttatcctaaaaaaaatggaaaataatcaaggagatagatatgttaaagtagcttgacctagtcattcaccattgtgtgtgtgtgtgtstgtgtgtgtatgtgtgtgtgtttatagtcaaaacatcaacttgcaaaacataaatgtatacaattgttttttcagtcaaaataatattaattatacattttaggggcatggcttaaacaacagaaactttatttctctcagttttggagtctggaaatttgagatcaaggtgctggcagcgttgattctcctaaggcctctctccttgccttgtagaca

SEQ ID NO: 553197 - DNA, 1194 bp, Homo sapiens
ttcaccagctccactctacctactacagacctgcctatgctaggtgttattgagacaattggttaattagtgagtgtggtaattatagtgtttcattttctctgcaaacacctatttttgaaaattttagtgtttttggaagattcatatttatatctattctttaaaactggagataaactggcttaaatcacacatacctataataaaaatgctcaccatcactggccatcagagaaatgcaaatmaaaaccacaatgagataccatctcacaccagttagaatggcaatcattcaaaagtcaggaaacaacaggtgctggagaggatatggagaaataggaacacttttacactgttggtgggactgtaaactagttcaaccattgtggaagtcagtgtggcgattcctcatggatctagaactagaaataccatttgatccagccatcccattactgggtatatacccaaaggactataaatcatgctgctataaagacacatgcacacgtatgtttattgcaggtctattcacaatagcaaagacttggaaacgacccaaatgttcaacaatgatagactggattaagaaaatgtggcacatacacaccatggaatactacgcagccataaaaaatgatgagttcacgtcctttttagggacatggatgaaattgaaaattatcattctcagtaaactatcgcaagaacaaaaaaccaaacaccacatcttctcactcataggtgggaattgaacaatgagaacacatggacacaggaaggggaacatcacactctggggactgttgtggggtgggcggagggggaggggggagggatagcattaggagatatacctaatgctaaatgacgagttaatgggtgcagcataccagcatggcacatgtatacatatgtaactaacctgcacattgtgcacatgtaccctaaaacttaaagtataataataatttttaaaaagtaacaaagaaaggtgctgagaaaaggacaagggtataaaatggaaagcatgcctgttaggaagagaagagataagataaaattaagtcagagtggcagttgggaaaaggtggtattttcaataaatggtgctgagtcagttggatgtccatatagaaaacaaaattgtattttgaccccagtttacaccagatataaaaatcaatcaca

SEQ ID NO: 553198 - DNA, 1301 bp, Homo sapiens
catagcgcccatggctccaccaccagtcaaaggtagtggggccagcagtggactcctgtgtggttcagctctcaaaaatgtgaactgaaagacacagaaaaagacttgtgtttggggataaatactgagactgagcagtcttgtggattcaggaattgggcatccagttgggaccctttgcaagaagggtgttagggagcagagagcatgagtaagccagaagcagagcaggagagagaatggagcaggtgtgcaaagagggcggtgagatgctgagagtaatggggctggcccaggaggaagtgagaggaagcaaagtgagacagaggtggtgtgtgagcgtgtgtgtgtgtgtgtgtgtgtgtgtgtgtgtgtgattgagagagagagagacagatggagggaaagagaggcgggggattccaggtacagtggctcatgtctgtaattctagcactttgggaggccggggcgagcaaattgcttgaactcacgagttcgaggctagcctgggcaacacggcaaagccctcatctctacaaaaaatacaaaaattagctgggcttggtgacagacgcttgtagtctcagctactcgggaggctgaagtgggaggatctttagagcccaggaagtctaggctgcagtgagccatgaccttgccactgcacaccagcctgggtgacagagggagaccttgtctcaccaaaaaaaaaaaaaaaagagagagaggttgagctcaactgatcagcatctcagattaagggcctccattccccccatgctttgtaattgctgcctgttttccatgaagcctgactgtgcattggttctaagtcatgggctctgcaagatcctccttgtgccttgagaagggccctgtccgcagcctgaggagcctcaactgttctctgcacgacctagttctgggctagggaatggctgtctagcttcagtggatttccagrgtccggagctactaaaggtcaacagctgtgttactgcaaactctgtggcctgcattctatcaatgccaaaatgcacatcacactgacaacagctctttgtttacaccggggagcccccaaagccccagggtaattccatcaccacccaagttgtaagatggtagagcgaacaggccagaatgtgataaagtaaaatgaaagaagaaaaaggaggaaggaaaaagagagagggagaagcacatagaggaaagaaggaagaaggaaggaggaaggagggagggagggagacagggaaggaaggaagtctggcaagagggcacagtcagacctgcca

SEQ ID NO: 553199 - DNA, 1301 bp, Homo sapiens
catagcgcccatggctccaccaccagtcaaaggtagtggggccagcagtggactcctgtgtggttcagctctcaaaaatgtgaactgaaagacacagaaaaagacttgtgtttggggataaatactgagactgagcagtcttgtggattcaggaattgggcatccagttgggaccctttgcaagaagggtgttagggagcagagagcatgagtaagccagaagcagagcaggagagagaatggagcaggtgtgcaaagagggcggtgagatgctgagagtaatggggctggcccaggaggaagtgagaggaagcaaagtgagacagaggtggtgtgtgagcgtgtgtgtgtgtgtgtgtgtgtgtgtgtgtgtgtgattgagagagagagagacagatggagggaaagagaggcgggggattccaggtacagtggctcatgtctgtaattctagcactttgggaggccggggcgagcaaattgcttgaactcacgagttcgaggctagcctgggcaacacggcaaagccctcatctctacaaaaaatacaaaaattagctgggcttggtgacagacgcttgtagtctcagctactcgggaggctgaagtgggaggatctttagagcccaggaagtctaggctgcagtgagccatgaccttgccactgcacaccagcctgggtgacagagggagaccttgtctcaccaaaaaaaaaaaaaaaagagagagaggttgagctcaactgatcagcatctcagattaagggcctccattccccccatgctttgtaattgctgcctgttttccatgaagcctgactgtgcattggttctaagtcatgggctctgcaagatcctccttgtgccttgagaagggccctgtccgcagcctgaggagcctcaactgttctctgcacgacctagttctgggctagggaatggctgtctagcttcagtggatttccagagtccggagctactaaaggtcaacagctgtgttaytgcaaactctgtggcctgcattctatcaatgccaaaatgcacatcacactgacaacagctctttgtttacaccggggagcccccaaagccccagggtaattccatcaccacccaagttgtaagatggtagagcgaacaggccagaatgtgataaagtaaaatgaaagaagaaaaaggaggaaggaaaaagagagagggagaagcacatagaggaaagaaggaagaaggaaggaggaaggagggagggagggagacagggaaggaaggaagtctggcaagagggcacagtcagacctgcca

SEQ ID NO: 553200 - DNA, 1301 bp, Homo sapiens
catagcgcccatggctccaccaccagtcaaaggtagtggggccagcagtggactcctgtgtggttcagctctcaaaaatgtgaactgaaagacacagaaaaagacttgtgtttggggataaatactgagactgagcagtcttgtggattcaggaattgggcatccagttgggaccctttgcaagaagggtgttagggagcagagagcatgagtaagccagaagcagagcaggagagagaatggagcaggtgtgcaaagagggcggtgagatgctgagagtaatggggctggcccaggaggaagtgagaggaagcaaagtgagacagaggtggtgtgtgagcgtgtgtgtgtgtgtgtgtgtgtgtgtgtgtgtgtgattgagagagagagagacagatggagggaaagagaggcgggggattccaggtacagtggctcatgtctgtaattctagcactttgggaggccggggcgagcaaattgcttgaactcacgagttcgaggctagcctgggcaacacggcaaagccctcatctctacaaaaaatacaaaaattagctgggcttggtgacagacgcttgtagtctcagctactcgggaggctgaagtgggaggatctttagagcccaggaagtctaggctgcagtgagccatgaccttgccactgcacaccagcctgggtgacagagggagaccttgtctcaccaaaaaaaaaaaaaaaagagagagaggttgagctcaactgatcagcatctcagattaagggcctccattccccccatgctttgtaattgctgcctgttttccatgaagcctgactgtgcattggttctaagtcatgggctctgcaagatcctccttgtgccttgagaagggccctgtccgcagcctgaggagcctcaactgttctctgcacgacctagttctgggctagggaatggctgtctagcttcagtggatttccagagtccggagctactaaaggtcaacagctgtgttactgcaaactctgtggcctgcattctatcaatgccaaaatgcacatcacactgacaacagctctttgtttacaccggggagcccccaaagccccagggtaattccatcaccacccaagttktaagatggtagagcgaacaggccagaatgtgataaagtaaaatgaaagaagaaaaaggaggaaggaaaaagagagagggagaagcacatagaggaaagaaggaagaaggaaggaggaaggagggagggagggagacagggaaggaaggaagtctggcaagagggcacagtcagacctgcca

SEQ ID NO: 553201 - DNA, 1301 bp, Homo sapiens
catagcgcccatggctccaccaccagtcaaaggtagtggggccagcagtggactcctgtgtggttcagctctcaaaaatgtgaactgaaagacacagaaaaagacttgtgtttggggataaatactgagactgagcagtcttgtggattcaggaattgggcatccagttgggaccctttgcaagaagggtgttagggagcagagagcatgagtaagccagaagcagagcaggagagagaatggagcaggtgtgcaaagagggcggtgagatgctgagagtaatggggctggcccaggaggaagtgagaggaagcaaagtgagacagaggtggtgtgtgagcgtgtgtgtgtgtgtgtgtgtgtgtgtgtgtgtgtgattgagagagagagagacagatggagggaaagagaggcgggggattccaggtacagtggctcatgtctgtaattctagcactttgggaggccggggcgagcaaattgcttgaactcacgagttcgaggctagcctgggcaacacggcaaagccctcatctctacaaaaaatacaaaaattagctgggcttggtgacagacgcttgtagtctcagctactcgggaggctgaagtgggaggatctttagagcccaggaagtctaggctgcagtgagccatgaccttgccactgcacaccagcctgggtgacagagggagaccttgtctcaccaaaaaaaaaaaaaaaagagagagaggttgagctcaactgatcagcatctcagattaagggcctccattccccccatgctttgtaattgctgcctgttttccatgaagcctgactgtgcattggttctaagtcatgggctctgcaagatcctccttgtgccttgagaagggccctgtccgcagcctgaggagcctcaactgttctctgcacgacctagttctgggctagggaatggctgtctagcttcagtggatttccagagtccggagctactaaaggtcaacagctgtgttactgcaaactctgtggcctgcattctatcaatgccaaaatgcacatcacactgacaacagctctttgtttacaccggggagcccccaaagccccagggtaattccatcaccacccaagttgtaagatggtagagcgaacaggccagaatgtgataaagtaaaatgaaagaagaaaaaggaggaaggaaaaagagagagggagaagcasatagaggaaagaaggaagaaggaaggaggaaggagggagggagggagacagggaaggaaggaagtctggcaagagggcacagtcagacctgcca

SEQ ID NO: 553202 - DNA, 972 bp, Homo sapiens
ggattcattaattttttgaaggattttttgtgcctctatttccttcagttctgctctgattttagttatttcttgccttctgctagcttttgaatgtgtttgctcttgcttttctagttcttttaattgtgatgttagggtgtcaattttggatctttcctgctttctcttgtgggcatttagtgctataaatttccctctacacactgctataaaaaaaaaaaaaaaaacccggctgggcatggtggctcacgcctgtaatcccaacactttgggaggccaaggagggcggatcacgaggtcaggagatcgagaccatcctggctaacacggtgaaaccccgtatctactaaaaatacaaaaaattagctgagtgtggtggcgggcgcctgtagtcccagctactctggaggctgaggcaggagaatggcrtgaacccgggaggtggagcttgcaatgaaccgagatcaggcccctgcacttcagcctgggcgacagagcgagacttagtctcaaaaaaaaaaaaaaacaaaaaaaaaaaaaccagtaaatttcatgaattatactctaatataaatgacttccagattttacactaatgagtctagtcctcaaaagtttatacataataagttgtgtttaaattcagccgattggtctctgactcctagatcctgaattgaatcactataggtgattctgggatggcactgggagaggagagaggtgactgctttccctgacctgggcaaatggagagagaatggtaatcctcacttaatatcatgccttgatgcactgctcactggaaaatttgccactgagtcactttgaggaactttcatagagtttattagacacaacacaaattactccttatccacgtttgccagggggaaaaataccccagaaacttatgggaatgaattttgctaagaaggagaaaaacaagtttcttatgaaaggcctgca

SEQ ID NO: 553203 - DNA, 553 bp, Homo sapiens
tacgtttagaggtcactgtatataggtatgccattctgaagccagttttgttcctggggtatgttcttggttaaatcacatcatccctctagattctggagagctctgacccctaccttattctcaccttctgtggggactatgagaaattcctggacatcttaagcctcatagagaggatttcctggaaatagagctactattctcaatttgacaggtctattcttctcctggagggagaaggaaaaaagaaacgccagcttcctacatctccttcccacttgtgtcctttcctccttagagccatctttcttcaccaagtataacaagttagaaggaagaaaattaccgagtgtccttttgagctcaataaaacctttagcttggccgggtacggtggctcatgcctgtaatcccagcactttgggaggccaaggtgggcggatcacgaggtcagaagatcaagaccatcctggctaacayggtgaaaccccgtcactactaaaaatacaaaaaattagctgggtggggtggcgagtgcctgtagtcccag

SEQ ID NO: 553204 - DNA, 1195 bp, Homo sapiens
  misc_feature 860, 861, 862, 863, 864, 865, 866, 867, 868, 869, 870, 871,872, 873, 874, 875, 876, 877, 878, 879, 880, 881, 882, 883,884, 885, 886, 887, 888, 889, 890, 891, 892, 893, 894, 895,896, 897, 898, 899, 900, 901, 902, 903, 904, 905, 906: n = A,T,C or G
  misc_feature 907, 908, 909, 910, 911, 912, 913, 914, 915, 916, 917, 918,919, 920, 921, 922, 923, 924, 925, 926, 927, 928, 929, 930,931, 932, 933, 934, 935, 936, 937, 938, 939, 940, 941, 942,943, 944, 945, 946, 947, 948, 949, 950, 951, 952, 953: n = A,T,C or G
  misc_feature 954, 955, 956, 957, 958, 959: n = A,T,C or G
agaaggggtccaacttaggccatctgggaactctctctggaggaggtaagagcttatctgggcctgcaaagaagaaaaggacttcgactgatgattctaaagtgggagggaaggcagacagaatcttccagattgagggaacaccacaaagaaccagagctttacgtgctcagagtgatggatttagatgcattgttaaatattaccgacattcccattttttgagcagtggcctgcactgtgctaagtgatatttacatgtattatctcctacagttgcccaaactaccctcacaggtctttttcattactgcctctggtgttgaatgaggccaggtggagatgtaggaaaagtaaacattttgcccctaagcatacagttaaagtcagagagtgaactctgaatcctcaaatccagatctyctatcaggtaatgatgactacagtgtttcttattttgttaggtgtaaatatggtcagaatgccttccaatctgttttagtgatagtatagttattgagctttccttagtttacacattcacaagtgtttttgaagcactgaagtccctgtgctgaatcagattgtgtggtcagcagtgtgatctgaggaccctatagtgtgtagggtagggtgtgacaaggtaaagagggtggactctgtagccagtttgtctgtgactatcttctgtgtgactctgagaatgtcccctggtctctctaaatctaaattttaacatccattaaagtaggtatgaggattaacaatatatttaaaattttaatacaaatattaacatagcacaaagtgcaaatacaatacatgtggccaaggttataatcatcgtctgcattatcacnnnnnnnnnnnnnnnnnnnnnnnnnnnnnnnnnnnnnnnnnnnnnnnnnnnnnnnnnnnnnnnnnnnnnnnnnnnnnnnnnnnnnnnnnnnnnnnnnnnntagggtgctaatagtcctttgcgatgccgccatatatcttaatgaaatgaaggatgtggaaatattttcagaagtcaaagcctcatacagatgtaggtggtattttcctgatggtgatccccttggggctccctcactctttagagcttcggagcactccaagtgttggagggatggggcacaagtgttggcttttttgtttgtttgtttggatgtcattacattgaaatcagccc

SEQ ID NO: 553205 - DNA, 1849 bp, Homo sapiens
cgcccaattatagcttctctggggcccctcaggagtgtgtagagtgatggagagtgaacgagtcgggtctccctggcactgacgctctgctcagacgcccaaggaaagctgagccctgactcctacccaaagggactgagctctatcactatccctctgagcccagctcaagagactagagggaggctgtgtcgcggggtggaaaggagaagaggaataacggggctggaagagaggacctgctggaatggaggggtgggcactcagcagaaagcacgcagggataccagcgctccgaacacactaactacccaaggggatcgaagctgtgtcagggactctcgcttcttcatgctgccaccttgtggtcgcacaggggatcttcagcctcgtggccgtccctgagcaatggctctgaggatgatgcctttaagaaccaaggacccaactgactctagcatctgagctctttccactactctgcgctgccccttagctctccctctcaccctctcaagcccaccctttcttccttgggtcgctaatcatagatgtcctgtccctccagaaatgagaccgtgtggcatgtttgtttgaacatggggctctagaaggaaacagacttgggtccgcccatttattaatagtatgactactataagcatttartgtgaaagcatttaatgtgaaaaacgaaatgagatactagcaagtctccagtgaatgtttgtgttcattattactagtcaaaacaaatggaagagccaaggacgtaggaaatccagtagacagtgccacaaaagagacaggaaaaaatatattgacaaggaagattggtcagcagttcagaaagctgccgagagatcaagcagtgaaaagactgaaatcaaaggtcactggctacctggataacagggtgggggatggaatcttgagtgaagcagtgtgaggagtgtgttaggaagagatgaagagagtcgatgtagacaacccttttaagatatttgtacgtgaacagaggagtgaaatggacaatattgggaggatttatagctccacagagattttaaaatgtgtattttggaactagaagagactaaatgtcaacaggatggagttggcagagagactccttgtcctttactcctcacattactggtagctatggcccaggaagataatctgtcttccccctctatatagtaactatgagtaatcttactttgtccagtagctttcatcacccaagcaggccagaccaatctcctaaactccaaatatggtaaagtctattggacataggtgtccttcaggcacctcaaactcaacacctaactcatcatttctaagctcattgatttcattatcaactaagctcatcatctctgctcttcaatccggaccccgctccctgtctgttttatgttccctgtcatataaatcactctgttggccatgtcaaaaatttagaaatcatcatccctgccttctccccatctctctctcaccttcctctccaaccacatccaatcagtcaccaagttctgttcattttatctactagatatctattttgtgagtctgattatctttctccatcttttttgccttttcttcattccaagccaagacagtcttttgcctagatcatcagaataacttgttcactggtcagactcacagaagaacttccctaccaatctgttgtctatgctgtggccagtgtgatcttccaaacacatatcagttcatggcaattctccattgcctttagaatgaacagttgaattccccattgcctgtagaatgaacacactcctgaacccaactcataggaactccataagcc

SEQ ID NO: 553206 - DNA, 1849 bp, Homo sapiens
cgcccaattatagcttctctggggcccctcaggagtgtgtagagtgatggagagtgaacgagtcgggtctccctggcactgacgctctgctcagacgcccaaggaaagctgagccctgactcctacccaaagggactgagctctatcactatccctctgagcccagctcaagagactagagggaggctgtgtcgcggggtggaaaggagaagaggaataacggggctggaagagaggacctgctggaatggaggggtgggcactcagcagaaagcacgcagggataccagcgctccgaacacactaactacccaaggggatcgaagctgtgtcagggactctcgcttcttcatgctgccaccttgtggtcgcacaggggatcttcagcctcgtggccgtccctgagcaatggctctgaggatgatgcctttaagaaccaaggacccaactgactctagcatctgagctctttccactactctgcgctgccccttagctctccctctcaccctctcaagcccaccctttcttccttgggtcgctaatcatagatgtcctgtccctccagaaatgagaccgtgtggcatgtttgtttgaacatggggctctagaaggaaacagacttgggtccgcccatttattaatagtatgactactataagcatttagtgtgaaagcatttaatgtgaaaaacgaaatgagrtactagcaagtctccagtgaatgtttgtgttcattattactagtcaaaacaaatggaagagccaaggacgtaggaaatccagtagacagtgccacaaaagagacaggaaaaaatatattgacaaggaagattggtcagcagttcagaaagctgccgagagatcaagcagtgaaaagactgaaatcaaaggtcactggctacctggataacagggtgggggatggaatcttgagtgaagcagtgtgaggagtgtgttaggaagagatgaagagagtcgatgtagacaacccttttaagatatttgtacgtgaacagaggagtgaaatggacaatattgggaggatttatagctccacagagattttaaaatgtgtattttggaactagaagagactaaatgtcaacaggatggagttggcagagagactccttgtcctttactcctcacattactggtagctatggcccaggaagataatctgtcttccccctctatatagtaactatgagtaatcttactttgtccagtagctttcatcacccaagcaggccagaccaatctcctaaactccaaatatggtaaagtctattggacataggtgtccttcaggcacctcaaactcaacacctaactcatcatttctaagctcattgatttcattatcaactaagctcatcatctctgctcttcaatccggaccccgctccctgtctgttttatgttccctgtcatataaatcactctgttggccatgtcaaaaatttagaaatcatcatccctgccttctccccatctctctctcaccttcctctccaaccacatccaatcagtcaccaagttctgttcattttatctactagatatctattttgtgagtctgattatctttctccatcttttttgccttttcttcattccaagccaagacagtcttttgcctagatcatcagaataacttgttcactggtcagactcacagaagaacttccctaccaatctgttgtctatgctgtggccagtgtgatcttccaaacacatatcagttcatggcaattctccattgcctttagaatgaacagttgaattccccattgcctgtagaatgaacacactcctgaacccaactcataggaactccataagcc

SEQ ID NO: 553207 - DNA, 1524 bp, Homo sapiens
gttgcagcaaacactagatatttcaatttttttgaaacaatattgaagaatgatagaaaacacaaaataacaacaattagtaccctaataattcataaaatctatagcaagaatatgaattacaatggtatcattgtgtagatttaagataatgagttatttttaacactctaatttattattttgtaaaggaaagaagatataattttatcaatataagtttcactcaccactggtttctttgaatggttcccacaatgattcttcgagaaataattctgttaagtactcctcaaggtcaggagctcattcaccgcagtactgacttttagaggtcaccaaaatacagctccytctaagtgcgctccttctcctttggataaaactgagcttgtctcttctatgtccttttataagaatctgtgaagaccacacccacctctttaagtgggtggagtattgagaaaggtagagaataagatgattaggtttatgcagtatttagaacacacctttgcaccgctgattaaattatcatcactccttcattccaaaaaaccgtgactgaagtgaataatatgtaacataaatcctatgagattagacatacactagaaattaactaagatgcattttatactgtttattgagtttcatccaagatgcaggcattcctctaagggcacatttatttattctagagaaactgtctccttgtggagtgcagtggtacattcacagctcactgcagccttgaattccaaggctcaagggatcctcttgcttcagcctcccaagtagctaggactacaggctcacaccatcccacctggctaatgttttttaaaacttttcatagagtcagggtatggctctgtagcccaggctgttctccaactcctgtcttcaaatgatcctctggtcttggacttccaaagtgcttgggagtacaggcataaaccacctcttccagtcctaaatgctgctttagtacatttataggctattcccagagaagtccaacaggaagataaaacttttttttattttctaccactctaagagaaatcactgattaaccaaataaccccactaatttgaggtctcttattgaatttacaaaactttgccaatctcatgggtgaaatataagttattgttttaaggcttttctccacatagtgcatgatgttctatgatgactagaaatgcaatgtaataatttgaggattataaacaagttttaggacataggctaattcacaaatacagaatccaaatgatagggatggattatatttttctttctttaacaaatatttttgctgtcatgtgacaattaaaaaaagaagagatttttagaagcggctactcaaacgttttctgacagaggaattctttgccaatagcccccacaagacttatagtcaagagtgcttatgtattttctcagcttattttatgtttaaccacatacaaatcatggagaaaatgtatctatggttatgtgcaatagtcctcctt

SEQ ID NO: 553208 - DNA, 565 bp, Homo sapiens
tcatctcaaaaacaaaacaaaacaaaaaagttcctttagtggttgtcaagtgaagtaatttttagaactacttgtctgactttattagaatgtattcgtttgataatagattcagacataaaattgggggatactattcctactgactgattaatccattcgtctcttgatcttggataagtgagaggcagaatttactctctctttactctctctctcttttagtttcttacacatcacatgctcatccatcatgcttaattcgaaaaggtgctgtttatgatttgaaatttacatcatataaattttctttggaaacaatgcaagatttaaaaacaaaacaaaaattatctttgtaggtgaataagtctttgaccatgtgatcttgtgtcagtcctaaagcagcattgtaacaaaggtggatgttttggagaagctcaaattgatgaattaagagcatgaagacccataaagtggaaaacttctctcattatatcattattaattgactttaaagctctactctcttggctyttaatagaagagtgaaaatctgagaatccct

SEQ ID NO: 553209 - DNA, 535 bp, Homo sapiens
atatctcaaatcatccagaaatcaaggaaatgatatttcaacagaataattgtgtaggcagcagagcactgaatcatatcatttattttgacacaaattatattaatatattcatattaatatattattaattataaaaatgtttaatatattaataaattatatcatttattttgacataaatgtggtctcttatattgacctaattatctcaagtgtattttgattttattttctttaacagcactaaacatagtactggatggtgtatttattttttaattaatatttgtagaaataaattaagctggggcacattctcaggagaaagaaaggggtagcactcaactggggctcattctggtgcctagattttatttggctctcacttgcctttggattttgctcaagaagaacagggaaaagaaragctatgtcagtaattaatattccataacctaaagtaactgaactttagcagagaactaaaatctgtgcttagaggatttatctaaaggtgttttacgggcagatg

SEQ ID NO: 553210 - DNA, 1033 bp, Homo sapiens
acgtactgtcttttaaaatccaatgcaagttctattgtatttaggaagactttcctatgtcagcactcatttatttgtggccatcactactgataatttcaataactaccctttgtggagtgcttaccactgccagatggtcagttaagcaatttatatacatcatctcttttgttcctattgatatctctgtgaagtacatattacaattcccatactatagatgaggaacctgaggatcagcgcacttttggcacttactccaaaccatgaaaagtcttactttgagctgagaggctcattctctcctctccacttaaagagaaagaaaaaaaagcatgaaagtgatgaagagttacataggcgagaacttggtttgtgtgacccaaaggatatttgcaatttagtagcaagctcattttactataaatatttttctactttgtaaagatggcaatagtatataaaatattttaaatttgtgtaaaaatatgttacttttaaaacttttaaaatctgatattagcataaacaagaagacctgggccttatttacaatgttgaagaggctggatggcaataggccaagtttgaactaagtcctccaccaaccagtcctgaatctcgtagcccccttttcsttacttaatcgataatacactaggttcaaagcaaggacatcagacacaaagtatagctatgttctctcttttttgtcaacagttacttaaggccttcccaggctcatggatgcaaattgaatttaaattcataagcagattccctctattgcttgtcttcatcacaacgcaaaatatggaactatagcacatttgatttgattcaaaattaggacctctattggcctaagacaattaaccccttgttgaccttaaatcctataagatccaagcttcctttgcctagctctgaaagcctgtcttaaaaagatgcctggccaggcgcggtggctcacacctgtaatcccagcactttgggaggttgaggcgggcggatcacaaattcaagagat

SEQ ID NO: 553211 - DNA, 1545 bp, Homo sapiens
ccaagagtgccagcctctttcagaacagtgtgattttatctgtgtttatttctgtctatcctactctcctgtattctttccctggcaaactcctactcatccttcaagactcagctctcagatctcctcctctgtgacattttcctgacattcccaggaggcattattcatcctctgacccccacccccgactctagctaggctgcattgaaaaatgtctgtgtttacaagtctcttgctctacaccttccttcctctacagctattcctctgctcattcgtttactcattcaagaaatgtacattaagaccttactgtgtgacagatattgttctagacactggggatttagcaatatacaaaatcccctgcccttctggaggtgtatttgtggatttcattcatttcagtagctgtatttgtggatgtattaatgaggctcttttatagtaagaaacagaaacttgctcaggctagctctagaaatgggtattactgtaaaatggtggcaataaggaaggcagaaaatctcacagagacccaagagcagctgcacagctgagcttcacagcttctgtaactcgttaattggctcattcatggcccttcctaggcccatgtcatttaagaaactttttattgtgatatgaaatacatacataaaagtgcatatatcacaaaagtacagctcaatgaattttcacaaactacaacccataaagaggtgaagaaacataacattcattaccccagtacctcctatcctcctttatttcatttttaagatacattctcatcccagcttctccccaactgtttaccatgtgatgttttgatttctgttttcactggattcattttataaacagctttatttaggtgaaacctacataccgtaaaatcatccattataaatgaacaatccaatgattttttagtaagtttataaagagcaaccatgatcacaatccagttttagaacatttccatcatcccaaagaatcctcctgagtcaattttcagtcagtactcagttccagccccaaccccagccccagactaccaggttttacgtttaggtctgggatccattttttaaaaataattttactaagatataattcacatactgtaaagcctrcactttagaaggtaaaattatgtgtttctaatatatttacaaagctgtacaaatatcacccctatttaattcgagaacattttaatcaccaaaaagaaaccccatatctattcatagtcactccccacttttccctccctttagtcctggaaatcactactctcctttctgtctctatggatttgcctattctagacattccacatgaatagagtcatataatatgtggcctttaacgcctggcttctttcactcagtataatgttttcaagattcatccatgttgtagtatgtatgagaacttcattcctttttatggccaaataatattccattgtatagattcacaatattttgttcatccattcctatactgatagacatttggattgtttctactttt

SEQ ID NO: 553212 - DNA, 209 bp, Homo sapiens
accatcatgcttatacagctacctcacaaaagttatattccagtatttagtaaaaagtcagcatttttaaatgctttactataaaactcaktatctgacatgcatttttttcccattggttctgccctaaaacctctatctccccatgaagggattcagtatcccttgtaaagtgttagaagtacttgaagaattgtcatgtaactgta

SEQ ID NO: 553213 - DNA, 637 bp, Homo sapiens
atgactcttcccttcagagccctcccatccgctgaagaagtggtgtcctttgctcctcctgccctctttactctgacttcaagtcaaacccacaagctgctgtgttccttcctcctcaccaaagtggtaacagattcctccacctcacacacattgtgaacagcttgaacttcagctatgcatgcatctgtacaaacatgcacactccacacactaacacacattttgccccttggtcctgcattccccacagtccccacttgcagcccccagccctatatggtccgggatcacactcctctgccccactcctggccacagtctccactccgtatctcagccagactcacatctctccgcctgacaagaaaatgggggcaagagacagccagtccccattcattccagctctgcataccctgacgtttcaccccagtttttctggaacaccctgattgatgtcaggtaatgaggacaggtgcctgtttccctcactgaagccactctttgtacaayaaattacagggtcatagatctttgagtcactctgctggaccacaggggtcagagatgtcactagttaaggctctctggacccagccactcacggagttgtgggtaagggtgtggcctggta

SEQ ID NO: 553214 - DNA, 659 bp, Homo sapiens
tgggctcttttggtgcacctggtcagcatccactgctctgggctatgttagtcccccaacagctagggacccaggaaggcaggtggtagtggcactgccttactcccgtgactggttctgacccttctgtgcccctgggtcagctgcttcacatggaggtctttatcctcagcagtcagtgaagaaagtactgaagtaatagtaagcctttgtggaggctgcctatagaaggcaccasgtgggcacttcctggccgcacttaatcctcaaaaccagccttggtccaacctcggacactttagaaactcctaaaggggtgctgttatgctacagctgcaggtgcagcccatggcatgtgatcccctacttctgaagtaggtattatgattatctttgtttcacgggtgagaaaatattgaagataatgaacctacgaaggggtgggggtagcatttgatctaggggccctaggaggtttcaattgcccaaccagagctggggctgctagctcttgactgtaatcctggaagtctctgggtggccaactgccccttgccaaggcatgacaggtggaggtgggtttgaaagggagcaagagcaggttctgtgttctgaaggtggtttggcccagacaggccaccaggttgatgacttccaaa

SEQ ID NO: 553215 - DNA, 612 bp, Homo sapiens
gggggcatggaagattataatggtacatagtgtaagttctcaagcttaattaacccaagtgttaattatcatgatgatgaaaaacatgtagacgtgtattatcctggcatggggcagcgttgcacagctgtggtttggtgatgtgacctatagagtcagaatgcttgaactgcaatcccctgctctaccacttgaagaaggtgtgaccacagatgagtttattaccctctctgaatttcatttctttcatctgtaaaatatgaattgtaatgtatctacttcagagtgttgytgtgaagagtaatcaaagaaggcatgaaaaatgcttagcatgatacctggcacatagtaaatccttaataactgttgttagctaaaagttatcattttcattattttaaagtgtgctgaatttatgcaacactaaagggtcccagagggcattttattacattgagtcttaaaaacaatgtacttcatttcattttgaaaaccaggcattaatcctttatgccattttttgttggtcttttagactccatgggatggtatccgagtggcttggaaaataatatttagttgtgttcacccacctttaaaagacatctcttt

SEQ ID NO: 553216 - DNA, 575 bp, Homo sapiens
cagcaggagctgtggcagcggcgaaaggaagcggctgaggcgcttggaacccgaaaagtctcggtgctcctggctacctcgcacagcggtgcccgcccggccgtcagtaccatggacagcagcgctgcccccacgaacgccagcaattgcactgatgccttggcgtactcaagttgctccccagcacccagccccggttcctgggtcaacttgtcccacttagatggcracctgtccgacccatgcggtccgaaccgcaccgacctgggcgggagagacagcctgtgccctccgaccggcagtccctccatgatcacggccatcacgatcatggccctctactccatcgtgtgcgtggtggggctcttcggaaacttcctggtcatgtatgtgattgtcaggtaaggaaagcgccagggctccgagcggagggttcagcggcttaagggggtacaaagagacacctaactcccaaggctcaatgttgggcgggaggatgaaagaggggaggtaaactggggggactctggaggagaccacggacagtgattgttatttctatgagaaaacctact

SEQ ID NO: 553217 - DNA, 1461 bp, Homo sapiens
ggagtggaattgctggaatggagtcatatgataactctatatttaaccacctgaaaaactgccagactgttttccaaagtggctgcatcattttacattctccccagcaaacatgaaagttccaatttctctgcatccttaccaacacttataattccaatcttatactctttctttttatagccaccctagtggatgtgaagtagtatctcattgtgctttctttcttaacttttcatctgggtaattcctattatctttaaatctccagcctaaaagtcacttccatagggaatcttaccttggctaccccaccctcaaactagcctcagattcctctcagaaaacccatcctttctctctaaactttaagttcaacatggacaggcaccattccatctcttctttattccccactctagccccagcatctagctakttatttatttatttatttatttatttatttatttatttatttgagacggagcttggctcttgttgtccaggctgaggtgcaatggcctggttttggctcgctgcaacctctgcctcccgggttcaagtgattctcctgcctcagcctcccgagtagctgggattacaggtgcccgccaccatgtctggctaatttttgtatttttaatagagacgaggtttcaccatgttggtcaggctggtctcgaactcctgacctcaggcagtctgcctgcctcggcctcccaaagtgctgtgattacaggcatgagccaccgcacccggccgcatctggctattatgtgaactataaagttgttgaaagtgtattaagtcaatgccactttttttaaataatgagaaaaagtgtgtattatctgaaaatcacctgtgtcagaataattgacatgattacctttaaatccatttcatttttcagtatttctacagacaaaactattgaggaagattctaatatcactggcaagggtaggaaaggggctctatgatataaccataatgaatgcttctgttgtcctgaattttgttggagctgtacacatttatgtttgttaagaaaaaggatttttgtgggaaagtgcaatatatacaagcaaaaacaaatggacttgagaaataaggaacttaaggggactggattttcctgctttagctgtgagctaagcatacctctagaggtttcaattcagtagatctgagatggggcccaggaatatgcattttaaacatagtccctagtaattctaacgccagtggtccatgagcttcactttaaaaatatatatatcctagttaatgtccttattatttaacataaacaagtcaatgtagaagtttaaaaatcaggctctggagtttgatgcagatttaaacccctggactgacatttactatgtggcttagaacgaattacttaatctttctaagccttagtttctggcccataagaaatgccccaatatg

SEQ ID NO: 553218 - DNA, 1461 bp, Homo sapiens
ggagtggaattgctggaatggagtcatatgataactctatatttaaccacctgaaaaactgccagactgttttccaaagtggctgcatcattttacattctccccagcaaacatgaaagttccaatttctctgcatccttaccaacacttataattccaatcttatactctttctttttatagccaccctagtggatgtgaagtagtatctcattgtgctttctttcttaacttttcatctgggtaattcctattatctttaaatctccagcctaaaagtcacttccatagggaatcttaccttggctaccccaccctcaaactagcctcagattcctctcagaaaacccatcctttctctctaaactttaagttcaacatggacaggcaccattccatctcttctttattccccactctagccccagcatctagctatytatttatttatttatttatttatttatttatttatttatttgagacggagcttggctcttgttgtccaggctgaggtgcaatggcctggttttggctcgctgcaacctctgcctcccgggttcaagtgattctcctgcctcagcctcccgagtagctgggattacaggtgcccgccaccatgtctggctaatttttgtatttttaatagagacgaggtttcaccatgttggtcaggctggtctcgaactcctgacctcaggcagtctgcctgcctcggcctcccaaagtgctgtgattacaggcatgagccaccgcacccggccgcatctggctattatgtgaactataaagttgttgaaagtgtattaagtcaatgccactttttttaaataatgagaaaaagtgtgtattatctgaaaatcacctgtgtcagaataattgacatgattacctttaaatccatttcatttttcagtatttctacagacaaaactattgaggaagattctaatatcactggcaagggtaggaaaggggctctatgatataaccataatgaatgcttctgttgtcctgaattttgttggagctgtacacatttatgtttgttaagaaaaaggatttttgtgggaaagtgcaatatatacaagcaaaaacaaatggacttgagaaataaggaacttaaggggactggattttcctgctttagctgtgagctaagcatacctctagaggtttcaattcagtagatctgagatggggcccaggaatatgcattttaaacatagtccctagtaattctaacgccagtggtccatgagcttcactttaaaaatatatatatcctagttaatgtccttattatttaacataaacaagtcaatgtagaagtttaaaaatcaggctctggagtttgatgcagatttaaacccctggactgacatttactatgtggcttagaacgaattacttaatctttctaagccttagtttctggcccataagaaatgccccaatatg

SEQ ID NO: 553219 - DNA, 1461 bp, Homo sapiens
ggagtggaattgctggaatggagtcatatgataactctatatttaaccacctgaaaaactgccagactgttttccaaagtggctgcatcattttacattctccccagcaaacatgaaagttccaatttctctgcatccttaccaacacttataattccaatcttatactctttctttttatagccaccctagtggatgtgaagtagtatctcattgtgctttctttcttaacttttcatctgggtaattcctattatctttaaatctccagcctaaaagtcacttccatagggaatcttaccttggctaccccaccctcaaactagcctcagattcctctcagaaaacccatcctttctctctaaactttaagttcaacatggacaggcaccattccatctcttctttattccccactctagccccagcatctagctatttatttatttatttatttatttatttatttatttatttatttgagacggagcttggctcttgttgtccaggctgaggtgcaatggcctggttttggctcgctgcaacctctgcctcccgggttcaagtgattctccygcctcagcctcccgagtagctgggattacaggtgcccgccaccatgtctggctaatttttgtatttttaatagagacgaggtttcaccatgttggtcaggctggtctcgaactcctgacctcaggcagtctgcctgcctcggcctcccaaagtgctgtgattacaggcatgagccaccgcacccggccgcatctggctattatgtgaactataaagttgttgaaagtgtattaagtcaatgccactttttttaaataatgagaaaaagtgtgtattatctgaaaatcacctgtgtcagaataattgacatgattacctttaaatccatttcatttttcagtatttctacagacaaaactattgaggaagattctaatatcactggcaagggtaggaaaggggctctatgatataaccataatgaatgcttctgttgtcctgaattttgttggagctgtacacatttatgtttgttaagaaaaaggatttttgtgggaaagtgcaatatatacaagcaaaaacaaatggacttgagaaataaggaacttaaggggactggattttcctgctttagctgtgagctaagcatacctctagaggtttcaattcagtagatctgagatggggcccaggaatatgcattttaaacatagtccctagtaattctaacgccagtggtccatgagcttcactttaaaaatatatatatcctagttaatgtccttattatttaacataaacaagtcaatgtagaagtttaaaaatcaggctctggagtttgatgcagatttaaacccctggactgacatttactatgtggcttagaacgaattacttaatctttctaagccttagtttctggcccataagaaatgccccaatatg

SEQ ID NO: 553220 - DNA, 1461 bp, Homo sapiens
ggagtggaattgctggaatggagtcatatgataactctatatttaaccacctgaaaaactgccagactgttttccaaagtggctgcatcattttacattctccccagcaaacatgaaagttccaatttctctgcatccttaccaacacttataattccaatcttatactctttctttttatagccaccctagtggatgtgaagtagtatctcattgtgctttctttcttaacttttcatctgggtaattcctattatctttaaatctccagcctaaaagtcacttccatagggaatcttaccttggctaccccaccctcaaactagcctcagattcctctcagaaaacccatcctttctctctaaactttaagttcaacatggacaggcaccattccatctcttctttattccccactctagccccagcatctagctatttatttatttatttatttatttatttatttatttatttatttgagacggagcttggctcttgttgtccaggctgaggtgcaatggcctggttttggctcgctgcaacctctgcctcccgggttcaagtgattctcctgcctcagcctcccgagtagctgggattacaggtgcccgccaccatgtctggctaatttttgtatttttaatagagacgaggtttcaccatgttggtcaggctggtctcgaactcctgacctcaggcagtctgcctgcctcggcctcccaaagtgctgtgattacaggcatgagccaccgcacccggccgcatctggctattatgtgaactataaagttgttgaaagtgtattaagtcaatgccactttttttaaataatgagaaaaagtgtgtattatctgaaaatcacctgtgtcagaataattgacatgattacctttaaatccatttcatttttcagtatttctacagacaaaactattgaggaagattctaatatcactggcaagggtaggaaaggggctctatgatataaccataatgaatgcttctgttgtcctgaattttgttggagctgtacacatttatgtttgttaagaaaaaggatttttgtgggaaagtgcaatatatacaagcaaaaacaaatggacttgagaaataaggaacttaaggggactggattttcctgctttagctgtgagctargcatacctctagaggtttcaattcagtagatctgagatggggcccaggaatatgcattttaaacatagtccctagtaattctaacgccagtggtccatgagcttcactttaaaaatatatatatcctagttaatgtccttattatttaacataaacaagtcaatgtagaagtttaaaaatcaggctctggagtttgatgcagatttaaacccctggactgacatttactatgtggcttagaacgaattacttaatctttctaagccttagtttctggcccataagaaatgccccaatatg

SEQ ID NO: 553221 - DNA, 575 bp, Homo sapiens
ggaaaacttcagtagaattttttaaaaagagctctgctgctgaaaaatcactgacaatagcctccttccacaggagaggagctgatagtgcagagagggtgtgactggttcaagttcatacaatagattagtggaactgatgggaccagagactcggtatcctgggatctgtggacagttgacatggttattggattgggagctgcaggaagtgcccaacatgggaagaaaaaccctttagaatgaaagggctgtcyacacaagttctcttgctctcccaatcccaggttgggctcagcaaacaactttccagctgttggttctgtaagggtttcagtgagcaagacgcactgtggtccaggaaaatcgagcaccaggggcctctgggctgcaggccaaggaacactcggtatgttgtgccacccagcttcagccactaaacagtcctgtctccaccaactaacagcctagaagggaaactgtggacagatcacaccattaatgaacagtaggggaactttgggaagattcctgcagaggaagtcattgttcagggacatggcaacatgatcaga

SEQ ID NO: 553222 - DNA, 1438 bp, Homo sapiens
cataaaatttttaaaatggtattttgacatttgaaatttggaggattttatattaaggtctagattttgctttaaaagtctcctgaaaaatcttctaatactagcttataagtgagtagctgcttcctactttaacatgggcaaaatctgtccagttctcatctaggtttgcaacccggcattgttctgtcccatctttgcttcaacaaaaatgtagctcatttactatttataataatcaggcagaaaaaatattgtgccttctgctttcaatactatctctgcaataaggagaaattaacatttatccttatcttacatatggaaaacttagtaattgtagagtttttttgtcagattcttctgggtattttctttcttataataaaaattagaagcactggtaaggaacaatcagaactgatattctttttctatctttgttaggagacttacatggccaattggatgacttaatatttatattttataaggtatgaatgttcaaattaagttgctttcttgctctgaggcttaatttagaagctcaaattcagtatcaattgaacaaatgcttaaatattacttgaatttttaaaatgttattatttacttttattttttttttgagataggggtctcactctcacttaggctggagtgcagtggtgcgatctcggcttgctcaacctctgcctcccagattcaagcaattctcctgcctcagcctcccgagtagctgggagtataggcgcgcgtcaccacatccagctaatttttgtacttttagtagagacgggggtttcaccatgttggccaggattgtctccatctcttgacctcgtgatccgcccgcctcggcctcccaaaatgctgggattacaggcgtgagccactgtgcctggcccaggtaattttattttraggatgttgttatctgctccaagcagcatccctaacttgaggagattaatagtgttaatatgtattgagccttttccaaataggcgctgttctgggcattttctataaattagttgattaaccaccataccactcctataagatagcatcttttatagtacagataagaaaactgaggcacaaaatactaagactcttccaggactgaatccagatagtctgactctggagcccatacctctctgtacttctctctcaagtagtccttggactgtatcatttgctgcatcaccctctctccagagctttgcaaaccaaacattgggaagttagttttttgctaagccacagaaaataaacttttcgttagcattctttcccagagttccttcttctatgtttacataattaaatatgattcttcccatgagataatttgctctactgtggcttgctgtctctgcctccagacatacatgcagctggacagaatgtttgagttgaaagtttgtga

SEQ ID NO: 553223 - DNA, 548 bp, Homo sapiens
tcattgctagacacaggaatgagacgtagccttggtgacggagccatctccagggcatgatgggctggcaaacaacattgtgcaggactcgaccccagcagtgacatcatgtggcagcaagaagcaatggtcatagtaggcttgccacatagactccatccagctccttccacatcgggagtgagttggggggtcaaatgatcacccaccacctctacttattgaactgagccagctgctgcagctcttgtacaaacttataggagaggaaaatgctggactttctggtaataaagcgagcaggtgctcctgcaataattgagaagattacattctcatcaccctcaaatttatatcaagtccttctgttctacttccttaaaaggagacataagatcaaattttagcaatcccgtaacatgacaaacattttgagcagcagaattaaaaacaacaacagcatctccyagtaagacccccttctccttagcctctccactcctctccttcaaggtgcctttcctggcactatcaccaccctcacaacc

SEQ ID NO: 553224 - DNA, 532 bp, Homo sapiens
agtatccttccgttgtttaattagaaaaccctaaaactgactgaaatttgcctgaaaagagtcaatatctaattaccattcggggtgaggagagatgggcaactttgaattgtggcaatacatgggaaataagttgaaaaacaaaccctttgaaatgtgtctaactaccatcacaaccratgcagataatgattttatccaagatttacaatttgtgctgtcaaaaagtgaatgccccaagaactttcagaaaagagctaagtatgtttatagaatctacattacaagaattatcacatatatcttggtctgtctataggagaacatacacaggcagggtttctatttataaaaacactctctgaattgcaacagaatgcaatgaaggctctttatgtgttgtacccagcaccctatccccaggatgtagctcagtgtctgaaactttatgagaactcaataaatatatgataacttaatggttaaatgaatttagctaaaaaaaaagtgactgcttttcatcatggtttga

SEQ ID NO: 553225 - DNA, 1296 bp, Homo sapiens
aatcctgatagcaaaactacaaaacccaggaatgcaaaattgatttcaacttaaggggctatcaccattctaatctgtgattctaatgaatttggctatcttagatactttatacaagtggaatcatacagtttgtmcttctgtgactgatttactttacttagcattaatgttctctaggttcatccatgttgcatattgccagattttcttgttttaaagctgagtaatattccgttgtatgaatataccacattttctttatctattcatctgccaatagacattaaccttatttccacattttgattagtgtaaataatgctgcaatgagcctgagaatcatcccaatctcaattctttcagataaataacctgaagtgagattgctagatcatatggtagttctactttcttaattttttttgaggaaccactgtactgttttccatagaggctgcacagttttactttcccagaaacactgtacaagtgttccaatttctccccattgttaacactcgttatctttttcttttaataagaccattctaacaggcttgaggcaatatctctttgtggttttgatttgcatttccctgatgattagtgatgctgagcatttttttcatgtacctgttggtaatttgtatattttctttggagaaatatctattgctgattaaaaaaaaaaaaaaaactctcagcaagctagaaaaagaaattttctcgaagtggtggaaagcaaccacaacaaaacatataaacaatattatatttaattgtgaaagcgtaaatgtttaaaccacatagattaggacaagaaaaggatgtgtgtgttcatcatctctattcaacattttactggtgatcctagattgagtataaatatttaggggataactattgtcactgaagcccaaatcttggtcatcctcaggaaaaaaaaaaaagttgattaggttgtatataatctaaatctacttgctaatttaatttctctaaaattacagcttgtatcaactctagaatttattgggcacctcctaggacataaacactggaatttggtgagagacatcaaataggaaagaacctggctctgacataaattcaacacacggagggggacacacgttatgagactgacctggcctcttcatctcataaaaggggttcttgttgctggtaacacagattaaaactatttcaattacattcaaggtaaaaagattagcaatgataggtaagataaaaaaatcaccccgcaggaagacaaaagtctcacaaaaggat

SEQ ID NO: 553226 - DNA, 1296 bp, Homo sapiens
aatcctgatagcaaaactacaaaacccaggaatgcaaaattgatttcaacttaaggggctatcaccattctaatctgtgattctaatgaatttggctatcttagatactttatacaagtggaatcatacagtttgtccttctgtgactgatttactttacttagcattaatgttctctaggttyatccatgttgcatattgccagattttcttgttttaaagctgagtaatattccgttgtatgaatataccacattttctttatctattcatctgccaatagacattaaccttatttccacattttgattagtgtaaataatgctgcaatgagcctgagaatcatcccaatctcaattctttcagataaataacctgaagtgagattgctagatcatatggtagttctactttcttaattttttttgaggaaccactgtactgttttccatagaggctgcacagttttactttcccagaaacactgtacaagtgttccaatttctccccattgttaacactcgttatctttttcttttaataagaccattctaacaggcttgaggcaatatctctttgtggttttgatttgcatttccctgatgattagtgatgctgagcatttttttcatgtacctgttggtaatttgtatattttctttggagaaatatctattgctgattaaaaaaaaaaaaaaaactctcagcaagctagaaaaagaaattttctcgaagtggtggaaagcaaccacaacaaaacatataaacaatattatatttaattgtgaaagcgtaaatgtttaaaccacatagattaggacaagaaaaggatgtgtgtgttcatcatctctattcaacattttactggtgatcctagattgagtataaatatttaggggataactattgtcactgaagcccaaatcttggtcatcctcaggaaaaaaaaaaaagttgattaggttgtatataatctaaatctacttgctaatttaatttctctaaaattacagcttgtatcaactctagaatttattgggcacctcctaggacataaacactggaatttggtgagagacatcaaataggaaagaacctggctctgacataaattcaacacacggagggggacacacgttatgagactgacctggcctcttcatctcataaaaggggttcttgttgctggtaacacagattaaaactatttcaattacattcaaggtaaaaagattagcaatgataggtaagataaaaaaatcaccccgcaggaagacaaaagtctcacaaaaggat

SEQ ID NO: 553227 - DNA, 1296 bp, Homo sapiens
aatcctgatagcaaaactacaaaacccaggaatgcaaaattgatttcaacttaaggggctatcaccattctaatctgtgattctaatgaatttggctatcttagatactttatacaagtggaatcatacagtttgtccttctgtgactgatttactttacttagcattaatgttctctaggttcatccatgttgcatattgccrgattttcttgttttaaagctgagtaatattccgttgtatgaatataccacattttctttatctattcatctgccaatagacattaaccttatttccacattttgattagtgtaaataatgctgcaatgagcctgagaatcatcccaatctcaattctttcagataaataacctgaagtgagattgctagatcatatggtagttctactttcttaattttttttgaggaaccactgtactgttttccatagaggctgcacagttttactttcccagaaacactgtacaagtgttccaatttctccccattgttaacactcgttatctttttcttttaataagaccattctaacaggcttgaggcaatatctctttgtggttttgatttgcatttccctgatgattagtgatgctgagcatttttttcatgtacctgttggtaatttgtatattttctttggagaaatatctattgctgattaaaaaaaaaaaaaaaactctcagcaagctagaaaaagaaattttctcgaagtggtggaaagcaaccacaacaaaacatataaacaatattatatttaattgtgaaagcgtaaatgtttaaaccacatagattaggacaagaaaaggatgtgtgtgttcatcatctctattcaacattttactggtgatcctagattgagtataaatatttaggggataactattgtcactgaagcccaaatcttggtcatcctcaggaaaaaaaaaaaagttgattaggttgtatataatctaaatctacttgctaatttaatttctctaaaattacagcttgtatcaactctagaatttattgggcacctcctaggacataaacactggaatttggtgagagacatcaaataggaaagaacctggctctgacataaattcaacacacggagggggacacacgttatgagactgacctggcctcttcatctcataaaaggggttcttgttgctggtaacacagattaaaactatttcaattacattcaaggtaaaaagattagcaatgataggtaagataaaaaaatcaccccgcaggaagacaaaagtctcacaaaaggat

SEQ ID NO: 553228 - DNA, 1296 bp, Homo sapiens
aatcctgatagcaaaactacaaaacccaggaatgcaaaattgatttcaacttaaggggctatcaccattctaatctgtgattctaatgaatttggctatcttagatactttatacaagtggaatcatacagtttgtccttctgtgactgatttactttacttagcattaatgttctctaggttcatccatgttgcatattgccagattttcttgttttaaagctgagtaatattccgttgtatgaatataccacattttctttatctattcatctgccaatagacattaaccttatttccacattttgattagtgtaaayaatgctgcaatgagcctgagaatcatcccaatctcaattctttcagataaataacctgaagtgagattgctagatcatatggtagttctactttcttaattttttttgaggaaccactgtactgttttccatagaggctgcacagttttactttcccagaaacactgtacaagtgttccaatttctccccattgttaacactcgttatctttttcttttaataagaccattctaacaggcttgaggcaatatctctttgtggttttgatttgcatttccctgatgattagtgatgctgagcatttttttcatgtacctgttggtaatttgtatattttctttggagaaatatctattgctgattaaaaaaaaaaaaaaaactctcagcaagctagaaaaagaaattttctcgaagtggtggaaagcaaccacaacaaaacatataaacaatattatatttaattgtgaaagcgtaaatgtttaaaccacatagattaggacaagaaaaggatgtgtgtgttcatcatctctattcaacattttactggtgatcctagattgagtataaatatttaggggataactattgtcactgaagcccaaatcttggtcatcctcaggaaaaaaaaaaaagttgattaggttgtatataatctaaatctacttgctaatttaatttctctaaaattacagcttgtatcaactctagaatttattgggcacctcctaggacataaacactggaatttggtgagagacatcaaataggaaagaacctggctctgacataaattcaacacacggagggggacacacgttatgagactgacctggcctcttcatctcataaaaggggttcttgttgctggtaacacagattaaaactatttcaattacattcaaggtaaaaagattagcaatgataggtaagataaaaaaatcaccccgcaggaagacaaaagtctcacaaaaggat

SEQ ID NO: 553229 - DNA, 658 bp, Homo sapiens
atggatacaccagctgctgctttggatttcacccattggcggtttctataaaaactttagacacagtgagccactcttctcacggaatggtggaaaccctcccaattccaatttcctaaacaccagccaagggccagccttgcatgcaggcctttctaaggatggcagtctcttgcctgttatatgaaatcttttctgcacactttgtataaccccaacttaatttttggtgttgttttaaaatttcattttaataacataatattataagataaggtaacttggtactaatttctgttgtatgatccatyttaagttgcagcgctggttacttttttgactttcagtgacgaacagctatttgtacataagttaccatagcaatttaggtaattataatctgtcctatttatctcatttacctttcagtaaaattgttaaataagcaaaataatttctgagttaaaattagaataaaaattgtcttttatttggattacatgaataatctagttttcatattgtgctaaagccctgcttagaattatgaaataagataaaatattcaatcatttttatcaatattttcttacctaagcatgcaattaaatttatttattttatatacttcaatttgagaaataatgaccacatgttg

SEQ ID NO: 553230 - DNA, 556 bp, Homo sapiens
aatccttatgctacctgatgtaacatgatgcagcagtaaacaaaatgaatgacactgcatttgtgtaaatgtgttctgattccgacttaggcacaaatttaatggttattcagtcaatcagttagctctttctgaagtgctaagaatatttttaaaaatcattgatattaattacttccctattaaacaactatttactgcaaaagatgtcaggcaaattatgtagcattgttttctacaggcagggtctcaatctacttgtggcacgggtttctaaatgttttacttttgttcaatttgtttttaattgaatagaagtctcttggttttctccacagacagtgtttctttttaaattccagaaatatgtaatataaaccttcatcctaactacttytatttctagaaatcatcattttgtgtaaaggtctcattatgatttaagttctgtaactattttcattcattaagtctaagtgattgcaacagagtgccggaaagtcttagattttttggtaatttataatatatatatattcattttaggcataggcaa

SEQ ID NO: 553231 - DNA, 659 bp, Homo sapiens
ttgacacattacytacattacttataaaatatttgttccacattccgtagccagcaccaatatttacacagtatgcactggtgctgccttactggttgtttacagctacaacctttccaattagttgctgcccatgccttacaggttattgaatattttgagtatcccctacactagtcatagtcccaacagaaaacagaggacatactcagatgaaggagttggggagaggaaatatttagaaaacgcaggtaggagtaaaagaaaagggcaacatatagtgtagtgcttggggctagtaattgtgtgtctgcaaccatgcttcacaatgaagaggcaaaaagagaagccataggagaggagcagagccaatgctttggcaatctgccaggacaaagcctggtgaataaataccctgatctcactgtactgttacctgttcatcctttgcctgtctctcattggccatgcccaatcagaagctaaagaagaggaacccattgatgtggaactagaggttatttgtgcctacagtgcacagagcatggagacgagaaatggagagtagctctgaaagaacaaaggaaaaatatccagcacattacttctgcttatactgactgagttatgccagcatgttgcagttcacaatggggaac

SEQ ID NO: 553232 - DNA, 1003 bp, Homo sapiens
tgacaaacctgacaaaaacaagcaatgggaaaggataccctatttaataaatagtgttgggaaaactggctagccaaatgcagaaaactgaaactgggccacactcatacaccttaaacaaaaattaagtaagatggatgaaagagttagaagtaagacctaaaaccataaaaaatctagaagaaaacctaggccaccaacctcaggggaaatgacctgtagtgaaatgcatggtacaaacatgcattccctgcttccttgagtgggcaacgttgatggctagtccaaccacttcaggcacacccttgcaaacacggctggttgctttttgagccagcttggccttgccyggcatacacaagcctcaatgcaacaactgtgctaaaaatggagccacacagaggaaatgagcagcaagctcagaagcagggtgtgcactgcctttggggctccagtccatgcctcagggcttgtatgggactgcaggattcttggttgccaagaggtagaccatagaccagccgaggaggactttatgttcaagggcagaaagcagccaggtttaccacccaggggactcggccttctgtggccccggtcagacttagaatttggctcaaagcaggaccagctcactcggagtagtgtgtcagtagctggggcctgtacatgctaggcaaggctaagctggctcaaagagcaaccagctaccactgcaagggtgcttctggaggaggtggagcagccagcaacatcagctacacaaggaagcagggatggccaggttctcacagcatgagtggccaccgcctgatggctgatcaagcagaggcctgaggaaaagcagatggcagttgggccctacctctagggtagaagaactgatgtactctgaccggtagtgagtgaggttggtggtgggtccaccggctcctggcacacccttgcagaggaggctgtttgctctttaaggcagcttggccttgcctggcatgcacaagcc

SEQ ID NO: 553233 - DNA, 553 bp, Homo sapiens
gggcgcctgtagtcccagctactagggaggctgaggcaggagaatggcrtgaacccaggaggcagagcttgcagtgagccaagattgctccactgcactccagcctgagtgacagagtgagattccgtctcaaaaaaaaaaaaaaagaaatccttacctgttcctgtttacttatttgtttatagagtgtaacatgtatgataactaacactatcatctcactaagtttttacactcttgctgttgagggaatcctggtcccacttctcatctgccatgagggaatattcatgaaagttaaatttatgaccaccctttttaccttctcacccaacttgggaggttggaagaagtaactgcctgtgagtttggcaccttctttattttggagcaaactaccaacagcaggcacacatttttgcctgtcttataacacatctgtttctgtgggctgttgaattgagggcaacgtgggcaattattccaatctgagaaaagatgagaaagttttaggaagtcaattttgcttttaacccaagcaaaaaagagctct

SEQ ID NO: 553234 - DNA, 766 bp, Homo sapiens
atatatayatatatatatatatatatgaagcgtgagagaattagaagttacctgcagccccaacttgcctgccaacaaattaaagtaattcacttggaaaaagactgtctttcaaacttattaagacaagtggaaattccaaccactacattatgcataaataacctaatacagtatacaccatcttgatgagaattctgctgattataaataaatattattattatgtaaatcaacaaaaatgcagtggatttaatgtttctttagtctttttaatttgggattgaactgtcgttaaaacttgtcattttatttttatttttatattaactttgatgggttcaacaataaatggtgaactggaactcacccatgctttctgtagtacagctacttgtgaaacatgtgtgccagagatccattctgctttggttcaaatcctggtttaagaacttattggctgatgaccttataaacattgcccacaaaaaaatgtagaaccaaacgttgctaactgctaaataaatattacctattattagcatacactttaaaagcttttacccaaaacaacattagggaaatataattaaaaacaaaatcacctcccaatccagaaaacctcttcataagagtagaagacaaaacaaaatattattgaaaaaacatttggctaggcgcggtggctcacgcctgtaatcccagcactttgggaggccaagacaggtggatcacttgaggtcaggagttcaagaccagccgagcc

SEQ ID NO: 553235 - DNA, 766 bp, Homo sapiens
atatatatrtatatatatatatatatgaagcgtgagagaattagaagttacctgcagccccaacttgcctgccaacaaattaaagtaattcacttggaaaaagactgtctttcaaacttattaagacaagtggaaattccaaccactacattatgcataaataacctaatacagtatacaccatcttgatgagaattctgctgattataaataaatattattattatgtaaatcaacaaaaatgcagtggatttaatgtttctttagtctttttaatttgggattgaactgtcgttaaaacttgtcattttatttttatttttatattaactttgatgggttcaacaataaatggtgaactggaactcacccatgctttctgtagtacagctacttgtgaaacatgtgtgccagagatccattctgctttggttcaaatcctggtttaagaacttattggctgatgaccttataaacattgcccacaaaaaaatgtagaaccaaacgttgctaactgctaaataaatattacctattattagcatacactttaaaagcttttacccaaaacaacattagggaaatataattaaaaacaaaatcacctcccaatccagaaaacctcttcataagagtagaagacaaaacaaaatattattgaaaaaacatttggctaggcgcggtggctcacgcctgtaatcccagcactttgggaggccaagacaggtggatcacttgaggtcaggagttcaagaccagccgagcc

SEQ ID NO: 553236 - DNA, 766 bp, Homo sapiens
atatatatatatatatatatatatatgaagcgtgagagaattagaagttacctgcagccccaacttgcctgccaacaaattaaagtaattcacttggaaaaagactgtctttcaaacttattaagacaagtggaaaktccaaccactacattatgcataaataacctaatacagtatacaccatcttgatgagaattctgctgattataaataaatattattattatgtaaatcaacaaaaatgcagtggatttaatgtttctttagtctttttaatttgggattgaactgtcgttaaaacttgtcattttatttttatttttatattaactttgatgggttcaacaataaatggtgaactggaactcacccatgctttctgtagtacagctacttgtgaaacatgtgtgccagagatccattctgctttggttcaaatcctggtttaagaacttattggctgatgaccttataaacattgcccacaaaaaaatgtagaaccaaacgttgctaactgctaaataaatattacctattattagcatacactttaaaagcttttacccaaaacaacattagggaaatataattaaaaacaaaatcacctcccaatccagaaaacctcttcataagagtagaagacaaaacaaaatattattgaaaaaacatttggctaggcgcggtggctcacgcctgtaatcccagcactttgggaggccaagacaggtggatcacttgaggtcaggagttcaagaccagccgagcc

SEQ ID NO: 553237 - DNA, 673 bp, Homo sapiens
ttaattcagaaactcttgactgctggaggctgtgattgacccactgagagcttttaggcatgtggatgtgagtcagccaggattgatggagcattgactgctaattggactcctctgggaaggtagaggggggcaacacataatgccttcgctgtgggagcttcatcaaggggatgattcttggaaggacatcttttcctccctctttccacaggggcatgctagccctgtcattctaggagtttattatccttcagacacagctacttatgtttttaattccctcacagratgaagacatgaagagaaagtttcaagatcttctgtctgaggaaaatgaatccacagctctatctcaggttctagcccaggtattcgtattcctgatgatcactaaatatagtctgggcttaaggagctgattagcaaagatgatgaaattcaagattttcctgagtagcaattgcttaacattgtttcagttataatgtagtagaaactctgtttgaacttgattcactccagcacccttagatttaaaattgcaggatatgtttaatatctaacacataatagacagataagcacagctagggattgtcatccaaaaggtcacctgcaaggcaatttcaaaagactctattagaggctcaaatataaatttgttggaaaa

SEQ ID NO: 553238 - DNA, 616 bp, Homo sapiens
caagccccacttctaattcttctgtatcacaaccctggagacagycacaaactccactgacaaagtcaacattctaaggaagatttcttttctttttttttttttttgagatggagtctcgctctgtcacccaggctggcgtgctgcgtcgtgatctcagctcactgcaacctccgccttccaggttcacgccattctcctgtctcagcctcctgagtagctgggactacaggcacccaccaccatgcccggctaatttttttttttttgtatttttagtagagatggggtttcaccgtgttagccaggatggtctcgatcttctgatctcgtgatctgcctgccttggcctcccaaagtgctgggattacaggcgtgagccaccgcgccccggccaggaaaatttcttaatatgtgctattaatctcttcccattcaatttcctccaactctttaattcaaaagttactcatttttcttgtgtttcttcaagttctctctcttccttgaaccatgtagatatctatataaatgctcatttacataagttagcgtatctacagaaatgctcagaatttctgttgaattctggttcttttatttgcctcccatggcc

SEQ ID NO: 553239 - DNA, 616 bp, Homo sapiens
caagccccacttctaattcttctgtatcacaaccctggagacagccacaaactccactgacaaagtcaacattctaaggaagatttcttttctttttttttttttttgagatggagtctcgctctgtcacccaggctggcgtgctgcgtcgtgatctcagctcactgcaacctccgccttccaggttcacgccattctcctgtctcagcctcctgagtagctgggactacaggcacccaccaccatgcccggctaatttttttttttttgtatttttagtagagatggggtttcaccgtgttagccaggatggtctcgatcttctgatctcgtgatctgcctgccttggcctcccaaagtgctgggattacaggcgtgagccaccgcgccccggccaggaaaatttcttaatatgtgctattaatctcttcccattcaatttcctccaactctttaattcaaaagttactcatttttcttgtgtttcttcaagttctctctcttycttgaaccatgtagatatctatataaatgctcatttacataagttagcgtatctacagaaatgctcagaatttctgttgaattctggttcttttatttgcctcccatggcc

SEQ ID NO: 553240 - DNA, 550 bp, Homo sapiens
ccagagacacaatcaagcatcaaatactgtacattgcttagctacacagggtgacaagaagttcccacaaggaggctggcataagccttcctttcaaaattcaactaaaatgctgatgggcaattttctttataggcaaagcatgatggggctgcagtttktatgcacttctgaaaccacaggggtttcaattgtctctcaggccaaattcttcagaaaactttgctcctatttcatccccagacttgagtttgccaactcaatacagctaaatataaatgtaaatgtagatggaacttttacttcttaacataaaatgctttttatttgattttctcttgattgctgccaacatgagttgatagatacattgcatttttggtttctggaatttgttgcaaatgttggagcaaggggttgattgattggaataaacatgtagcaatggcaacagctgttaaaaaaatagctgaacagggaatgaaataatttaaaataaacagtagttacatttatgacatacatactgcctggatatttttaattttcc

SEQ ID NO: 553241 - DNA, 604 bp, Homo sapiens
taatgcaaagcctatcaaacttaaaattagcttaatcctgaaagatgtatattgcataatcaacctgtcacttttttcaaacacgatttgggagggtattgaggtcccatgtaaattttaaaataaaagacaaacaggaactaatcttttagtaaaaattattttgttttcatataggaaaacaatgccttctgtcatttacggaaaacacatgggcaatatggttggttgttcattgtgcccctctatcctataggaagaatgtgatcttttaattgtgcttggtgctttgtttctggagatatatatatatatattatatatatgtatatataccatatgtatatatacatatgtatgtgtgtatgtgtgtatatatatctctctaggttgtatgtaattcaatatgttggaatttaaagatgcattattatttggatttgatgtgaaattagattgtgaataatggagattgctctccattttttgctgttctagcatagccaaaaatataaakatatagatgtacatatacatatgtatttgattaaacactttaaattttaaatggccgcatcaaattttaaatggtagatgatatcaa

SEQ ID NO: 553242 - DNA, 1078 bp, Homo sapiens
aatatcccaagtgtgatgggaataatattcagatttccgtttctatgtcatgtcaatatcccatgacacgtgggatatcattcttcttttgatataagaaatccatttaaaaatctaaaaattgtttttagctcaagggccatacaaaaacaagaagtgggtgggctggatacttgtttatttatttacatattttctgtggctacttttctgctactgctgcaaagttaaatctttgcagcaaagttgagtatttgtcagagagactttaatgcttgcaaagccaaaactatttactatttggctcttcaagaaaaactgtcaatccctggtgtagacaacaatatatttccatcaacaagcagtaagtagtcacatgacatgatatataaagtacaatataacacagtttttgtccaaaaggcaacaaactaacattctaacacaataatattcttgaaatcatgaatatatattttgagcaactactatgtgccaagcactattctagacattggagataccacagctcaggcatataaatggacataatctctgttctcatggagtttacattcttgaatgggagcccaataataacacacaaacatgcatacacacaataaataaatgtaatttacagacaaaataacttctacaaatattcctggcttctgagctaaactggaaatgacaaagcagtaacactaatacacttttagggttacccaacaagggttctagcagcctgctcattgaacctctagttggggttaagacttatcatgaggaaaatcttaaatcttgtcttctcagaaactgcaatacatcaaggagaaaataaaaattcaaggtcagaacacaagctcaatgcttttttttwtaaaaaaaaaatagcttacactgtcaaaattgtcttaaagcaaagattgtagatagtgggacaatatagttagaaaaatttggaattttctatggagccctagagattaaaaaaaaaaaactccaaatattgttacacttgaagttagttgaggatttaaggcgttagagaaataggctgaggaactataaaagg

SEQ ID NO: 553243 - DNA, 1078 bp, Homo sapiens
aatatcccaagtgtgatgggaataatattcagatttccgtttctatgtcatgtcaatatcccatgacacgtgggatatcattcttcttttgatataagaaatccatttaaaaatctaaaaattgtttttagctcaagggccatacaaaaacaagaagtgggtgggctggatacttgtttatttatttacatattttctgtggctacttttctgctactgctgcaaagttaaatctttgcagcaaagttgagtatttgtcagagagactttaatgcttgcaaagccaaaactatttactatttggctcttcaagaaaaactgtcaatccctggtgtagacaacaatatatttccatcaacaagcagtaagtagtcacatgacatgatatataaagtacaatataacacagtttttgtccaaaaggcaacaaactaacattctaacacaataatattcttgaaatcatgaatatatattttgagcaactactatgtgccaagcactattctagacattggagataccacagctcaggcatataaatggacataatctctgttctcatggagtttacattcttgaatgggagcccaataataacacacaaacatgcatacacacaataaataaatgtaatttacagacaaaataacttctacaaatattcctggcttctgagctaaactggaaatgacaaagcagtaacactaatacacttttagggttacccaacaagggttctagcagcctgctcattgaacctctagttggggttaagacttatcatgaggaaaatcttaaatcttgtcttctcagaaactgcaatacatcaaggagaaaataaaaattcaaggtcagaacacaagctcaatgctttttttttwaaaaaaaaaatagcttacactgtcaaaattgtcttaaagcaaagattgtagatagtgggacaatatagttagaaaaatttggaattttctatggagccctagagattaaaaaaaaaaaactccaaatattgttacacttgaagttagttgaggatttaaggcgttagagaaataggctgaggaactataaaagg

SEQ ID NO: 553244 - DNA, 1932 bp, Homo sapiens
aactcaaactcacttttgttctctagccagcaagccttccatgtgattacagaattactgggcagactacaccgaatcatcttatttcagaagagatgattaatcacaaacagcaagagttaagccaattacaagtacttccccctaaggtgattgccttaccataactacagataaaatccaccagcttcaggcgcattttatgaggccagttctcatctaggtgtgacagagtgaatctttgaacatcatcattaaaatcaatgggagctgtaacagaggcagaagtgtggaattgggtgcactagctctgaaactgctgatgttcatttaagcccactgctcattttgcaagcaaaaagatttatcctatccgacagagcaatccaaagaatctctccagtccatactactcagcactaagctgaaaattacaaaaagctgataactgcatgttaaattatgttttcctgcacttgtctactaccttctacatgagagtcacttgtcttagccatgttggggaatagggattcattatcaagaaataaccccagtgtatcctgaatacaggtccctacagaagtagaaagcactttcttgattacagaaagagcagataaacacacagattagattgtttctgaattgcccactctgaactgccccagcagctaaagaagataccacagtcagtccgaaacagtaagctgcttgctgttctgttcctgtctattggggaatcacattgcagggttaagattagccaataggtggayagagaatgtacttgaagaccagagacgcagagaaataacaaaccatctggaaataattttgtgtcatttcaaaacaatgcattttaaaattctaaggtttttttttaattgtgaatactatgaataatagtattaatgttttcagagcttgagtcctctaaagcagtgattctcaaatgaccagtgatgaagaaacagttttgttgttatttttccaatccatcaggacagatatcattgtaaattcggtacaaattactaaaaaaattatttaaaatagagacatataaaatacaagccccaatttttgtttcattattagattcaagaaacataaaattgctcaaccaaactgctacaaatgtttccaaactgattctcactgcacaccagtgctggctactgagggtcaccctttgaataggacagctctaaaggacttcattgggctttggcccggaatgattacagcaaggtttttttttaaatattttattagcctgatttccctactagtaggatttaaatcccacatcattaactttagttttatttttcccagaatacactcgaacagcaaagtatatttgctaaacatgcttggtgcctcatttatctagtaattctctccttcattctacaaacatttatagaacagttctttgatggttcaaagttctatcttcaaaattctagaaattgagcccagaaaacacagggtttagaaaggcttctaaccatactatcattttaaagtttgtttttgcaagagaagaaccaagtaaaatcctaaaaatagtctctatttttaagtccaatatattgtctaaagtctaaaatgcaagcactaacacactggctttttatacctgattaacataagaataaaatatagaggaaaaagctgaactgtacccctacaaaatcagatatgctccagataattttatttctaccatcaatttatcttcaacatagataatttcaataacttatttttcctttaaactttttaattgtggccagctttaacctccattgaaatagctaccctggcttcttttaccctacagataaatccaaccataatcattcctacatcaattgataatgcatttttcccaaaaatgctaatgacctcattaatgtccca

SEQ ID NO: 553245 - DNA, 613 bp, Homo sapiens
caactttagctcataattcttacgaattattcagggtttctaagactacatccatcatctgcactttttaaacttttactactatgcttctaaagcactagacaattatctttcttttttgcttcaccagtgtgatgtcagcagaatacaatcaggtacttcctcctcctcttctgatttccttttcctatacaacatccctccsctatctctctcatacctctccctcacgtatctactcagagaaatttaagaactaatttgaaagtccctgtaaaattttaagcataatttgacacagtatgattagtctcatgtacacagaatgtactaaaattgttattgtttacagagctgtaaaaatggtttgtagaacaacaaagaagttcggtttacattaccattttaacagaaacagagacgccattctcataacgaagtttaatgctaaatccatttttatagatatcatattgcacttaaaaattcctttatgtacaggcatatttaacaaaaatctaccataacattaatccactaagtcatttttgaataaaatcaatatatagcctttggtgtaaaaatgagaagtgataaaatgaaaacatttgcc

SEQ ID NO: 553246 - DNA, 613 bp, Homo sapiens
caactttagctcataattcttacgaattattcagggtttctaagactacatccatcatctgcactttttaaacttttactactatgcttctaaagcactagacaattatctttcttttttgcttcaccagtgtgatgtcagcagaatacaatcaggtacttcctcctcctcttctgatttccttttcctatacaacatccctccgctatctctctcatacctctccctcacgtatctactcagagaaatttaagaactaatttgaaagtccctgtaaaattttaagcataatttgacacagtatgattagtctcatgtacacagaatgtactaaaattgttattgtttacagagctgtaaaaatggtttgtagaacaacaaagaagttcggtttacattaccattttaacagaaacagagacgccattctcataacgaagtttaatgctaaatccatttttatagatatcatattgcacttaaaaattcctttatgtayaggcatatttaacaaaaatctaccataacattaatccactaagtcatttttgaataaaatcaatatatagcctttggtgtaaaaatgagaagtgataaaatgaaaacatttgcc

SEQ ID NO: 553247 - DNA, 1206 bp, Homo sapiens
tgtagctttggatggtcagggcctggcctaactgggaaccccgattctggtcatttctcagcccctctaggtgtcactcactctgtcatccgccaggtgggcattgataaagtgggccagcaggttatagcctcacaagaaaactacttcacccgggacatgagggatcaagccaacaaagaatcccagtggccctttctctttgaaaatcttcccagtggagctcagcacaccactgtacttaacctcccatcccacaaattagaccatgcagcacatcaagatggcatgcagggggtgggccaacatacaggacgcacactgcatcatcatcccctaggaggtctccttcactgcttgcttcagagaagtcttcatatccatccttattggaaacctgcttgatttcatctggagggaaaaccttcacgctgcccctggttacaaaggagaggggtcacatcagttgggggctcagacctcggaacagccctgtcttgccatccatcacacccatgcccagtgccacaaaaagcttcagtggtcagggagttgtcttcaggacccaggacccaggacccaggacccaccatccattcttctggccaagggtagcatggatgtgcgtgggcagtctcgaccttcattgcaagttcctgctccagctcctctgcttctgccatctccgtggcactaccacaagcccagggccagaaattttaacaatcacagcattgtttatgatggtaaaaattgggaaaaaaatcctaatgcatattatgccagttatttattgcctttcagttccaaatccatcatttattgcttgctctaccataatgaagctgggccctgtaagcatttcttcctcgttagtggacaggctaacgttttgtcagtagagggccttcagaggatactacaagaggaagggctttctcttcttagttccagtgtgtgtctattcgtgattctgtgtggctgccagtggcatrtatggggacttctagtggcactcaccgtgtcaagtatcagtggctccactgcggacttcttccacacctgtgtcactgagacaattgaccagtgagttccacaagcacccattgccagctttagcctgcagcagctcattagacctctaccgtccagttggtcatgtccacaactcctccaacatgttttggatctcagccctggagggga

SEQ ID NO: 553248 - DNA, 534 bp, Homo sapiens
tttagataagagcataaaaaagtcattatatcttaaagaaaaagaaattcaacttgatgtatagtttaagtgtaactatcacaaaagctgcatggagcctgtctttattatgttttcctcagaacattaccaaagaaacaggcatatcaatgttcatagcaaagtattatatatcatctgccaaatagctgcctgtactgccctgaaatggcaacttaacctaccggctgctagattctgtaacaccctacttccttccttcctgcagactatccccagtccaccacctccaccgtgctccccagtggcacagtcagttccaaaaatgaggatcccaatcacagtctggatttccttgcccttgcaaggtaaaagctgctagtgyataacatatttccctactgacttcataagaagtaaataaatgcaagtattctttcaaaagaaaatgtattaaggacctacaaatcggcaggcaataagccatcatcagggacatatggagatggcagacacagtccctgcccttgagga

SEQ ID NO: 553249 - DNA, 875 bp, Homo sapiens
tatttttgttcctttctcttagtcatttcaactgtgaccagggagggaaattccatcatatattgcaaatctgattaagttttatttttaaatggttagtttactaaaaataaataaataaataaataaataaaatcacatccatcaaggcatgaagggcaaactgaaatgttcctattcacaaacccagcatgggtgtatttcttattctcagcaaaaaagtccagaacatagacttacccacacttgggttggcacccaccatgctaccttactgatttcacagtggtgacaagggatgacattctttcttataggctttaattgacaatgcagatttagtcattgcctttatttagagctcttaaaagagttatcagaaaagaaggagataacttgattgccgttaattgatggtctgtccaaagataatttaacagtgggataactttctttacctaatctaaattaagaaacttattacacctttccctttaatgagaagttttgtcaatactttgaggcctaacagaatgacctttaggaaagaggtagtgttaggtgctgccagttggctttatgaagatgaagaaataaaattttctttaatagtatacatagtcccaaaatattactgtgtcgtctctctctttctctctctcatttatcttttctcttttaaatttagcttattcatagatctactattttgtttggcatggattgtrgatagagccactggaatatttgtcaaggatcttgttctgttcatagtagtcaataaatgtttattcaagtaacattgatatgattacttattgctgctgatgccatatctgttctgtgacctaaataaaaattcaagtctttgctga

SEQ ID NO: 553250 - DNA, 664 bp, Homo sapiens
gacccaatggttcccttctcgtaagtcactgctggtgctggtgccttcactccctccttttacccagtgcagagtctcccaaaggtgcacagtggctgaatgcggagattcctggagattcagagtcccagggggaggggctgggaaagtgtgtattaggaaacactcgaggctccaggctgacgacctcagggctcccgggctcacccccaagcctatttggccttggaggctgactggagctaaggcctggaacagagccagcaggggtcaagccaaagaatcacagtcaccctcatgcttcccatgccccttccatgactggcagagaaggctccagtattaacacagcacttttaaggcacttgatcctgtcagaacagaccactgmagccccctgaccaaaaggctgggtggtaactaaggctcaaacaggtgactccctcgcagataggtcctgatgggagtaggcaaactcaggacttctctggaagctgcatacatttctgaaacggacaccataaggaattaggagagttttgcttgttttttgtcggtaatcatgaaattataccaccagctcacaagagctaggaggacttgggacaagattttagagatgttaaagcacgccatccacatgatctcattaaatcctgacaat

SEQ ID NO: 553251 - DNA, 664 bp, Homo sapiens
gacccaatggttcccttctcgtaagtcactgctggtgctggtgccttcactccctccttttacccagtgcagagtctcccaaaggtgcacagtggctgaatgcggagattcctggagattcagagtcccagggggaggggctgggaaagtgtgtattaggaaacactcgaggctccaggctgacgacctcagggctcccgggctcacccccaagcctatttggccttggaggctgactggagctaaggcctggaacagagccagcaggggtcaagccaaagaatcacagtcaccctcatgcttcccatgccccttccatgactggcagagaaggctccagtattaacacagcacttttaaggcacttgatcctgtcagaacagaccactgcagccccctgaccaaaaggctgggtggtaactaaggctcaaacaggtgactccctcgcagataggtcctgatgggagtaggcaaactcaggacttctctggaagctgcatacatttctgaaacggacaccataaggaattaggagagttttgyttgttttttgtcggtaatcatgaaattataccaccagctcacaagagctaggaggacttgggacaagattttagagatgttaaagcacgccatccacatgatctcattaaatcctgacaat

SEQ ID NO: 553252 - DNA, 950 bp, Homo sapiens
tgaggacgctgtgaggtgcttagctcctaccgggaatgtcatcagagaaattcagcgactgacctcctgcaggagtagatgtggttaaaaggaacctcaggttccatcaaagtttccttcccactgtaatattctaggaactataactaaagaggttgaagtccttcaaacacagctttgctatacacttgtccagagaccagcagcagatgggaatgccacctcttaaagaagactggaatctatgtttatctgtgcccattatatccttaagtttggacatttagctgaccttctcttttaacatgggtctaatttatttgctgtgtcattttccatacaattcagttgctttaaaagttcatttctcataccatgaattaaaataaaaatttgaccaattaaaaaaaccaaagaaaatggctcagaataaatgaatatattatcaatggtgctaaacttttgcagggtaattcctgaatacttgcattaaagattttgtatcatgaaattacacttagcacatgtttattgttttttgacagttttcagtttatttataggyctaccaaggataaaatggatagataaaattagaaaccataaatttcacagagaattagttctactgtatatattttacatttgttttctctctagttatcctcttttttataagcgttcaatcaacaaatgttgaagtgcatgatgtcagcaaggcactgtgaaagcataaataaagaacagtgcttcaaggagtttacagtctttggggggaattaagcatgcaaagtaactattacagcccaatgtgacaaggactatagtcgagagaggtaggatgcaaagagaaaacaggaaaaagaactcccatttcaacctggaggacacaaggaatcttcacaaaggaggtagcactgaagagatgagtagttgccaccttcaagcaa

SEQ ID NO: 553253 - DNA, 950 bp, Homo sapiens
tgaggacgctgtgaggtgcttagctcctaccgggaatgtcatcagagaaattcagcgactgacctcctgcaggagtagatgtggttaaaaggaacctcaggttccatcaaagtttccttcccactgtaatattctaggaactataactaaagaggttgaagtccttcaaacacagctttgctatacacttgtccagagaccagcagcagatgggaatgccacctcttaaagaagactggaatctatgtttatctgtgcccattatatccttaagtttggacatttagctgaccttctcttttaacatgggtctaatttatttgctgtgtcattttccatacaattcagttgctttaaaagttcatttctcataccatgaattaaaataaaaatttgaccaattaaaaaaaccaaagaaaatggctcagaataaatgaatatattatcaatggtgctaaacttttgcagggtaattcctgaatacttgcattaaagattttgtatcatgaaattacacttagcacatgtttattgttttttgacagttttcagtttatttataggcctaccaaggataaaatggatagataaaattagaaaccataaatttcacagagaattagttctactgtatatattttacatttgttttctctctagttatcctcttttttataagcgttcaatcaacaaatgttgaagtgcatgatgtcagcaaggcactgtgaaagcataaataaagaacagtgcytcaaggagtttacagtctttggggggaattaagcatgcaaagtaactattacagcccaatgtgacaaggactatagtcgagagaggtaggatgcaaagagaaaacaggaaaaagaactcccatttcaacctggaggacacaaggaatcttcacaaaggaggtagcactgaagagatgagtagttgccaccttcaagcaa

SEQ ID NO: 553254 - DNA, 1518 bp, Homo sapiens
catatctattacaactgctctcttgaaaatcacctatttcccagaggtcttaaataggcttcttcaagcctcaccctctctaattcagttgaattatttttaaatttttaaaattttaatctttttaaagacaggagtgcagtggagtgattatagctcactgtgatctcgaactcctgggctcaggtgaccctcctgcctcagcctcccaagtagctgggacaacaggcatgcaccatcatgcttgcctaattttttatttttatttttagagatggaatcttgttatgttgcccaggctggttttgaactcctggcctccagcaatcctcctgcctcagctgtccagagtgttggaactacaggcataagccaccgtgccagccgactcagttgaatttaattctctccatcacttcccatctttgttcctatagctctgtttcttctgcctctctttcatgggctccttttcttttgatcatcaaagttaaggcaacagcaaggctctctattggacctttctgcctctcctccctccgtgcattcccagtgatggcgaatactaccagattcagctatcatctcagaccatttctggtaaagatctttaggttatgtgtcaaactatagttcttgggccaggtatggtggctcacatctgtaatcccagtactttaaaaggctgagagggaggttcacgaggtcaagagattgagaccagcctggccaatgtgggaaaccccatctctacgaaaaatacaaaaattagctgggtgtggtggcgtgcacctgtagtagtcccagctacttgggagactgaggcaggataattgcttcaacgcgggaggtggaggttgcagtgagccgagatcgcgccaatgcacttcaccctaggtaacagagcgagactccgtctcaaaaaaaaaaaaaaagaaaaagaaaaaacctatctatacatacatgtataagacatgaggcgatgataagtggtgattagtgttctcaagaacatgagccacagtagcggatagtgacggagacggctcatttttgatagggtagcagataagtccgtggggaggactttgttgaaaagatttgatgacttgtagcaatctgagggtgggggaaatatttcaaagaaggtagcccagaaaagcataaagcctctgagttgttgaaggaagagaaagaaggcatgtatgactgaaccaagcagagggaatgagagacagaggcagcccctctgcttgggagggaccaaggagcatgcagagtcggcttggccaaggcaagtttctgagtagactggggagcctttggagggttttgaacgggcgtgaaataactgacttaatgtttgaaaagattaatcactctggcgactgttgccaatacttttgagctgggaagccactgggagaktttgagcaggagggcagcatgaagtgacttgggttttctgaggatgatttgggctgctgtgtggaatagagacggtcatggaaccagagt

SEQ ID NO: 553255 - DNA, 603 bp, Homo sapiens
atcagcagcacccattccctagccccttgcctaccaaattatccttaaaaaccctaggctccaagttgttggtgaggcaaatatgagaaacatctcccatccttctgctcaactgccttgcagtaattaaactctttctctgctgtaacactgctgtctcaatacattggctttatctgcacagcgggcaagaagaaaccattgggggtgtaacaaggacaagattgcctagactcaaatcttggttgtgtcattatctgtatgaatttaggcaagttacgtatcccttctcagcctcagctttctcatctgtaaaatgagaacaataataatacttatcactttgggatgctgcaaggattaagtgaatcatacttgaaaagcacttaaatattcatagtacaaagtcagtgcctcataaatattatatattattataagtatagagctargttattaatccattaggaactacttgccttaaaattaaaatatttttaaaaataaaaaaaatttaaatatacagaaatgctaatatgtttttctcttccccaattgagtgttcacatttcacactgcaatcaagtgccttacacaataaaa

SEQ ID NO: 553256 - DNA, 603 bp, Homo sapiens
atcagcagcacccattccctagccccttgcctaccaaattatccttaaaaaccctaggctccaagttgttggtgaggcaaatatgagaaacatctcccatccttctgctcaactgccttgcagtaattaaactctttctctgctgtaacactgctgtctcaatacattggctttatctgcacagcgggcaagaagaaaccattgggggtgtaacaaggacaagattgcctagactcaaatcttggttgtgtcattatctgtatgaatttaggcaagttacgtatcccttctcagcctcagctttctcatctgtaaaatgagaacaataataatacttatcactttgggatgctgcaaggattaagtgaatcatacttgaaaagcacttaaatattcatagtacaaagtcagtgcctcataaatattatatattattataagtatagagctaggttattaatccattaggaactacttgccttaaaattaaaatatttttaaaaataaaaaaaatttaaatatacagaaatgctaatatgtttttctcttccccaattgagtgttcacatttcacaytgcaatcaagtgccttacacaataaaa

SEQ ID NO: 553257 - DNA, 513 bp, Homo sapiens
gtgtgtgtgaattgaaatgtgcatttatttatttacattttcctatttataattatatttatatcagagttcttctcaacacatcttcccagctggtcactatcaattgtccagagatacatgctagataaaacttatgtcctcatcctgggcctaatttagcaaatattatttgtattcagagaaattatgatttattcattgagtcagcaaacattattaagtcaagaaaggtacttaatgctgatgacagaaatataaatggagtgtgcttctgatcctctgagatctcccagtctggtgggagagctggtaaaagartcagtcatgattataacagggcaattagagttacagtggaggatgcagaggaggtaatgattacttaaccccttgagattaaaaatttgattaaagctgctctctgggctgggtatggcattttctagggctatataagcatctttcctgataggtggatggtaatggtaagagtgtccaataccatgaggt

SEQ ID NO: 553258 - DNA, 674 bp, Homo sapiens
gtaataaacatttactgtaagcgactgctgtcagccctctaacaccatagctcttgccagtgactcaccagcaattacatccacctagtcaagttctctcatagtacaatgtaatctctggtatcccccaaagccaaggagatcaagtaatgcaatacaagaaagagcagagtgttagacctgagagggatctctctgcttacaactctgagggcctcatgagaaaaagcagtttcctcccaagaggaggagactgtgacaacttttctgttttctgtgattctaggctagaattctgttagaattctttttttggggggcgttcccctcatgtggcatttggagtggcaagaggaaggacagacagaagtaaatggagaaacagaattcatttgacttttacagagagaggagatcttaaaaccatgcatatgtgtatgtacrtagagtaaatatcagtttttattaagtcaactttggactatagagctctttaaaaatccttttcctaactgtaattcctactcaagtcattatacttttgctgctagctggacctctgtagccaaatgagcagccattacaccttagtcgctgttcaacacccttcctcactgcagtgtgatagaccactctcagataacaatcatgctaattctgccagaagtatccta

SEQ ID NO: 553259 - DNA, 305 bp, Homo sapiens
taaacaactccaataaatcaaatagtataagctccaaaatagcctttaactgttaattggcccaaacttataaaacaaaatacattagaaattatattgtttattgttgattattggccaaatattctaacgtagtcagtgtcaatgatatctaacagatcaccattctcatatttttatagtatttgtgatgttagacctggatgtggtaaaacagtgtttgaaataactagccaattaaaaaaktatttgttttaggtgttttcaaaatttacttcattctagacattagaaacaaccattag

SEQ ID NO: 553260 - DNA, 631 bp, Homo sapiens
aatctttgaaatatttatgctagcaccttgcctttagttcatcataaaacctttctgtaaagaaggctattctggaacatactgccaatgtaattaccagcaactctgaacaactgcagttttaaggctgcatcttaatataastgattatttatatggcccgatccaacactgtttagaaagatgcttgcatgtttgtaggaagttaacacctagtgtttggctatacagtgccatcaaacagtcattagactacttgaacacattggatagtagctttaaagcaagccattacatcgtgcttttcccagacattactttcacatcaattactctttggccagtttaaggtaaactatcttctttgttttcatctgcgtgaacccagtatagaaaaataagaatcatgttgaaaaccacactattagtagtaaagcctaccaaaaagttcacaaagtgactacttttactaatccgttctgtaatttggatgttaaaagtttcactcccatgtacacatatcaacagaaaatgggaccaagcgaatttcaggacttcacaaaacagaattcaaaaactataaaatcagaaaatttccaagtttccttccactcccagctttctatgttta

SEQ ID NO: 553261 - DNA, 631 bp, Homo sapiens
aatctttgaaatatttatgctagcaccttgcctttagttcatcataaaacctttctgtaaagaaggctattctggaacatactgccaatgtaattaccagcaactctgaacaactgcagttttaaggctgcatcttaatataactgattatttatatggcccgatccaacactgtttagaaagatgcttgcatgtttgtaggaagttaacacctagtgtttggctatacagtgccatcaaacagtcattagactacttgaacacattggatagtagctttaaagcaagccattacatcgtgcttttcccagacattactttcacatcaattactctttggccagtttaaggtaaactatcttctttgttttcatctgcgtgaacccagtatagaaaaataagaatcatgttgaaaaccacactattagtagtaaagcctaccaaaaagttcacraagtgactacttttactaatccgttctgtaatttggatgttaaaagtttcactcccatgtacacatatcaacagaaaatgggaccaagcgaatttcaggacttcacaaaacagaattcaaaaactataaaatcagaaaatttccaagtttccttccactcccagctttctatgttta

SEQ ID NO: 553262 - DNA, 639 bp, Homo sapiens
gaattcaatttaaactttgacacatatccagactgaattcaataaaaggggcagtgtcaggtagtgaaaatagagccctgaattgggagtcaagatacctgagttccactcctgactctgtcactaacctaattttcctaggtcaagtttcatgctctggcaaatgrgtatgcagagatcaaagctagaaactgccaatgagtcttttatgtctaacattctatagttcacaaatccttggtaagagattcataatcttagtcttcaacattactcttaaactattaatacaatgtatttagaaaagataagaggtgaaatgccctatctgttattaatcaagcaaggacaaaatatcacttttataagaagaaggatcagaacgcaaatctgtaatattactttgggcccgcttttatttattaccatatcactttaataatcagattagcatttgctgccaattactagtttatgttattcccactgtttactacattccctttgtaagaatttaaggaatatgaaatccttaatcttcaacattcccaggaaagaggggctaccaaataaccaactgtataaaaaggcagaaaggttttcttcaccagtcatgagtctcatttggcaagacctcag

SEQ ID NO: 553263 - DNA, 1028 bp, Homo sapiens
tgctatcaggaaattaattccactggaattggatgtgtttcagagtatttaaattatgatgatttctggtgatatgtgtttttgacctttggacttctgacacacacatacacacacacacacacatacactgctctaagtcagtacatactagaattttgtattattacaaaaagaaccatattattaaggaagtgcattattgcttagagattagtggtttgattcctgaatatgaaactttatggcagcatagcagagtaattgcgaacatggacttgggttctattacttcatagcggcaaccagggcaaattatttaatctgtgcctcaatttcctcatctataaaatgggaagaatcatagtacctacttcatagggttgctaaggttttttaaagtgcttagaatagtgtcaagttcacagtaagtgccttgtgtgtgtttgtcattattattacaaggtcatcccctgcaaagatgatcaataatttgactctaaatctcctggatggtggggaaagatattgcctagtcattgtattcatgaccagcaggcaaaatcctctgtcctctgcacccctgaycagtctgtggaccactttccctcagcattactcatgtagaattgactcttggccctgatatctgcattgcttagttatttgaaaacaacattttaatgcaagattttattgaatgaatctgtttttgcatccttttcttagtcagtttgagctgccttaacaaaatgccataaactgggtggcttaaccagcagaaaccttttttcttgcagttctgaggctgaaattccaagatcgggtgcctgtatgatcagggtctggtgagacctctcttcctagtttgcagatggtcaccttctgactgtgtcttcacacagaggagagagacagacagagagcaagctctctggtgttctcttcttatcagcacctaatcccaggtcccttcactcccaggacctcatctaaatgtaattactcataaaggcctcatctccaaa

SEQ ID NO: 553264 - DNA, 499 bp, Homo sapiens
aagtcaagtagtgtgtcttccaccgttgtctcaggatccagggagggaacagaggtcatgtcacagtgtgagaagagcacatgggttggaaattgttgtggtggccatctttggaaatacaatctgtcactctgcatgagttctgtggccctggaaaatttacctaaaaggagctttgatgccccagttgctttcttctctcacaggagatccacgtttaccaaattgcttatcttcattgaagactggagcgactggagctacagactggccttcagtaagacaatcatggctttgcagaagggggtaaactgaggatctagcaccttgcacagggctgacacagagaaggtgcttcataaaccttgggtggtgggagctcaggacacctcacacaatcagcccaatattcctgggagagcagcagaagatgcrtgtccatgcagtgaggtccctggggctcggacctgtgggtaccagcacagacagattgaaggcc

SEQ ID NO: 553265 - DNA, 532 bp, Homo sapiens
gtctctgatccctctggattctacaaagcccagaagaagagatgctttcccctatctttactcattttatagcctttagcataagactagaaaaataagtattctgcattttagtgtgttttgtttccatgtcaaacgaatgtatcccctttcaagttgtgtattcagaaataattcacttcatgaatagctgaagtccrcaagattaaatggttgtttttatggaattgcctccattaatttcccaataaatcatttataatcttgtatgcctattaaacatgatagtctcaatcttagtatttacatcaggcaaaaacacccttcattaagtctgcaaatggttacttagcttttgtcaatattgaagtcaaattcccttcctggacatgtgcaatttaatctaaaatattgaactccttaaacactttgtaagcccatataaagaaagcatttcttcttatcataatgtattaacaatgtaagggatacttcagtttctatagaagaaaaataatgtcttgaatactca

SEQ ID NO: 553266 - DNA, 502 bp, Homo sapiens
tgaattgtgctgtggttgtctcacgtgctgttcacacagctctcaaaatagtgacaattgcttttaaaaaaacttgttaatcttttgctctaagtgctgcaactttgaacatttaagcaattaccttggctttaagtaaatcccaaaacttaagagggctccttacaatttttacaatctttgtaagtctgcatgaaacctttacaattatttccacttatttagttttcaattcataatgaacacatttctgttgcargttctgtatgtgtggtagagtgctctgtgttaggactaataaaagctaaatttagtgagcacatgagagtataaactctccagaggcaatatcatttaaccaccagaacaagactacaatatctatgttccattttacagatgagcaaaccaagattcttagagtttattaagtttagtaactctcccaaggtgaaatattttataagtgaccaagctctctgaaaccaagtttgtttcatac

SEQ ID NO: 553267 - DNA, 502 bp, Homo sapiens
tgaattgtgctgtggttgtctcacgtgctgttcacacagctctcaaaatagtgacaattgcttttaaaaaaacttgttaatcttttgctctaagtgctgcaactttgaacatttaagcaattaccttggctttaagtaaatcccaaaacttaagagggctccttacaatttttacaatctttgtaagtctgcatgaaacctttacaattatttccacttatttagttttcaattcataatgaacacatttctgttgcaagttctgtatgtgtggtagagtgctctgtgttaggactaataaaagctaaatttagtgagcacatgagagtataaactctccagaggcaatatcatttaaccaccagaacaagactacaatakctatgttccattttacagatgagcaaaccaagattcttagagtttattaagtttagtaactctcccaaggtgaaatattttataagtgaccaagctctctgaaaccaagtttgtttcatac

SEQ ID NO: 553268 - DNA, 848 bp, Homo sapiens
acgactgggctaactatgaaaaaggctaataccttttattgaaccatgttaacttcagagagtcttagcattagcctgaaattttgctctgattactgtcaaatgtcttttgagtatgattccctgcttggagcagcagagactaactctgttttttaatagaagttatacccctgaactgacataacagaaaaggtactgcactcgtgtcttgctactcctgaacctccattcctgagaatgtgtcatacagttctatagcactcaaaagtatccaataaaagcaagagctagtttggaacactgaattttagtgatcaagttggtagaacaacaacaaattttaaaatgtgctagaggtaacgtgtgctttgttggacaaagggccgatgggagtttctggcaatctggcccatggcagattgcctgttcacctcgaacctgtggaatgacctgcaatgttgcatgagcaacaggtctgacctactgtgtatggtgtttgtgaagatcagttaatcaaatattatatcaggctgggtgtggtggcttatgcctataaacccagcactttggaagacagaggcaggaggaccacttgaggccaggaattagagagaccagcctggacaacatagcaagaccctgttcttatttttaaaaataaaataaatttaaaattggccaggcatggtggcttatgcctatagtcccagcactttgggaggccaaggtgggtggatcacttgaggtcagaagttcaagactaccctggccaacatggcaaaaccccatctctactaaaaattaaaaaattaggcccagcctggtggctcactccwgtaatccca

SEQ ID NO: 553269 - DNA, 1263 bp, Homo sapiens
tgaactatattacattctggaaaaagcaaaactatgagacagtaaaaagatcagtggttgccagaagttaaggggcagggagaatgagtaagttgagcacgcaggatttttttgaacactgaaattatgctgtatggttctgtaatggtggatacatgtgattaaacatttttccaaaaccatggcatagaacaccaagagggaaccctgatataaactgtggacttaggttgatgatgcttgtcaatgtaggttcactgattgtaagaaatgtacccctttggttagggatattgattgtaggagaggctgtgcttgtctgtgtttaggagtatatgggaactctctgtacttcctgctcagttttgctgtgaacctaaaactgctgtaaaagagtctttttaaaagggaaaaaaatggaaggaaattatgaaaagggaaaaaacatatagatacttgcttaaatattaaaaagtcctgggattattgtgtcattctcttgtatcaagccagaaagttttactttttctttgtaattgattaaatatttcagagaatcttttagaaattagaaaatagtccaggcgcggtggctcacgcctgtaatcctggcattttgggaggctgaggcaggcagatcacctgaggtcgggagattaagaccagcctgaccaacatggagaaaccctgtctctactaaaaatacaaaatcagctgggcatggtggcacatgcttgtaatcccagctacttgggaggctgaggcaggagaatcgcttgaacccgggaggcgggggttgcagtgagctgatatcgtgccattgcactccagcctgggcaataagagcaaaactctgtctcaaaaaaaaaaaaaaaaaaaaaaaagaaaagaaaagaaaaaaaaattagaaaacaagatcttatagaaacctttattacttccaacattattaacaaaaaactaagtaatggaatggcaggtgaaatgattagttacatttgggaaaaaacatgtaacagtgacttttgcaatttttctgatattttcattacattgaaaagccccctctccaagagatggtgtcaggagtgcagttatccagatggtgacttgggatggagtcagtgtgatgtgccagtttgattggcatctgacagattctctgacatatactgaaataaaacttgagaatattttcatccataaaccacacacatacattcacacatytgtatctaggctttaattgttcataacacttcc

SEQ ID NO: 553270 - DNA, 758 bp, Homo sapiens
ggttggcaaatccgaagtctgtagagctggttgtgggttagaaattcaggcaaaagttgatgttgcagtcctgattccgatggctggaaactcaaacagattcctgtgtttcagtctggagggagaattccatcttctttggagaattttgtstttttcctgaaagccttcaactgattggatgatgctcacgcctcctatggagggtaaatctgatttactcaaaatctactatataaaatgttaaatcacatccaaaaaataccttcacagcaacatctagactgtttgaccaaatatttgggcaccatagcctagccatgttgacacagaaaatcaaccatcacagaaagcaaacttagcaagagctaataaaaacaaaagaattccaaagacggttggatcagagtgaacaagattgggtatctgagaaaggctggcaggtgccgcgtgtgggtggaagagacagcaaggttgcagataactggagtctgctggagcatgaaaatggtgtcctgagttaagtatgcagtaaaggttgtaggtaactaagagcagtcagaggcacacaaagatgtcagaactgggaatacttaggctccattaaaccaatgcacttcatcgcattgattttcattgtttgttctcattcccttgtttgcttattcattacatgctgctccactcagagcattttgacttgcttgaacatttctttattagcttgttggtgttggttttgcttgtcagctacacta

SEQ ID NO: 553271 - DNA, 758 bp, Homo sapiens
ggttggcaaatccgaagtctgtagagctggttgtgggttagaaattcaggcaaaagttgatgttgcagtcctgattccgatggctggaaactcaaacagattcctgtgtttcagtctggagggagaattccatcttctttggagaattttgtctttttcctgaaagccttcaactgattggatgatgctcacgcctcctatggagggtaaatctgatttactcaaaatctactatataaaatgttaaatcacatccaaaaaataccttcacagcaacatctagactgtttgaccaaatatttgggcaccatagcctagccatgttgacacagaaaatcaaccatcacagaaagcaaacttagcaagagctaatraaaacaaaagaattccaaagacggttggatcagagtgaacaagattgggtatctgagaaaggctggcaggtgccgcgtgtgggtggaagagacagcaaggttgcagataactggagtctgctggagcatgaaaatggtgtcctgagttaagtatgcagtaaaggttgtaggtaactaagagcagtcagaggcacacaaagatgtcagaactgggaatacttaggctccattaaaccaatgcacttcatcgcattgattttcattgtttgttctcattcccttgtttgcttattcattacatgctgctccactcagagcattttgacttgcttgaacatttctttattagcttgttggtgttggttttgcttgtcagctacacta

SEQ ID NO: 553272 - DNA, 562 bp, Homo sapiens
ccaacctggccgttttctgtccctcacttctgttttccataagtcactggcctttttctgtccataaatgttaaccaaccttgtggcagccacagagttgctcagaatttattttagttctggggggtgtccgatgcatcagttgttctttgctcaattaaactctgtcagatttaatttgtctaaagtttttttttcttcttcttttttaaacactccattctgtagatctcagagctagtaagtggctgagtcggggtctgaatccagggcctgggcttttaaccactgggccatatggattcccagaattggaagtgcctaaaaattcttgcaaattggccatatatatatctccatttatatccatttcccaattatatatatacacacacatatatctgtagttgkctttatgtttagatctgagagctggaagctgccagactctaaaaagagaggggcaaaatctgttccagctgtcctgtgcattgacaagcactcagcctaggtagaattctttattctccatttctgaatgaacaggaacaaaaaaaaaaaa

SEQ ID NO: 553273 - DNA, 733 bp, Homo sapiens
gttaaatgcctaaccaaggcaggcttctcatgttaagatgaaggacctggatgggaaaaatctagaatcctaatatatgggatagaatttatgtgagaatgctcttcaatattttgataccttagaatccactgaatcaggagtcctcagcccccaggccatagaccggtactgatccagtggcctgttaggaaccgggccacacagcaaaatgtgggtagtgaacaagctagcattaacgcctgagctctgcctcctgtcagatcatcagcagcattagattctcatagattgcgaacactatttgtgaaccgcacatgtgagggatctaggttgtgccctccttttgagaatctaatacccaattatctgagatggaacagtttcaccccaaaaccatgtcccctcatccccatcagtccatggaaaactcagaccggtcccctggtgctaaaaagcttgggggctgctactctgaaccttctcatacactgaggagtctggctccaggaaaaaattctgtgtgtgagtttcaaagctttgcctggcacatttccttgggggcagctgccatccccaccacagacttggtgtgcagcctgtgtatggtagttttctggagagaagtacagtcaagaatccaggtaccctgggaaggccrtgctcatactcatatctgcatttgaaccaaagtgcctctactaagacttatttatggaggaggggtggggag

SEQ ID NO: 553274 - DNA, 733 bp, Homo sapiens
gttaaatgcctaaccaaggcaggcttctcatgttaagatgaaggacctggatgggaaaaatctagaatcctaatatatgggatagaatttatgtgagaatgctcttcaatattttgataccttagaatccactgaatcaggagtcctcagcccccaggccatagaccggtactgatccagtggcctgttaggaaccgggccacacagcaaaatgtgggtagtgaacaagctagcattaacgcctgagctctgcctcctgtcagatcatcagcagcattagattctcatagattgcgaacactatttgtgaaccgcacatgtgagggatctaggttgtgccctccttttgagaatctaatacccaattatctgagatggaacagtttcaccccaaaaccatgtcccctcatccccatcagtccatggaaaactcagaccggtcccctggtgctaaaaagcttgggggctgctactctgaaccttctcatacactgaggagtctggctccaggaaaaaattctgtgtgtgagtttcaaagctttgcctggcacatttccttgggggcagctgccatccccaccacagacttggtgtgcagcctgtgtatggtagttttctggagagaagtacagtcaagaatccaggtaccctgggaaggccgtgctcatactcatatctgcatttgaaccaaagtgcctctactaagacttatttawggaggaggggtggggag

SEQ ID NO: 553275 - DNA, 1102 bp, Homo sapiens
atttttacatatgaaaatgagtaaagtaccggaagaaaacacaaacgcttattttacaggtacactttatgttsacaaaagccttcctaagaatgacctcataagaagacattctgaaggttgatttagcaaactaaaaattaaaactgcctgtgtttcagaaaaaaaaaataacaaaagagagcttacttgaaaaatattaactatattatatatatatatatattcagatgaaaagtgtgttttcattttagagggaattcattatattcttttcctttttttttttttttttttgagtgagagtctcacttctttgcccaggctggtgtccaatggcacaatcttggctcactgcaacctctgcctcccgggttcaagcaattctcctcgctcagcctcccaagtagctggggttacaggcaggtgccagcatgcctggctaatttttctatttttagtagcgaggggtttcaccatgttggccaggctgatcttgaactcctgagctcaagtgatctgcctgcctcggcctcccaaagtgcttggattacagacatgagctaccatgcccagcctatattgtttattatatatcatatgatatatatatattgctgatacatataccatatatattattacagatataatctgttatatatatatcagttatatatacacattagatgaaaagttgtatgtatatatacacattagatgaaaagtacattttcattttacagggaattctttcaaatcaaatcatcaaaaactctaaaatgggcaaagtacttttttccagatctgcaagttatttgtgtacatagcaaaaagtccttcgcatttctggtataagaatttaaattaaaggaggaatgaaagttttctatccacaatatttgcgaggacgttttgtactcctgcttaaagtttaagttgctgattacttttcaaatagataatttggtggtaagtactacatttaaaaaatatgtatgctctttacccatcaattccattatactaaaacacccttaggaaataaagatacatgcactttatttttcacagcacttattttaaaaagaacccatagaat

SEQ ID NO: 553276 - DNA, 1102 bp, Homo sapiens
atttttacatatgaaaatgagtaaagtaccggaagaaaacacaaacgcttattttacaggtacactttatgttgacaaaagccttcctaagaatgacctcataagaagacattctgaaggttgatttagcaaactaaaaattaaaactgcctgtgtttcagaaaaaaaaaataacaaaagagagcttacttgaaaaatattaactatattatatatatatatatattcagatgaaaagtgtgttttcattttagagggaattcattatattcttttyctttttttttttttttttttgagtgagagtctcacttctttgcccaggctggtgtccaatggcacaatcttggctcactgcaacctctgcctcccgggttcaagcaattctcctcgctcagcctcccaagtagctggggttacaggcaggtgccagcatgcctggctaatttttctatttttagtagcgaggggtttcaccatgttggccaggctgatcttgaactcctgagctcaagtgatctgcctgcctcggcctcccaaagtgcttggattacagacatgagctaccatgcccagcctatattgtttattatatatcatatgatatatatatattgctgatacatataccatatatattattacagatataatctgttatatatatatcagttatatatacacattagatgaaaagttgtatgtatatatacacattagatgaaaagtacattttcattttacagggaattctttcaaatcaaatcatcaaaaactctaaaatgggcaaagtacttttttccagatctgcaagttatttgtgtacatagcaaaaagtccttcgcatttctggtataagaatttaaattaaaggaggaatgaaagttttctatccacaatatttgcgaggacgttttgtactcctgcttaaagtttaagttgctgattacttttcaaatagataatttggtggtaagtactacatttaaaaaatatgtatgctctttacccatcaattccattatactaaaacacccttaggaaataaagatacatgcactttatttttcacagcacttattttaaaaagaacccatagaat

SEQ ID NO: 553277 - DNA, 1102 bp, Homo sapiens
atttttacatatgaaaatgagtaaagtaccggaagaaaacacaaacgcttattttacaggtacactttatgttgacaaaagccttcctaagaatgacctcataagaagacattctgaaggttgatttagcaaactaaaaattaaaactgcctgtgtttcagaaaaaaaaaataacaaaagagagcttacttgaaaaatattaactatattatatatatatatatattcagatgaaaagtgtgttttcattttagagggaattcattatattcttttcctttttttttttttttttttgagtgagagtctcacttctttgcccaggctggtgtccaatggcacartcttggctcactgcaacctctgcctcccgggttcaagcaattctcctcgctcagcctcccaagtagctggggttacaggcaggtgccagcatgcctggctaatttttctatttttagtagcgaggggtttcaccatgttggccaggctgatcttgaactcctgagctcaagtgatctgcctgcctcggcctcccaaagtgcttggattacagacatgagctaccatgcccagcctatattgtttattatatatcatatgatatatatatattgctgatacatataccatatatattattacagatataatctgttatatatatatcagttatatatacacattagatgaaaagttgtatgtatatatacacattagatgaaaagtacattttcattttacagggaattctttcaaatcaaatcatcaaaaactctaaaatgggcaaagtacttttttccagatctgcaagttatttgtgtacatagcaaaaagtccttcgcatttctggtataagaatttaaattaaaggaggaatgaaagttttctatccacaatatttgcgaggacgttttgtactcctgcttaaagtttaagttgctgattacttttcaaatagataatttggtggtaagtactacatttaaaaaatatgtatgctctttacccatcaattccattatactaaaacacccttaggaaataaagatacatgcactttatttttcacagcacttattttaaaaagaacccatagaat

SEQ ID NO: 553278 - DNA, 524 bp, Homo sapiens
tgtattcattcatttattccatcaataagcatttactgaatgcctactatatgtaggaactgttttaggttctggggatagagcggtgataaaaacaaagtgggcaccgagctcatccctgcctcttcttgccctacgcgtcctggggacggcgagaggccatcttgccgccgcagccccctcgggccggagctcctgggggacgcctcctgggggtggggccyggaggccggcctggcggaggtgaaagcggccccagcaaagcgggagggtagatgagaagggggctgccaccctctgctgggcgccagcggcgctgcagggcggagcttccagggctctaggcgcatgtgctgggcttggccccacccccttggccccgcccaggctccggctggccggtgggccaacccgggaagtgccgccccgggcctggggctgactcggccctcacagagcctgacccgtgcgtagggtgctgagtggctggggtggccctgggcatgcgccgttggtcactccag

SEQ ID NO: 553279 - DNA, 1236 bp, Homo sapiens
aaaagcacatcacacacttcaggacasttttaaagtgagcctccattagaaatttgtacagttaatccatttttttaacttcctctgtcttattcttgagccatgtttaacggttccctttaaaatctttttgaatttttttttcagtttaaccttatatccagaaatgagcacagtagtgttaactattaaaagagggtaactgcttgatttttcatttgccttccatttgaacactcatatttgcttttatttttgaaaatatagttgtatattgtttggattttaaatcatatctttctctccccagaaagtatgaatagattaaattctaaatttaaatatatatatttatatatttatttatatgtgtaaatatataaatatatacatatctaaatggaaaagttaaaaatgattactgtgtttttagatatgttcctcaaatcaattcaaataataatattcaaagtgttttgtctataggagttaatatactatcactagtttttgtcatagttaaaagcactcttcattcatataattaattagaagtaagtatgattaaatcaaacaaaattgagttactataactgcatctattctcttaataatatgagaggtagttgacacagttgcagtagtccactgggtagatatttcctggtgaaacagttgtaaatgtactattgccttgtgagaaggtagttctcatgtgtaaatatataaatatatatatataaatatatatatttatatatatatttatatatttacacatatatacacaagattatatataatatataaatatatgtaaacaaatataaatatatatattttatataaatatatgtaaataaatataaataaataacttatttatttatatttatagataataaaaccggtttatttatttatttttgagacacagtcttgctctggtgtgcagtgctgtgatcctggctcactgcaacctcagcttcccgggttcaggcgattcttctgtctcagactaccaagtagctgggattacagttgcgcaccacaacgccaggctaatttttgtagttttagtacagatggggtttcaccatgttgcccaggctggtctcgaacttctggcctcaactgatctgctcaccttggcctcccaaagtcctgggattataggcatgagctactgtgccttgccaaactacggttcttaattttaattcataaggttcatac

SEQ ID NO: 553280 - DNA, 1524 bp, Homo sapiens
aaagtctgactgcacttttcagtaatattcattggccctagaactattttttgagatagttctttaataacactcgtttggtttattcttgcttgtaatattaatacttaagtctgttttggcaatttttatttactaagaagccagtttacctcattaggattaaaaagcattcagatatatcccttctttcattcctaattttattcttttgagtttttcttttttatagtgaaattttcagcttttataattgattgtatgattttattattggttttcccctctccttccaactatctttggatttatcagttttgtttgtctatgtggcagttactagattgtgcattatttttcattattttgttttttctgttttcctgtttgtttgatcttttctctaactttattaattggacagttggtttaacattttatcatttcttcttaataatgaaatcatagaaactgattaatttaccactgcatcctgaaagtgcaatatttttactctttgctatttagattttttatttgatccagtagagattataggagagagtgtatgtgatattttaatgaccaagtagtaaacattttgttagatcagtccttaaaatttttaccaatatgatggctgcaatggacttttattattgtaattttcatttccctggttaataatgaggttgagtatcttttaatatatttattgtttttttgtttttatcctcagtttttatgttttgtatagttttttatttgttgcttatcttttactattgattgtagaatttctatttactttatacagcaatcatttgtttatgtacattaagtatattcttccaatttttggctagtctattttatttgtatacatatttttattttttcttatttttattttttatttttttggacagagtcttgctctgtcatctaggcaggagtgcagtggtgcagtctcagctcaatgcaatctgtgcctcccaggttcaagtgattgtcctgcctcagcctcccaagtagctgggattgcaggtgtgtgccaccacaccagactaatttttgtatatttagtagagatggagtttcaccatgttggccaggctggtctcaaactcctgagctccacccaccttggcctcccaaagtgctgggattacaggcgtgaaccatcacaccccaccatattttatttatatttacttttattgtaaagacattttaaattttaacatagctaaatttatcagtcttttcctttacagtttgggggggtgtgtatgcatatatgggtgtgtgtgtgcatatgtgtattctttaacaaaaatatgcctgcatattcctattagaatcttaattaaaattggattaaatttatagaataatttgggtagaatcaagttacaatattgagttattccacccaaatgtattacaaattatcccagtaccaattattgataggccgtcctttaatgactgmtcagcagtgcctcatctgtcaacatgagg

SEQ ID NO: 553281 - DNA, 636 bp, Homo sapiens
cataaccatactctgacatttttaactgttttgtaaaattaaagaacttgcagttgataaaaaagttctcaaactctaatagttaatatattattatatgttatccataactttttatttacacatacaaataaaatatatatcgtatgtgtatgtatacacgcacacacacatatatgtgtgtgttwccattttatatgttatatatgtgtacttttaaaaaggtatggaatatgtgtgtgtgtgtgtttctaaagtattgtgaatattcttctatgttatgtaacacagatcttctatattaatgctttatccatattccttgtctatgtttctagaattaatttttatttgttacttattcttaagaactctttgtacattatggatgtctattccttgtctataaatcatcattttttcaacaaagtattatgtatctattatcctttttccatggtaggtttcctacagagagcttttagtttttatgtaatcaaatttgttcccttcttttacaatttctgggttgtctcctttgcttaaagaattccacgctccaagaatatcacaatagtctttttatttgcatgtcttactgtaactgcctcaggtaggatgagccaggtgatgacc

SEQ ID NO: 553282 - DNA, 644 bp, Homo sapiens
ggtgcctgtcctgctggcttcacggctaattccgccagcctggaaccatctctctccaggggcctggggccagggggacctggagggcgggggtggggagagcagagggggagggagcgaggtgagccggctgctcattggcgtctccagggagacggggcttggagtcgtggagggccccttggctcctccaaaggtcagcttgtccatcttcctgccccctgcccagccacaggattatggagatctttttcagggaaaactagtcttgctgtctctaacccgggcctcacttagcgctgcaggagaaagtctcctgaaatgaaaatctctcgtgccgctttgtgctcctcattcctcccgcatcaacttgagcaggaccttggtgtgtttgttcatctataaaatgggaccgtgtttcccaccccacagggttggtggcagatcagacagcatgtcrcacagagcctggtgtatactaaacatctggtaggctgctattattaccattactattattattattattattatttgagacggagtctcgctctgtcacccaggctggagtgcaatggcgcgatcttggctcactgcaacttctgcctcctgggttcaagagattgtcctgcctcagcctcctg

SEQ ID NO: 553283 - DNA, 514 bp, Homo sapiens
gcatataattttccctcctgtggtgttatttcataaagacttgtcaagagatcaatccctcagtcacaaaagtcaggctacacatcaccttgggggacaattatttaatttcagttggtgatgtaaatgctccttttttttttttttttttttaaagatgttgtttcactcttgttgcccaggctggagtgcagtggcatgatctctcctcacygcaacctccacctcccagattcaagcaattctcctgcctcagcctcccgagtagctgggactacaggtgcctgccactacaccaggctaatttttgtatttttaggagagtttttttgttttaggagatgttttgtatttaggagatatttttgtattttaggagtttcaccatgtaggccaggctggcctggaactcctgacctcaggtgatccacctgcctcggcctgtaaatgctacttcaaatttgaccaattgccaaactacctttaccacacattcttctacgtagtcagttct

SEQ ID NO: 553284 - DNA, 545 bp, Homo sapiens
aaaggtataatgctatgtgaggatcctgcggggggaatctattttttatttttttctttgaggtttatgttctccctaggttacacagggctgtcttgattaatacaggctgcatctttagtctctactgctaactgttcattcacagcacatcagcatttatactttgcatattagaatatgctgtgacaaagcaaattttaggtatttatcataaggacaaataagcagyattatttctattagaaaaaaatcaaaaacaagttaaatgtccatcattaggaaactgattaaataaaggatcacatcctacaatggaatactatgcatcacttaaaagtgaggctgcttctatatttaattgcacagaaagatatttactaaataacactaaatgaaaaaaactaactgtaaaacagtatgatgagtatataggtattgcctacacaatgctttcaatttttctgtttgaaacttctcataataaaagttgggagaaaggcagtatgtatagtgtcattctttcataaaaatattttaaaatc

SEQ ID NO: 553285 - DNA, 545 bp, Homo sapiens
aaaggtataatgctatgtgaggatcctgcggggggaatctattttttatttttttctttgaggtttatgttctccctaggttacacagggctgtcttgattaatacaggctgcatctttagtctctactgctaactgttcattcacagcacatcagcatttatactttgcatattagaatatgctgtgacaaagcaaattttaggtatttatcataaggacaaataagcagtattatttctattagaaaaaaatcaaaaacaagttaaatgtccatcattaggaaactgattaaataaaggatcacatcctacaatggaatactatgcatcacttaaaagtgaggctgcttctatatttaattgcacagaaagatatttactaaataacactaaatgaaaaaaactaactgtaaaacagtatgatgagtatataggtattgcctacacaatgctttcaatttttctgtttgaaacttctcataataaaagttgggagaaaggcagtatgyatagtgtcattctttcataaaaatattttaaaatc

SEQ ID NO: 553286 - DNA, 989 bp, Homo sapiens
tggcaaaacttcatctctacacaaaatacaagccaggcatggtggcatgcacctgtggtcccagttagttgggaggttgaggtaggaggatcacctgagcccagaaggttgaggttgtagtgagctgtgatcgtgccactgcactccagcctgagcgacagagtgagactttgtctcaaaaaaaaaaaaaaaaaaaaaaaggcagcctggaggacagctgcagcagcaccgtgcatctgtatcctgggtgtttaataactgattgttgaggaaggaaggaaggaagctggacacagagaggcaggtatccagctctcgcttctgggaggttggtggagatgggcacagagcccagggcacccggccaaatcaggggcaggtccagctaggagggtcccttctgagagcagcggtccaagctcgctcctccctgggagcaagaagcctggtcagaaacagagactgaagcaggaggtgagtccatgtgaggccgtggcttggacaccaacctgagatgttggagacatggagtgaggccccatggagagggcagatgaggagggtggattagggctgatcttgggagctgttgcccccatatccctttgacattcgccttggcaaactttgtaggcccrgaggagagttctcaaaacacagtgagtgtgacctgagggacacagccggactgggctgcaggtgggtggatccgaggtggatgagaccagcccctgttgtgtcctatgcttagatctcggggcactcttgggcggtctgtaactggcaacagtgtcgcccccacgcagggaaagccgagtgggacccagggtggtccttggggagccctccacccaggctccagctccggcctgcccgctggccaggacattacctgttcccagaacgccatctgccccagaggccattcaccctggcggcaggctgggccagaaagcaagtgcccagccccagagccaagagtgaggcat

SEQ ID NO: 553287 - DNA, 577 bp, Homo sapiens
ccagaatacagactttattttctatgctaaaatacagcaaccaacattcaatctccattgatcctctaatagtaatcataataatagtgatagtaataaataaccatgatggagctctatgtatcagttgctttcctaagctatacatgtatgatacatatcacctatgagatatgtgatatataatatatatatatacacttttgaagttaatactgttatatctatttkgtagacaagcaaactgaagggccaaagtttgagtaatttgataaaaatttgagtaatttaaatccccacttctaagtctaaaatcctccctgacaatttccaagaattcctagatgctgtacaatctcagagccacttcaggtactgagctcctgctttcttatttgatgtatctgatacctacatttgggatcttatatagactcaataaacagactcaatctttccttcctttgttagaacaaattaagaaatcaaacttgaatctggagacgtggatgccaaaatgtcagttatattactaataaagctgattggagaaggtgtctttggatccataaccaca

SEQ ID NO: 553288 - DNA, 771 bp, Homo sapiens
ttccaattcttagccccattaaaatccccatttaagctcttctgccctgtcacccctccatgaggctccttctgacctctagccgtgtctctgccctgtctctgccttgtctctgctctgtctctgccstgtctctgctctgtctctgccctgtctctgccctgtctctgccctgtctctgctctgtctctgccctgtctctgctccaaaccccaccagtggtctccatcgaagacccctttgaccaggatgactgggccacttggacctccttcctctcgggggtgaacatccagattgtgggggatgacttgacagtcaccaaccccaagaggattgcccaggccgttgagaagaaggcctgcaactgtctgctgctgaaggtcaaccagatcggctcggtgaccgaatcgatccaggcgtgagtgcctcctgaccctgaggctcaccatagcctgcctctgccccagctctgcccactccagctacagtcttacccaccaactccaagcttacctttcccctggcacctgacttacccacaccttgatctcaagactttgtttgactaatccttggcctgactccaagagctttgcccctgtggctctgtcatgaccccccacccccagcccacaccattcctctctcagattccgctgttctcagcagcatctcaagagcccgaaatcaagataagtcttttcctctcctacttcccaaagaacttagtcactgccctccctgcagagtgcttgctacccaaaacag

SEQ ID NO: 553289 - DNA, 771 bp, Homo sapiens
ttccaattcttagccccattaaaatccccatttaagctcttctgccctgtcacccctccatgaggctccttctgacctctagccgtgtctctgccctgtctctgccttgtctctgctctgtctctgccctgtctctgctctgtctctgccytgtctctgccctgtctctgccctgtctctgctctgtctctgccctgtctctgctccaaaccccaccagtggtctccatcgaagacccctttgaccaggatgactgggccacttggacctccttcctctcgggggtgaacatccagattgtgggggatgacttgacagtcaccaaccccaagaggattgcccaggccgttgagaagaaggcctgcaactgtctgctgctgaaggtcaaccagatcggctcggtgaccgaatcgatccaggcgtgagtgcctcctgaccctgaggctcaccatagcctgcctctgccccagctctgcccactccagctacagtcttacccaccaactccaagcttacctttcccctggcacctgacttacccacaccttgatctcaagactttgtttgactaatccttggcctgactccaagagctttgcccctgtggctctgtcatgaccccccacccccagcccacaccattcctctctcagattccgctgttctcagcagcatctcaagagcccgaaatcaagataagtcttttcctctcctacttcccaaagaacttagtcactgccctccctgcagagtgcttgctacccaaaacag

SEQ ID NO: 553290 - DNA, 2562 bp, Homo sapiens
ataaattacccagtctcaggtagtatctttatagcagtgtgcagacagactaatacagtgaaattattgttttgttttgatatttgaatttggatcaagtgtgcttctgaaatttttatttccttttcaatttaattaaccagtcataaaattgaaaataagatagacaactaaaacaaaatttatttttcaaaagtaatttaaaaatatatagtagaaagaagatacagctttaggcttaaacagtattttctgagagcatgctatatttagattttttaaaaaaaaatcacattgatgttgaatatctataataatttgaaatcatggagcttctagttagatattcacattcaggattttcaacaaagacaatggcatatcaaaatcatctaggaagaaatttcatactatgtacctggaccctcttccactgagtaacagtaattctcaaacttggctgcacattttaatcaactgggaagctttaaaaaatacttgtacttgggtcccacaccgaaagacttttgtatatttggcctgaggttcagcttagacgctaggattatttttagtcaccccaggtgaatttaacgtactaccaaaattgagaacaatttgcttgtcagaacttctgagaggacagaaggaggagatttttattgccaggtgattgtcatatatatatcagattgctttcttccaaagtgtcacttcagccagcaccactgtggtgatgattctcaaatgtatacctagttcttaaacattctgctgagctccaagtaatacttccaaactttccacatcttcccactccacaatcaaaccttttccacttgcttttccacgttgtagtcactgggactatcattctgctgagattcccataccagaacccggtaaactctttttgagacatttctctcttcctctcgcccttcataaatggggttccaaggcatttcagttctactttcctaacatttcttgaatatatttagtttgtgtttcaattatcaattgccatgaaacaaaccacactgaaatcagtggctcagagcaatcaccatatatttgctcacaattctgcagcctggcaggactcctcagatacaactcatcctgcttcatgtggtattagctggggtctttcacatagtggtattagttggggtctttcatatagatgcattcaattgtgagctcttctgaggtttagtgtatgacatagtccactcacatatctggcacmtcagatggggtaactagaaaggctgggagcaggctggacatctctctccacatcatctctccagcagggtagcaggaccactttacgtggtggctcaggattccaagaacacaaaaggagctgtcagttcgcttaaggcctagaactaaactgagatagtgtcacttatatcacattttgttgattaaaaaaaagtcacaatgcaaccttagattaaaggaggggaaagcgacaccaccattgatgggaggagacatatgtgtgtaaaaagaaagaaagaatttgggggcaccatttggaagacaatctaccatgcttcatttccactattttgtttaagcaatcacactatctcttctttcatcaatgggcttgtgtttcttctacaaaggaatctctatcttaaaagcaagttgattgtactaaaatattacttaaaaaaatctcaatatttggactttccttagttgtctaaactcatctcttgaccttcttttctcactatttgctccaataacagagtcaccttttaatttcccacatcatcttttctctttaaatcttgcctgtttgtaagctcttttctctgggtaaatgctgtcactactttacttggctatgtcatttttcccattcaggatttagttttgctccatcaaaactaatcctttacagcaatataatatatttccacctccaaactctgctatctcagaaaaatcttcatatgtcaatagtagcacttgcaactcggcactgcaattgtatgcttttccataactttcaattcatgagctttgcatgaaaagttaaaagaattttaatacaagcatcattatgtttctacacagtgtctttaattttgccactttggatttggcccttaatttgaagtaccaaataacaatatcataactgagattaaagaaaactataaactcttataattatctttcctgtctttctttttcaattattcatttctttgtacttttcctctgtaatctcagatatttctcgactcagacaagttcctagcagcagctgttttctttcaattttaaaccataagatttaaaaattatttccggttacatactgtcttctgctacaatttttattttattgatggctccttaagcatctcttcagttttccagagtggtcagtatgtgatttgatttcttatattggatttcttccttcaagttgttagatctccttaaataaataattttgtaacctattcgtgggtgtatacatatgtgggttcatcaacaagtgttcaggcctgattgctggggtct

SEQ ID NO: 553291 - DNA, 2562 bp, Homo sapiens
ataaattacccagtctcaggtagtatctttatagcagtgtgcagacagactaatacagtgaaattattgttttgttttgatatttgaatttggatcaagtgtgcttctgaaatttttatttccttttcaatttaattaaccagtcataaaattgaaaataagatagacaactaaaacaaaatttatttttcaaaagtaatttaaaaatatatagtagaaagaagatacagctttaggcttaaacagtattttctgagagcatgctatatttagattttttaaaaaaaaatcacattgatgttgaatatctataataatttgaaatcatggagcttctagttagatattcacattcaggattttcaacaaagacaatggcatatcaaaatcatctaggaagaaatttcatactatgtacctggaccctcttccactgagtaacagtaattctcaaacttggctgcacattttaatcaactgggaagctttaaaaaatacttgtacttgggtcccacaccgaaagacttttgtatatttggcctgaggttcagcttagacgctaggattatttttagtcaccccaggtgaatttaacgtactaccaaaattgagaacaatttgcttgtcagaacttctgagaggacagaaggaggagatttttattgccaggtgattgtcatatatatatcagattgctttcttccaaagtgtcacttcagccagcaccactgtggtgatgattctcaaatgtatacctagttcttaaacattctgctgagctccaagtaatacttccaaactttccacatcttcccactccacaatcaaaccttttccacttgcttttccacgttgtagtcactgggactatcattctgctgagattcccataccagaacccggtaaactctttttgagacatttctctcttcctctcgcccttcataaatggggttccaaggcatttcagttctactttcctaacatttcttgaatatatttagtttgtgtttcaattatcaattgccatgaaacaaaccacactgaaatcagtggctcagagcaatcaccatatatttgctcacaattctgcagcctggcaggactcctcagatacaactcatcctgcttcatgtggtattagctggggtctttcacatagtggtattagttggggtctttcatatagatgcattcaattgtgagctcttctgaggtttagtgtatgacatagtccactcacatatctggcacctcagatggggtaactagaaaggctgggagcaggctggacatctctctccacatcatctctccagcagggtagcaggaccactttacgtggtggctcaggattccaagaacacaaaaggagctgtcagttcgcttaaggcctagaactaaactgagatagtgtcacttatatcacattttgttgattaaaaaaaagtcacaatgcaaccttagattaaaggaggggaaagcgacaccaccattgatgggaggagacatatgtgtgtaaaaagaaagaaagaatttgggggcaccatttggaagacaatctaccatgcttcatttccactattttgtttaagcaatcacactatctcttctttcatcaatgggcttgtgtttcttctacaaaggaatctctatcttaaaagcaagttgattgtactaaaatattacttaaaaaaatctcaatatttggactttccttagttgtctaaactcatctcttgaccttcttttctcactatttgctccaataacagagtcaccttttaatttcccacatcatcttttctctttaaatcttgcctgtttgtaagctcttttctctgggtaaatgctgtcactactttacttggctatgtcatttttcccattcaggatttagttttgctccatcaaaactaatcctttacagcaatataatatatttccacctccaaactctgctatctcagaaaaatcttcatatgtcaatagtagcacttgcaactcggcactgcaattgtatgcttttccataactttcaattcatgagctttgcatgaaaagttaaaagaattttaatacaagcatcattatgtttctacacagtgtctttaattttgccactttggatttggcccttaatttgaagtaccaaataacaatatcataactgagattaaagaaaactataaactcttataattatctttcctgtctttctttttcaattattcatttctttgtacttttcctctgtaatctcagatatttctcgactcaracaagttcctagcagcagctgttttctttcaattttaaaccataagatttaaaaattatttccggttacatactgtcttctgctacaatttttattttattgatggctccttaagcatctcttcagttttccagagtggtcagtatgtgatttgatttcttatattggatttcttccttcaagttgttagatctccttaaataaataattttgtaacctattcgtgggtgtatacatatgtgggttcatcaacaagtgttcaggcctgattgctggggtct

SEQ ID NO: 553292 - DNA, 610 bp, Homo sapiens
ttttgctctgtctcccaggctggagtgcagtagtgtgatctcggctcactgcaacctccgcctcctaggttcaagtgattctcctgcctaagcctccctagtagctgggactccaggcatatgccaccatgcctggctaatgtttttgtatttttagtagagatggggtttcacyatgttggtcagcctggtctcaaactcccgacctcgtgatctgcctgcctcagcctccaaagtactgggattacaggcatgagccaccatgcctggcccctttcttatttttaagaagcttttcttttcataacgtgtcataaaaatttatacaaaaagataaatattttatagataaatgggcatattattcataatatacaattcacaaaggataaatgacaaatattaacaaagtggaaagatgcaaacttattagaaacaaattgaaaattaaaacaagataatgactaccatctgacagagcaggagcattgccatcctggacaagccactcattctaaagttcaccttaataaaaaccacctaaatccaaagggcatcagcctaatggctaaggtcagaataaccataaaccacaaataactcctccaac

SEQ ID NO: 553293 - DNA, 1071 bp, Homo sapiens
atccgtggaaagctccttctccattctctccgaaattcatgactggttaacacagcttagctgttcattgtttttaaaatggacaaaggattcttttactctgcctctaagaccactgaaacactgacaagccttacccctgaaaactgtaaaggcagcaaaacgatgcatctattatgaaggccagaagcaatgcccccgccccraggctactgtgagcacaggcacccaaaataaccagccacaatgtgaaaagggaactgaaagcatttgaaacaaattagaaggtttggtaatgagagctaatagttctctaagtacttgtccctcttacttctatttagggtgattttcctttgaaaaagacaaacacaacccggtgaaatgaggcgggggggaaaaatcctatgaagcccagctgggcccgtgcgtgcgatgccttcccttcctgtcacaggctgcttttgggaaaagtcgcagattctgtccaaaaccactgcgaggcctgaactccttcctacgagacccacttggcttcctgctcctccaggcaagctgctcctccacaagcagggcctcaaaagctacacagggctgctcaaggagcgaagcaaagagtctactcaagacagaatcacctggccgtgtggagtcacggatgcgcgatttgacctgtgtgtgattttacctgcacgctttctccttctttgcagatcagaggcgactccaccatgctgtagtcgcggcccagctgccagactttgtctatgagctgcacattgttcccacccggagaggtgatgctgtgggctcccagggagtcctttttgggtggttgtggcgacctcttggagtgatagatgttaaacacaatgtcccctttgcacacgtcgaaatcccaagtgatgactgacgaggcatccacaatctgaatgagaatctgaaaaagaggcagcgttaggcagccacgatccacgagcaccaggccggcatgctgcgagcgcatcgtgctctccaggggatccagggtgcaggtgctgaagctggggagggaaacgctgaatgcgtatg

SEQ ID NO: 553294 - DNA, 1100 bp, Homo sapiens
acttcacaggctggtataattatcagatgatataattgctaaaaaatgttttgtgaaaatttaagcattatataaaaggtattatttkgatgcaaataaatacaaaacacttgaaactgctttatgacaataatctctcagggattcatgtatgatttttattgcacacactgtcatcactttaaacaacttccaacatttcacatcctacctgttaatagaagcaacttttgtcttaattactcaagtatttatactcatagaactttaatgatctattcattaatttaaaaaattattaaggatataactgtgtgctacgaagaaggccatgaagctaggagtatcctagtataattgaatgttgaagacaaacataatcaactaaaataaatgtgataagtgatataacgaagaacattttactatgagacccaagaaaaagaaataattaatgttttccttccttctcctattttgtcctttacttcaatttatttatttattattaatattattattttttgagacggagtttcactcttgttgccaacctggagtgcagtggcgtgatctcagctcactgcacactccgctttctggtttcaagcgattctcctgcctcagcctcctgagtagctgggactacagtcacacaccaccacgcccggctaatttttgtatttttagtagagttggggtttcaccatgttggccagactggtctcgaactcctgaccttgtgatccgccagcctctgcctcccaaagagctgggattacaggcgtgagccaccgcgctcggccctttgcatcaatttctacagcttgttttctttgcctggactttacaagtcttaccttgttctgccttcagatatttgtgtggtctcattctggtgtgccagtagctaaaaatccatgatttgctctcatcccactcctgttgttcatctcctcttatctggggtcacatatctcttcgtgattgcattctgatccccagtacttagcatgtgcgtaacaactctgcctctgctttcccaggctgttgatggggtgctgttcatgcctcagaaaaatgcattgtaagttaaatta

SEQ ID NO: 553295 - DNA, 1100 bp, Homo sapiens
acttcacaggctggtataattatcagatgatataattgctaaaaaatgttttgtgaaaatttaagcattatataaaaggtattatttggatgcaaataaatacaaaacacttgaaactgctttatgacaataatctctcagggattcatgtatgatttttattgcacacactgtcatcactttaaacaacttccaacatttcacatcctacctgttaatagaagcaacttttgtcttaattactcaagtatttatactcatagaactttaatgatctattcattaatttaaaaaattattaaggatataactgtgtgctacgaagaaggccatgaagctaggagtatcctagtataattgaatgttgaagacaaacataatcaactaaaataaatgtgataagtgatataacgaagaacattttactatgagacccaagaaaaagaaataattaatgttttccttccttctcctattttgtcctttacttcaatttatttatttattattaatattattattttttgagacrgagtttcactcttgttgccaacctggagtgcagtggcgtgatctcagctcactgcacactccgctttctggtttcaagcgattctcctgcctcagcctcctgagtagctgggactacagtcacacaccaccacgcccggctaatttttgtatttttagtagagttggggtttcaccatgttggccagactggtctcgaactcctgaccttgtgatccgccagcctctgcctcccaaagagctgggattacaggcgtgagccaccgcgctcggccctttgcatcaatttctacagcttgttttctttgcctggactttacaagtcttaccttgttctgccttcagatatttgtgtggtctcattctggtgtgccagtagctaaaaatccatgatttgctctcatcccactcctgttgttcatctcctcttatctggggtcacatatctcttcgtgattgcattctgatccccagtacttagcatgtgcgtaacaactctgcctctgctttcccaggctgttgatggggtgctgttcatgcctcagaaaaatgcattgtaagttaaatta

SEQ ID NO: 553296 - DNA, 1100 bp, Homo sapiens
acttcacaggctggtataattatcagatgatataattgctaaaaaatgttttgtgaaaatttaagcattatataaaaggtattatttggatgcaaataaatacaaaacacttgaaactgctttatgacaataatctctcagggattcatgtatgatttttattgcacacactgtcatcactttaaacaacttccaacatttcacatcctacctgttaatagaagcaacttttgtcttaattactcaagtatttatactcatagaactttaatgatctattcattaatttaaaaaattattaaggatataactgtgtgctacgaagaaggccatgaagctaggagtatcctagtataattgaatgttgaagacaaacataatcaactaaaataaatgtgataagtgatataacgaagaacattttactatgagacccaagaaaaagaaataattaatgttttccttccttctcctattttgtcctttacttcaatttatttatttattattaatattattattttttgagacggagtttcactcttgttgccaacctggagtgcagtggcgtgatctcagctcactgcacactccgctttcyggtttcaagcgattctcctgcctcagcctcctgagtagctgggactacagtcacacaccaccacgcccggctaatttttgtatttttagtagagttggggtttcaccatgttggccagactggtctcgaactcctgaccttgtgatccgccagcctctgcctcccaaagagctgggattacaggcgtgagccaccgcgctcggccctttgcatcaatttctacagcttgttttctttgcctggactttacaagtcttaccttgttctgccttcagatatttgtgtggtctcattctggtgtgccagtagctaaaaatccatgatttgctctcatcccactcctgttgttcatctcctcttatctggggtcacatatctcttcgtgattgcattctgatccccagtacttagcatgtgcgtaacaactctgcctctgctttcccaggctgttgatggggtgctgttcatgcctcagaaaaatgcattgtaagttaaatta

SEQ ID NO: 553297 - DNA, 1100 bp, Homo sapiens
acttcacaggctggtataattatcagatgatataattgctaaaaaatgttttgtgaaaatttaagcattatataaaaggtattatttggatgcaaataaatacaaaacacttgaaactgctttatgacaataatctctcagggattcatgtatgatttttattgcacacactgtcatcactttaaacaacttccaacatttcacatcctacctgttaatagaagcaacttttgtcttaattactcaagtatttatactcatagaactttaatgatctattcattaatttaaaaaattattaaggatataactgtgtgctacgaagaaggccatgaagctaggagtatcctagtataattgaatgttgaagacaaacataatcaactaaaataaatgtgataagtgatataacgaagaacattttactatgagacccaagaaaaagaaataattaatgttttccttccttctcctattttgtcctttacttcaatttatttatttattattaatattattattttttgagacggagtttcactcttgttgccaacctggagtgcagtggcgtgatctcagctcactgcacactccgctttctggtttcaagcgattctcctgcctcagcctccygagtagctgggactacagtcacacaccaccacgcccggctaatttttgtatttttagtagagttggggtttcaccatgttggccagactggtctcgaactcctgaccttgtgatccgccagcctctgcctcccaaagagctgggattacaggcgtgagccaccgcgctcggccctttgcatcaatttctacagcttgttttctttgcctggactttacaagtcttaccttgttctgccttcagatatttgtgtggtctcattctggtgtgccagtagctaaaaatccatgatttgctctcatcccactcctgttgttcatctcctcttatctggggtcacatatctcttcgtgattgcattctgatccccagtacttagcatgtgcgtaacaactctgcctctgctttcccaggctgttgatggggtgctgttcatgcctcagaaaaatgcattgtaagttaaatta

SEQ ID NO: 553298 - DNA, 1100 bp, Homo sapiens
acttcacaggctggtataattatcagatgatataattgctaaaaaatgttttgtgaaaatttaagcattatataaaaggtattatttggatgcaaataaatacaaaacacttgaaactgctttatgacaataatctctcagggattcatgtatgatttttattgcacacactgtcatcactttaaacaacttccaacatttcacatcctacctgttaatagaagcaacttttgtcttaattactcaagtatttatactcatagaactttaatgatctattcattaatttaaaaaattattaaggatataactgtgtgctacgaagaaggccatgaagctaggagtatcctagtataattgaatgttgaagacaaacataatcaactaaaataaatgtgataagtgatataacgaagaacattttactatgagacccaagaaaaagaaataattaatgttttccttccttctcctattttgtcctttacttcaatttatttatttattattaatattattattttttgagacggagtttcactcttgttgccaacctggagtgcagtggcgtgatctcagctcactgcacactccgctttctggtttcaagcgattctcctgcctcagcctcctgagtagctgggactacagtcacacaccaccacgcccggctaatttttgtatttttagtagagttggggtttcaccatgttggccagactggtctcgaactcctgaccttgtgatccgccagcctctgcctcccaaagagctgggattacaggcgtgagccaccgcgctcggccctttgcatcaatttctacagcttgttttctttgcctggactttacaagtcttaccttgttctgccttcagatatttgtgtggtctcattctggtgtgccagtagctaaaaatccatgatttgctctcatcccactcctgttgttcatctcctcttatctggggtcacmtatctcttcgtgattgcattctgatccccagtacttagcatgtgcgtaacaactctgcctctgctttcccaggctgttgatggggtgctgttcatgcctcagaaaaatgcattgtaagttaaatta

SEQ ID NO: 553299 - DNA, 1043 bp, Homo sapiens
caccctctgtcctctgcaagataacctgattcttttaggtagagatctgagcccttcacatcccagcaaaaggaagtgtatgtggcatacttaccatgatgtacgacacccttcaacccgtggataataggatccagtgcagaattggccctcggactgacctaaatgtaaaggaaacatgattggttaaatctattctggcatcaggcacaacagtctcagtttaatcttctaaagagaagggggagaatagaatgttatctagcaagctgcttaggtctcacatacaccatggctctcaccaaatgcaggagatttatgacatcataaaatcaagtgaggaagtttaaatcaaaagaaagaaacttctcagaatacattgtaacaggagagaaatactatagtcctagcaaaatcttaaaaagcaactgcaagattttcttcttgccttgttttattaaaagtaggcccaatcggctaaaaagtcattgaaagtcatgagagagcaatccatcattgacggaaaatttcaacatcttctggtgactgtgtttttcccttctttttagaaaatgaatctgttttctgccagcctattctccttcgtaaggatcccagtcccctgtgaaaaagcacatattctaaaagttatggaaagcagaagaggaggggagagaagcttgaagagacagtgtctcccaccttcatttcctcctggggtttttaatccccctcaaaagtcaagcctcttcagtcttcttcccacctcttctttcccttaactttctgatactactcagcagaactcctcattcttgcccattctagaagattaaaattctagcagcatattacaattttggctttcaagtattttcttttagacatacagagatatttacaaatgacatgaaatgacgtcttgaatttgtttcaaaataatccaagagtgaacagcagggggagtgagyggggtatacatgccacaggattagcttgaatcaatcatttatgaccttgggtggtgggtataggatgggtca

SEQ ID NO: 553300 - DNA, 629 bp, Homo sapiens
ctaagctttagaatgattgcatgactgataaaagaattagaaaaaatagtttaatatcaatttactcttctatagggcttgacaatttatcaagtgcctttacctatattacatgatttgatctttaagaccagtacaagccctccatatccttgggttctagatttataaattcagcccaggaattgaaattatttgaaaaaaaataaaaaaaaatacaacaatatgaaatcatacaaatgaaaaaataataccatggtttgcatatcacttacattgtattaggtattataagtaatctagagatgagttaaagtaagcaagaagatgagtataggctgtatggaaatactacaccattttatataagggacttatgcatctrtggatttgggtatctgtggggttcctagaaccaatcacctgtggatagtggggataactgtgggcaaataaggcattgtcaattttatcccaccctccaccttggccccagcttttattctggccattaaaaaaaacagagttgggggaaaagatcagaggttaagtaacttgcccaaggtcacatggctggaactggcacccagaccctgtagcttttatttctgtattctttattaccttcc

SEQ ID NO: 553301 - DNA, 629 bp, Homo sapiens
ctaagctttagaatgattgcatgactgataaaagaattagaaaaaatagtttaatatcaatttactcttctatagggcttgacaatttatcaagtgcctttacctatattacatgatttgatctttaagaccagtacaagccctccatatccttgggttctagatttataaattcagcccaggaattgaaattatttgaaaaaaaataaaaaaaaatacaacaatatgaaatcatacaaatgaaaaaataataccatggtttgcatatcacttacattgtattaggtattataagtaatctagagatgagttaaagtaagcaagaagatgagtataggctgtatggaaatactacaccattttatataagggacttatgcatctgtggatttgggtatctgtggggttcctagaaccaatcacctgtggatastggggataactgtgggcaaataaggcattgtcaattttatcccaccctccaccttggccccagcttttattctggccattaaaaaaaacagagttgggggaaaagatcagaggttaagtaacttgcccaaggtcacatggctggaactggcacccagaccctgtagcttttatttctgtattctttattaccttcc

SEQ ID NO: 553302 - DNA, 677 bp, Homo sapiens
cagaaaaccgacactttggttattacaacataatgcaattttaagtaaataagcaggagccgtctttaccctcctgggatttccttgtggccgaatgaaaacccacccctacgctgtcattttatgtctttcagtttctgtgcagtcagaccacagagaggggctttcttcaccatggatttggcatcccttcagttagagagtggatctggacatatgccagatttgcctggatgtttttctgctttccaatcataagccaaaaaaacaaaaaaacaaaaacaagaagcacacaggaatgtatgatttgaattctggatctctcagttcccatctcttaattttttagttgtttggctaaatgcttgggcattttagccatggaataaatactagtaaagactttatggaatacgtagcaggargcatttttaaatggtgcactgtttccactgagctgtggacagatgggttgtttataggctgtttcatatccagcctccttttttgttttgtttcgttttattttgttttggtcttttgctggtgagaagtagaaccacgcttcttttgttctttttctacctctctgctaaatcttcttttatatgtaatattctttaaagtataatttgcaatgataaagtggcatccaaaatgctaaaggaacatgttaa

SEQ ID NO: 553303 - DNA, 901 bp, Homo sapiens
cagtatttgaactgcatgattgttttaggattaatagttgtgtcctaaggcctttgtgacatggccagtcctccacaatccatatccatcatatcatttcctaaaataaattttatcaaaacaatgctatactgtctggggctgaaagtttgaagaacaacctaggatttcaaacaatttgcaaacactgaattagaagatacaggatattggccatcaatatctctacaaatggagataaaaagggtatagctgaaattctctatactccttataatcttaattcctaaaaggggaatgctctccataataagtactttaagtgaaaagaaaagtcatattaataggggagaaaaggccatggatacagaaaagaaaaaaaaaaagaacttctccactctagacttatgttccacactttacttttcccaatccaatgctacttttcctaggcctgatctatcaagaacaagtattagttgtctccacagagctttggcaagcattgccaagaatggtggattataagaccttgaattaaaactgaataaggagggctcactcagcttgaacaatattggagtatagaagttctactgatttttgtatagtgattttgtatcctgaaactttactgcagttatttatcagttctatgaacctygacacataggacttaattaaactaaaaagcattttcatggcaaaataaattatcaatagagtaaacagacaacctacagaatgcaatattttcaaactatgcatctgtcaaggtctaatatccagactctataagaaattaaacaaatcaataaacaaagagcaaataacgccactaaaaagtgggcaaaggacatgaataaacacctctcaaaagaagacacacaagcagccaaca

SEQ ID NO: 553304 - DNA, 1535 bp, Homo sapiens
tgagtctctgcacttgttttatttcttttattaacttgattatttttggacactaaaatcacctttaaaaatccatgtggattttaggattatcatggtaagtttcaagaaaagttttgttgaatgttgtgattgtaatgttattaaattcagaggtcagaattgacatgctattgtattgatttgttttcttcatgaacatagtctatttgatcagtatttctttaatgtcctttcattatgttttataactttgcttgcacatattttgttagacttttttctagaggtttcttgttattttgaacattattgtttttaagttacattttcaaatcgtgtggcagccatagaagtgattccctcagatttccattcagtgaaaacctgttgcagcacctttgagatttactgcagtgtatragtcaagggcacattctctccaggcagctccagtggcagactaagcacaacaggagtgccaggacctagccgttaccacctaaggtagaattcctctagaaacagcctttacactgaggtgccttgttgcactggccatgattttctcagagatgctcctcagactgaactttttttctacataatatccttgctccactcctttatcaggtgtcagacatgcattgcagcatgaaggctttccctgttgacttgtttcatttcctcttatctttcaaaggtgttagttgcaataaaattcttgcacttctaattctatcttagcatctacttatcaaaggacctcaactgacacaacttattatcagaagtggtacaagaaagcatgcattaagataaaatttagagattgactaacttattacttggctagaaaagagaaccccatctcaagtggtatgtggagtactacagataatcctgggcataaaatagtggcaaaattgctaaaacgttaattggcaatgactgcaaatagcattctgatgaaatgaaacactctgatcaatgggatgtcacaaatattggaaaggtatgaggtgagcaaaatatactaggataatgagcttgaataattatcattaagttgcatgggaaacctacagaagaataatgagaaaataaaggcattttaaaaaatagattaacactaaatatgaggacctttttggtagcttacagatacaccagctgagaaaaaaatctcaagatctgatagttaggattaaggagcttcaaagacaagtcaatgctcaaagtaagtctattacacgaaggtcacagaaaaagttagaaaagtctagaaccctaacatgtgagatgaagacttctgggtgtatattcccaaggattatggctagacagacttctctgaaacataaggaggctgtataggtggcccaggcaccttattaacccatttatgcctgagttggtaatttttggaatttttgcaatcagaccttggcaatgaccttgagcagtaggatataaataactcccacatgcttagcatccaataatggaacactaggcataaataggttaaaaga

SEQ ID NO: 553305 - DNA, 691 bp, Homo sapiens
ttagatacaatcaggcagcaaaattctaaaaataggttagaaggcttaatacaaggagcaatgtttaacctatttgatgaaggctcagggaagcacgttgaatgctgttgaagtgaaaaagcagtttgtacacaatgaaccttagtaagaaacaacattcatagatttacctgtgaaaccacacacttcaccctcccaagtatttatcttaccaaatttaattgaactgaagcagataaaactgttcaagcatgggaaccagtaattgtttgtaattcataaaaaggattattcacaggcaacacttccagagaaactacctgtctataaagaaactacctacagttataacaaaatgttctacaaatatgcactttttaatagtctacttacctacaggaataatgcaagcatcactgcccttgggggaagtggtgataagaattcttgcccatgcccatcagtacagtacacaattttagaagttacactccagctctaaactcatacttaaaagacgagatttygcttctaaggcttcatttacatgacaagcaattaagtcagctagggtcatctatgctctaataaagttagaagaagatctatttctaggtcttccacgctgacaaatttcccaaaggtatccattggaagaagtgttgaaactatcctttttgatattgtgatt

SEQ ID NO: 553306 - DNA, 627 bp, Homo sapiens
cttaatatgtgcttaatgtatgtcactgattattgctattcctgacttttgagtttttctaacttttttattttccaagtttaccttaattcatttacttgattctctctcttctccccttccaccttcccctccctcccatacattatatcaaaaagagactgaatctttctccatcacgagatacatttcagtactgtggcacaaatcagcatattttagcatacgtataaatgttaactaattcctcaatctgattaaaactcgtgttttgggactatatcttaggacaggaagtctgacctacatctgagaaatgtgaatcgtggctttcagcagtggaaggaatttttgtatgaatcatgccagggaacagattcttcatcacccgaactgcacgactgaatgatggtrcaccttcttttgtctaggcatgtttttctctgggaaatttaggcaaagagaaaaagatttcacatatttttttcttccttttcaataacgactatattttctagttaccgttattttagctctgccctttagttaacatgagattaaactgtcaagaagttgaaggtcactttaacattttcctagatggcacaaaagacttgaaaaaatatc

SEQ ID NO: 553307 - DNA, 549 bp, Homo sapiens
cggtagcagagaagcagaatgcatagaaggccttaactgatgggatattattgtaagcatatattggacttggatgtcatctccttagccacgcaagttcttcaagactgggatgtgcagtrtacttcatagggcacataagaattatctcagccttgctctggccaacaatctgaactcaagtgcccatttaatgtttattttccacgctcagttatagttaatactttccaaggaataagtgggattgactcagcttactaccatacaatacagaacacctcaggagacaaagtttcagccagcctacctcaagagtagctgggctgtcttgtgctcaaccccaggatcagtgggtcttaaccagagttgcatgtcagaattatctgagaatctttaagaaatacatatgcctgcccactcagcctattcttggaaaatatgattcagaaaaacaagatacttaggaaggctccagccttgttagtttgaaaaagcaagtgattctgactaagaaactatgggtgtttaagaaccactgcaaaaatt

SEQ ID NO: 553308 - DNA, 2179 bp, Homo sapiens
  misc_feature 784, 855, 856, 857, 858, 859, 860, 861, 862, 863, 864, 865,866, 867, 868, 869, 870, 871, 872, 873, 874, 875, 876, 877,878, 879, 880, 881, 882, 883, 884, 885, 886, 887, 888, 889,890, 891, 892, 893, 894, 895, 896, 897, 898, 899, 900: n = A,T,C or G
  misc_feature 901, 902, 903, 904, 905, 906, 907, 908, 909, 910, 911, 912,913, 914, 915, 916, 917, 918, 919, 920, 921, 922, 923, 924,925, 926, 927, 928, 929, 930, 931, 932, 933, 934, 935, 936,937, 938, 939, 940, 941, 942, 943, 944, 945, 946, 947: n = A,T,C or G
  misc_feature 948, 949, 950, 951, 952, 953, 954: n = A,T,C or G
tttgggtggagacacagccaaaccatatcagatagattaaaccattgatgaggtgagtatctcaggataagttccttattctaagccactgttccctcatctataaactaggttaataaaacactgtctccagaaccttggacaatgggattaaatcagaaaacatgtacaaaactcttggcagagtggctcatacattgcaagaggttaatgaatgatagcaactataagcttttattgccataaagctcagacattggattcctcaaaggcagagactgtagttatctggggaaagcatcatgcctggtggtgtagactcttaatgatagtgtaggttaaattcagctggactgaaataaaatagataaatattacatttacacaatgctgtaaatttctgttactttctaaaagtattttgatattgcaaagaaaaaaaatttctcaaatattaaagtacttaactgggtaggtaaaataaactatattgaggaatcaaagtcagttcaggcttaagtctattaacccaacacttttaaacaataaagactcagtagccaattactctattctaaatagacatgtatcacaagatattatataataatgttgagattccatttgttttagtgatcaaaaatattatttgctgtaggaactagagaggagaaatagatatgggtagttttaaaattcagactcttttggaaaaagcaagccttatgggaatattcacagtcatccgccgaaaccagatcaagcgcccgccggctcatggaanaatccccgcaaatagcgacacatgggatacgcggatcccataaaaaaacacccggagattcaccgattccnnnnnnnnnnnnnnnnnnnnnnnnnnnnnnnnnnnnnnnnnnnnnnnnnnnnnnnnnnnnnnnnnnnnnnnnnnnnnnnnnnnnnnnnnnnnnnnnnnnnttcttcaggaaggaaatggaatttaatgttagtctaataaaagttataatttggaaggcatgcctacaacaaaaaaattctatagaccacaacaaaatctaaagcttagaatttagatatttatgtaaattgtacagattagcatgcatttgtataaattctatttattacaaatctctgtaccatcttctgaaatttaattgttatgagtgatgctcaaagacaaatgaaaaaatatagcataaagaaacctaaaaattcaacaaattatagcctaggaccacacaaattggggaaagaaattatttcaaagaaaagaaatgtagctataacatgaaaacaaaaattagattttatttaaaatcatattccacagagcaagctactgccctaaaggtcatcatttttttaaagaaaatatttgcagaaaagacaacsgtgtgactatgctgaattcatctaagcattcatttctaatatatacaatatttgtgaaaatcattgtccctgactctcttaggtcctaaaatgtatgtttacctcaaagccacaaagacttttgatgaaatattattcttttggggaaaaattttttttggttttgtacagggaccataaacaattcattagaaagggataaaactctgagacctgtaatatgaaagtgcagcctctgccagccctccagaagtccttagccatgcttgtaacataatctcttcatttatctttcaaagctactcctatcttggcaatgtctctcccagcagctgtgtgctttgctctccgtgcttgtagtctcttccatcttcattatggacagtaaatctttgacaaagtgcctggaaactttagcaaaaagctctgtaaacatacttaggagaaggggtcaacacatttctagaagcgtaagagctgactatcttggtacacgtgcatgtggcaactaattggtggtatagataaaccagaatgcactgaaataggcagtagcctgtggtttgatccagttcactccagtagaaaggaaagaaaatacaagaaactactttatgtgattagggggagaaaaatccatactttccatatgggaatttctcgtgtgttttcttaatgaactcagagggaagttgagagagtcttttaagctgctaaaactactaatacggtctctttggggatgtgagagtatgaatttcctaatttcatcagaaccattaatgac

SEQ ID NO: 553309 - DNA, 1427 bp, Homo sapiens
acttacagaaatgttggaagaatagtacgaagaatttccatatgctttttgccagttccccaaagattagcacatttgctttattatattctccttctcgctctgcatgtgtgtattttaatgtgtgtatatatatatgagtgtgtgtgtaaatatatatatatatatatattttttttttttttttttttgagacagagtcttactctatcacccragctgaagtgcagtggtgcgatttcggctcactgcaacctccatctcccaggttcaagcgattctcttgcctcagcctactaagtagatgggattacagatgtgtaccaccacacctggcgaatttttgtatttttagtagagacagggtttcaccacgttgtccaggctggtctcgaattcctgacctcaggtgatctgcccacctcggcctctcaaagtgctgggattataggcgtgagccaccgtaatgtacatatatatttatatccccatacatatatgtttgagggatgtgtgtattttttctgagctatgtaagaataaccctgatttattttaaatactttgttctttttgtgatttaattcgaaaggttcagaggataagaaatatttgaaaaccactgctaaactccttttagtgctgacttttagtaatttttctcatgctggattaaaatagctgtagctcccaaatatgctgatgaggccatacccaattaaatagtaattttaaatatgaacatcatagtgtgtaaatagggtgacttgttggcagggattgtcatacagagattttcagttctctcattttacagatgaataaaatgagacccactgaaaagagaagatttgcccaacattccacagctttctatcagatattttctctagcacattagcatattctgcatacacatagtaagggatcatgaagcaaaataataataatcattgtttactttgtgcctggcaatgtgctaatcattttgccttccttgtttctttgagttgttacaacatccatgcttcgtaggtattataatccccattttacagatgagagtgagtctcaaagaggtttttatttatttatttaatttccaacttttaaatttagggggtacatgtgcaggtttgttacatgggtatattattatgaggctgaggtttagggtatgaacgatcccataacccaggtaacgatcttagtacccaatgggtggtttttcaacccttgctccccttcctcccccgtctagtagttcccagtgtctactgttcccatctttatgtccatgagtacccaatgtttagctcccacttatcagtgagaatatgtggtatttggttttcagtttttgagttaatttgctgaggataatagcctccagctgcatccatgttgctgcaaagaatatgatttca

SEQ ID NO: 553310 - DNA, 615 bp, Homo sapiens
ccaagaatataatgagataaagacaggagtaaaaagsgtcagatagaaagtgaatgaattggaagagaggcaaagcaaatctaacatttgtaaaactgaagaagaggaagagggagggaaggagaagaagaagacaatgaagatgaagaagatgatactgaggaagaaggaggaggaggaagcaaaggaggagaaagagaagaagatttactaccacccatggaccggaactaatattaaaactatatttcaagaaagaagaataaatgaaagcatatttgaagaagaagaaaaataaaacaatgaaacaggtctaatacttaaaactatatttcaagaaaactttctggaaataagagaaaaccttaatctaaatattgaaatggcccatgatatgcctggaacaatggaatggaataatcaactctaggctataatagtgtagtaaaatttttagattttaaagacaaagaaaaaattccccagggcctccatgcaaaaagacaatattacttagaagggtaaggaaattaggctggcattagctttctcaatagcagtgtacaaacaaagtaacagtgaagcaacatttttaagaaactcaaggaaagaaag

SEQ ID NO: 553311 - DNA, 510 bp, Homo sapiens
gtcataaaaaagtggctgaactggaatgggaatactggtgtccttggcccttgctaaacgccttctaagctaattcatgctaggctggtaatagacaaagccagtgcattgtcaagtctgtaaaatgtttggcagaggcatatgaaggcataggctgaataaatatggtgcatcaattcaactagaactattattggaaaacaactgagtactgggctgatgattaagttattgcctctcagcttcaaccttgctttattgtgttttagctttgtgagactgtggctgacactctggaaatacacttctgttttaccagctgctcccttttcggttctgccaagagggggmgctagatagtgccagcaagttggaggaaaaaggaggaagggatctctttcttctggtctgtttcctgttactgactgaccccaaagcccagtgacaattgtttacctcgctggaaaaaacagatgtttcagtagcagcggttgcttccacattgcagtt

SEQ ID NO: 553312 - DNA, 520 bp, Homo sapiens
gcgagagggggaagctgaatattgcgacatgaaagtctccggacaagatagggttccattccgcggaaagggtcttcctcttcattactggaatgtagtgtttcctcagaggcctgaggtaataattcaagaaagtacatataatcaacaaaaatcacactgtttatcattacataatggcttaatactttcctgggaaagaaattaagtaaaatgtatacatgaaaaatgctatctagaaaacagtgacattaactgaacaatayttgattaactaaaatctaaatttatttttaaaatagcaaatttgttcaccaggtgtggcttggttaaaacagttaactaacatcttcagtaatcttagaatttattagctttgtgtgtgaattctataaaatcaaggataaatcaaaatgtttttataacttctatgaaatgaattgcaaacatcattaaatatatacattgacatatgcatgtgtcatatatatatatatatatatatatatacacacacaca

SEQ ID NO: 553313 - DNA, 520 bp, Homo sapiens
gcgagagggggaagctgaatattgcgacatgaaagtctccggacaagatagggttccattccgcggaaagggtcttcctcttcattactggaatgtagtgtttcctcagaggcctgaggtaataattcaagaaagtacatataatcaacaaaaatcacactgtttatcattacataatggcttaatactttcctgggaaagaaattaagtaaaatgtatacatgaaaaatgctatctagaaaacagtgacattaactgaacaatatttgattaactaaaatctaaatttatttttaaaatagcaaatttgttcaccaggtgtggcttggttaaaacagttaactaacatcttcagtaatcttagaatttattagctttgtgtgtgaattctataaaatcaaggataaatcaaaatgtttttataacttctatgaaatgaattgcaaacatcattaaatatatacattgacatatgcatgtgtcatatatatatatatatatatatatatacacacayaca

SEQ ID NO: 553314 - DNA, 553 bp, Homo sapiens
atgtgtactcttttttttaatttttacttttttgagatgaagtctcactttgttgccaggctggagtacagtggtgcaatctcgactcactgcaacctctgcctcccaggttcaagagattctcctgcttcagcctcctgagtagctgggattacaggcacccgccaccatgcccagctaatttttgtatttttagtagttggrgtttcaccatgttggccaggatggtctcgatctcttgacctcatgatccgcctgcctctgcctcctaaagtgctgggattataggcatgagccaccgtgcccggcctctttttgtttttctattacttttttttttcttgaaaatggatgggctcattggttcatttaatgcatatgctaaaagacaatacaatgcattgtccatgtctagagtgccccttaaatgtgtatgtaatgctgacacagtcaaaaccatttaaacacattagaggcagacacaacagaaaggtcactggttttgcatctacagatccatatttgtgcatgttgctaggcagtggaagaaaat

SEQ ID NO: 553315 - DNA, 513 bp, Homo sapiens
catctaattataaccaaacatgtatagatttgattataaaatatccactttcttacaggatttgtgtgtatacatgtggagagaagtaaataggaatactatttactggtttatatttktttttttttttttttttcactaaactcaacatctctgttgggggagtggttggggtaactttacaaagtaaggtacattgatataattcatttaacaaatatgtattgattacccactttgcgcaaggtaatatgctaagtgctcgaggtagaagagtaaaagtaatagaaaatcttcatcttcattgaggtaaaatttcagcagatagtttaaaataatttgagtttaaattttatttcattgtatacctgtaaaacccaaaagaatccacaaaaaaattataaacagtaagagaattcaataaagtagctgcttacaaaacaggcaaaaataaatagacttccaatgagaaaatgtaagaaaaaataaaatacatagaaatggtcttgagtg

SEQ ID NO: 553316 - DNA, 513 bp, Homo sapiens
catctaattataaccaaacatgtatagatttgattataaaatatccactttcttacaggatttgtgtgtatacatgtggagagaagtaaataggaatactatttactggtttatatttttttttttttttttttttcactaaactcaacatctctgttgkgggagtggttggggtaactttacaaagtaaggtacattgatataattcatttaacaaatatgtattgattacccactttgcgcaaggtaatatgctaagtgctcgaggtagaagagtaaaagtaatagaaaatcttcatcttcattgaggtaaaatttcagcagatagtttaaaataatttgagtttaaattttatttcattgtatacctgtaaaacccaaaagaatccacaaaaaaattataaacagtaagagaattcaataaagtagctgcttacaaaacaggcaaaaataaatagacttccaatgagaaaatgtaagaaaaaataaaatacatagaaatggtcttgagtg

SEQ ID NO: 553317 - DNA, 513 bp, Homo sapiens
catctaattataaccaaacatgtatagatttgattataaaatatccactttcttacaggatttgtgtgtatacatgtggagagaagtaaataggaatactatttactggtttatatttttttttttttttttttttcactaaactcaacatctctgttgggggagtggttggggtaactttacaaagtaaggtacattgatataattcatttaacaaataygtattgattacccactttgcgcaaggtaatatgctaagtgctcgaggtagaagagtaaaagtaatagaaaatcttcatcttcattgaggtaaaatttcagcagatagtttaaaataatttgagtttaaattttatttcattgtatacctgtaaaacccaaaagaatccacaaaaaaattataaacagtaagagaattcaataaagtagctgcttacaaaacaggcaaaaataaatagacttccaatgagaaaatgtaagaaaaaataaaatacatagaaatggtcttgagtg

SEQ ID NO: 553318 - DNA, 513 bp, Homo sapiens
catctaattataaccaaacatgtatagatttgattataaaatatccactttcttacaggatttgtgtgtatacatgtggagagaagtaaataggaatactatttactggtttatatttttttttttttttttttttcactaaactcaacatctctgttgggggagtggttggggtaactttacaaagtaaggtacattgatataattcatttaacaaatatgtattgattacccactttgcgcaaggtaatatgctaagtgctcgaggtagaagagtaaaagtaatagaaaatcttcatcttcattgaggtaaaatttcagcagatagtttaaaataatttgagtttaaattttatttcattgtatacctgtaaaacccaaaagaatccacraaaaaattataaacagtaagagaattcaataaagtagctgcttacaaaacaggcaaaaataaatagacttccaatgagaaaatgtaagaaaaaataaaatacatagaaatggtcttgagtg

SEQ ID NO: 553319 - DNA, 1456 bp, Homo sapiens
caaaactatgaatgtgtgaaaagagacttctcaaagaaagaaaggaagagaaaagtactggtcactccccacacagacagaatgccatggagttgctctttcttgccatgagtttaatgacaagcttccttccccttcatatgccaactaagcagcagccagcaggtcattcyccgtctttgctgcccagccaggcctagagtcttccccaaacacagtcacagatattcccaggcttgaatgccatccagagactagtcatctgatgcaatttcctgtggtctgacaaacgaactcccatccaaacacgttgtgcttggggagtctgactatatgatcacatctcccaggactcaggcccactctgaccacaggattcttctaaagacaccaccgacagaagtgtgtgcaattgcaccatataatttttgtctgggaagtgaaatatctctgtcgttacatcatcttccttagcatagtgatcccttaaaagaagaaagcctaaataagatcccttctcaaagccaaactattaaaacaatcctttttaaatattctttcctgtcttccatgctgtacaagtacagctttcacacaatttctcttctgatcttcaaaacaatgcacggaggggtgtattattcctgtgtcctagtccagccaggacttcctgctcccctttccccccgattcctgcaaaggtgacatggccagcccggccaattcacgtctgagagactggcttcctgtgacaaccttcacccccctcccctgacccacaggcctgacacaaagagactgccggaaactccccacaacggccaagtgggtagccacagtgtcctggaaaggaattctaagcccacaacagagcatttctcatctagctgttttttgtttttttttttttaaatgggattggggttggcgaccagccaaagacgggtggcagaatgatgaaatcatacaagcccacagcaccgattgatgtcgtagtggaaatggggacaggcttttgtgctaaccagagtgttcctacatacactctctgattaataatagtgatggcccaggaacagccgtgacagtcaaagagaaacattgctgtatttgtaacattccatttttttaaagagtgtatattcatatattctttatgaaatctaagttatcttgagaaatgaaaagaaaatggccattgctgccactttgagagccctccgactcaggggtgttgtgtgggttgggggagatttccaactccctgcttaattatctcaaaacaccccatccattcgggtcagccagcatttgactgcctgctactgcgaagctcaatactgcactctgcctaataagcacaaagcccgcgggtctctccaggaaggcaggggtggtgggtcagaaagagctggctctcaaatcgcccatgcctgtgattggatggggaggagtt

SEQ ID NO: 553320 - DNA, 1456 bp, Homo sapiens
caaaactatgaatgtgtgaaaagagacttctcaaagaaagaaaggaagagaaaagtactggtcactccccacacagacagaatgccatggagttgctctttcttgccatgagtttaatgacaagcttccttccccttcatatgccaactaagcagcagccagcaggtcattccccgtctttgctgcccagccaggcctagagtcttccccaaacacagtcacagatattcccaggcttgaatgccatccagagactagtcatctgatgcaatttcctgtggtctgacaaacgaactcccatccaaacacgttgtgcttggggagtctgactatatgatcacatctcccaggactcaggcccactctgaccacaggattcttctaaagacaccaccgacagaagtgtgtgcaattgcaccatataatttttgtctgggaagtgaaatatctctgtcgttacatcatcttccttagcatagtgatcccytaaaagaagaaagcctaaataagatcccttctcaaagccaaactattaaaacaatcctttttaaatattctttcctgtcttccatgctgtacaagtacagctttcacacaatttctcttctgatcttcaaaacaatgcacggaggggtgtattattcctgtgtcctagtccagccaggacttcctgctcccctttccccccgattcctgcaaaggtgacatggccagcccggccaattcacgtctgagagactggcttcctgtgacaaccttcacccccctcccctgacccacaggcctgacacaaagagactgccggaaactccccacaacggccaagtgggtagccacagtgtcctggaaaggaattctaagcccacaacagagcatttctcatctagctgttttttgtttttttttttttaaatgggattggggttggcgaccagccaaagacgggtggcagaatgatgaaatcatacaagcccacagcaccgattgatgtcgtagtggaaatggggacaggcttttgtgctaaccagagtgttcctacatacactctctgattaataatagtgatggcccaggaacagccgtgacagtcaaagagaaacattgctgtatttgtaacattccatttttttaaagagtgtatattcatatattctttatgaaatctaagttatcttgagaaatgaaaagaaaatggccattgctgccactttgagagccctccgactcaggggtgttgtgtgggttgggggagatttccaactccctgcttaattatctcaaaacaccccatccattcgggtcagccagcatttgactgcctgctactgcgaagctcaatactgcactctgcctaataagcacaaagcccgcgggtctctccaggaaggcaggggtggtgggtcagaaagagctggctctcaaatcgcccatgcctgtgattggatggggaggagtt

SEQ ID NO: 553321 - DNA, 1456 bp, Homo sapiens
caaaactatgaatgtgtgaaaagagacttctcaaagaaagaaaggaagagaaaagtactggtcactccccacacagacagaatgccatggagttgctctttcttgccatgagtttaatgacaagcttccttccccttcatatgccaactaagcagcagccagcaggtcattccccgtctttgctgcccagccaggcctagagtcttccccaaacacagtcacagatattcccaggcttgaatgccatccagagactagtcatctgatgcaatttcctgtggtctgacaaacgaactcccatccaaacacgttgtgcttggggagtctgactatatgatcacatctcccaggactcaggcccactctgaccacaggattcttctaaagacaccaccgacagaagtgtgtgcaattgcaccatataatttttgtctgggaagtgaaatatctctgtcgttacatcatcttccttagcatagtgatcccttaaaagaagaaagcctaaataagatcccttctcaaagccaaactattaaaacaatcctttttaaatattctttcctgtcttccatgctgtacaagtacagctttcacacaatttctcttctgatcttcaaaacaatgcacggaggggtgtattattcctgtgtcctagtccagccaggacttcctgctcccctttccccccgattcctgcaaaggtgacatggccagcccggccaattcacgtctgagagactggcttcctgtgacaaccttcacccccctcccctgacccacaggcctgacacaaagagactgccggaaactccccacaacggccaagtgggtagccacagtgtcctggaaaggaattctaagcccacaacagagcatttctcatctagctgttttttgtttttttttttttaaatgggattggggttggcgaccagccaaagacgggtrgcagaatgatgaaatcatacaagcccacagcaccgattgatgtcgtagtggaaatggggacaggcttttgtgctaaccagagtgttcctacatacactctctgattaataatagtgatggcccaggaacagccgtgacagtcaaagagaaacattgctgtatttgtaacattccatttttttaaagagtgtatattcatatattctttatgaaatctaagttatcttgagaaatgaaaagaaaatggccattgctgccactttgagagccctccgactcaggggtgttgtgtgggttgggggagatttccaactccctgcttaattatctcaaaacaccccatccattcgggtcagccagcatttgactgcctgctactgcgaagctcaatactgcactctgcctaataagcacaaagcccgcgggtctctccaggaaggcaggggtggtgggtcagaaagagctggctctcaaatcgcccatgcctgtgattggatggggaggagtt

SEQ ID NO: 553322 - DNA, 1456 bp, Homo sapiens
caaaactatgaatgtgtgaaaagagacttctcaaagaaagaaaggaagagaaaagtactggtcactccccacacagacagaatgccatggagttgctctttcttgccatgagtttaatgacaagcttccttccccttcatatgccaactaagcagcagccagcaggtcattccccgtctttgctgcccagccaggcctagagtcttccccaaacacagtcacagatattcccaggcttgaatgccatccagagactagtcatctgatgcaatttcctgtggtctgacaaacgaactcccatccaaacacgttgtgcttggggagtctgactatatgatcacatctcccaggactcaggcccactctgaccacaggattcttctaaagacaccaccgacagaagtgtgtgcaattgcaccatataatttttgtctgggaagtgaaatatctctgtcgttacatcatcttccttagcatagtgatcccttaaaagaagaaagcctaaataagatcccttctcaaagccaaactattaaaacaatcctttttaaatattctttcctgtcttccatgctgtacaagtacagctttcacacaatttctcttctgatcttcaaaacaatgcacggaggggtgtattattcctgtgtcctagtccagccaggacttcctgctcccctttccccccgattcctgcaaaggtgacatggccagcccggccaattcacgtctgagagactggcttcctgtgacaaccttcacccccctcccctgacccacaggcctgacacaaagagactgccggaaactccccacaacggccaagtgggtagccacagtgtcctggaaaggaattctaagcccacaacagagcatttctcatctagctgttttttgtttttttttttttaaatgggattggggttggcgaccagccaaagacgggtggcagaatgatgaaatcatacaagcccacagcaccgattgatgtcgtagtggaaatggggacaggcttttgtgctaaccagagtgttcctrcatacactctctgattaataatagtgatggcccaggaacagccgtgacagtcaaagagaaacattgctgtatttgtaacattccatttttttaaagagtgtatattcatatattctttatgaaatctaagttatcttgagaaatgaaaagaaaatggccattgctgccactttgagagccctccgactcaggggtgttgtgtgggttgggggagatttccaactccctgcttaattatctcaaaacaccccatccattcgggtcagccagcatttgactgcctgctactgcgaagctcaatactgcactctgcctaataagcacaaagcccgcgggtctctccaggaaggcaggggtggtgggtcagaaagagctggctctcaaatcgcccatgcctgtgattggatggggaggagtt

SEQ ID NO: 553323 - DNA, 1456 bp, Homo sapiens
caaaactatgaatgtgtgaaaagagacttctcaaagaaagaaaggaagagaaaagtactggtcactccccacacagacagaatgccatggagttgctctttcttgccatgagtttaatgacaagcttccttccccttcatatgccaactaagcagcagccagcaggtcattccccgtctttgctgcccagccaggcctagagtcttccccaaacacagtcacagatattcccaggcttgaatgccatccagagactagtcatctgatgcaatttcctgtggtctgacaaacgaactcccatccaaacacgttgtgcttggggagtctgactatatgatcacatctcccaggactcaggcccactctgaccacaggattcttctaaagacaccaccgacagaagtgtgtgcaattgcaccatataatttttgtctgggaagtgaaatatctctgtcgttacatcatcttccttagcatagtgatcccttaaaagaagaaagcctaaataagatcccttctcaaagccaaactattaaaacaatcctttttaaatattctttcctgtcttccatgctgtacaagtacagctttcacacaatttctcttctgatcttcaaaacaatgcacggaggggtgtattattcctgtgtcctagtccagccaggacttcctgctcccctttccccccgattcctgcaaaggtgacatggccagcccggccaattcacgtctgagagactggcttcctgtgacaaccttcacccccctcccctgacccacaggcctgacacaaagagactgccggaaactccccacaacggccaagtgggtagccacagtgtcctggaaaggaattctaagcccacaacagagcatttctcatctagctgttttttgtttttttttttttaaatgggattggggttggcgaccagccaaagacgggtggcagaatgatgaaatcatacaagcccacagcaccgattgatgtcgtagtggaaatggggacaggcttttgtgctaaccagagtgttcctacatacactctctgattaataatagtgatggcccaggaacagccgtgayagtcaaagagaaacattgctgtatttgtaacattccatttttttaaagagtgtatattcatatattctttatgaaatctaagttatcttgagaaatgaaaagaaaatggccattgctgccactttgagagccctccgactcaggggtgttgtgtgggttgggggagatttccaactccctgcttaattatctcaaaacaccccatccattcgggtcagccagcatttgactgcctgctactgcgaagctcaatactgcactctgcctaataagcacaaagcccgcgggtctctccaggaaggcaggggtggtgggtcagaaagagctggctctcaaatcgcccatgcctgtgattggatggggaggagtt

SEQ ID NO: 553324 - DNA, 1456 bp, Homo sapiens
caaaactatgaatgtgtgaaaagagacttctcaaagaaagaaaggaagagaaaagtactggtcactccccacacagacagaatgccatggagttgctctttcttgccatgagtttaatgacaagcttccttccccttcatatgccaactaagcagcagccagcaggtcattccccgtctttgctgcccagccaggcctagagtcttccccaaacacagtcacagatattcccaggcttgaatgccatccagagactagtcatctgatgcaatttcctgtggtctgacaaacgaactcccatccaaacacgttgtgcttggggagtctgactatatgatcacatctcccaggactcaggcccactctgaccacaggattcttctaaagacaccaccgacagaagtgtgtgcaattgcaccatataatttttgtctgggaagtgaaatatctctgtcgttacatcatcttccttagcatagtgatcccttaaaagaagaaagcctaaataagatcccttctcaaagccaaactattaaaacaatcctttttaaatattctttcctgtcttccatgctgtacaagtacagctttcacacaatttctcttctgatcttcaaaacaatgcacggaggggtgtattattcctgtgtcctagtccagccaggacttcctgctcccctttccccccgattcctgcaaaggtgacatggccagcccggccaattcacgtctgagagactggcttcctgtgacaaccttcacccccctcccctgacccacaggcctgacacaaagagactgccggaaactccccacaacggccaagtgggtagccacagtgtcctggaaaggaattctaagcccacaacagagcatttctcatctagctgttttttgtttttttttttttaaatgggattggggttggcgaccagccaaagacgggtggcagaatgatgaaatcatacaagcccacagcaccgattgatgtcgtagtggaaatggggacaggcttttgtgctaaccagagtgttcctacatacactctctgattaataatagtgatggcccaggaacagccgtgacagtcaaagagaaacattgctgtatttgtaacattccatttttttaaagagygtatattcatatattctttatgaaatctaagttatcttgagaaatgaaaagaaaatggccattgctgccactttgagagccctccgactcaggggtgttgtgtgggttgggggagatttccaactccctgcttaattatctcaaaacaccccatccattcgggtcagccagcatttgactgcctgctactgcgaagctcaatactgcactctgcctaataagcacaaagcccgcgggtctctccaggaaggcaggggtggtgggtcagaaagagctggctctcaaatcgcccatgcctgtgattggatggggaggagtt

SEQ ID NO: 553325 - DNA, 1346 bp, Homo sapiens
ctgtgtgctgcacccactatctgacaagccccagtgagatgaaccgagtacctcagttggaaatgcagaaaacacacgtcttctgcatcgctcatgctgggagctgcagactggagctgttcctattcagccatcttggaacctccctgctgggagtgctcatctttatagagacatgtcacagtcagacttcagaggcttctctctgattggaggttgctttacctatgtcagaatcacccagcaatagcactgatttgttgttaagggcaaatcttgttcttgaccaacttaaagctttcctaagaaggaggattgaggctgatttcagggcagaaaagaggagtactcattctttcaacttgtttcttagcaatttgcaagcataatatacagtatcgtcagatttgcaaaatcccatcaaactgggagggttagtgaaagggawggaaagttgccataggccttttctcagggccactttgttcataaaagcattcataatttcattttatgagcaaatgaataattaaataagccactaaagtctcaaaatgattattttatttaaaaaagtatggctaatctggttttaagaattgtgaccattactttaaaaatgcttaagtttttgtctagactcatgctctgcaggaatgagtatgtacaaccgaagaataaaacaaaaactcccctattttattgttaaaattgtgacatgtggactgtattttttaaccttttataatgacattaatattattcttgcaaatttcacagatttcattgcatggtctgcatttacttgatattgattttttgttttttgttttttgttttttttttttgcagagacaagtgaacatttatttttatgcctttcttcctatgtgtatttcaagtatttttcaaaacagggccccaggactctccagattcagttatgtccttgggcttggtctactgctgcaggagtcttagggagccttgtacaaatgctagagtgactcatttaccaacattaaaccctaggatagatgcaacaaagcgggactccttcttccatggaatgtgctgatttcagacaatgcagcacccaatgtagaaaacgccggaatttttccttggaactggactgtgatgagaggtgcttgccatgaacataagctactgtcttttcctttctttttttgagatggagttttgctccttgcccaggctggactgcaatggcgtgatctcggctcactgcaacttccgccttccaggtttgagtgattctcctgccccagcctcccgagtagctgggattacaggcatgcaccaccatgcccggtcaatttttg

SEQ ID NO: 553326 - DNA, 1346 bp, Homo sapiens
ctgtgtgctgcacccactatctgacaagccccagtgagatgaaccgagtacctcagttggaaatgcagaaaacacacgtcttctgcatcgctcatgctgggagctgcagactggagctgttcctattcagccatcttggaacctccctgctgggagtgctcatctttatagagacatgtcacagtcagacttcagaggcttctctctgattggaggttgctttacctatgtcagaatcacccagcaatagcactgatttgttgttaagggcaaatcttgttcttgaccaacttaaagctttcctaagaaggaggattgaggctgatttcagggcagaaaagaggagtactcattctttcaacttgtttcttagcaatttgcaagcataatatacagtatcgtcagatttgcaaaatcccatcaaactgggagggttagtgaaagggaaggaaagttgccataggccttttctcagggccactttgttcataaaagcattcataawttcattttatgagcaaatgaataattaaataagccactaaagtctcaaaatgattattttatttaaaaaagtatggctaatctggttttaagaattgtgaccattactttaaaaatgcttaagtttttgtctagactcatgctctgcaggaatgagtatgtacaaccgaagaataaaacaaaaactcccctattttattgttaaaattgtgacatgtggactgtattttttaaccttttataatgacattaatattattcttgcaaatttcacagatttcattgcatggtctgcatttacttgatattgattttttgttttttgttttttgttttttttttttgcagagacaagtgaacatttatttttatgcctttcttcctatgtgtatttcaagtatttttcaaaacagggccccaggactctccagattcagttatgtccttgggcttggtctactgctgcaggagtcttagggagccttgtacaaatgctagagtgactcatttaccaacattaaaccctaggatagatgcaacaaagcgggactccttcttccatggaatgtgctgatttcagacaatgcagcacccaatgtagaaaacgccggaatttttccttggaactggactgtgatgagaggtgcttgccatgaacataagctactgtcttttcctttctttttttgagatggagttttgctccttgcccaggctggactgcaatggcgtgatctcggctcactgcaacttccgccttccaggtttgagtgattctcctgccccagcctcccgagtagctgggattacaggcatgcaccaccatgcccggtcaatttttg

SEQ ID NO: 553327 - DNA, 1346 bp, Homo sapiens
ctgtgtgctgcacccactatctgacaagccccagtgagatgaaccgagtacctcagttggaaatgcagaaaacacacgtcttctgcatcgctcatgctgggagctgcagactggagctgttcctattcagccatcttggaacctccctgctgggagtgctcatctttatagagacatgtcacagtcagacttcagaggcttctctctgattggaggttgctttacctatgtcagaatcacccagcaatagcactgatttgttgttaagggcaaatcttgttcttgaccaacttaaagctttcctaagaaggaggattgaggctgatttcagggcagaaaagaggagtactcattctttcaacttgtttcttagcaatttgcaagcataatatacagtatcgtcagatttgcaaaatcccatcaaactgggagggttagtgaaagggaaggaaagttgccataggccttttctcagggccactttgttcataaaagcattcataatttcattttatgagcaaatgaataattaaataagccactaaagtctcaaaatgattattttatttwaaaaagtatggctaatctggttttaagaattgtgaccattactttaaaaatgcttaagtttttgtctagactcatgctctgcaggaatgagtatgtacaaccgaagaataaaacaaaaactcccctattttattgttaaaattgtgacatgtggactgtattttttaaccttttataatgacattaatattattcttgcaaatttcacagatttcattgcatggtctgcatttacttgatattgattttttgttttttgttttttgttttttttttttgcagagacaagtgaacatttatttttatgcctttcttcctatgtgtatttcaagtatttttcaaaacagggccccaggactctccagattcagttatgtccttgggcttggtctactgctgcaggagtcttagggagccttgtacaaatgctagagtgactcatttaccaacattaaaccctaggatagatgcaacaaagcgggactccttcttccatggaatgtgctgatttcagacaatgcagcacccaatgtagaaaacgccggaatttttccttggaactggactgtgatgagaggtgcttgccatgaacataagctactgtcttttcctttctttttttgagatggagttttgctccttgcccaggctggactgcaatggcgtgatctcggctcactgcaacttccgccttccaggtttgagtgattctcctgccccagcctcccgagtagctgggattacaggcatgcaccaccatgcccggtcaatttttg

SEQ ID NO: 553328 - DNA, 1346 bp, Homo sapiens
ctgtgtgctgcacccactatctgacaagccccagtgagatgaaccgagtacctcagttggaaatgcagaaaacacacgtcttctgcatcgctcatgctgggagctgcagactggagctgttcctattcagccatcttggaacctccctgctgggagtgctcatctttatagagacatgtcacagtcagacttcagaggcttctctctgattggaggttgctttacctatgtcagaatcacccagcaatagcactgatttgttgttaagggcaaatcttgttcttgaccaacttaaagctttcctaagaaggaggattgaggctgatttcagggcagaaaagaggagtactcattctttcaacttgtttcttagcaatttgcaagcataatatacagtatcgtcagatttgcaaaatcccatcaaactgggagggttagtgaaagggaaggaaagttgccataggccttttctcagggccactttgttcataaaagcattcataatttcattttatgagcaaatgaataattaaataagccactaaagtctcaaaatgattattttatttaaaaaagtatggctaatctggttttaagaattgtgaccattactttaaaaatgcttaagtttttgtctagactcatgctctgcaggaatgagtatgtacaaccgaagaataaaacaaaaactcccctattttattgttaaaattgtgacatgtggactgtattttttaaccttttataatgacattaatattattcttgcaaatttcacagatttcattgcatggtctgcatttacttgatattgattttttgttttttgttttttkttttttttttttgcagagacaagtgaacatttatttttatgcctttcttcctatgtgtatttcaagtatttttcaaaacagggccccaggactctccagattcagttatgtccttgggcttggtctactgctgcaggagtcttagggagccttgtacaaatgctagagtgactcatttaccaacattaaaccctaggatagatgcaacaaagcgggactccttcttccatggaatgtgctgatttcagacaatgcagcacccaatgtagaaaacgccggaatttttccttggaactggactgtgatgagaggtgcttgccatgaacataagctactgtcttttcctttctttttttgagatggagttttgctccttgcccaggctggactgcaatggcgtgatctcggctcactgcaacttccgccttccaggtttgagtgattctcctgccccagcctcccgagtagctgggattacaggcatgcaccaccatgcccggtcaatttttg

SEQ ID NO: 553329 - DNA, 1346 bp, Homo sapiens
ctgtgtgctgcacccactatctgacaagccccagtgagatgaaccgagtacctcagttggaaatgcagaaaacacacgtcttctgcatcgctcatgctgggagctgcagactggagctgttcctattcagccatcttggaacctccctgctgggagtgctcatctttatagagacatgtcacagtcagacttcagaggcttctctctgattggaggttgctttacctatgtcagaatcacccagcaatagcactgatttgttgttaagggcaaatcttgttcttgaccaacttaaagctttcctaagaaggaggattgaggctgatttcagggcagaaaagaggagtactcattctttcaacttgtttcttagcaatttgcaagcataatatacagtatcgtcagatttgcaaaatcccatcaaactgggagggttagtgaaagggaaggaaagttgccataggccttttctcagggccactttgttcataaaagcattcataatttcattttatgagcaaatgaataattaaataagccactaaagtctcaaaatgattattttatttaaaaaagtatggctaatctggttttaagaattgtgaccattactttaaaaatgcttaagtttttgtctagactcatgctctgcaggaatgagtatgtacaaccgaagaataaaacaaaaactcccctattttattgttaaaattgtgacatgtggactgtattttttaaccttttataatgacattaatattattcttgcaaatttcacagatttcattgcatggtctgcatttacttgatattgattttttgttttttgttttttgttttttttttttgcagagacaagtgaacatttatttttatgcctttcttcctatgtgtatttcaagtatttttcaaaacagggccccaggactctccagattcagttatgtccttgggcttggtctactgctgcaggagtcttagggagccttgtacaaatgctagagtgactcatttaccaacattaaaccctaggatagatgcaacaaagcgggactccttcttccatggaatgtgctgatttcagacaatgcagcacccaatgtagaaaacgccggaatttttccttggaactggactgtgatgagaggtgcttgccatgaacataagctactgtcttttcctttctttttttgagatggagttttgctccttgcccaggctggactgcaatggcgtgatctcggctcactgcaacttccgccttccaggtttgagtgattctcctgccycagcctcccgagtagctgggattacaggcatgcaccaccatgcccggtcaatttttg

SEQ ID NO: 553330 - DNA, 1346 bp, Homo sapiens
ctgtgtgctgcacccactatctgacaagccccagtgagatgaaccgagtacctcagttggaaatgcagaaaacacacgtcttctgcatcgctcatgctgggagctgcagactggagctgttcctattcagccatcttggaacctccctgctgggagtgctcatctttatagagacatgtcacagtcagacttcagaggcttctctctgattggaggttgctttacctatgtcagaatcacccagcaatagcactgatttgttgttaagggcaaatcttgttcttgaccaacttaaagctttcctaagaaggaggattgaggctgatttcagggcagaaaagaggagtactcattctttcaacttgtttcttagcaatttgcaagcataatatacagtatcgtcagatttgcaaaatcccatcaaactgggagggttagtgaaagggaaggaaagttgccataggccttttctcagggccactttgttcataaaagcattcataatttcattttatgagcaaatgaataattaaataagccactaaagtctcaaaatgattattttatttaaaaaagtatggctaatctggttttaagaattgtgaccattactttaaaaatgcttaagtttttgtctagactcatgctctgcaggaatgagtatgtacaaccgaagaataaaacaaaaactcccctattttattgttaaaattgtgacatgtggactgtattttttaaccttttataatgacattaatattattcttgcaaatttcacagatttcattgcatggtctgcatttacttgatattgattttttgttttttgttttttgttttttttttttgcagagacaagtgaacatttatttttatgcctttcttcctatgtgtatttcaagtatttttcaaaacagggccccaggactctccagattcagttatgtccttgggcttggtctactgctgcaggagtcttagggagccttgtacaaatgctagagtgactcatttaccaacattaaaccctaggatagatgcaacaaagcgggactccttcttccatggaatgtgctgatttcagacaatgcagcacccaatgtagaaaacgccggaatttttccttggaactggactgtgatgagaggtgcttgccatgaacataagctactgtcttttcctttctttttttgagatggagttttgctccttgcccaggctggactgcaatggcgtgatctcggctcactgcaacttccgccttccaggtttgagtgattctcctgccccagcctcccgagtarctgggattacaggcatgcaccaccatgcccggtcaatttttg

SEQ ID NO: 553331 - DNA, 669 bp, Homo sapiens
gggggtttgtggtatttttaagccatattaaagttcatttttttccacatagaacaatttctgtgtgatgtcttcatagcttttaataatgattgatggttaattaaactgttgggttgaaagmgtttgaagtaaacagaatacaggggttttttggtagaaacactgaagtcagcttgcagatctcctgttgcattccaggcagggcgagaactgagaccctggggagcatgtagaaggtgacctgaaactctgttcctcggcatgggggctgaggggactggcttctgctggatggaaaatgcaagctgagtggtttaaagaaaaggagtggaaaataggtaacagccagtatggctgtagcaggcctagggaggaagatggggtggagagaaagagatgtggtggatgtggtaaggagtggaaatttgaggaaaggaagaggtttaaagataatttttgagaagtttatcagtatgataattgattctcacaaacttgcagtgaaaaccacattatacgtcatgctttaaagttcatcttggtcatgtctttgatgcaaaagtgggagacaggccccaaggcaggggctggtgaaggcagtgccagcccaaggcagccaactatgtttatggtccactgtggccacattgaggctgaccccccagc

SEQ ID NO: 553332 - DNA, 669 bp, Homo sapiens
gggggtttgtggtatttttaagccatattaaagttcatttttttccacatagaacaatttctgtgtgatgtcttcatagcttttaataatgattgatggttaattaaactgttgggttgaaagagtttgaagtaaacagaatacaggggttttttggtagaaacactgaagtcagcttgcagatctcctgttgcattccaggcagggcgagaactgagaccctggggagcatgtagaaggtgacctgaaactctgttcctcggcatgggggctgaggggactggcttctgctggatggaaaatgcaagctgagtggtttaaagaaaaggagtggaaaataggtaacagccagtatggctgtagcaggcctagggaggaagatggggtggagagaaagagatgtggtggatgtggtaaggagtggaaatttgaggaaaggaagaggtttaaagataatttttgagaagtttatcagtatgatarttgattctcacaaacttgcagtgaaaaccacattatacgtcatgctttaaagttcatcttggtcatgtctttgatgcaaaagtgggagacaggccccaaggcaggggctggtgaaggcagtgccagcccaaggcagccaactatgtttatggtccactgtggccacattgaggctgaccccccagc

SEQ ID NO: 553333 - DNA, 1297 bp, Homo sapiens
ttgcactcccagaaggattattttaactgttggtatgggttgaattgtttctccccaaaaaagatacgttggagtcccaacctccagtatctaagaatgtgaccttgtttgtagataaaggtctttacagaagtaatcaagttaaaatgacccattagggtgggccctgatctaacatgacttgtgtctttataaagwcgtaaaggggaaatttgacacagagctagacacacatagagggaagatgatatgaaaagacacagagagaagatgaccatctacaaacaaagagcagcggtctgggatggattctcccctcccagtcctcagaaaaagtcaactctgatgacaccttgattttgagcttctagcttccataactataagacaatacatttcttttctttaagctatcaagttagtgggttttcgttacggcagccctagcaaagtaatgcaaacatttcctctattccattttgttaatccagctgttcatgccagggcctccaagtgctttttaaccggagcgaaatcttagtttcagcagaatgtcaagttgacttatgctaaatagataatagctttctaaattcccaataccaagtattaagatattttaaaatataactgttgcttttttctctcattatttctgaatgtggaaaaaaataatctcattagaaatgttgttttcaaatatgttagcaagccaattaaaatataggcttctgggttttgcccggatggtagtgatgaaattaattatgagccccatgctctgctttctgtgagtttcctcttctcttagaccaagctggcaggtctgttattgtaaaagaaaccactgaagggtcatcaccagtatgagatgaaatcatcgatgaacgtttgacagtttgtaaggcatagtgatgttacttagatgttttgttttctccttgggtgacatgggcagcatagcaattatagcacatttcaaatcattgcttacagggatatgactcatttcacaatgcagtacttagttggggccctggctatggatagagacaagtatctttctgtttatgacttttcctgaattatgagcaaaccagacagaggcttaggttcatttgaaattttacactgtgtttttcattttaatgagatgcctgggtaaattcaaaaccaatactttacactgacacttgatacgcactgacatgtcattatgtcctacacatgctggtcaggacttgtaaaacagaaacaccagagccatctcaagagtctccaaatagatatggacgga

SEQ ID NO: 553334 - DNA, 1297 bp, Homo sapiens
ttgcactcccagaaggattattttaactgttggtatgggttgaattgtttctccccaaaaaagatacgttggagtcccaacctccagtatctaagaatgtgaccttgtttgtagataaaggtctttacagaagtaatcaagttaaaatgacccattagggtgggccctgatctaacatgacttgtgtctttataaagacgtaaaggggaaatttgacacagagctagacacacatagagggaagatgatatgaaaagacacagagagaagatgaccatctacaaacaaagagcagcggtctgggatggattctcccctcccagtcctcagaaaaagtcaactctgatgacaccttgattttgagcttctagcttccataactataagacaatacatttcttttctttaagctatcaagttagtgggttttcgttacggcagccctagcaaagtaatgcaaacatttcctctattccattttgttaatccagctgttcatgccagggcctccaagtgctttttaaccggagcgaaatcttagtttcagcagaatgtcaagttgacttatgctaaatagataatagctttctaaattcccaataccaagtattaagatattttaaaatataactgttgcttttttctctcattatttctgaatgtggaaaaaaataatctcattagaaatgttgttttcaaatatgttagcaagccaattaaaatataggcttctgggttttgcccggatggtagtgatgaaattaattatgagccccatgctctgctttctgtgagtttcctcttctcttagaccaagctggcaggtctgttattgtaaaagaaaccactgaagggtcatcaccagtatgagatgaaatcatcgatgaacgtttgacagtttgtaaggcatagtgatgttacttagatgttttgttttctccttgggtgacatgggcagcatagcaattatagcacatttcaaatcattgcttacagggatatgactcatttcacaatgcagtacttagttggggccctggctatggatagagacaagtatctttctgtttatgacttttcctgaattatgarcaaaccagacagaggcttaggttcatttgaaattttacactgtgtttttcattttaatgagatgcctgggtaaattcaaaaccaatactttacactgacacttgatacgcactgacatgtcattatgtcctacacatgctggtcaggacttgtaaaacagaaacaccagagccatctcaagagtctccaaatagatatggacgga

SEQ ID NO: 553335 - DNA, 602 bp, Homo sapiens
ctttctcaatgtttgtcctaccaccacaccacttcccacccccagagattagaatcagtctggagcgagggccaggtatccagatctttagaagccctctgggtcgttctattgtgatgccaaagttgagagtcactgccacagttcggtgcttttcaaatgttagtgagtgcgccaatctctagggtctagctaaacttcagattctgaatcagtatgtctacagcgtggctccagagtctgccttctagccagctctcagtgatggtactgctgctactccttagaccacacttggtagcgagcttttagagctaactcagctaatgatcttgcctgggtacgcttagtgccccgtgtcctcagactcagtgtggcagatgtcctgtctaaagcayggaaggcgatgtacagagactactttttggaaattttctgggacttttgtggagtgaggtcgggtcatcatagagtaagagccaatcacacattggaccctgaagctagccacttctaattatagctactggacattcacaaattcttagggttccaggaagggcatggaaaagacagaaacatccccttaaatcctacttcag

SEQ ID NO: 553336 - DNA, 991 bp, Homo sapiens
caggcttctcttgtattttgcttggctcagctatctacaatcagccattttccctagaagcactggtcctatttagtataaaatggtttttacatgctacaatttgggtacttggtgtgctcattgttactgggatatactcttggaccatctctgaacagttaagcgtgtgtgtgtgtgtgtgtgtgtgtgtgtatgtgtactctacacacatatataagtatacacaaagatctatagctatttctatatcaatctgtaaatacataaatttaaaaatcatgaattcatactgattttttccaattcaaacctaatacctgagttcctttatagccataagtaccttttctaacagtgaaaaaatttgacttttattatccttaatatatttgttcattgacttatgtgttcagtgtaactaacttcctgaccacgcagacatctcctctgccacttcagctcttcacatccttggatgccagtgggaatattgctattctctatgcagcatccctgtgcaacgccgtcctcccctcctcagtacccttgccagtgggcacccttctgatgcatctctgtatggtatctccctcctcccctcagtgccccgtgctggcgagcatgccaaccatgcacctctgtgaaattcaccctcactccacagacattttctgtagtggcctgtgattgactgctctgcgccmggaacagaaaaggagaaggaactataatttcttttataggtaattaggaattcatatatcacataggagtagaatctttgagctggaagagaccttgtaaataaatcatttagggtgagcaggggtatagaaaatgggattcttttgtgttggaattctggccctgtcacttacttggtgaatcttgcataattaaacatcagtcagagcaggatatttaagtctgctgattctcccatccccttgctgtctcagaaatattctatagcatttggagacatgca

SEQ ID NO: 553337 - DNA, 636 bp, Homo sapiens
cattcccacttttcctacttttcaaacgagatttctatcttcatacgatggaagggaggtattttaaaagatcatctggaaacttcttttttattatcttcattgactagtcaacctgagcattatttcaatgtttcatttaacgtgcagttgaccccattttaagatattcctggaactctggatgcatatcaaatttytgtagcgcaaatcatttcccaattgattttcattccattttgaagacatgctctcatacctcctgttgacttcccagtctgctaattatagctcaaggcaggagatgggaagtgcagaagctcatataagccctggcattttgccttaatctgaagctcaaggcaggtatctgatgcaatgagttttatgttctctgcctagatcaagaagaagccaggaagggcaggagtttgctccagcagatgccttcctcaagctgacagctgcttcgctggctctgataatcagtctgaggagttgctcaactgctggtagaattcaatgaataaggggcttttaattattacacatcttccatacacatcttaatgctggggaacataaaagaaatataacttggtgcctggtatcaaagaacctaaagacttaaagggc

SEQ ID NO: 553338 - DNA, 636 bp, Homo sapiens
cattcccacttttcctacttttcaaacgagatttctatcttcatacgatggaagggaggtattttaaaagatcatctggaaacttcttttttattatcttcattgactagtcaacctgagcattatttcaatgtttcatttaacgtgcagttgaccccattttaagatattcctggaactctggatgcatatcaaatttttgtagcgcaaatcatttcccaattgattttcattccattttgaagacatgctctcatacctcctgttgacttcccagtctgctaattatagctcaaggcaggagaygggaagtgcagaagctcatataagccctggcattttgccttaatctgaagctcaaggcaggtatctgatgcaatgagttttatgttctctgcctagatcaagaagaagccaggaagggcaggagtttgctccagcagatgccttcctcaagctgacagctgcttcgctggctctgataatcagtctgaggagttgctcaactgctggtagaattcaatgaataaggggcttttaattattacacatcttccatacacatcttaatgctggggaacataaaagaaatataacttggtgcctggtatcaaagaacctaaagacttaaagggc

SEQ ID NO: 553339 - DNA, 636 bp, Homo sapiens
cattcccacttttcctacttttcaaacgagatttctatcttcatacgatggaagggaggtattttaaaagatcatctggaaacttcttttttattatcttcattgactagtcaacctgagcattatttcaatgtttcatttaacgtgcagttgaccccattttaagatattcctggaactctggatgcatatcaaatttttgtagcgcaaatcatttcccaattgattttcattccattttgaagacatgctctcatacctcctgttgacttcccagtctgctaattatagctcaaggcaggagatgggaagtgcagaagctcatataagccctggcattttgccttaatctgaagctcaaggcaggtatctgatgcaatgagttttatgttctctgcctagatcaagaagaagccaggaagggcaggagtttgctccagcagatgccttcctcaagctgacagcygcttcgctggctctgataatcagtctgaggagttgctcaactgctggtagaattcaatgaataaggggcttttaattattacacatcttccatacacatcttaatgctggggaacataaaagaaatataacttggtgcctggtatcaaagaacctaaagacttaaagggc

SEQ ID NO: 553340 - DNA, 636 bp, Homo sapiens
cattcccacttttcctacttttcaaacgagatttctatcttcatacgatggaagggaggtattttaaaagatcatctggaaacttcttttttattatcttcattgactagtcaacctgagcattatttcaatgtttcatttaacgtgcagttgaccccattttaagatattcctggaactctggatgcatatcaaatttttgtagcgcaaatcatttcccaattgattttcattccattttgaagacatgctctcatacctcctgttgacttcccagtctgctaattatagctcaaggcaggagatgggaagtgcagaagctcatataagccctggcattttgccttaatctgaagctcaaggcaggtatctgatgcaatgagttttatgttctctgcctagatcaagaagaagccaggaagggcaggagtttgctccagcagatgccttcctcaagctgacagctgcttcgctggctctgataatcagtctgaggagttgctcaactgctggtagaattcaatgaataaggrgcttttaattattacacatcttccatacacatcttaatgctggggaacataaaagaaatataacttggtgcctggtatcaaagaacctaaagacttaaagggc

SEQ ID NO: 553341 - DNA, 365 bp, Homo sapiens
acaaccctgtgaagtagcagaggaaataggattatttcctgtaatggatcaggtaacccggttacagggcagttaattcattctaagtgacacaggctgtaagtgagaaaaccagcaccaaatttcacactaattttactacattaagtttcatctctggaaatcaagaagaggtttgcagggccaagctagttgaagctcaccgtggactaagaatcaaagttggtttttttttcctttcttttyttttcttaagaggtgggtgggggtgttgacaaggaggaaagggaggaacccacaaatgtaatttcagcaacagttcccttaacaacgcccgcagatggatgaatttccgcacagtctgg

SEQ ID NO: 553342 - DNA, 552 bp, Homo sapiens
aagctgcctcagaagcaaatataataccaagtgctcagtggtactcaaaggataaatttcccacgtttcactcccttttattcatttactcactgtcaaattcacattgcaaacagtgtaaaaagagacaaaattcagaattgtcatcagctcccagaggatcaccaggattgaaaggtaaaaagcctgttattgctatgggccaggagctgttttaatggctttcccagcctgttgagagtcatttcaggatgctgagtcaaagagagtgaaacttggagtgacccagctgttagtctctggcataccttttaactgatgtcaccaggcatttcttagagagtagagtaagccactgtwcttctgccagtcatgttcatttttgtcagttttttaagtaaaaatattactttatagaaaataatccttaatagctactcattcagtcattctatattctggataaactttaaaaataaagttaaacatgctgcccatgacttgatgtgtgttttttgtttgtttgtttctgtttgtttgttttgttttgta

SEQ ID NO: 553343 - DNA, 1238 bp, Homo sapiens
gtgtggcttctatcaagccattagtcatctctgagcctcagtttccccatctgttaaacggacataatattagtattgtgcaaaaataatagaattattgcaaggattagatgatagtgaagtaaagcacttagatggaggctggcccatctgagcactcaatattaatttctgttattaattttttatcataatgatgatataaggtaaagtcaaagatgctatraagttgcacgagcttattaacacaaagcaaccaatgtaaaccaagtaatttgttttaatgccagatgtgaataagttgttctgctttttttcctactttataacctccttcgcatcaaccttgatttctatagttatataaacctttgtatttaaacaaagagatctcctggataagttggaagaggagaaagaaaaaaacaacttgggctggggaatctgatgattgtggggtcagcgttaacttttggcctcagttttaaccttgggggactgttttcattgtttgtacctctgcgttagatttatctttgtccctggccttctaataataggtaatcatttgaattcaataagatctgatccagcgtcaggaattccaaaggccagagagacaactcaactatttcttttgctttttcttttgagacagagtctcattctgtcactcaggctggagtgcagtggcaggatctcggctcactgcaagctttgcctccagggttcaagagattctcatgccccagcctccagagtagttggtattacaggtgtgcgccacaacgccaagctaattttttgtatttttggtagtgatgggatttcgctgtgttggccaggctggtcttgaacccctggcctcaagtgatctgcccaccccagcctcccaaagtgctgggattacagtcatgagccgccatgcctggcctaacttaactatttctgatcttatatgtaagtggacccattggcttcccaaatggaataaaattaaggtgtcatcattttatgcgtagatgctgcagcagaacccaaggggctcagatgagaatgtgcaaacgtgtgaggtcaaaaagctgctattgacaaagcagaggagttattattatataaatagccttcagcccgcatctctggatttatggtactggtcattttagtattagccaagaaagctactccactgggaaaccattcaatgaaggagggaagaataacgcctcccacaccca

SEQ ID NO: 553344 - DNA, 1238 bp, Homo sapiens
gtgtggcttctatcaagccattagtcatctctgagcctcagtttccccatctgttaaacggacataatattagtattgtgcaaaaataatagaattattgcaaggattagatgatagtgaagtaaagcacttagatggaggctggcccatctgagcactcaatattaatttctgttattaattttttatcataatgatgatataaggtaaagtcaaagatgctatgaagttgcacgagcttattaacacaaagcaaccaatgtaaaccaagtaatttgttttaatgccagatgtgaataagttgttctgctttttttcctactttataacctccttcgcatcaaccttgatttctatagttatataaacctttgtatttaaacaaagagatctcctggataagwtggaagaggagaaagaaaaaaacaacttgggctggggaatctgatgattgtggggtcagcgttaacttttggcctcagttttaaccttgggggactgttttcattgtttgtacctctgcgttagatttatctttgtccctggccttctaataataggtaatcatttgaattcaataagatctgatccagcgtcaggaattccaaaggccagagagacaactcaactatttcttttgctttttcttttgagacagagtctcattctgtcactcaggctggagtgcagtggcaggatctcggctcactgcaagctttgcctccagggttcaagagattctcatgccccagcctccagagtagttggtattacaggtgtgcgccacaacgccaagctaattttttgtatttttggtagtgatgggatttcgctgtgttggccaggctggtcttgaacccctggcctcaagtgatctgcccaccccagcctcccaaagtgctgggattacagtcatgagccgccatgcctggcctaacttaactatttctgatcttatatgtaagtggacccattggcttcccaaatggaataaaattaaggtgtcatcattttatgcgtagatgctgcagcagaacccaaggggctcagatgagaatgtgcaaacgtgtgaggtcaaaaagctgctattgacaaagcagaggagttattattatataaatagccttcagcccgcatctctggatttatggtactggtcattttagtattagccaagaaagctactccactgggaaaccattcaatgaaggagggaagaataacgcctcccacaccca

SEQ ID NO: 553345 - DNA, 1238 bp, Homo sapiens
gtgtggcttctatcaagccattagtcatctctgagcctcagtttccccatctgttaaacggacataatattagtattgtgcaaaaataatagaattattgcaaggattagatgatagtgaagtaaagcacttagatggaggctggcccatctgagcactcaatattaatttctgttattaattttttatcataatgatgatataaggtaaagtcaaagatgctatgaagttgcacgagcttattaacacaaagcaaccaatgtaaaccaagtaatttgttttaatgccagatgtgaataagttgttctgctttttttcctactttataacctccttcgcatcaaccttgatttctatagttatataaacctttgtatttaaacaaagagatctcctggataagttggaagaggagaaagaaaaaaacaacttgggctggggaatctgatgattgtggggtcagcgttaacttttggcctcagttttaaccttgggggactgttttcattgtttgtacctctgcgttagatttatctttgtccctggccttctaataataggtaatcatttgaattcaataagatctgatccagcgtcaggaattccaaaggccagagagacaactcaactatttcttttgctttttcttttgagacagagtctcattctgtcactcaggctggagtgcagtggcaggatctcggctcactgcaagctttgcctccagggttcaagagattctcatgccccagcctccagagtagttggtattacaggtgtgcgccacaacgccaagctaattttttgtatttttggtagtgatgggatttcgctgtgttggccaggctggtcttgaacccctggcctcaagtgatctgcccaccccagcctcccaaagtgctgggattacagtcatgagccgccatgcctggcctaacttaactatttctgatcttatatgtaagtggacccattggcttcccaaatggaataaaattaaggtgtcatcattttatgcgtagatgctgcagcagaacccaaggggctcagatgagaatgtgcaaacgtgtgaggtcaaaaagctgctattgacaaagcagaggagttattattatataaatagccttcagcccgcatctctggatttatggtactggtcattttagtattagccaagaaagctactccactgggmaaccattcaatgaaggagggaagaataacgcctcccacaccca

SEQ ID NO: 553346 - DNA, 504 bp, Homo sapiens
catcgaaagagtattttcctggggcttgagcccttgtttggagaatcctagattctcctggaataacacccaagttccttactggaactcaaaaagccccactgacctggttccactctcttgagtgacctctttgctttgttcactgcggtgaagtcactctggttttcctttggtttctgtaacacgtcctgctccttttggcctggaggcctttgagcatgctgttcctctcagcctggaaccttcccccaaccgccactctcttccttcatgcttgttcttctggtcttttcttaagcctcagagtttgggtgaaagaagagaggtgaggtaaagggacaagaagtcctcctgttggagacttccrgagtctttggttatgggcaatgctacccttgccactagtgaaaactacccctgccctgccggcccctggaattctatcactgtgttggggtcccttcatcctttcagcagtccttctgggcagcatattttttc

SEQ ID NO: 553347 - DNA, 639 bp, Homo sapiens
ggactaacaaaactaggcagccctttagcactatacttgggagccattttcaaaagcaaaatcaccacaaaatgtctaaaaatgtggaaaaggtggcacttgatagactacaaaaaagtttacaatatataagacctgaaacaagaaggtagaccatcactttgacctaagctaagaatgtgcactccaatttttcaccactctgtatatgtcctcaaaattacgtaacagcaccaagcatattgacttaaggattacaaacacattttagcaatcagggaaattcatgcatgtggaattcacaaataatgaggattggctgtattttattaaaaagatggacttgaacaaatcaattwagaggcaatattgttacaggtctcccccaaatgtaatactttattttaaaaaaatagtagtaagaagtatcatttgtgtttatataaaataaacattttcagaaacagaattaaacatgccgcagatttgggttctatagcactcagatatctgaaatctattgattactcggctaattcatatcatttctcttgggcttcttagctaaaattagctcgtttgccatctgatctgccctcagttatgcattttacattctcattcttttagcatctctca

SEQ ID NO: 553348 - DNA, 639 bp, Homo sapiens
ggactaacaaaactaggcagccctttagcactatacttgggagccattttcaaaagcaaaatcaccacaaaatgtctaaaaatgtggaaaaggtggcacttgatagactacaaaaaagtttacaatatataagacctgaaacaagaaggtagaccatcactttgacctaagctaagaatgtgcactccaatttttcaccactctgtatatgtcctcaaaattacgtaacagcaccaagcatattgacttaaggattacaaacacattttagcaatcagggaaattcatgcatgtggaattcacaaataatgaggattggctgtattttattaaaaagatggacttgaacaaatcaatttagaggcaatattgttacaggtctcccccaaatgtaatactttattttaaaaaaatagtagtaagaagtatcatttgtgtttatataaaataaacattttcagaaacagaattaaacatgccgcagatttgggttctatagcactcagatatctgaaatctattgattactcrgctaattcatatcatttctcttgggcttcttagctaaaattagctcgtttgccatctgatctgccctcagttatgcattttacattctcattcttttagcatctctca

SEQ ID NO: 553349 - DNA, 526 bp, Homo sapiens
ccatgtatcagataaaaaagactggaaaagccaggcacggtggctcacgcctgtattcccagtactttgggaagttgaggcaggcrgatcacctgaggtcaggagttcaagagcagcctggccaacttggagaaagcctgtctttattttaaaaaatgcaaaaaatagccagacatggtggcaggtgcctgtaatcccagctactcgggaggctgaggcaggagaattgcttgaacccaagaggcagaggttacagtgagctgagatcacaccattgcactccagcctgggcatcaacagtgaaactccatctcaaaaaaaaagactggaaaatatatgtgatgtttcagaatttgttgttttctcactaatctcctttctccccattccaaaaaaaaaaaaaattccagttggagagcaaagagaaggagagtgggaaaagagaaaaaaggagatgtcagtgtgtcctgggagtggtagggataacttcacaaatatttcagaatctgaaggcacaggataagca

SEQ ID NO: 553350 - DNA, 526 bp, Homo sapiens
ccatgtatcagataaaaaagactggaaaagccaggcacggtggctcacgcctgtattcccagtactttgggaagttgaggcaggcggatcacctgaggtcaggagttcaagagcagcctggccaacttggagaaagcctgtctttattttaaaaaatgcaaaaaatagccagacatggtggcaggtgcctgtaatcccagctactcgggaggctgaggcaggagaattgcttgaacccaagaggcagaggttacagtgagctgagatcacaccattgcactccagcctgggcatcaacagtgaaactccatctcaaaaaaaaagactggaaaatatatgtgatgtttcagaatttgttgttttctcactaatcycctttctccccattccaaaaaaaaaaaaaattccagttggagagcaaagagaaggagagtgggaaaagagaaaaaaggagatgtcagtgtgtcctgggagtggtagggataacttcacaaatatttcagaatctgaaggcacaggataagca

SEQ ID NO: 553351 - DNA, 999 bp, Homo sapiens
agaagaatgagatgtcaaagaraaacagggcaatttgtcctgcagaaccatggaaaagctcaggaactaaatctacagttattgcagaaagtgagagaaggaatgaagctgaaaacagctgaaagtctatgtaaggagtaatgaaatccccaggttcatgtcccagtccatgtatccataagagcctattctcagaaaaatttacaccaaaaagctctagtctcaaggaaagcacgtacagaggaatgctaaggggaggcaccaaatggaatatgtagattttaatccaaagactggccattgaactctttccctgctcgtctcttaagtgcactggcagcttggacttatatccttcacaagactgattgcatcttctgaaaagacatgacagttctcagagaaacgagttcaaatatcaacaatttggggatgttttgattaaaaagctgtatcagagtataataaaatctatcaaaaagccactcttttacacccatagagtttctaatctaatttttatattttcccttttaatataaacttaagaatgaattaccagtgggaaaataatcaacgtggaagaaggacagaaatccaaacataaggaataagctagaggaaacagacatcataatgcagcaaacaggagtaaattcagaaatttttaacacatataatcaaaggagatacggtattaatgaaataaaagttggatgcttttttaaataaaagaaacatttagagaaaagtggaagctctgggaaataaaaactataaatagcaaaataaaatattctcctgagaaaaatattctgaaattcagacttaaaaaaaaagttgaggttcaacatatatttattgagccattactatatgccaaaattttcacacagatgatctaatttagttaagataaagaagggtgttcttaaaagtctaaattcaatggaaaattattatttttgccatttaataaacttagaaaaagtagaattc

SEQ ID NO: 553352 - DNA, 1426 bp, Homo sapiens
cctctgcctcctgggttcatgtgattctcctgcctcagcctcccaagtagctggggttacactcgcctgccataaagcccagctaatttttgtatttttagtagagacaggatttcaccatgttggtcaggctagtcccgaaatcctgacctcaggtgatccgcccgctttggcctcccaaagtgctgggattacaggcgtgagccgccatgtctggccaatctttttttttttttaagacaaggtcttgctctgtcacccaggctggagtgcagtggcgcgatcttggctcactgcaaccttcacttcctgggcttaaacaatacacccgccttggccacccaaagtgctgggattacaggtgtgagctattgtgctcagcctaaatcttgtattttatgatgaaaccttcactggcacctagaatttccctttctgaatcatctggtatatccgtacttatgtaaaaagcattctggcatttaatttatattcctaacggataagatggctggctgcaagaatgcctcaataaatggtaaaatattgggctggacacggtggtttgtgcctgtaatcccagtattttgggagactgaggcaggcagattacctgaggttcaagaccagcctggccaacatggtgaaaccctgtctctactaaatatacaaaattagctgggcatggtagcgcatgcctgtatcccagctacttgggtggctgaggcaggagaattgcttgaacccgggagggagaagtttcagtgagctgagactgtaccactgcactccggcctgggtgacagagtgagactccatctcaagaaaaataataaaatgttagagaacactgaacattggaatttactggtacataactggttttacaagaagcagcagtggtagctttcatctcccagtccaaggccacttttgggctctgtattgtcaacaagcttgctcttggcatgtcacattgtcctcatgtttcatctttggccattgagttttatttttatttttttacccccttttggtctcttgggacgaatttatgatttaccataaatacataccattcaatcaagtatattttgcaactccatttcattgttattgtttgatttgcttccattcccattaatccttatttattcccacatagcagtgctacaaatgggaagtcagagaccatcacagctgatgtcaatcacaagtaaatataccagcctgcctacagtgcatggtgatggggctgtgcttccctccatactaactggcatcgtagtttagtgctctgccttttgggggtctggagggaggatggttgaaactttggtgtgggtgcactgcttacttggtggcaggtatctctctggatgacactaactcagaatcttgttgcatgctggaaatggrgagcatg

SEQ ID NO: 553353 - DNA, 545 bp, Homo sapiens
cataatgattctgatttgcaggaaaagtttggactaaagsgggggaaacactcctaaatcttttccttaactctatcacaggatcttcaacctaagatacaagtagtgtggataagatccactgagtgttgttttgctccattgatgggctcctattttttcctgtgccattgacatctcagcagttgaactagtgaatgttactggtaataaagttacatgtgaccagggaagattcattatcggtatcgcaaaagacaaagacaactcagacgatatgtcctactcacaaaagccagtgacattttcatgtacaaagaacacattttagttgtagctatatttatacacatgttatttgtatgtggcatgaaaatagctattttggttttctgtgtgtgcacgcatgtagcaggacccagacacagtagtgaatcatccttaagtacagcatttacattttaaacacaggaacctattcaaatcaaatgtggaaggccctctctatttggcagtatatttgtcatccggaagctcaaaatagc

SEQ ID NO: 553354 - DNA, 2248 bp, Homo sapiens
tgcatgagcattttacataataagctgtttttcatattgatgcaaaagttattctaagtttattgagaatgttttaattaaaagactaaaacacttatagaaatttataatgtttgtgtggtcaagtgcactatttttttcttttttacatttcttccaacactttcaagttcagaaactacccccgatccctttttacttcctctcacttacaactactacaaaggcatatattttttcatcttggtattttaaatttgatttgttatgttctttttactccatattggatttggtacgatgttaactataaaatgaggatctattctgatttatttcctaaacatgtattcaattgtttcagtatcatttactaaataatgatttaactcgtagattttgatgcctactttatgacagattatattctcacaacatctctcctcatgaaaaccagaggagtagggaaaaagcaccccacccacacccttctacacacactgcaaccaaatctatcaatttaataattgacagttgtataaaatttagtcttttcacctggtcaactattcttcattttctcaaatcttcctttagcgcattcagtagattttctgtagttttgaaccaagcttgggtattacctggactgtgaacaacctaaccgggagaaacatccaacatcctgcagaaaccccatgaccagccactgcgtgccacttcgccactttgacagtagcaccagaatttaagaactccttcaaactacagaaaatcaactgaatgaacgaaaagaagtcctcacaatgctgagtcagattattatagttatagtaattctttccaacacttgtaatttgtagctcttagaacagcatgctggagtttccatgtggctgccccatgattttgtccatgacaacttccttattttttttttagcaataaatatagtacaaatttgcacaccttttttcatgttcagttaccctatcattagtacactatgcagcagagactgtatttttacagctatttctgttcccaccattcttcaactccagccgaacaggattatttgttaatccttaaacatgctgtgtactttctcccctccattcctttttctatgccattcgctgaagctcacaaacactatgccacatcctctctcctcatcttctgtccaaatccaaaccaacaatgtttgacatacaggaaataacctaatagttagataaagatatttaaattcaatagaatattatacaataaccaaaaatgaacaagagggaaaagaggaggagaaatgtttactaaaatatgcataaacaaattctatgagtaacttgattataaataggtatgttggtcaggctttgatcagcatgacataagggctacaggaactagggtagccatgtcagggcctagattctgagacttgtccttgctaaaactaactctctgtctctcatatctcctcttccatttctcattgttacttttttctactttacataagtctcttccatcacagacagactttctccttagagattaagggaggattatggcagataatggctaccagaattcacaaatctgtgagccagtcctaaattttaaaaatcccccagggagactctgacaggtcagaattgacacacagccccaccttagaccaatcaccatactcataggaatggctaccaggagtggtcagacctagaacaagagccctttcctgtcatcagagatgagggtaccatgattgacaggctcatcagaatcacctgttggagtggagaagcagtagtttcccaaaggaaatgtgtgtgtattggagtggaaagaggggagcagaagattagagcagaagcagccaaggtgctgagcagacaagaaaaacaacagttgcattctacaaattggcatgcatggccatctgtgaattacccctgccactgctacagcctcctttttcatcactctgtacctctcatcctgtgttagggatattckgaactaattagagttctgtaacttctgggctccacctttgcacatgttgttccttctttctctaagccttcctagtctttctgcctctacctcgctaattccaactcatacttcagctcatattgcagctatcacctgctctaagaagcctatgaggattctatacttgcccccactcagagttttagaatcccacacgtgcttatagtgcttgaagcttacc

SEQ ID NO: 553355 - DNA, 523 bp, Homo sapiens
attcagattattctttgtgatcatgtgttctaggtttccttcctaaagtgttttttttaaattggaacacatttcctgtgaatgttttccattttttttgtcttctgtcttgcaaattgtgtttgcagacaatggggctgcacatcattatgattacaccaagtgtcaggaaggaagcagtacattccaaagagatgggctctttattttctcraaaaaccaatttggagttactcatttttccataacattaaatttcttacaggaactacatattgtccataagtgcttcatcaggactcatcgccctcctgtctactggctccaaatagaccatgtcagcttcaccccctggctttgtgtctatgggtggcctgtggtatatggaaaagtagcagggtggtcagggtgggagacacaagatgtttttatagtctagagcctttaaaaaacccagcagaatgtaattcagtatttgtttattggctgttttttgacagattgttgaaattaaatgaattga

SEQ ID NO: 553356 - DNA, 1725 bp, Homo sapiens
cacttcagatggaagcatacactggaaaataatttggagaaaatctggcaaaatgtgttaaatttataattttaaatcctctgatttagtgaccccatctgaaggactctaagcaaataaacgtacaggtgagcaatgatgtatgtacaaggttcttgattgagcataaattctactggtaaaaaattgtatcaggccaagagcggtggctcacccctgtaataccagcactttgggaggctgaggaggggtgggtcacctgaggtcaggagtttgagaccagctggccaacatgatgaaaccccgtttctactaaaaacacgtaaaattagttgggcgtggtggtgggtgcctgtaatcccagctactcgggaggctgaggcaggagaattgcttaaacctgggaggcagaggttgcagtgagccaagatcacaccattrcactccagcctgggcaacaagagcaaaactttgtatcaaaataattgtttaatacagtagagtacaaacaaacaaacaaaaatcaattctataaagttaaggaacaagatgggtctacatgtactgtcctggaaagacacatgacatgctgttgagtgaagataaacacaatatatatgcaattctgtttataaatatatgcattcaaagtctgaaaagattcacagatacacaccactctattagcattctttcatccagtaagtactaagtgagtcccaattattcactaggcacacaacatagtggcaaagagacctatgaaacagctaaaatatattgtgacggcttatggtatgtttggtttcaattgagggtgcaagagttgcatatgggcaggaaaatcctagcctagacttcttggaagacatttctgagaaatcgatgttttcactgaaactagaaagagaaggaatacttaaccagggaaaaatgatttaatgtagaaaagcagagacaacagcatctaaaaaagcctagaagcaggaaagagatgtaatgtattcaagaactgaaaaagttaggtatgactggatagtgtgtaagaggggatattgttatctttgggactgggattatacttgcaaatttacttacaattttataaatttctctttttgttaatgaagatattcctattaacatgaaaataatttaaaaactagctaaaattctaacaaagaaaaaataaggaaacactttaaacatgctacagaaaaataataagaaaagacaaaaggggctagaattataaagttgaagtctaatacaacagagtagcattatatattgagccaaattgaaagagacaaatacagtgattttagaaaatgaagatacttcttttatataggctatttaaggagcattaaataaagcagtagtgcacatcttttaaaattagactgctatcgtagaagggcccacaggaatatttgtaccaatacagctgtaaaacacttatcagactttttcagctatttttcttttgcctcagttgcccaggtatatatactggggcaaaaagcaagatctggtaaatgactgttggtgtttttctttcctgtttattacagtgtagttaataatctttgcaattccttccaaaggtatgagccgactctgtatctgtggttctccaccttggctctatgttacactcaacttgggagattttttaaaaaatttatgctcaggccccacttcaggccaattagattatta

SEQ ID NO: 553357 - DNA, 1248 bp, Homo sapiens
aaaccctgtatctacaagaaataaaaaaattagcccgccatggtggcctgtgccaccatgtctcagctactcggtaggctgaggtgggaggatcacctgagcctagggaggtcagggctccagtgagccaagatcacgccactgtactccagcctgggtgacacagtaagaccctatgtcaaaaaataagtttaaaaagttttggtttttttttttttcctcagaataagatgagagtaactagaattactatagtaaggggaccagaagaatggaagacctgggccaggaaaacttattttttttctttttgcttatataattttggtatatatccaatagtatcattaccggagaataagtgagccagagctagcaatcaataggatcttgatttttccatgtccccacagtcatacgaaatctgctattgttttttaaatcatagtattaaattgacatattttaaactcataacattcataaagcttttgtcaagaaataaagcttcaagttaatgttatttctggagttatgagtatatactcaagatctttttaaattcattattcacatagtcttattaacatgtcttgtatgcctagtttcctccaaaacaaaacctaacattactaaacagcacactaagattaaattcccccaaagcagccgggcgcggtggctcacgcctgtgatcccaaaattttgggaggcttaggcgggtggatcgcctgaggttaggagtttgagaccagcctggccaacatggtgaaaccccgtctctactaaaaatacaaaaattagccaggcatggtgccaggtgcctgcaatcccagctactcaggaggctgtggcaggagaatcacttgaatccgggaggcggaggctgcagtgagctgagattgcgccaytgtattccagcctgggcaacaagagcgagattttgtctcaaaaaataaataatcccaaagctattaattttgtcttatttgtaaataattcattctccctagtttccattacagttatttgaaggatctttaccttggaagcctcatggtagaaggtgtagctctcacattcttcaaagaattttcaaaacacttccactacttgatgtatcattaataattctatctttagcaaaaaactctggacagagaatgaatagggaaggcatggattgggagaaagaatatgtgtgtctgacaaaggatttaaagtcagaatatataaagtactacaact

SEQ ID NO: 553358 - DNA, 869 bp, Homo sapiens
tttctaaagaagttttatattgaaatcactttctttgctcaaaaaattttgaaactttctgctctcyacctcaattgatttttggaaaatggtcttatttactgtatcaatgtattcagtttatttaaaatcaaggcattcaatattgtagtatttttatgaggttttatttaaagaccctcttttgatacaggaatatccttgcccagatatttttgatccttactatggaatgaataactttacatataattccaaaattattaagtagtttgcaagtaatagttacatacattcacacagctaaaataattacactatgtctgccatcgtgtagattttgcttaaaataaaaataaagtctggtaggctacatttaatatgcaattagtttcataaattagttgtataaaatggtagagaataaaattagtttcactcctaaattaacaagatttcctgattattttaactattgattttcaatttaattatagtttacctagatttaagtaaattaaaattaagaccaattagtacttccaattctggcattgtggataaatattactttcttgccaagagcactgaaaagagaaatgatttgaagttatatatttttaaatgttacttttacatctaattaaaaccatttaattactactggaaattaatgtaattcattaatataactttaacagtttactggttatttagttttccctagcaggttctatttaaatcttaaactttatatttaagtcaagtaacttgattgtaactttggcagaaaaaaactcaattttttcaatggcaaagtactatagttgtgtaaactatatctaagatagaaaaaaattccaatcaaa

SEQ ID NO: 553359 - DNA, 869 bp, Homo sapiens
tttctaaagaagttttatattgaaatcactttctttgctcaaaaaattttgaaactttctgctctctacctcaattgatttttggaaaatggtcttatttactgtatcaatgtattcagtttatttaaaatcaaggcattcaatattgtagtatttttatgaggttttatttaaagaccctcttttgatacaggaatatccttgcccagatatttttgatccttactatggaatgaataactttacatataattccaaaattattaagtagtttgcawgtaatagttacatacattcacacagctaaaataattacactatgtctgccatcgtgtagattttgcttaaaataaaaataaagtctggtaggctacatttaatatgcaattagtttcataaattagttgtataaaatggtagagaataaaattagtttcactcctaaattaacaagatttcctgattattttaactattgattttcaatttaattatagtttacctagatttaagtaaattaaaattaagaccaattagtacttccaattctggcattgtggataaatattactttcttgccaagagcactgaaaagagaaatgatttgaagttatatatttttaaatgttacttttacatctaattaaaaccatttaattactactggaaattaatgtaattcattaatataactttaacagtttactggttatttagttttccctagcaggttctatttaaatcttaaactttatatttaagtcaagtaacttgattgtaactttggcagaaaaaaactcaattttttcaatggcaaagtactatagttgtgtaaactatatctaagatagaaaaaaattccaatcaaa

SEQ ID NO: 553360 - DNA, 869 bp, Homo sapiens
tttctaaagaagttttatattgaaatcactttctttgctcaaaaaattttgaaactttctgctctctacctcaattgatttttggaaaatggtcttatttactgtatcaatgtattcagtttatttaaaatcaaggcattcaatattgtagtatttttatgaggttttatttaaagaccctcttttgatacaggaatatccttgcccagatatttttgatccttactatggaatgaataactttacatataattccaaaattattaagtagtttgcaagtaatagttacatacattcacacagctaaaataattacactatgtctgccatcgtgtagattttgcttaaaataaaaataaagtctggtaggctacatttaatatgcaattagtttcataaattagttgtataaaatggtagagaataaaattagtttcactcctaaattaacaagatttcctgattattttaactattgattttcaatttaattatagtttacctagatttaagtaaattaaaattaagaccaattagtacttccaattctggcattgtggataaatattactttcttgccaagagcactgaaaagagaaatgatttgaagttatmtatttttaaatgttacttttacatctaattaaaaccatttaattactactggaaattaatgtaattcattaatataactttaacagtttactggttatttagttttccctagcaggttctatttaaatcttaaactttatatttaagtcaagtaacttgattgtaactttggcagaaaaaaactcaattttttcaatggcaaagtactatagttgtgtaaactatatctaagatagaaaaaaattccaatcaaa

SEQ ID NO: 553361 - DNA, 639 bp, Homo sapiens
tcttaatgtcttaatggtttaaagcaataaccgttttatttgctcatggttgttctggagagcaatttgtcctgggctcaacttgtccagggtggttcttttggttgtcttaccagcgatcatttttgtagctttagtgaaatggtggcttatatggaaggtggttggtctagaaggccatggttgggtcactgtgtctctgctgcatatgattttatgctcctgcaggctagtttgggtttgttcatatagcagcgttgtgttccaagacagcaaaaacagaaggtgcaagaattctaaacytggatattgcaaaacatcagttctgctacctccctctaatcaaaataagttacgctgtgatcccagattcaagcattgggaaaataaagcattaaataaaagagtggtaatatcccattataaaagggctgcatacagggataggagaaacttttgcaaacgtcttggcaagttacctaccatgagaagtaatttattcttcaagggtcattggtagggtatatgcaattggaagagatgggctagaagcatggatgtcagagagaaatgaatacaataattcagataaaatataaaaacatgctgaactgaggtcatgagaattttgaagagatg

SEQ ID NO: 553362 - DNA, 525 bp, Homo sapiens
ccgccgtaggaacagcagctctgtctctggtggggaagaaggaggccatggagtctggtggggttggaggctggccccttgctccatcccactggtctgtccctaggtggagaggcaaggctgctggaatcctggttgggagtacaggcacgggacacagagtatctcatcctcatcaggacctaacctcgaacatggagccgggcacttgtggccgtgctccctgcccgcaaagtcacggtccctgcatcccccagttggcagcctcgcaaggttaagatgcggcttgaaccattctgggccatctccacctggggccctggagtgacgacggccccattgcgcagccaggtgacatcggcatctggtggggagacttcacaccggaacgtggcatcatcgccctcgtggacagtgagtggtgtcagstccgagaccagcttcaccagcagtggctctaaggggcacggtaaggcagtgagctgggctgagtcttttcttctctctccttttcatcccctcctc

SEQ ID NO: 553363 - DNA, 525 bp, Homo sapiens
ccgccgtaggaacagcagctctgtctctggtggggaagaaggaggccatggagtctggtggggttggaggctggccccttgctccatcccactggtctgtccctaggtggagaggcaaggctgctggaatcctggttgggagtacaggcacgggacacagagtatctcatcctcatcaggacctaacctcgaacatggagccgggcacttgtggccgtgctccctgcccgcaaagtcacggtccctgcatcccccagttggcagcctcgcaaggttaagatgcggcttgaaccattctgggccatctccacctggggccctggagtgacgacggccccattgcgcagccaggtgacatcggcatctggtggggagacttcacaccggaacgtggcatcatcgccctcgtggacagtgagtggtgtcagctccgagaccagcttcaccagcagtggctctaaggggcamggtaaggcagtgagctgggctgagtcttttcttctctctccttttcatcccctcctc

SEQ ID NO: 553364 - DNA, 528 bp, Homo sapiens
agataattcagcataaaatagtcaatgtagaataattttaactaatagtcacagtgctcactattttcttttcttttctctctttttttttttaacataagaagtttttcaaatacccaaccccctggcaattcagaacagattcaggaaaggacattacttcttactcaagaattagttccaaactaatacagatgayggaacaagaaagcatacatgggaaataaaatctgaaacagatggcaggaagtcctatacgaagaattatacatgcatagttgatctggccaaagaaaattattccggcataaacactgggtccattcaagagatggtcaagaagaaggatgaagtgaaattgtcagaccaataagtggtcatcatggggcaaaatatactttttaaatgtactattggtgatgtaattcacattagggtattctggccttataggtccttagtaagaaatgaaaacagaacatagcattattcaccctcatttgcatgcagtaatttctgcaaaaatgt

SEQ ID NO: 553365 - DNA, 575 bp, Homo sapiens
agcatttcattcctggtgtattagtttactaggagtgatgaaacaaaacctcactaactgggttgtttaaacaacagaaatttatttcctcacatttccttaggctagaagacagagatgacaatgttggtagggttggtttcttctgaagcctttctttgtggtttgtagatggcaatcttctctctgggccttcagaggaccttccttctgtatctgttatctgtctatatcgaaatattctctcattataaggacatcagtcatgtaggattaggacttaaccctcaggacctcattttaacttaattatctctttatagaccctatctctaaatacagtcatatctggggtactgagggttgggacttgtattagcctgttttcatactgctataragaactgcccaagattgtgtaatttaagaaggaaagaagtttaactgactcagagttcagtatggctggagaggcctcaggaaacacacaatcatggcagaaggcaaatgggttttttgatatattactaggtcctcgtaaatacaaaacacacaggacaccaaacgaccatgga

SEQ ID NO: 553366 - DNA, 759 bp, Homo sapiens
taatgtatcaggaaaacacggtggggtccacagatgggatgagttttgataaagtcaggaagtgggggccagaacaggaggtggcactggagtagtgggctacttgaaggtaagatcagttattgctgatgacaggtcaacagtgtggcgttgagaatagatggttcgcatggggtggaggagaatatattgcaaatgmggagatcaagaagccacaaagccatgaaaatagatggatggtgatatcatcaaatatattgacaggggttgagatggaaagaaaaggatagtaaccaaggtgctaaaattaactgtaaatggggaggagtagccagaggattcatacatattttaacaagcatggataccaatttctgtgttccttgctttgtatgaaaaagtcaacatacctaattttcagacatgattaggcatccacttattatagcatagcctacacaaaagaggatcacaagacaaggttaaatactttgctcctactctttcaaatatactatttagatagtgtatcagagttctctaaaaaaacagaaccaacatgagatttattttaaggaattggctcatgcgactgtgggggctggcaagtctgaaatttgtagggcaggccagcatgctgaaaactcaggcaggattttatgcttcagtcttgagacagactttctttagtttttgctcttgaggccttcagctgattggatcagacccacccagatatccctgggtaatctcctttat

SEQ ID NO: 553367 - DNA, 1326 bp, Homo sapiens
aattttgtaatattcacttagtatrgtataggtaggtaatattaacaaaataatttttaaaaatttaaaactctcaaggacttagctatcttctattcaaactctaattttttatctgtgaaaatggagaacttggaaaattgtgacttctgtggtattaaaattaatttctggtataatactaaaaagttgaagtcttatcactcaattttgtgttttcttaggtaactcataaaagtttttttttagctgtaagaaaaatatcaactatgtatataatatatatattttttgggatagattcttgctttgttgctcaggctggagtgcaagggcaggaacatggctcactgcagccttgatctccttagctcaagcgaccctcccgcctgagcctcccaagtagctgggaccacaggtgcacaccatcacacccgactaattttttgacttttttagagagacagggggtcaccatgttgtccaggctggtcttgcactcctgggctcaagcgacactacctcctcggtttcctaaattgctgggaatacaggcatggaccaccacatgtagcccacaattatcatttattttcttaatgttttatataacaaatgtcagatagaaacatgtttgtttcaaaaccttaacataaaaattgatatgtattctaaaaacgaacagacttaaggggaatttttttatatagaattagtattttcaaaacattaatttaaagaaaggcagagattaattaataatttaccaaagatactagtaatataggaacacaaattacgtaaagtattttaaccataaagtacacactgctttaacagattgaaaatatagcactatgcattatgaaagcctcaaaataatacgtgtaacaaaaggataaacattttttcaaatagtttattttaagatatcttaaattttcattaacttttactaaacactttttgtaaaataagaaaaaagtcaatattattgaaacatactacattgatggaagatggtactgggaagacaaatagaaacctttaaaaaattatatacagatcacagaatctgaaaaaattttgataggagatttctggagagagagagcataaatggaatcaaaatgatcattgcattgcttttcatgtctagcaaatgatatgttaaaaattatgtctaaattaacctttacagatttgtagtaactacaatatgcagatttatgtgtttacctgaatgaaagtttagaggaatgtgagattaacactgactctaatatgcattctttttgtcagtttggaaagatatatgggaaaggg

SEQ ID NO: 553368 - DNA, 1326 bp, Homo sapiens
aattttgtaatattcacttagtatagtataggtaggtaatattaacaaaataatttttaaaaatttaaaactctcaaggacttagctatcttctattcaaactctaattttttatctgtgaaaatggagaacttggaaaattgtgacttctgtggtattaaaattaatttctggtataatactaaaaagttgaagtcttatcactcaattttgtgttttcttaggtaactcataaaagtttttttttagctgtaagaaaaatatcaactatgtatataatatatatattttttgggatagaytcttgctttgttgctcaggctggagtgcaagggcaggaacatggctcactgcagccttgatctccttagctcaagcgaccctcccgcctgagcctcccaagtagctgggaccacaggtgcacaccatcacacccgactaattttttgacttttttagagagacagggggtcaccatgttgtccaggctggtcttgcactcctgggctcaagcgacactacctcctcggtttcctaaattgctgggaatacaggcatggaccaccacatgtagcccacaattatcatttattttcttaatgttttatataacaaatgtcagatagaaacatgtttgtttcaaaaccttaacataaaaattgatatgtattctaaaaacgaacagacttaaggggaatttttttatatagaattagtattttcaaaacattaatttaaagaaaggcagagattaattaataatttaccaaagatactagtaatataggaacacaaattacgtaaagtattttaaccataaagtacacactgctttaacagattgaaaatatagcactatgcattatgaaagcctcaaaataatacgtgtaacaaaaggataaacattttttcaaatagtttattttaagatatcttaaattttcattaacttttactaaacactttttgtaaaataagaaaaaagtcaatattattgaaacatactacattgatggaagatggtactgggaagacaaatagaaacctttaaaaaattatatacagatcacagaatctgaaaaaattttgataggagatttctggagagagagagcataaatggaatcaaaatgatcattgcattgcttttcatgtctagcaaatgatatgttaaaaattatgtctaaattaacctttacagatttgtagtaactacaatatgcagatttatgtgtttacctgaatgaaagtttagaggaatgtgagattaacactgactctaatatgcattctttttgtcagtttggaaagatatatgggaaaggg

SEQ ID NO: 553369 - DNA, 1144 bp, Homo sapiens
  misc_feature 309, 310, 311, 312, 313, 314, 315, 316, 317, 318, 319, 320,321, 322, 323, 324, 325, 326, 327, 328, 329, 330, 331, 332,333, 334, 335, 336, 337, 338, 339, 340, 341, 342, 343, 344,345, 346, 347, 348, 349, 350, 351, 352, 353, 354, 355: n = A,T,C or G
  misc_feature 356, 357, 358, 359, 360, 361, 362, 363, 364, 365, 366, 367,368, 369, 370, 371, 372, 373, 374, 375, 376, 377, 378, 379,380, 381, 382, 383, 384, 385, 386, 387, 388, 389, 390, 391,392, 393, 394, 395, 396, 397, 398, 399, 400, 401, 402: n = A,T,C or G
  misc_feature 403, 404, 405, 406, 407, 408: n = A,T,C or G
gcaaaaatcaccttattaatagattgccactgtaaagactgaattactttctcatctagttaggactccaggtggagtcaataatttcacattcattgagagaaatgaaaagagactataatccagagctgcgtaattcagtatctcaaagaatttcatattcagcgtgaacctaccaagcttacttaatgagtatttcattgttgaatgacccccttgcagtttgattgtgagtgtgctattctatagtgcatttcagaaattagattttgaagctttaatgaaagtaaatttcagtactctcaactnnnnnnnnnnnnnnnnnnnnnnnnnnnnnnnnnnnnnnnnnnnnnnnnnnnnnnnnnnnnnnnnnnnnnnnnnnnnnnnnnnnnnnnnnnnnnnnnnnnngtgaggataatttgaacacagtgacgacataaagtttgtgaaaacagaaaacacctgaacgctataaaagttaggttgagtggctttatataggctttctaactcataattcttaattcaaatatctacgactcgaatgttttccagatcttaagctcacaggtatttcatttgtcagcaaagtattctatttctcataattatctgtgatgttagtgtcttctaaattattttcatatctttaaaataacactattaatgtgttttagtttaaaaatttgcaggtacattttgacaagacgttcgtaagatagagctgttgtggggtggggggaggggacagcattaggagatatacccaatgtaaacgatgagttaatgggtgcagcacaccaacatggcacatgtatacatatgtaacaaacctgcacgttgtgcacatgtaccctagaacttaaaatataataaaaaaatatatatatatataattaaaaaaagatagaactggaacatgggtataaactgtgaataaatgccaccagtaatatctgcactatttaaaaataccacttagggtatttttaacctaagtggttattagaatagatacttagggtatagtgtaatcttaacagaagaactatacaaaaatcaccatcaactgtacttcctctacattttttgggccaaagyagagtcaactacctatatgtggaactggctgccacctttgcca

SEQ ID NO: 553370 - DNA, 1096 bp, Homo sapiens
gataccaagaccttcaattttggagtttcttcaggttcttatagggttcaatgatctccaaagktaggaaccactgatcaacattatattttatggctgaatggactataatttatttaatagtatatctgttgataaaaacttagatttttaattattgaatattataaacagcatgactaatattctcatttataaatctgactagtctgatgatttccttaggataaattcctagaagtaaaatttgaaaaattgagtgcacgccttaatttactgtcaaactgccctccaaaaatgtacaaatgtacaagagaatcatagccactgtgggctgggcatggtggctcacgcctgtaatcttagcactttgggaggccaaggtgggtggatcaccagaggccaagagtttgagaccagcctggccaacacagtgaaagcttgtctctaataaaaatacaaacattagctgggcatggtagcaggcacctgtattcccagctacttgggaggctgaggcagaaatgcttgaagccaggaggcgaaggttgcagtcagctgagattgcaccattgcactccagcctgagcgacagagcaaaaactccacctcaaaaaaaaaaaaaaaaatttaatcactgtgtatgtgtcacagaaaaaatacatgtgtttaggtaattcaaatcaatttttcctttgtaatttcttggtttttatgcttagaaagtcattctccacccagtgatcagctattgttcattggtattttcttctaatactttatggtttcaaggatctttgattcacctgcaatttaatatagtaaacagtgagttaaagtttcatctaccctcccaccccccaattatttaggcaattacccaaactttgttgaagaaattgaaaacggatttgtgacaattccttgatcatgtatttgctttccatttatggtaaagggccatgtattctattccaccatctggccatctctctggggccagcatggctgaattttaattattggtattttataacagattttaatatttaatgtctgaagggacaagtcttccaacattgctcttctttttcat

SEQ ID NO: 553371 - DNA, 1096 bp, Homo sapiens
gataccaagaccttcaattttggagtttcttcaggttcttatagggttcaatgatctccaaagttaggaaccactgatcaacattatattttatggctgaatggactataatttatttaatagtrtatctgttgataaaaacttagatttttaattattgaatattataaacagcatgactaatattctcatttataaatctgactagtctgatgatttccttaggataaattcctagaagtaaaatttgaaaaattgagtgcacgccttaatttactgtcaaactgccctccaaaaatgtacaaatgtacaagagaatcatagccactgtgggctgggcatggtggctcacgcctgtaatcttagcactttgggaggccaaggtgggtggatcaccagaggccaagagtttgagaccagcctggccaacacagtgaaagcttgtctctaataaaaatacaaacattagctgggcatggtagcaggcacctgtattcccagctacttgggaggctgaggcagaaatgcttgaagccaggaggcgaaggttgcagtcagctgagattgcaccattgcactccagcctgagcgacagagcaaaaactccacctcaaaaaaaaaaaaaaaaatttaatcactgtgtatgtgtcacagaaaaaatacatgtgtttaggtaattcaaatcaatttttcctttgtaatttcttggtttttatgcttagaaagtcattctccacccagtgatcagctattgttcattggtattttcttctaatactttatggtttcaaggatctttgattcacctgcaatttaatatagtaaacagtgagttaaagtttcatctaccctcccaccccccaattatttaggcaattacccaaactttgttgaagaaattgaaaacggatttgtgacaattccttgatcatgtatttgctttccatttatggtaaagggccatgtattctattccaccatctggccatctctctggggccagcatggctgaattttaattattggtattttataacagattttaatatttaatgtctgaagggacaagtcttccaacattgctcttctttttcat

SEQ ID NO: 553372 - DNA, 1096 bp, Homo sapiens
gataccaagaccttcaattttggagtttcttcaggttcttatagggttcaatgatctccaaagttaggaaccactgatcaacattatattttatggctgaatggactataatttatttaatagtatatctgttgataaaaacttagatttttaattattgaatattataaacagcatgmctaatattctcatttataaatctgactagtctgatgatttccttaggataaattcctagaagtaaaatttgaaaaattgagtgcacgccttaatttactgtcaaactgccctccaaaaatgtacaaatgtacaagagaatcatagccactgtgggctgggcatggtggctcacgcctgtaatcttagcactttgggaggccaaggtgggtggatcaccagaggccaagagtttgagaccagcctggccaacacagtgaaagcttgtctctaataaaaatacaaacattagctgggcatggtagcaggcacctgtattcccagctacttgggaggctgaggcagaaatgcttgaagccaggaggcgaaggttgcagtcagctgagattgcaccattgcactccagcctgagcgacagagcaaaaactccacctcaaaaaaaaaaaaaaaaatttaatcactgtgtatgtgtcacagaaaaaatacatgtgtttaggtaattcaaatcaatttttcctttgtaatttcttggtttttatgcttagaaagtcattctccacccagtgatcagctattgttcattggtattttcttctaatactttatggtttcaaggatctttgattcacctgcaatttaatatagtaaacagtgagttaaagtttcatctaccctcccaccccccaattatttaggcaattacccaaactttgttgaagaaattgaaaacggatttgtgacaattccttgatcatgtatttgctttccatttatggtaaagggccatgtattctattccaccatctggccatctctctggggccagcatggctgaattttaattattggtattttataacagattttaatatttaatgtctgaagggacaagtcttccaacattgctcttctttttcat

SEQ ID NO: 553373 - DNA, 565 bp, Homo sapiens
ccgcaaaagacaaccttacaggccacttcagaatatgtcaaagaaatctgttttggggtaaagtattaatattttgatttccttcacctgcatactcaagtcctgaggggaggtggacgacaggatggacaccacacaggcctctggatctctttctctgtcagcctctcccccagcctcctctgggcacacacttcatcttcagggctggtgcaagatggcagccccagttcagcctcagtgagaaggagaatgttcacaggaaaaaagtgcaagtagaaaataaaatcctaaggccctcaaccaaatgaacagaccccattttggccaaggggatcccagataaaccttaaaaacagtgcccagctgtgacaggacaggaggtcagacaagcctcattacaccccctcccttttgcggtttagacgcaacaactgaccagcattaatgataaaatagagattacaagacrgacagaagaggctctttttggcaataagataccaaattatacataggacctaaggccatgccaggtaagggttaagcgtgcacagtttattaa

SEQ ID NO: 553374 - DNA, 565 bp, Homo sapiens
ccgcaaaagacaaccttacaggccacttcagaatatgtcaaagaaatctgttttggggtaaagtattaatattttgatttccttcacctgcatactcaagtcctgaggggaggtggacgacaggatggacaccacacaggcctctggatctctttctctgtcagcctctcccccagcctcctctgggcacacacttcatcttcagggctggtgcaagatggcagccccagttcagcctcagtgagaaggagaatgttcacaggaaaaaagtgcaagtagaaaataaaatcctaaggccctcaaccaaatgaacagaccccattttggccaaggggatcccagataaaccttaaaaacagtgcccagctgtgacaggacaggaggtcagacaagcctcattacaccccctcccttttgcggtttagacgcaacaactgaccagcattaatgataaaatagagattacaagacagacagaagaggctctttttggcaataagatacsaaattatacataggacctaaggccatgccaggtaagggttaagcgtgcacagtttattaa

SEQ ID NO: 553375 - DNA, 667 bp, Homo sapiens
tgattataatgaaaggttcactaaaatctgttctatgcacacctagatatgcctatcaccaaaactcatgctttggtaatctgtcacaccattttcttctcaggatttgacccccctaaggttataataacaattaccataatgtggacttagctccattcttaagggcatgagaggcttcctctagaattctggaactctattggaatagggcatctgcttcatgacccatatcaactaattaagctgattatataactatgcagcatcaacctccctggtaacatttaattttcagtcaaaataagtgttgaacttttaaaaagtttaaacraattaaatcattttaaggagcttattttatactttattctttcatttgctagttttgtaattctcttgatgccttctatgtaattgcactttaaaaacagaattggaacacattcctcagagctagaagtctccatggaatttttttttctatgaaaaatttgtggggaaataaatgtgtatgtatgtgtggtttagttcaagatgaggtttagtttaagatgagaaagtttctcagaactaggacttactatcaaaagttatagctcaaaggggcacaataagatattgccaattagaaaaaaaaggaaacattttaatgtaaaggctggtt

SEQ ID NO: 553376 - DNA, 638 bp, Homo sapiens
tttactgtgcatttactctgaatctgctagaaatgtgctatggttatttcaaactttgccatttgatcaagtactgaatttcttgagaattatcctaaacgtttcccttatcccaacagctcattattcatcaaaccctgytaattttacctcagaaatctccccattctccccgcaaatgccttgtttcaaaatcccttcatttattttgcggactactaaagtaacctctcaactgatcctcttgccttcaggtgccctttctacaagacaaatgaaatcgtgtcatcttcctgcttttaataagtatctctatgttcctccctgttgccttgaagagttaaaattccttagcatggctttcaagacttttcttggtctcgttccctgcaacccttcccatccccagcttttctcccatacttctctgtactctagccatattagagtgtccatgatgctctgaatactatgctttttcacacttcagtggttttgcacatctttattgtactgaaatgtcttcatctcagccaactatctgcgtggccaacttctagtcctttaggaatgggccactaatacaattaggtgacaaactgatggagaactttatactggatggacatggctgacat

SEQ ID NO: 553377 - DNA, 638 bp, Homo sapiens
tttactgtgcatttactctgaatctgctagaaatgtgctatggttatttcaaactttgccatttgatcaagtactgaatttcttgagaattatcctaaacgtttcccttatcccaacagctcattattcatcaaaccctgttaattttacctcagaaatctcyccattctccccgcaaatgccttgtttcaaaatcccttcatttattttgcggactactaaagtaacctctcaactgatcctcttgccttcaggtgccctttctacaagacaaatgaaatcgtgtcatcttcctgcttttaataagtatctctatgttcctccctgttgccttgaagagttaaaattccttagcatggctttcaagacttttcttggtctcgttccctgcaacccttcccatccccagcttttctcccatacttctctgtactctagccatattagagtgtccatgatgctctgaatactatgctttttcacacttcagtggttttgcacatctttattgtactgaaatgtcttcatctcagccaactatctgcgtggccaacttctagtcctttaggaatgggccactaatacaattaggtgacaaactgatggagaactttatactggatggacatggctgacat

SEQ ID NO: 553378 - DNA, 648 bp, Homo sapiens
gagtcatgaaytgtacactttacatacattggatttcaacaaagtgtataaaaaacatttcaggcacatatttaaaagggtaagtggggaataatagtaatgttaatctccaatttaaagccaatatgtcatggatataacaataatcaaaatgtggagatttttaacacactttctcaaagtttgagagagcaaacagacaacaaaaaatacaaaatggaaagatttgaataataaaatgttgatttaacaggtggtaatgagaataaataagatatagaacactttcatctcattaactctatatttttatcccaaaatatctatataatatttacaaaaattgaatatgtgttttgtcaaaaagaaaatctcaataaattccaaaatcctggcaatcatatatatacagcattccgtgtaataaaactgcaaaaaaagcccaaaatagaaaagaaaaactagtcttagaaacaaactaacaacataccttaaaaaactagatgtaaaaactcttatgctcattttataaaaattatatttatttatataagtgttttatgtacataggaagaatcacaaaaaaatagacatgaaataatttacattggctacttttaggaatgatggaattgggggatgagaata

SEQ ID NO: 553379 - DNA, 648 bp, Homo sapiens
gagtcatgaattgtacactttacatacattrgatttcaacaaagtgtataaaaaacatttcaggcacatatttaaaagggtaagtggggaataatagtaatgttaatctccaatttaaagccaatatgtcatggatataacaataatcaaaatgtggagatttttaacacactttctcaaagtttgagagagcaaacagacaacaaaaaatacaaaatggaaagatttgaataataaaatgttgatttaacaggtggtaatgagaataaataagatatagaacactttcatctcattaactctatatttttatcccaaaatatctatataatatttacaaaaattgaatatgtgttttgtcaaaaagaaaatctcaataaattccaaaatcctggcaatcatatatatacagcattccgtgtaataaaactgcaaaaaaagcccaaaatagaaaagaaaaactagtcttagaaacaaactaacaacataccttaaaaaactagatgtaaaaactcttatgctcattttataaaaattatatttatttatataagtgttttatgtacataggaagaatcacaaaaaaatagacatgaaataatttacattggctacttttaggaatgatggaattgggggatgagaata

SEQ ID NO: 553380 - DNA, 648 bp, Homo sapiens
gagtcatgaattgtacactttacatacattggatttcaacaaagtgtataaaaaacatttcagrcacatatttaaaagggtaagtggggaataatagtaatgttaatctccaatttaaagccaatatgtcatggatataacaataatcaaaatgtggagatttttaacacactttctcaaagtttgagagagcaaacagacaacaaaaaatacaaaatggaaagatttgaataataaaatgttgatttaacaggtggtaatgagaataaataagatatagaacactttcatctcattaactctatatttttatcccaaaatatctatataatatttacaaaaattgaatatgtgttttgtcaaaaagaaaatctcaataaattccaaaatcctggcaatcatatatatacagcattccgtgtaataaaactgcaaaaaaagcccaaaatagaaaagaaaaactagtcttagaaacaaactaacaacataccttaaaaaactagatgtaaaaactcttatgctcattttataaaaattatatttatttatataagtgttttatgtacataggaagaatcacaaaaaaatagacatgaaataatttacattggctacttttaggaatgatggaattgggggatgagaata

SEQ ID NO: 553381 - DNA, 648 bp, Homo sapiens
gagtcatgaattgtacactttacatacattggatttcaacaaagtgtataaaaaacatttcaggcacatatttaaaagggtaagtggggaataatagtaatgttaatctccaatttaaagccaatatgtcatggatataacaataatcaaaatgtggagatttttaacacactttctcaaagtttgagagagcaaacagacaacaaaaaatacaaaatggaaagatttgaataataaaatgttgatttaacaggtggtaatgagaataaataagatatagaacactttcatctcattaactctatatttttatcccaaaatatctatataatatttacaaaaattgaatatgtgttttgtcaaaaagaaaatctcaataaattccaaaatcytggcaatcatatatatacagcattccgtgtaataaaactgcaaaaaaagcccaaaatagaaaagaaaaactagtcttagaaacaaactaacaacataccttaaaaaactagatgtaaaaactcttatgctcattttataaaaattatatttatttatataagtgttttatgtacataggaagaatcacaaaaaaatagacatgaaataatttacattggctacttttaggaatgatggaattgggggatgagaata

SEQ ID NO: 553382 - DNA, 648 bp, Homo sapiens
gagtcatgaattgtacactttacatacattggatttcaacaaagtgtataaaaaacatttcaggcacatatttaaaagggtaagtggggaataatagtaatgttaatctccaatttaaagccaatatgtcatggatataacaataatcaaaatgtggagatttttaacacactttctcaaagtttgagagagcaaacagacaacaaaaaatacaaaatggaaagatttgaataataaaatgttgatttaacaggtggtaatgagaataaataagatatagaacactttcatctcattaactctatatttttatcccaaaatatctatataatatttacaaaaattgaatatgtgttttgtcaaaaagaaaatctcaataaattccaaaatcctggcaatcatatatatacagcattccktgtaataaaactgcaaaaaaagcccaaaatagaaaagaaaaactagtcttagaaacaaactaacaacataccttaaaaaactagatgtaaaaactcttatgctcattttataaaaattatatttatttatataagtgttttatgtacataggaagaatcacaaaaaaatagacatgaaataatttacattggctacttttaggaatgatggaattgggggatgagaata

SEQ ID NO: 553383 - DNA, 1000 bp, Homo sapiens
gaaaccccatctctactaacagtacaaaaattagatgggcatggtggtgcatacctgtaatcccagctactygggaagctgaggcacgagaatcgcttgaagccaggaggtagaggttgtaatgagcccagatcacgccactgcactccagcctgggcaacagagtgagactctgtctcaaaaaaaaaagaaaaaaaaaaaaaaacccaaaaacaaacctattcattaatgcaagtatcatcattattaaccatttcatataagacatatgtgtccatgttccatttgtttgagtaactaaatctatacaaagagaaagactattactcctcataatttgagaggtaattcatttctaaaatcaaggatagaggccgggagcagtagctcatgcctgtaatcccagaattttgggaggcccaggcaggcagatcacctgaggtcaggagttcgagatcagcctggccaacacagtgaaactccatctctacaaaaaaatatatacaaaaattagccaggcgtggtggcacgcacttgtagtcccagctactttgggagagtgaggcagtagaattgctggaacccgggagtcggagattgtagtgagccaagactgcgccactgcatgctagcctggaggaaaagagtaaaactgtctctaaataaaaaataaataaataaatataaataaaatcaagtataattaaagtctctctctccccaatcactatgctttccattcaatgccaaaggaattaaagacagtatctccaaaatgcctacagaacaaataggatttgtctttaaaagaatgagaagacagttaaatatactgtaacattattagcaaagacttttcatttttaattctaatctagttcaaaacatcatttatagttatcttaacaccaaaaataatttttaaagggaaaaacagcattggaaaaagctaaataagtgcctcagtttcctcagccattagctggataatatcagtatc

SEQ ID NO: 553384 - DNA, 604 bp, Homo sapiens
tatatggtcacattatctatagtaagaatatattcatgatttcatcgttgaattttaaaaatcggtggagctttgccaaccactgtctagagttgggattagcaaaccaccttggactggacttttgtaattatgagaaacaaggcttgtgtggccacttttatattttagtgtgaggccacactaaaggggagatatacctccccctgtggcttagcaaacactttccttaccttggtatatagagctctgaggatggaatagaccaatttgtataaagagctccgggccttcarggagggaagagcctggggcccctaagccatttcctctagatacaaacttagtaactctttgctgttgtctctggcacagccctgatggagatacaggcaagcaagaactcaccctgaagtagaggggctgttgggtctaggctgtcaacctcagcttaatacaagggcctgaagcttgttccacagagactggttctagtgtaggctgtggcggaagacatcagcttctctggtactgaccaacctggcacagtttcatgccttgggattcagagctgaacacctgaggatgaactagtagagctgtt

SEQ ID NO: 553385 - DNA, 835 bp, Homo sapiens
acataaaattccaattaaacacatgttcagccctactagactctgggagcaagcatagtaaatcattcccaagtaagccattcttgatctaaaataagtgtggacactaaagaaaaggttattataagcccaaactgctaaattatactttcatgactgaacacaactgtaatccatattattattttaaattacactataaaaagcagtcatttatcgcctttccaaaacacagtgataatatattaccaaattatcaagggttctttattaaatctcttgaatttgatttataatacaygaggtagcttatccttgagaaagatctactaaaaggtatacttagtcttaaagctagtgaaataaaatctccctctaatcagctgccagaaagcttccgcttcagtgctttgttgatactggtgtcagcaggacattaaaagcttgaagctttttacgtttgatcaaataccaacattatgctgaagcagaagtattaattcatagagtaaagcttccagaacctctccagctctccttcatccttcctccccccaccaaaaaggtcacatcaaatcaggggttcagggacaaaacagagacgggcattttgtcagtgtttcatgtacacaaaaccactctagaacccaagggagagacaagcactaaaatatacttttctaaaaatgccaatcccatctaagaaaggggaaagtaactgttgctgaaaaataagaaggtgacctggttattattctcatcttataatgagaaatggagcaccagaaagggtcaggaatttgccccaaattttcagctagtgtttggggagctg

SEQ ID NO: 553386 - DNA, 574 bp, Homo sapiens
tcaggatgtcagctatagaaaaaagaggttgtgtttactgtttctgcagtgcatacaacactacttgtacatctggagaaggaaaagcagctgctctctctgcatgtgagactttggtccaattatttatctttttgaactttacttcttttaactgcaacatagaaataatattacaaaacttagatggtgtttaggaacataaattacaatagtcaaattatagcaggttccccgcactctctttacatatagggatttatttaattgtaataagtcttatgacacaggtttcatgatttamaaatgagggaatgaagcacagagagatccaagccatttgctcccagccacacaactgtggaactggctgcagggaccacatacttgaactccactctgaaatctttctctaataatggagataaagcacatagtaagtgctcagtaaatgattattattatcgttgttgttgttatagagaagagatgtgtttgttcttacacttaagaacattctgttacagattgctccactaagactcccaagtgcatttagatgggagagaaattg

SEQ ID NO: 553387 - DNA, 1055 bp, Homo sapiens
tgctgaaaagtaaaaagaaagcaataaaaacaacccataatgccatcatgcagggatataacctctcctaaaattgtagtatattttctaagtctctgcacatgtaataaacaccattggcctcgtacgtcatatgtgactttgtgttccactttttgttttaacctaacaaatcataaacacttccctcacatcattaaagactctgcaaagaatctttatgacttggatggatagattgamaatggccacaatttattagctactcttgctgaacatttagattgttttcagtgtttttccaggtagaaataatatagcaatgaacatctctgaagacatttttatcagaccattggcacatggtctccccatgtctagaatctaatataaagtggcatctgatctgacccaaagatatatcttaggttttctgttttaccatgctctgaagagcaggtgtcttccagaggccccagcaaccgaactagctggagaaccactggactcagttatagaacagggactccatggccccttatcaaatggagggggctccagtgctgcagaagtcccaggcccaggccgggcatagtggctcacacctgtaatcccagcactttgggaggccaaggtgaattgcttgaagccagtagcaagtccctgtctgtacaaaaattttttttaattagccaggtgtgatggtgcacgcctgtggtcccagcttcttgggaggctgaggtgggaggactgcttgagcctggtaggcagagattgcagtgggctgagatcacaccaatgcacttcagcctgggtgacagagcaagaccccgtatcaaaaaaaaaaaaaaaaaaaaaagaagtcccagacccccttagcctcaggccagactgcatggggcagaggaggggagtgagagtgaaatcccgggaacaattttgagaacccaccatgcgatgtaattccaccgagaacgggatgctcaaagtccacagaactgtgccgtttggaatttttacaaaaccgttgcttgctgatttagttaataataatg

SEQ ID NO: 553388 - DNA, 901 bp, Homo sapiens
ttataacatgttatgaagaaaaagatttgtaaagcatcaaaatctttgtaatgagatggtcactgaatagtgatttgaccttggtaattttgtgttcctgagtttcattwtttgtaaaatgagaccagactaggcatcagtgaaacttgcatggtgtgaagattctttgattatattaggatttccagtggggaataacacatttaaaaatctagtataaagtttatggaatagagacatgtaatgtggaacacctcactctctttacctgtttgtctctctgtctttgtctccacacacacaaacacacacacatgcacacacacacacacacaccacacattcatatacacacaaacacattgcagagggaaatacatattgatatatggaagaaaataacactttttaaatacaaaggtggatttttaacgtagctcatcctgactactaagtgttaacttaaaaaaacagataaaaatgataaattaattgtaggttccatgtagttctatcctgtttaatccatcctatcacattttattcctatttggagaaatacacatgaggaaggtaatattatttttgacattttgcacacttgagaagcataaagtaaacatagattgtagcataacacttccattgtcccattctctccctactcttttctatgtctttttttttttttggtactcatctcatttgccttttttttttcattttagactttttttcccagcgccctgcttcccctcatcttactcattaagtttctttttgttgatattttggggtaaggtgagaagaaagattcaagagaaaaggggatagatggaatgtcaacttcagaatgggagttgagaaagccattgactactgcctcctttaagacagagat

SEQ ID NO: 553389 - DNA, 901 bp, Homo sapiens
ttataacatgttatgaagaaaaagatttgtaaagcatcaaaatctttgtaatgagatggtcactgaatagtgatttgaccttggtaattttgtgttcctgagtttcattatttgtaaaatgagaccagactaggcatcagtgaaacttgcatggtgtgaagattctttgattatattaggatttccagtggggaataacacatttaaaaatctagtataaagtttatggaatagagacatgtaatgtggaacacctcactctctttacctgtttgtctctctgtctttgtctccacacacacaaacacacacacatgcacacacacacacacacaccacacattcatatacacacaaacacattgcagagggaaatacatattgatrtatggaagaaaataacactttttaaatacaaaggtggatttttaacgtagctcatcctgactactaagtgttaacttaaaaaaacagataaaaatgataaattaattgtaggttccatgtagttctatcctgtttaatccatcctatcacattttattcctatttggagaaatacacatgaggaaggtaatattatttttgacattttgcacacttgagaagcataaagtaaacatagattgtagcataacacttccattgtcccattctctccctactcttttctatgtctttttttttttttggtactcatctcatttgccttttttttttcattttagactttttttcccagcgccctgcttcccctcatcttactcattaagtttctttttgttgatattttggggtaaggtgagaagaaagattcaagagaaaaggggatagatggaatgtcaacttcagaatgggagttgagaaagccattgactactgcctcctttaagacagagat

SEQ ID NO: 553390 - DNA, 658 bp, Homo sapiens
agaatggagtccctcagccctcacggcagtctggagtggcctcgggcagctgaagcttttaggtagcttaatcctgaccttaagcagcctttttgtttagccctagtgcatcccacaaatgttatcattttctatgaatgttgtcatgtgggaaaaaaaatgaggagcattgaggcttaaagtatctcttaaatggcctcataatacataccttaactctcagaatcattcccacagactattactattattaagctaggccaggtgtggtggcttaaacctggccaacaaggtgaaaccgtggaaaccctgtctctaccaaaaatacaaaaagtagccaggcattgtggcatgtgcctgtaatcccatctacttgggaggctgaggaaggagaatcacttgaacccgggaaggggaggttgcagtgagccaagatcatgccactgcactccagcctgggcaacagagtgagactctgccaccaaaaaaaaaawaaataaaataagctagacatttttatattggaatatagatgtctctagcctgctctctagaacagtggtccccaaccttttttggtaccagggaccagtttcgtggaagacaatttttccatggatgggggtggagagagatggatggtttcaggatgaaactg

SEQ ID NO: 553391 - DNA, 1390 bp, Homo sapiens
agtcaccaggaggttctttgaagagttccttcctctggagtcatgatgggcactgggaggtgtacgtgtccagtgttgactatagccagtggcctcagggagtgtgtctggtccagctttcagctgacagctttctcatcagtgctgggtcactggctgcagctgcaattaatgcgctctcctgactaagggtaccatggaacgtcctctgcctttgccccccagagccttgggaacagattcctggaaattctgagcaaggtgctagcaagtccattgcaacccactcaccagaaagccttcctccactgatgggggatgtacggtggctgtctttgtccctctgtgtcccttttctgatgatgtcattctcakccaccctgtggagttgttggaaagaacacagcctctgaaaccagaggaccaggatgagagggtgttcaggccctcccttgttcagggaccttgtgtcagacactcagactctttatgcttctgttcttgccaccctgcccaaatgcactgctgtggtttgaatgctcccctcaaaattcacgtggaaacttaatccccaatggggcagtattgagaggtgaggcctttaagagttgattgaatcatgagggctctgccctcaaaagtggattaatccattcatggattaatggttaaagggttatcacaggaggggaactggtggttttacaagaagaggaagagaacctcgccatgcgatgccttgtgctaccccaggactctgcagagagtccccaccagcaagaaggctctcaccagatgtgacccctcaacctggaacttcctggcctccataactaaaggaaatacatttctttccttataaaatacccagttttaagtattctgttataagcaacagaaaacagacatgtactttccccatgtctccagatccttataatgatcaaagagaagatatatgtagagttcctctgtcagctcaaatattattactagcagcatctctttgaacttttgcttataagatcttcaattccaactccatctcatgagtcatgacatcaactctaaatatctcatttactcttctgttgaagcatgcactatgcaatgtgtgacacaggtgaacgtgtaccttatggaataacatgcctaagagctctggggtgattgggcaaagtccttggttatgttcccacctggagaatctatttcactctaggcaactactggacaaattcaggctactgattatgtaggagagagagacagagacagagctggctagccctaatatgtcaccatcaaattgtgtccagtgagggaatgtcttacactgtcgtccccatggaagtctgtagcctgagtacagctttcacctgtacagcac

SEQ ID NO: 553392 - DNA, 1390 bp, Homo sapiens
agtcaccaggaggttctttgaagagttccttcctctggagtcatgatgggcactgggaggtgtacgtgtccagtgttgactatagccagtggcctcagggagtgtgtctggtccagctttcagctgacagctttctcatcagtgctgggtcactggctgcagctgcaattaatgcgctctcctgactaagggtaccatggaacgtcctctgcctttgccccccagagccttgggaacagattcctggaaattctgagcaaggtgctagcaagtccattgcaacccactcaccagaaagccttcctccactgatgggggatgtacggtggctgtctttgtccctctgtgtcccttttctgatgatgtcattctcagccaccctgtggagttgttggaaagaacacagcctctgaaaccagaggaccaggatgagagggtgttcaggccctcccttgttcagggaccttgtgtcagacactcagactctttatgcttctgttcttgccaccctgcccaaatgcactgctgtggtttgaatgctcccctcaaaattcacgtggaaacttaatccccaatggggcagtattgagaggtgaggcctttaagagttgattgaatcatgagggctctgccctcaaaagtggattaatccattcatggattaatggttaaagggttatcacaggaggggaactggtggttttacaagaagaggaagagaacctcgccatgcgatgccttgtgctaccccaggactctgcagagagtccccaccagcaagaaggctctcaccagatgtgacccctcaacctggaacttcctggcctccataactaaaggaaatrcatttctttccttataaaatacccagttttaagtattctgttataagcaacagaaaacagacatgtactttccccatgtctccagatccttataatgatcaaagagaagatatatgtagagttcctctgtcagctcaaatattattactagcagcatctctttgaacttttgcttataagatcttcaattccaactccatctcatgagtcatgacatcaactctaaatatctcatttactcttctgttgaagcatgcactatgcaatgtgtgacacaggtgaacgtgtaccttatggaataacatgcctaagagctctggggtgattgggcaaagtccttggttatgttcccacctggagaatctatttcactctaggcaactactggacaaattcaggctactgattatgtaggagagagagacagagacagagctggctagccctaatatgtcaccatcaaattgtgtccagtgagggaatgtcttacactgtcgtccccatggaagtctgtagcctgagtacagctttcacctgtacagcac

SEQ ID NO: 553393 - DNA, 1390 bp, Homo sapiens
agtcaccaggaggttctttgaagagttccttcctctggagtcatgatgggcactgggaggtgtacgtgtccagtgttgactatagccagtggcctcagggagtgtgtctggtccagctttcagctgacagctttctcatcagtgctgggtcactggctgcagctgcaattaatgcgctctcctgactaagggtaccatggaacgtcctctgcctttgccccccagagccttgggaacagattcctggaaattctgagcaaggtgctagcaagtccattgcaacccactcaccagaaagccttcctccactgatgggggatgtacggtggctgtctttgtccctctgtgtcccttttctgatgatgtcattctcagccaccctgtggagttgttggaaagaacacagcctctgaaaccagaggaccaggatgagagggtgttcaggccctcccttgttcagggaccttgtgtcagacactcagactctttatgcttctgttcttgccaccctgcccaaatgcactgctgtggtttgaatgctcccctcaaaattcacgtggaaacttaatccccaatggggcagtattgagaggtgaggcctttaagagttgattgaatcatgagggctctgccctcaaaagtggattaatccattcatggattaatggttaaagggttatcacaggaggggaactggtggttttacaagaagaggaagagaacctcgccatgcgatgccttgtgctaccccaggactctgcagagagtccccaccagcaagaaggctctcaccagatgtgacccctcaacctggaacttcctggcctccataactaaaggaaatacatttctttccttataaaatacccagttttaagtattctgttataagcaacagaaaacagacatgtactttccccatgtctccagatccttataatgatcaaagagaagatatatgtagagttcctctgtcagctcaaatattattactagcagcatctctttgaacttttgyttataagatcttcaattccaactccatctcatgagtcatgacatcaactctaaatatctcatttactcttctgttgaagcatgcactatgcaatgtgtgacacaggtgaacgtgtaccttatggaataacatgcctaagagctctggggtgattgggcaaagtccttggttatgttcccacctggagaatctatttcactctaggcaactactggacaaattcaggctactgattatgtaggagagagagacagagacagagctggctagccctaatatgtcaccatcaaattgtgtccagtgagggaatgtcttacactgtcgtccccatggaagtctgtagcctgagtacagctttcacctgtacagcac

SEQ ID NO: 553394 - DNA, 532 bp, Homo sapiens
atgcaccaaaaactgaaacaccgcagctggcattgttcaacagaaagggcccagttcttctccatcacaatgcctgaccacaygtcacacaacacctcatctgcagtattcacctgacctctcaccaaccgactatcacttcttcaagcatctcgacaactttttacagggaaaatgcttccacaaccaccaggatgcagaaaatgctttctaagagttccttgaatcctgaatcatggatttttatgctacagaaataaacaaacttctttctcattggaaaaaaatgtgttgattgtaatggttcctatttcaagtaataaagatgtgtttgagccttgttataataatttaaaattcatagtccaaaaccacaattacttttgcaccaatttataaacaaataaaataatcttatttttcatatttttgtcttcttggtaatgtgttaatcatcaatcagataatttttttcatttatattttaaattcaggggcacacgtgcagatttgttacatagataaacttgtg

SEQ ID NO: 553395 - DNA, 532 bp, Homo sapiens
atgcaccaaaaactgaaacaccgcagctggcattgttcaacagaaagggcccagttcttctccatcacaatgcctgaccacatgtcacacaacacctcatctgcagtattcacctgacctctcaccaaccgactatcacttcttcaagcatctcracaactttttacagggaaaatgcttccacaaccaccaggatgcagaaaatgctttctaagagttccttgaatcctgaatcatggatttttatgctacagaaataaacaaacttctttctcattggaaaaaaatgtgttgattgtaatggttcctatttcaagtaataaagatgtgtttgagccttgttataataatttaaaattcatagtccaaaaccacaattacttttgcaccaatttataaacaaataaaataatcttatttttcatatttttgtcttcttggtaatgtgttaatcatcaatcagataatttttttcatttatattttaaattcaggggcacacgtgcagatttgttacatagataaacttgtg

SEQ ID NO: 553396 - DNA, 532 bp, Homo sapiens
atgcaccaaaaactgaaacaccgcagctggcattgttcaacagaaagggcccagttcttctccatcacaatgcctgaccacatgtcacacaacacctcatctgcagtattcacctgacctctcaccaaccgactatcacttcttcaagcatctcgacaactttttacagggaaaatgcttccacaaccaccaggatgcagaaaatgctttctaagagttccttgaatcctgaatcatggatttttatgctacagaaataaacaaacttctttctcattggaaaaaaatgtgttgattgtaatggttcctatttcaagtaataaagatgtgtttgagccttgttataataatttaaaattcatagtccaaaaccacaattacttttgcaccaatttataaacaaataaaataatcttatttttcatatttttgtcttcttgrtaatgtgttaatcatcaatcagataatttttttcatttatattttaaattcaggggcacacgtgcagatttgttacatagataaacttgtg

SEQ ID NO: 553397 - DNA, 1066 bp, Homo sapiens
tttttggttgccacctgttattgtcattcttctactggaagatgcagaaattggtatgcatgcagcaaaatcaaagatgcagataaactttcagaaataattttgcaatttttaatactaattacattcttttattgctgcatttctagatccaaartaaaggctatatttttcctcaactctttatgtaaataaataagaatatatgcaaaaaatataacaaaaacttgagtgtaagtaaaaatcttggtctgctttggaaagagacaattatacattcttaaagcatcccataactcttcaatttgtgctttaatcaactttcaccatcatcttcatcatcatcatcatgtccaaatcttcagatctaggaagtgaagaggacagcagtccttgtcttacagattctattactgaaaatcataagcataataacttataatcggcatcactttcaacagtatcctttaggtgataagttgagccaaacaatgccttgctcttttatcaacagaaaattagtacaaaaaactatttagtagcaaaaacgtgcagtatagtgactgttgaaagaatttagcacacacttgtgttggaaaactattgttcttgtgcaaaacgttcaaattttaaaaaataacgccaaaacattagtaataaaaatgttcaaatattcatctcaaataaaaagttaaatttattctggtttcccattaattaaatcaacaccattgatataacgtcaatgatgaatcattggcattaacctccaaacacagcattttactacaatatgtattaggcacacctctgcgtaggcagagatattttattaaaatctgaaattttttgtcttaaattaatacacctctcacaagtttatatatagatctaagtaattttttgttatcaggctgatttattcatagcagaaaagagaaaattacttgaacataaaaatttctagaaaaacctgaatccttcagtgcttaattgaaaaatatggcaacatacccagaactcaccaaggaaagatatgagtgtctcgcagatcttaaaccaaagg

SEQ ID NO: 553398 - DNA, 1066 bp, Homo sapiens
tttttggttgccacctgttattgtcattcttctactggaagatgcagaaattggtatgcatgcagcaaaatcaaagatgcagataaactttcagaaataattttgcaatttttaatactaattacattcttttattgctgcatttctagatccaaagtaaaggctatatttttcctcaactctttaygtaaataaataagaatatatgcaaaaaatataacaaaaacttgagtgtaagtaaaaatcttggtctgctttggaaagagacaattatacattcttaaagcatcccataactcttcaatttgtgctttaatcaactttcaccatcatcttcatcatcatcatcatgtccaaatcttcagatctaggaagtgaagaggacagcagtccttgtcttacagattctattactgaaaatcataagcataataacttataatcggcatcactttcaacagtatcctttaggtgataagttgagccaaacaatgccttgctcttttatcaacagaaaattagtacaaaaaactatttagtagcaaaaacgtgcagtatagtgactgttgaaagaatttagcacacacttgtgttggaaaactattgttcttgtgcaaaacgttcaaattttaaaaaataacgccaaaacattagtaataaaaatgttcaaatattcatctcaaataaaaagttaaatttattctggtttcccattaattaaatcaacaccattgatataacgtcaatgatgaatcattggcattaacctccaaacacagcattttactacaatatgtattaggcacacctctgcgtaggcagagatattttattaaaatctgaaattttttgtcttaaattaatacacctctcacaagtttatatatagatctaagtaattttttgttatcaggctgatttattcatagcagaaaagagaaaattacttgaacataaaaatttctagaaaaacctgaatccttcagtgcttaattgaaaaatatggcaacatacccagaactcaccaaggaaagatatgagtgtctcgcagatcttaaaccaaagg

SEQ ID NO: 553399 - DNA, 626 bp, Homo sapiens
gagtcatggctccacgtctcttcttttgaacatgtatccttcattttctttgttgtcttattattgctactcatggactgttcaacgtactttttwaaaattattattatactttaagttttagggtacatgtgcacaatgtgcaggttagttacatatgtatacatgtgccatgctggtgtgctgcacccactaactcgtcatttagcattaggtatatctcctaatgctatccctcccccctccccccaccccacaatgtacttttaaagaagttaccgtccagataatgtaactttcactttaagtgaaaagctgctcactcattctcttccttcctcttcctccccctgtctccccagctcccaaatttgagtaaaattatgcccagtgtaatttattgtgattttcccccttcttctaaacaatatctgtgttagagaattgaacacctgtaaaacatttgttattctcacttgtcctaatcaggaattcaataaaaaggcattctgaaatcttggaaatactgaggtttttctgaacttaaactgatctgttaaaccagttagttgagcaaggccggaagagccctcaggaaaaatcatgaaaacgaaattaaatcgaac

SEQ ID NO: 553400 - DNA, 378 bp, Homo sapiens
gtattattagtaaagacaaggtttcaccgtgttggccaggctgatctcaaactcctgacctcaggtgatccatctgcctcggcccctccaagtgctgggattacagkcgtgagccaccacacccagcagataacatgctattttcaatgaaatattttttcaaagaacctgttaaagatactgttgagtctgcctacaaatgtgaagaaaatatctcttcttttgcatcttgaggttccaatgtccgtgcccacacttagctagtacttctcagtgcacttacctccctgaaggtgaaaccagatggctcaagagctgtagttcaggccagttaccttcactattctatcatacagatttctccagagaacattcctt

SEQ ID NO: 553401 - DNA, 643 bp, Homo sapiens
tcagatatgttaggcaggactggaaaagtgcttagtctagggttaactatcccccctattgaggcaagaccctcttacacgctgttctcaataccttgtgaacaggggttttccagcccaggcatgtgtgagtgtcaggcacaattccctctaatctggttgggtctttccccagcatcgggtagtttcctcacacatatgcactgatcaatactctaytgaatacataagggggctcttcacctacctccagtgttccctttctgtatagctctctcctctctggtactctgtcctgcaaactgtaatagccttggtctcctgagactctcagctccatcttttccgcccacagagtctgtcaggttccatctggtgctccctccctaagcagtaacttggaattctcttaaggcagtcagctctggcagtcatagaactcacctcatttgcttcatgtttcttttggatcattttcctttgcacctaatattcagtgtgttaaaaacctttgttttatatattttgttccttaagaggattggttcagatagaagggtaaaccccgtccccgttacttcatcttggccagaaaaagtacccatctagttttttgaatatgaatatatgtagaatttaaagc

SEQ ID NO: 553402 - DNA, 529 bp, Homo sapiens
aatctgacagctcttccactcccaaatgcataagggaaaaagaaaaaaaaaaaaaactccctactcccccaaataccacttctgacctacagatcctgtctctaactaatctcccgcccaacccaaaacttatttgtttattactttactttaaaaatttcccacccttttgggaaggtgggaaagggagaaagagactgaaaaagttattgtagttggcaggtttaaacaatttttatttatttatttgtttgtttattttgagacagagtcttcctctgtcgcccaggctggagttcagttgtgcaagtttggctcactacaacctctgcctctggagttcaagtgattctcctgtctcagyctcccaagtagctgggattacagacacacatcacctaaaccgaatcccaaaatacaaaaaaatttttgtatttttagtagagacagggtttcaccatgttggccaggctagtctcgaactcctgacctcaagtgattcacctgcctcagactcccaaagtgctgg

SEQ ID NO: 553403 - DNA, 1236 bp, Homo sapiens
ccgatataacaagcagcatgctcatattatctgacttaacactcacaaatacctgcaaatgctttyattattatccccattttacaaatgagaaaagagaatctctggacatctaggtaatttcctcaaatttacaccactgacaaagcttgtattcaagcctagtcctgtctaaatatgcaattcatgatctttcaacttcctctactgactactttataccagacagcattgagtagagcccactttgtccaaataggaagaactgaagtgcaaaggactcacttgccatactcatcactcttcttgggaaccctctaaaaacccagagtgccatccttttggtgtcccatcagtactgctccttgaaagccagtagaggccagaaactgaaatccaaagttgaattaaccaagtataactctaagcccttcatgtatagctgggattaaaacactgtagaagttatatatatatatagtgttcccaaattctattgaagtcctaaaggagcccacatttctactacctaaatgctgcttcccacacttcataatcaagccaagccacttcagccaacactaagccccttcggaccagcaaagccttatccaaattcatttcaaccccttcccttcctcatcctccctttgtctgcctccttaaaaattagttccagtgaatccaaaggaacctccattcaactgtcagtagattttactacaaacttagtgtcttcatagaataatctctccagtatatcctaatgatccttttcctctgaaatagaggttgtttgtcttccttctccttgcatttcaagggtcataacactcccaagttcccaccaacattttcaacaattgttctttcactcatgtttgagactgtaggattcatctttatttatgtgctcactcattataagcagataataacacaacaggcattgtctcaagacattgttttattttccataattcttaagtccactccaaaaagcagtggttttatacacacaacaccccaagcaagtttcaaacaggttaaataattaacctagtttttgaggtggagtgggaatttgaacccccaaatgaggttctcttcatagcaccatgttctatttggctatactaacctctttccaccctcatttctgccatcttccaatctccatataactccccacattcactgaagactcttgcccttgacttgtaagactctattgcc

SEQ ID NO: 553404 - DNA, 1236 bp, Homo sapiens
ccgatataacaagcagcatgctcatattatctgacttaacactcacaaatacctgcaaatgcttttattattatccccattttacaaatgagaaaagagaatctctggacatctaggtaatttcctcaaatttacaccactgamaaagcttgtattcaagcctagtcctgtctaaatatgcaattcatgatctttcaacttcctctactgactactttataccagacagcattgagtagagcccactttgtccaaataggaagaactgaagtgcaaaggactcacttgccatactcatcactcttcttgggaaccctctaaaaacccagagtgccatccttttggtgtcccatcagtactgctccttgaaagccagtagaggccagaaactgaaatccaaagttgaattaaccaagtataactctaagcccttcatgtatagctgggattaaaacactgtagaagttatatatatatatagtgttcccaaattctattgaagtcctaaaggagcccacatttctactacctaaatgctgcttcccacacttcataatcaagccaagccacttcagccaacactaagccccttcggaccagcaaagccttatccaaattcatttcaaccccttcccttcctcatcctccctttgtctgcctccttaaaaattagttccagtgaatccaaaggaacctccattcaactgtcagtagattttactacaaacttagtgtcttcatagaataatctctccagtatatcctaatgatccttttcctctgaaatagaggttgtttgtcttccttctccttgcatttcaagggtcataacactcccaagttcccaccaacattttcaacaattgttctttcactcatgtttgagactgtaggattcatctttatttatgtgctcactcattataagcagataataacacaacaggcattgtctcaagacattgttttattttccataattcttaagtccactccaaaaagcagtggttttatacacacaacaccccaagcaagtttcaaacaggttaaataattaacctagtttttgaggtggagtgggaatttgaacccccaaatgaggttctcttcatagcaccatgttctatttggctatactaacctctttccaccctcatttctgccatcttccaatctccatataactccccacattcactgaagactcttgcccttgacttgtaagactctattgcc

SEQ ID NO: 553405 - DNA, 1236 bp, Homo sapiens
ccgatataacaagcagcatgctcatattatctgacttaacactcacaaatacctgcaaatgcttttattattatccccattttacaaatgagaaaagagaatctctggacatctaggtaatttcctcaaatttacaccactgacaaagcttgtattcaagcctagtcctgtctaaatatgcaattcatgatctttcaacttcctctactgactactttataccagacagcattgagtagagcccactttgtccaaataggaagaactgaagtgcaaaggactcacttgccatactcatcactcttcttgggaaccctctaaaaacccagagtgccatccttttggtgtcccatcagtactgctccttgaaagccagtagaggccagaaactgaaatccaaagttgaattaaccaagtataactctaagcccttcatgtatagctgggattaaaacactgtagaagttatatatatatatagtgttcccaaattctattgaagtcctaaaggagcccacatttctactacctaaatgctgcttcccacacttcataatcaagccaagccacttcagccaacactaagccccttcggaccagcaaagccttatccaaattcatttcaaccccttcccttcctcatcctccctttgtctgcctccttaaaaattagttccagtgaatccaaaggaacctccattcaactgtcagtagattttactacaaacttagtgtcttcatagaataatctctccagtatatcctaatgatccttttcctctgaaatagaggttgtttgtcttccttctccttgcatttcaagggtcataacactcccaagttcccaccaacattttcaacaattgttctttcactcatgtttgagactgtaggattcatctttatttatgtgctcactcattataagcagataataacacracaggcattgtctcaagacattgttttattttccataattcttaagtccactccaaaaagcagtggttttatacacacaacaccccaagcaagtttcaaacaggttaaataattaacctagtttttgaggtggagtgggaatttgaacccccaaatgaggttctcttcatagcaccatgttctatttggctatactaacctctttccaccctcatttctgccatcttccaatctccatataactccccacattcactgaagactcttgcccttgacttgtaagactctattgcc

SEQ ID NO: 553406 - DNA, 516 bp, Homo sapiens
agctcctggccgaataaagcccttccttctttaacttggtgtctgagggttttgtctgcggcttgtcctgctacaagctggtcttggcacactccccttggaggagtgtggagttcactgctccacaggtttggaaccatgagaactcagggcatcagtgacatccctacagttgtgccctggggacatcaagatgaggcatggtgcttggcaacacagtggcagctctagcaggaagtcctagagctggctgggcatagcggggactccwctgtgttagcagagttagcagctctgctgacaagcgtgcactcttgtgttagcaggtagaggcaagagcctttgaataccaagtaattattctttacattacctcctccagacatgggaggcctaggaaaactcgggttccatcacctgctgccaatcatctatgccttggaaataatgttatcagtagtggttaggtttccaaatgagaaaagaaagaaggaagggagggagggagggagagaa

SEQ ID NO: 553407 - DNA, 516 bp, Homo sapiens
agctcctggccgaataaagcccttccttctttaacttggtgtctgagggttttgtctgcggcttgtcctgctacaagctggtcttggcacactccccttggaggagtgtggagttcactgctccacaggtttggaaccatgagaactcagggcatcagtgacatccctacagttgtgccctggggacatcaagatgaggcatggtgcttggcaacacagtggcagctctagcaggaagtcctagagctggctgggcatagcggggactcctctgtgttagcagagttagcagctctgctgacaagcgtgcactcttgtgttagcaggtagaggcaagagcctttgaataccaagtaattattctttacwttacctcctccagacatgggaggcctaggaaaactcgggttccatcacctgctgccaatcatctatgccttggaaataatgttatcagtagtggttaggtttccaaatgagaaaagaaagaaggaagggagggagggagggagagaa

SEQ ID NO: 553408 - DNA, 521 bp, Homo sapiens
aaacaatagttgaagatataatgtctgagaaatttccaaaattgatcagacatcaacccagaaattcaagaagctaaatgccaagcaagaaaagaaaaagaaacccatactaagtacaccatagtaaaactactgaaaaccaaaaagaaaaaaatctttaaagcagccaggtgaaggcaaaatcaccttcaaaggaacaacaaaggaccagatagcgacttttcaacagaaatggtataagccagaaaacaaagaattacatctttaaagtccttaaacagactcctgtatgcacttgatagaagacagaattagtgaactttgtacaaaacagctataaagttctccccaaatatagcatatatataaaaatatgaaagacagattaagagataatatcatgatatgatccaacttacatttaatcagttacagaagaaacagacaatgctgaaagaaaaaatcatttaattttccacaattgattaaggayaccattgtacaaattcaagaatccaaaa

SEQ ID NO: 553409 - DNA, 1259 bp, Homo sapiens
tctattgcccaggctggagtgcagtggcatgatctcagctcactgcagcctctgcttcccaggttcaggtgattctcatgcctcagcctcacaagtaactgtgattacaaggatctgccaccatgcccggctaatttttgtatttttagtaaagacagggtttcaccatgttggccaggctggtctccaactcctgacctcaagtgatccgccagcctcgacctcctaaagtgctgggattacaggcatgagccaccacacccagccagctatggatcaattttgacaagtctgattaactcaccaagaattccttggaccaccaatgcaattatccacattgatttatgaatggtccatagccacacatatgtgtgtgggctaaagggaggaatagcaagmggtaatggaaattatgctcaattccaccacttgtggaaaacaagatgtaatggacgttgctagctattgtctttttgtcatccaagcaagctttctcatcaccctttattctggtaactgccttccctcctcctcactccctttgcagaggcaggggccagtttcaggtctggctaatcacagctctccattccttcccacttagtaatggttcaggggaaggtaaaaactcaagctgactttattaaagtccttccctgagatttctgagtttaaaaacaagagaagcagtggtgttttctcggggtcatggtaccataaggatatgaagttagaagactgtgactatctttgtaaccaaacaaagaagacctgctataggagcagatcagagagttaagcagagactcagagagaaaagctggatgtagaattgaatcatgatcccaattcttcagccctggagccaacatcttttttcaggttcttcaagttaccctactttattatgcctggctacatgggcctatcaattcctttcttttgtttaaagatagttggaattagatttttatcattcacaatgaagaattttgatgagaaattctagaggccaaacataccaaaaaataccccctgttttaggttaacagtttgtctgtagtcactgtgggtgtagggtaatatcgcctttcctctgaccctaaactaaggatggataagcctgaagtcagtctttcagtataaacctcatgggtgactagtgatcagctttttgtatttcctcactattgtctgtcttggtcagctcaaccaggaaggacaagttgctactgaggccaagagcacaggtcagg

SEQ ID NO: 553410 - DNA, 1036 bp, Homo sapiens
cacaagacagggatgtccagccttgtgttcattaagcctctttttccttataataattctaatgccttactttgcgtaacagacttgatctggtttctaaaactatttcatgaacattagtttattttatttacataaatataagtctttcacaagtgtcgtctgaatcccagaaagcaatgctgcttttattgaccagaaaagtcttacagggagaaggcaggggtagaaagactggagagttggcaaggggcttaggctgtggtagcttccaccagaacctcgggatgtccctttggttctctcaaccgtatctgaactgacactggactctggcgaatttgtgccaacaatatgttcattcttagttgaatatgcagggaatgtgcctttgccaaggtgttccctgttacagaggtcagactgtacattctcaatgttattcgtggcaatagcaacaatagatactgttcctgggcacttcacagtgattatttcacttaatcttcactacagctctgacaggggagtggtattatcccaattttccatatgaggaaactgaaacaaaacaaagctaaataatttgcccaaagatccatggttagtaagcagcagaggcaggatcctaacccaggtcttaaatcctctaaacttacaaactcctccctggcctcacagcttcccactggatcttctcttttttgctattttcgtcccattcctcaggagcttcctcctggactattcctggaaagtccaaattcttctttcttacttttcttttttcttttttttaaatgtgtatacatcttgtttctttactaagcaaagctgagcagaccctgcaagaatctcaggaaaacaagaggactctcctgtcatagatccctctgctttagaaagcaattgtggtagtttatagtgtggttgttatttttctcctttacacayacattatctcaatattcagtataaccctatgagaaaagtattattattgttcccttttgcaggtgagaaaatagtcacaaaa

SEQ ID NO: 553411 - DNA, 614 bp, Homo sapiens
cactccaagataaacatttctcttttaacatcagactgggctggaaggttcatttaggacatggctatttgaaggactggagaaggggggatgtgggggaatacagagaaagcaaagagacaaagtttaaaatcaagacacacagtctgcttcttccgatatatctcaaatatattcctaattagagaatgccaatgcaatagcctgagattctagagaaggaagaggtaggtaggtgacacaattaagtaagtctccatttggaataactgccgttgggatgggtggagggtgttccctaaaggatatttttttctctaaaaaattttcttttatttgaagaaggcctggaagcatttcatacatatacatgcagaygctcttcgacttacaatgggattatgtcctgataaactcatcataaagccaaaaaattttaagtctaaccattgcaatttggggaccatctatatatgtgtatatgtatatacgtgtatacatatgtatatgtatgtgtatgtatatgcacacatatatgtatacttttaaaagatggtttggtatttcttgctatgaaagcaaagcttagctcagaaatttccaaagaccctttt

SEQ ID NO: 553412 - DNA, 1827 bp, Homo sapiens
ttctgggaatggcaagcagaaggagaagtttattttcaccactttatgtaaaaattcctctgtaggcattatcgtcttaattttcggtgtgaaacttcagtcttggggaagtttgatgcctttgactagttctcatattagtttttagyagtgtcaaaaatggaaacaagaccattgtattatgtgttcttttttatttaacttacattaaaaaatattcctgggtaaggcataaaaaatgctaatctaggactttgggatttctggaaggagtggtggagagggcttgtagtccaggtgtttgtagatgcgagaatcagaagacaaaataagtttttgttttgttgcgtttttgaggcagagtctcactctgttgcccaggctggactgcagtggcactatctagactcactgcaacctccacctcctgggttcaagcaattcttctgcctcagcttcctgagtagctgggattacaggtgcccaccaccatgcctagctatttttttgtatttttaatagagacagggtttcaccatgttggccaggctggtctcgaactcctgacctcaggtgatccacccacctcggcctcccaaagtgcttggattacaggtgtgagccactgcaccaagctgaaataagatcttaaaataaaatgcgaggcctagaccttgattcctcctgagttgtatgtctggtcttggccagagaggaaattcttgaccatgttttaatttttattttatttgtatgtgattatttccaaatctgccatcacaaggtggagcatattttccctttcccttgaacctggcctgaccttgtgattttctttgacccaaagaatacagcacagcaaagctatatgacttctggggttagaccttagggaaatgtcctaatcatttgctttcagtcttgaaactcttaggtctccatgttccaaataagtctagtctagtccaccaaaggatgataagtctcatgaaagaggcacaactgctgttagctggaacaaacttctggatgaaccattgggtatctgtagccagctaaattagatgataattccttatacttgccctagtagttttcacagtattttgcatatattatctcatataatctttatcttcatgctagggagacaggacaaaaataacaccactcagattgttcacccacagaattgagagaaaggctaaacctttgttagtttaaacatctaaatgttggagtagtttgttgtacaacaataggtacttagatagcataaggtactcacttaacaatgacatatgtgagtgcatgtatagtgttttatagcttacaagggtttttcacatgcaattttatttccctggatccacaggataaccttgctttccaactctgtagagtagctgtgggggatttctgttttgtttggggatttaatctttattatataaaatgaatgttttattcacctatattacaaatgaagaagctgagatgttgaaagtttccagggttcacttacaatcacagggctggtaagtgagcaggaaagggctcccaaagaagtttttcttctagaaagcctataaggctgtgccttaggccatgttgttgaaaacgccaggggtataagcctgctgttggaacacacagctgtgagatgggctcctgcagggaaggaaggcagctttatcatggacctaggccactgcagaatccactgtggggccccgaagaagcttccctttggttgtcatgccaacagacctcctatagtctccagtaaaacttcagcccagcctgcaggagtttgttaattcatgt

SEQ ID NO: 553413 - DNA, 606 bp, Homo sapiens
cttgcaggaaccacctcaccccaaagagacctccatgaggaaagaaggctgaaaggcactaaggagtcagggtcaagaaaagaagggacatagccccagacctatgtggctatggtgatcaactgtcccagtttatctgggactgagggtttctcaggatgtggactttaaaaatgggaatgtcttggttgtggagcctctaaaaaaagttacatgaatacatgagatacacctgagatagagcccccacctcctcacccctcacacagctgccatggggaaaataagcagctgagcaagcctggcctgcagtttgggggattcaggctgagtggtcttcaatcacttatgaggtctaagcgaacagaagtcaaccagtaaatgaatgaatgactccaactgggtaattacttatatgtatatgacacttctgtttctaatatgaaacagaatatgattatcttccagtgactaaagtgtaaattttatcaactgaccgacactggtgaatccaccacctccattgcaaggccccatgrggcaaaggaaacacattcgaaaacatgaatcaaaaaaaatcacacccatctcatactcatacctttc

SEQ ID NO: 553414 - DNA, 551 bp, Homo sapiens
tgggcatattatggttcattgtatctcttgttacttatatgatgataataataattttaggtaataaatattatttgaaagcactattctatccactttgaatacatgaattcatttaaaactcatgactacctttaaaataagcactattattaaccttattttacatttgagaaaatatagccacaaagagtttaagtaacttgctccaaatcatacagataccgaggttagcttctgactttttttatgtattattacaataggcattttgtatatcgatatttgagtgcatcttttaattattttcttaatttattttcccagaattggaataaccaaatacgacatggacaaagtacatatacatatatgtgtgtgtgtatatatayatgtgtgtatgtatatatatttatatgtatattcaatcttctgaaatcctacacagactgttgaatagagataactttccaacaattctggcaaaaaagagaaatgttcttataatcagaactaacctgaacatgtctctggagcccaggtactagacc

SEQ ID NO: 553415 - DNA, 533 bp, Homo sapiens
acaaaaaggctcatggttggccaggcgtggtggttcatgmctgtaatcccagcactttgggaggctgaggcgggtgaatcacgaggtcaagagatcaagacaatactgaccaacatggtgaaaccccatttctactaaaaatacgaaaattggccaggtgtagtggcgggcacctgtggtcccagctattcgggaggctgaggcaggggaatcacttgaacccaggaggcagaagttgcagtgagccaagattgcactactgcactacagcctggtgacagagcgagactctgtctcaagaaaaaagaaaaaaaaaaggctcatggttgaatggagagagagagagtgtgtgtgtgtgtgtaaaggagtagaagcagtaggggcaaaacaggaatcaaggatagcatctaggtttggaggctgagcaaccagacagttgcaaaagagcaggttattaatttgtcaccccacctgggaagtcactatcagtacaaagcatattactagattttgctgacattcaaaaaaattca

SEQ ID NO: 553416 - DNA, 533 bp, Homo sapiens
acaaaaaggctcatggttggccaggcgtggtggttcatgactgtaatcccagcactttgggaggctgaggcgggtgaatcacgaggtcaagagatcaagacaatactgaccaacatggtgaaaccccatttctactaaaaatacgaaaattggccaggtgtagtggcgggcacctgtggtcccagctattcgggaggctgaggcaggggaatcacttgaacccaggaggcagaagttgcagtgagccaagattgcactactgcactacagcctggtgacagagcgagactctgtctcaagaaaaaagaaaaaaaaaaggctcatggttgaatggagagagagagagtgtgtgtgtgtgtgtaaaggagtagaagcagtaggggcaaaacaggaatcaaggatagcatctaggtttggaggytgagcaaccagacagttgcaaaagagcaggttattaatttgtcaccccacctgggaagtcactatcagtacaaagcatattactagattttgctgacattcaaaaaaattca

SEQ ID NO: 553417 - DNA, 612 bp, Homo sapiens
cagctctgctcactgacagaattgcctatggtgtaggcagggggtggtaaaaatcaccccatcctcaaayacttctcactgagcttctctgattgccctgccctgatacctgaagttctgcctcttgttatgcatgggatacaggtacctaataaccctataaaaatgcaaaggttctggctgggcgcggtggctcacacctgtaatcccagcaccttgggaggccaaggcaggcggatcacgatgtcaggagatcgagaccatcctggctaacacggtgaaaccccgtctctactaaaaaatacaaaaaaaattagccgggcatggtggcgggagcccgtagtcccagctactcagaaggctgaggcgggagaatggtgtgaacctgggaggtggagattgcagtgagccgagatcatgccactgcactccagtctgggtgacagagcgcgactccgtctcaaaaaaaaaaaaaagttctcattgagaagtaggaaagattggaaattagggaacttcatggggagctcagggctcccaagtggggtttcagaaattcagagtcagcttgtaagccttgaggactttggaaacaagtatcttttcttttgt

SEQ ID NO: 553418 - DNA, 547 bp, Homo sapiens
ctttttactttttcctataataaaaggctttccatatctgtaggtacacagtttgacttaattatcctatgttatatattgtaaataattacatgagaggtaatggcaatttaaacaaataaaatgatggctatttctttttattaacttcatcatatttcactgaggttttccttactttaggcttccttgatggctgcaatgtatgctaaaagtaaatttttatgtgaaatgtttaaaatayttgaaaatgatgcttattgtttgtcaggttttgccactattagcatgactcagtacccatagtgtctgtctcttagggatgtgaagcaaatgatttctctgatccaaaacatttcatatgctttaaaagtcaaaccatgcaaagatgtgatatttagaatactagttacataataatggataataacttagcttttaaaacaactgctttaaacatgacacatttaaagctaatttgtaactttcatatgtttctgaaactttcacagtcactaaataatttgagtaaagcaaatgggcttca

SEQ ID NO: 553419 - DNA, 654 bp, Homo sapiens
atgtgtgaaaatgtgctggatctttggttatcgacagtatttcacattgccccatagggtatttctatggtttctgtagacagggggaagtccagcagacctatcccagtgtgaaactagaggagaaatctggcagtttctatccgagaattcaatatggtagtcaccagtgaagtgtggcaattgaacccttgaaacgctgctggtacaaattctgatggggtttaagtgcagaacacacaccagattgtttttaaaaatgtaaaataggccaggcacagtggctcacacctgtaatcccaatgctttgggaggccaaggcaggcagatcacgaggtcaggatctcagaccagcctggccaacatagtgaaaccccrtctctactaaaaatacaaaacttagcgtggcatgttggcacgtgcctgtaatcccagctactcaggtggccgaggcaggagaatcacttgaacctgggaagtggaggttgtggtgagccaagattgcgccattgcactccagcctgggcaacagagtgagactccatctcaaaaaaaaaggctgggcaccatggctcacgcctgtaatcccagcacgttgggaggctgaggcgggcggatcacctgaagtcaggagttcaagaccagcctggccaa

SEQ ID NO: 553420 - DNA, 523 bp, Homo sapiens
gcaattaatgtgcttgcacacaaactgtgaaatatttcttcctcccagtttaattttcttttaaacctgcctatgtaggtgcctcccttggttctgtttattttaattctcagccagggatttagtcagaggttatgctcagttttctcaaaccaatttggcttcaggcatctggttaagctgtctctagttcaaggatgcattttaaaattcagcaagtttgaaagcacccttgctgttttggggctttctgtaattttccacacaaatgcagagcctaaccatcagtcagggacttgtgcagactttattatcccagactttytccagctatcacccctattattataatgtttccctttaaatttttggctgttctgccacccaaaccaaacatgccacagctgggtacttcttcttcttcttctttttttttttttttttttttttccctcaacaacctggggaaatgagaaaccctccaggaaagaaaatcacaaacatcattctgactcaaagcagt

SEQ ID NO: 553421 - DNA, 523 bp, Homo sapiens
gcaattaatgtgcttgcacacaaactgtgaaatatttcttcctcccagtttaattttcttttaaacctgcctatgtaggtgcctcccttggttctgtttattttaattctcagccagggatttagtcagaggttatgctcagttttctcaaaccaatttggcttcaggcatctggttaagctgtctctagttcaaggatgcattttaaaattcagcaagtttgaaagcacccttgctgttttggggctttctgtaattttccacacaaatgcagagcctaaccatcagtcagggacttgtgcagactttattatcccagactttttccagctatcacccctattattataatgtttccctttaaatttttggctgttctgccacccaaaccaaacatgccacagctggstacttcttcttcttcttctttttttttttttttttttttttccctcaacaacctggggaaatgagaaaccctccaggaaagaaaatcacaaacatcattctgactcaaagcagt

SEQ ID NO: 553422 - DNA, 527 bp, Homo sapiens
agaggacacaatttagcccataacacaactgctcaaagcgcatttgggaggttgcagaagtgaaaggatttctgtgtccccaaaccgggggcccacaggggccgccttctctatgaccagacctcatgcagaaagactttgatttgaaagtgagatcagacccgttctcctggaggctgcaagctccgggggagtcaggaatggaataggatctcaggyccttgggcagcacccgacccccgacggcagcgccagtgtgtcccaaagaggagcctgcagggaagagatgctgatgttgaacggggccaggccatggtgcatggcgagcctgagtggcactgtgttaggacaaacaagaaatcctccccttgcagaaggctctgggcctgggccttgcctgtgtcccctcccctgcaaggaaccacccttcctccatggaggggcagcttggtgggcctgtccatcaactggtggctgtggccatgctccccgagaaggaagaccgtgtcattccagggactgctcat

SEQ ID NO: 553423 - DNA, 1220 bp, Homo sapiens
gcacagtggctcacacctgcaatcccaacagtttgggaggccgagcaagtagcatcatttgaggccacaagtttgagaccagtctgggcaacataagcaagaccctgtctctataaaaaattttaaaattagccagatactgtgacacatgcctataagcccagctactcacaaggttgaggtgggtggatcccctgagccctggagtttgtggctgcagtgagccatgatcatgccactgcactccagcctgggtgacagagcaagatcctatctctaaaaattaaaaataaatacagaaaaagaaaggcaattttctatataaccatgatgctgttatcacacttagtaaaatccagctcctttttaatctatctcctgcaggataaggaggtcctatcatgatggagagggcttcatagagagagagcctgttagaaagtttggaaacaaatcttcatcaacagaagatttgttaagtaaattgtgatatattcatactatggattactggggaatatttaaaatgatatagttctatatatggaaacacgtccacaacatcactaggttttttaaaaagcatctctcaaaatagtatgtactacccacattcatgttccgggtgatcgtgtgatccagttcttgctttaaaatgcatttgcatgtgtgtgcccagtaacaacggctggaaggatgtaaataaaaatgctaataacacttgatcttgggtggcagagttatggatactggttttttttcttttttttatgtttcagcctcatctaaattgttttattatttgggtcttcagcrgtaagcagacaatagtgttgttgctcttcctgatacagaagaacaggtattgaggaacgtcgggagagatgcgttctttggcctgtagacaggcagaatgaatggcagctttgtttttatagtacaggaaggtgatagtccactataaattgtcatcccaacataattcttatgacactgaaaaactacatgtggccttgttttgtttttatagtaaaatatacataacacaaaatttactatttttaagtgtctagtttagtggcattaaatacattcacaatgttgtgtagtcatactgtcatccatctccagaactgtatatccactaaatagcccctccctattccccgctccttccaactcctgataactcttgttctactttctgtctaggtatctca

SEQ ID NO: 553424 - DNA, 1220 bp, Homo sapiens
gcacagtggctcacacctgcaatcccaacagtttgggaggccgagcaagtagcatcatttgaggccacaagtttgagaccagtctgggcaacataagcaagaccctgtctctataaaaaattttaaaattagccagatactgtgacacatgcctataagcccagctactcacaaggttgaggtgggtggatcccctgagccctggagtttgtggctgcagtgagccatgatcatgccactgcactccagcctgggtgacagagcaagatcctatctctaaaaattaaaaataaatacagaaaaagaaaggcaattttctatataaccatgatgctgttatcacacttagtaaaatccagctcctttttaatctatctcctgcaggataaggaggtcctatcatgatggagagggcttcatagagagagagcctgttagaaagtttggaaacaaatcttcatcaacagaagatttgttaagtaaattgtgatatattcatactatggattactggggaatatttaaaatgatatagttctatatatggaaacacgtccacaacatcactaggttttttaaaaagcatctctcaaaatagtatgtactacccacattcatgttccgggtgatcgtgtgatccagttcttgctttaaaatgcatttgcatgtgtgtgcccagtaacaacggctggaaggatgtaaataaaaatgctaataacacttgatcttgggtggcagagttatggatactggttttttttcttttttttatgtttcagcctcatctaaattgttttattatttgggtcttcagcggtaagcagacaatagtgttgttgctcttcctgatacagaagaacaggtattgaggaacgtcgggagagatgcgttctttggcctgtagacasgcagaatgaatggcagctttgtttttatagtacaggaaggtgatagtccactataaattgtcatcccaacataattcttatgacactgaaaaactacatgtggccttgttttgtttttatagtaaaatatacataacacaaaatttactatttttaagtgtctagtttagtggcattaaatacattcacaatgttgtgtagtcatactgtcatccatctccagaactgtatatccactaaatagcccctccctattccccgctccttccaactcctgataactcttgttctactttctgtctaggtatctca

SEQ ID NO: 553425 - DNA, 1220 bp, Homo sapiens
gcacagtggctcacacctgcaatcccaacagtttgggaggccgagcaagtagcatcatttgaggccacaagtttgagaccagtctgggcaacataagcaagaccctgtctctataaaaaattttaaaattagccagatactgtgacacatgcctataagcccagctactcacaaggttgaggtgggtggatcccctgagccctggagtttgtggctgcagtgagccatgatcatgccactgcactccagcctgggtgacagagcaagatcctatctctaaaaattaaaaataaatacagaaaaagaaaggcaattttctatataaccatgatgctgttatcacacttagtaaaatccagctcctttttaatctatctcctgcaggataaggaggtcctatcatgatggagagggcttcatagagagagagcctgttagaaagtttggaaacaaatcttcatcaacagaagatttgttaagtaaattgtgatatattcatactatggattactggggaatatttaaaatgatatagttctatatatggaaacacgtccacaacatcactaggttttttaaaaagcatctctcaaaatagtatgtactacccacattcatgttccgggtgatcgtgtgatccagttcttgctttaaaatgcatttgcatgtgtgtgcccagtaacaacggctggaaggatgtaaataaaaatgctaataacacttgatcttgggtggcagagttatggatactggttttttttcttttttttatgtttcagcctcatctaaattgttttattatttgggtcttcagcggtaagcagacaatagtgttgttgctcttcctgatacagaagaacaggtattgaggaacgtcgggagagatgcgttctttggcctgtagacaggcagaatgaatggcagctttgtttttatagtacaggaaggtgatagtccactataaattgtcatcccaacataattcttatgacactgaaaaactacatgtggccttgttttgtttttatagtaaaatatacataacacaaaatttactatttttaagtgtctagtttagtggcattaaatacattcacaatgttgtgtagtcatactgtcatccatctccagaactgtatatccactaaatascccctccctattccccgctccttccaactcctgataactcttgttctactttctgtctaggtatctca

SEQ ID NO: 553426 - DNA, 594 bp, Homo sapiens
tcacactgtttcaatgtattgatacagaacctatgcctttctggattgtctgccatggtcctttaaacagagctaccttcccagcatgcccagaagttggccaggacttcctccaacctaacaattcagcccctgcatccctacttagcttgtggcaggccaccagttgcagattctttctccttgaagaaactcttcggaccctactttttagctttacaaacacaactctatgactcctttggtttcatcccacccacttgcctctcacctcagtcctagaagtttccatacctgctgttgcacatctctgtcacctcccacaaaaacatgcatacacacgtacacagacaaacaccccaactatcccacctgcaccaggttgctccaacaagatgccagctatgactggttatctggaacactcaaatgattaatcttgataacagcatcatatacaggaccccatggacataaattactagttgatctttcctgactacccacagcaatatttgraaagctcagtgaaattagacatcacctggacaacattattgtgtgtttggatttggatgttcataatcaaaagaa

SEQ ID NO: 553427 - DNA, 574 bp, Homo sapiens
ttgttggacttggaaaaactatggaagtcagcttgtatcaaagaaggcctgtgattctcagccgttaaatttcaaatggcgttagtaaaaggaaacacgttgattttggcatagggtgcatcacgactgcctgggacactagttggctcattttgaaaatcacagttgttgaattatattttggtaacttcattagtttgttgtattggtgcacacatgcaattcaggtatggttgctgattgtctcagtatgggacaggtctttattttattttttaaatttttttaaytttttatttttttgagatggagtcttgctctgttgcccaggctggagtgcagtggcatgatctcggctcactgcaaactccacctcccaagttcaagcgattctcctgcctcagcctcccgagtagctgggattacaggtgcccaccaccacacccagctaatttttgtatttttagtagagatggggtttcaccatattggccagactggtctcgaactcctgacctcaggtgatccacccgcctcagcctcccagagtgctgggattataggcgtgagccac

SEQ ID NO: 553428 - DNA, 596 bp, Homo sapiens
ttagaaacttcagggttcacagacccagtgaaatctatctacaattaatggaactcagattaagagcacttaacctaaagagggttatacaccttattgcactgatttttaatacaaatagtgcagttcttgccttactctgttggacaaaataagaggtgtgcaaactatggtcctcaagtcatgtcatgctgccatctatttttataaataaagttttattgagacacaatcctgcctgtccatttatatattatctctggctgtttttgtgctacaactgcatcgttagtagctgcaacaaagaccatatgcccaaagcctgcaataattattatgtggccttttacagaaagcagcttgccacccactggcctaaatgtgtggtataaatatagagaatagttcacattcttcaagaagctaaaactgtaagtttaacatgaactaatataaccaagtatctacaaaacaagttattgttattttatacaaataaaaaactaagaataatagtatgatggtacctgtgtacaagggacctccaaaggacattagactgttttrgatatcacattttaatagagttattaaca

SEQ ID NO: 553429 - DNA, 1233 bp, Homo sapiens
tgtttttgcaggaaaaaaaatatatataatacatataaaatttatacattatataatttacatatttatacaatatgtttgttggggagggtgaagaaacttggcactaagattcagcattcttttcttcatatgcttatagtaagaaacatactgctcatggccagagctgtagagctcaccactctcctgtccctgtctaccctttcttgggtcaggggcaagtgctaccgcctcatgctattacattactccctcatgctattacattctctttcaagggcctacaaatgtccttggccactggaccaggaatccagtgggggttccagatagactctccagatgtagaacgaataattgactattaatctgctggccacactcaccaggaaggacaaagaggcactaattcaacctccaaccacactggcaatggagcatgtatctcagtgtctcatctcactttggatggaccatggtccctgactctcatcctccttatcagcacctgggtgtttttttaatatgttccttaaacataaacaaaccaacaaaaaatctcattctgcaaataacacctgaatattgtctttcactcagaagagtgcctattgaaattaataaaagaagatttgcagctttcgttttctgttttccaagtgaatggctttatgtctagttgtttgggatggtggatgaaggatcagggaaggaggttgtagaatgggaaatgggggagagatggatgttaccgtataatgaaggaagataagcacagaaagggggaagtattctattaatacttcaaaataaattacarcacaaagcaagctatatgtatatatactcaagagtttaaacagcattggtgagtcaaattaaagggcaacagtttctcagaactctgtctccccaggtttttccccaaaggtaagttgttcaacctcttcaatctccagctcatcacctccagggccaggtgtaggttttgtggagcttgaagggtattcactctatgagagtcttaaaggaacataattcaaatgacagtttgtgtgtgtgtgtgtgtgtgtgtgtgtgtgtgtgtgtgtgtgtgtgtgtatttccaggccttggaaggggcctggacaagtaaggacccctgaagcttaagtttcattagtttcgtggtttagggtttcataagtttcatagttttgaggattaattacagcattaatcctgctttgc

SEQ ID NO: 553430 - DNA, 680 bp, Homo sapiens
atattccaacaaatatctaggcacatttgttctcatcctgttctcatccacatttgttctaatcccctcatcctgaaggatggctggacagggtctggaatagctagagctccttggcagtctcatttggacaagagcagcttcatctgcttgccctagtgtgttgtgacaaatttcataattttctctgtgtaccatgatgtgaaaaaggttggaaagtactgtcctagaaaatacaaagcagcactagcattactacaatgctgagtacacaggaagtgcttaggaaataaggaaatatgatttttcttccctataaagcctcattctattgttcttccctaaaccacaggaggtattagatatatatggctgaattcttcatcaccttcacactcagaacrgcatggctcaagagcactttggttagaagatggaactcttaagctctatactgttgctagcatctaagcaaactctagtgaaaccccaactgactcaatgagactgctcctttaaaagaatctccagtgaggcgtctgaaacaactagcaggtggtagtgataagcagcaactaactttaacaacttacggcatcagagctacccgagtttcagtctgtccctgggggaagggcactccattattttttcatagttgataaaatctgattactttc

SEQ ID NO: 553431 - DNA, 680 bp, Homo sapiens
atattccaacaaatatctaggcacatttgttctcatcctgttctcatccacatttgttctaatcccctcatcctgaaggatggctggacagggtctggaatagctagagctccttggcagtctcatttggacaagagcagcttcatctgcttgccctagtgtgttgtgacaaatttcataattttctctgtgtaccatgatgtgaaaaaggttggaaagtactgtcctagaaaatacaaagcagcactagcattactacaatgctgagtacacaggaagtgcttaggaaataaggaaatatgatttttcttccctataaagcctcattctattgttcttccctaaaccacaggaggtattagatatatatggctgaattcttcatcaccttcacactcagaacagcatggctcaagagcactttggttagaagatggaactcttaagctctatactgttgctagcawctaagcaaactctagtgaaaccccaactgactcaatgagactgctcctttaaaagaatctccagtgaggcgtctgaaacaactagcaggtggtagtgataagcagcaactaactttaacaacttacggcatcagagctacccgagtttcagtctgtccctgggggaagggcactccattattttttcatagttgataaaatctgattactttc

SEQ ID NO: 553432 - DNA, 700 bp, Homo sapiens
gacagagtgagactccatctcaaaaaaaaaaaaaaaaaaaagatgttaatcagcgtacaatccaagggagataccagggaatggagttgttgtgttagatatggttagacaatctccataagaaaacaacccaattgccactaaaatcgttggcctagttattgggggagaggtgaaggaaagactatttagttaatctagagacttatgaggatctgaaagttgagggtatttttaggaaaggtcacccctagcatggggaaagagtgctcttggctggggtactactctaytgagatgctgtgggcggtagatacccgatatggagaagtgatggcagaacctcttagtctggcaaggggaattttcaagcctcagtgttagttggctgagtgttgaatgctctgacaaagctagcagtggggagggtttataaccacagggatgttctgaatttttctctgttgtatcagagggtgagagaaaagatacttctgaaccaggactaaagaaactcttatagaaggcagaggaaacaggagctagagatgcgaacagcatgaatcaggtctcctgtataacaggtgagttttagtgctgttccaggataagactttggggttttcccagctgccaaacccagggtggtcttttagattcttctactttttgaaactaacatgaaaaatggaggaggaga

SEQ ID NO: 553433 - DNA, 565 bp, Homo sapiens
gtctgtcttatattaactcaatactatgtgaccctatgaagtccaacttaraaaatgaaaatgtggctgggcgcggtggctcacgcctgtaatcccagcactttgggaggccaaggtgggtggatcacaaggtcaagagatcgagaccatcctgaccaacatggtgaaaccacatctctactaaagacaaaattagccaggcgtggtggtgggcgcctgtaatcccagctactcaggaggctgaggcaggagaatcgcttgaacccgggaggtggaggttgcaatgagctgagatcgtgccactgcattccagcctggcgacagagggagcctccgtctcaaaaaaaatagaaaatgagaatgcatttcccacagctagattttaactttgaaaaagtaaaaaataacttgctaatactgtttattgacaaagacaataacactgaagagagttatggttttccaaattactttcctagcatcaattctctccctcttcctctttaacagaatctctccccaatacaaccatatacctcagtagaagccaacaccattccagatt

SEQ ID NO: 553434 - DNA, 1171 bp, Homo sapiens
ttttttttttttggtagagacagggtttccctgtgttgcccaggctggtcttgaactcctgggatcaagcgatcctcccacctcagtcccctagagtgttgggattacaggcttaagccactgtgcctggtcctttgggccttttaaagagactttattggttgtccacgattgaaacatggacaaccatatcaaaatgttattggacaaaaagggtctgatcaaaacccagcaaagcctgtctgtttagattcttattggcctctctctgcggcattccttcctccagggtatgagtcaggaccttctctggaatgagggtcttatgacccacaatcagattagagttctactctgggaaggtgagaggagagcaggagaaggtcagaaagagactgtttcctgaagcctatttctgagtgccccagcattataacaaacactgtaacaatggctatggggcttatgagccaaaaactggatgaaaacctgcacacacacacacacacacacmcacacacacacacacacacagtaatatcacaactagtaaataagtcgaccatagtaatatgtagagccaaatagcctaccatttattgatttacagtattatacttgtcagatggtatgctatgcatgttaatatgttccttcgatgtctcatgacaaacctttagatagtacctcatattataataaagaaatgaaggtttaaagaaatcaattttaatttcatatggctcattaatggcaaaactggaactcaaatctaggtccatttaattccagtgtctaattttctcaatgtacaaatatatatatatatttttttgagacggagtcttgctctgttgcccaagctggagtgcagtggtgtgatctcggctcactacaacctctgcctcggttcaagtgattctcctgcctcagcctcctgagtagctgggcttacaggcgtgcgccacaacgcctggccaatttttgtatttttattagagacggggtttcaccatgttggccaggctggtctcaaattcctgatctcaggtgatcttcccacctcgacctcccaaagtgccgggattacaggagtgagctaccacacctggcctcaatgtacaaatattaatgcatggtcttactctggtttatcatagatgtgaataaa

SEQ ID NO: 553435 - DNA, 972 bp, Homo sapiens
acaggtcttctaatactaaagctattggggctttagtatgtttaatactaaagattcataccctgggactttagtcattacttctaccccttgtggtttggttaccaggtcatcaatgtcttgattcctatttgagcaaataaacctaccatccctagctaagggaggtttgctcaracatcccctgacacattctacctagcttgaaactcttcagtggttgtctactgctattaagataaaaaccaaaatttccagggtagaccacaagactctatgatctggtccctacctactttactatatttatttcacatgactctccaactgccctattccaactacactggtcttaatttcaattgcataaaaaccatattccatttcttaatcattgacgttgggataactggatagctagatgaaaaaatgaaaaattgcatgtgttcctcataatatttggaacttataccacagaaaaaagaattaatatataaaggactgatataaagagcttctaaaagagctaaaaatccttttgaaaaatagacaagaactaaaaacagatgagtcacagaaaaagaaagtcaaatggtcctttaccatgtaaacagatgccataataaaagagatgcaaatttatattataatgtaaattttttgcatattagttacaaatccaaatgtttgacaacgtactctattgaaacggctgtggataaatacacaccctcatatatttcagcccagcatgcaaaatgatacaacccctatagaggagaatttgccaatatctagcacaattaggtatggatttgtgcttgacccaataattctactcccaggaatctatcccaaagaaacaccagcaaaaacacaaaaagttgtgtgcacagggatattaatggcagtactctttgacataacgaaaaggctaggaacaatgcatatgactaccataaaaagattggt

SEQ ID NO: 553436 - DNA, 1924 bp, Homo sapiens
tttattttgcctcaatactcctgaggtgatttgacaagcccaaatgatacctgaaaatacaatggcttacatataaaagagaaattactaccttagagaactacaatcttttactcagggcggtaaacaaacttgccctttgctctgaagagagaaaagtactgttatctttcaagactgtttgctatacaaatactcttgataagattgccagaaacaagaggcagtgaatgcctctctcctaggaggtgcagaaatgcaagaagcctggagaatcatttcacaaccaaagtatgtcaaactaagataattttctttttctgatgttcactgtatttcagaattcttataagaatatactaattttatcatgtgataacatttcttctggtacacttgcacataagaaagctgtatagatgaaaagatgttgcaattggatgaatctgttgcacacagggtccagatagtttaatttatgaaaaccttaagggaagtcttaggcaatactcttgaacaagttatcaccaataattgccgtccttcttgatatgttaatttcaagtacttttttctctgacctatgtcctactcttttataaaatatattttagcacccccctccaaaaattgtataagttcgtttgaggtttacaatctacttatcccattactttttcaatatgtttcaacccatcatgcctttatcatctatgggcacgatttatattctatgatcaataattaggataattctctacaactagtggctgattgaattgctgctgtagtcttaatgtgtgtctccccaaaattcataagttggaacttaatctgcagtgcaacagtattaaaacgtggtgactttgggaagtgattatgatataagaactctgccctcataaatgggatgagtgcccttataaaagagacsccagggagcttttttgcctgttccgccatgcaaggaaacatagaaggcactgtctataagaaacaggccctcaccagacaccaaatctgctggcaccttgatcttggatttcccatcttctagaactgtgagcaataaatttctgtagttataaattacacagggtaaggtattttgttatagcagtctgaataaaccaagaaaatttcatgtaaccattgtgggatcagagaaaaagcaaccataatccaagggcttctattttaaattcatggccaaaaaccacaaatgttcaaataatatttagaaaatgtttagtatcatggcccatcataataaagcgactatccaacgagctgcatattttacaactatacctatgcagatgaatgggactgaaacacacacccacattcacacaaacacacattcatgagatacatgtactcagacacaccagggctgactttttgcctttcctttactgtaaatctcaaatgtgtactaaaactgacaaatcattccattatattttctcggaatattttctttcccactcattctctcagagcattatgacacacatttttccctctgtacaaacctccaacaatctcctaatttccaggtgattatattaactcatatttaactggaaaataaaacaagattaatctgactctaggaggacaagacaactatccagagatttgcagtgccacctaatggatagtccagagggctgatctagagttaagggagagaagttagaggaaaaaaaagttattcccagatgattttgagctacttagtgaaatactgggagggtgaagctgggcaactatgtttacatgctcttatagataaaaaacaaccagatttgagtcactgttgggtttgaagctgtatatgacacttgtaatagtgttaaattctcaatgtgacatgagaagagtttttaataaatctaaataggtgggcatatgtaga

SEQ ID NO: 553437 - DNA, 908 bp, Homo sapiens
aaggcttagaaaagtcaatattgtttttctatccttttctcacataatttcctttattgaagcttcccccaaagtttcctctttcttcagcttaaaaatttgaagagcttcctatttctgaatggatcctaaaaggctgatggcaagtttttctggctgtggtctttgatttgtaactaaatattcatttatacaatactcattgagtcacttgttaagtatttattgaacacctgttatgtgccatgaactgacagaagtgaagggaatatagtgtttaaaaaatcagatttagtgcctgtactctcaaagcttatacgttagagaaacagacccaggttctataggtaacaaagcataacaagagacaatgagggagaagacacaagaactaagggaatataaaaagggagttgattcaggctgtgggtggtgatacatgcctacaatcccaggaccgtgggaggcagaggcaggaggatctcttgatgccagaaatttgagaccagccttgggaaacataatgagatcctgtccttaaaataattaaaataaataaagaaccaggcacggtagcacactctggtagccccagctacactgaaggctgaagtgggaagatcagtcaagccccggagtttgaggttactgtgagttatgattgtaccacaacacactagcctgagcaacagagcgtgacaaaaagagagagatttgattgtagggtaagggaagtcattcctgaagcagtaatatttatagcaagactattagaagaaacagcagtaggctagacagatattgtcccaaaccacatccatggctccacactccaaaaacattgccaactgttgttgcatyacgaaaaataaattaaaattgggcattctggaaagtcacttttgtcc

SEQ ID NO: 553438 - DNA, 1397 bp, Homo sapiens
cacacattatgtatttatatgtatataatatatataaagatagatacatttatatgcaaaaacatatttctytgaaactgtgctccagtcataagaaaaccaaactgagatgttggtctggttcaagaaaaacaggatggagccttttgtgaaggtaaagaatattcttttgtgtttaacatgcaaatggctcagcttccaagttgcataggtagcccagcctgagtctacaggactctacctgtagagtagagtcctactctacaagtcttggagagtatcagatctgtcaagttttgatttttatgcccttaattataatctgtaggtaactcatatggctcattggatatgaattttggaaatctatgcttccagattactttgcttaattcttgcgtcctcatactttttctgtgaagggatatatacctaagacactaggaaaagcacatccgaggtaagtaacactgatgaatatttagtacatggttaataacctagtttgtgaggtttagaaatagtaaattatattttatatataatattctatataaaatatatttttatatataaagtatacatattacatatataaaatatagtatgcaatgttagtacatactaagtattctctaaattatttttatttctaataaagtgtacatttatctgtggttctgctctcttaaatttattttttaaaatttgaacattttcatctgaatttttgagtttgctaacaagccaaaaatcatttctatttgattaatccaacaaataatttactcttctttatcttaaatttgaagagaattaagaaataaaagaggaggaacatctatttcatgttctgtttagtagtaacagttgcaaatatgtaagcattttattcttggattcactaatttccctgctcaacaaagatgggtcagtatgttctgttttttttctgggaaagtctgtagaaataatttggttgtttttaagcacctgcatgctttttggaggcagtggtggtggaaagagtatgatgtaaaaggagctgtttctttacctaccttacaaatatctgtgcctgaaacaagcctcttctctgagcataatcagtctctaataaaactgtattcctaactacttgagctgataaatagtgaggttgttttaaacaagtcaagtttattttatgtcaattttctatttgccctgtgtaagatatatttaattactttactccatctctgtgttcaaattaatcagattctgccacatattggtgctcaaaatagaataattctttaatcaactgtgttatccatgctatggtagagtagaatagaaaatctactcgtggcatattgaagatgcatgcattttattttctattgtaatttaaa

SEQ ID NO: 553439 - DNA, 1397 bp, Homo sapiens
cacacattatgtatttatatgtatataatatatataaagatagatacatttatatgcaaaaacatatttctctgaaactgtgctccagtcataagaaaaccaaactgagatgttggtctggttcaagaaaaacaggatggagccttttgtgaaggtaaagaatattyttttgtgtttaacatgcaaatggctcagcttccaagttgcataggtagcccagcctgagtctacaggactctacctgtagagtagagtcctactctacaagtcttggagagtatcagatctgtcaagttttgatttttatgcccttaattataatctgtaggtaactcatatggctcattggatatgaattttggaaatctatgcttccagattactttgcttaattcttgcgtcctcatactttttctgtgaagggatatatacctaagacactaggaaaagcacatccgaggtaagtaacactgatgaatatttagtacatggttaataacctagtttgtgaggtttagaaatagtaaattatattttatatataatattctatataaaatatatttttatatataaagtatacatattacatatataaaatatagtatgcaatgttagtacatactaagtattctctaaattatttttatttctaataaagtgtacatttatctgtggttctgctctcttaaatttattttttaaaatttgaacattttcatctgaatttttgagtttgctaacaagccaaaaatcatttctatttgattaatccaacaaataatttactcttctttatcttaaatttgaagagaattaagaaataaaagaggaggaacatctatttcatgttctgtttagtagtaacagttgcaaatatgtaagcattttattcttggattcactaatttccctgctcaacaaagatgggtcagtatgttctgttttttttctgggaaagtctgtagaaataatttggttgtttttaagcacctgcatgctttttggaggcagtggtggtggaaagagtatgatgtaaaaggagctgtttctttacctaccttacaaatatctgtgcctgaaacaagcctcttctctgagcataatcagtctctaataaaactgtattcctaactacttgagctgataaatagtgaggttgttttaaacaagtcaagtttattttatgtcaattttctatttgccctgtgtaagatatatttaattactttactccatctctgtgttcaaattaatcagattctgccacatattggtgctcaaaatagaataattctttaatcaactgtgttatccatgctatggtagagtagaatagaaaatctactcgtggcatattgaagatgcatgcattttattttctattgtaatttaaa

SEQ ID NO: 553440 - DNA, 444 bp, Homo sapiens
ggtcaggctggtctcgaactcccgacctcaagtgatctgcccgccttggccttccaaagggctaggattacaggcgtgagccaccatgcagggcaaatttttctatttttttagagacagagtctccctctgttgcccaggttggagtgcagtggtgttaccatagctyactgcagacttggcctcctgggcttaggcaatcttcctgcctcagtctctcaaaggagctggaagtgcaggcgccgtggctggctaatttttgtattttttgtttgagatggggtctcaaactcctgggctcaagagatcctcctgccttggcctcctgaatagctgagaccacaggtatgtgccaccatacctggcttaaaatttgttttaagttttcctagaggctcacctaaccagggtgagcagtagcccaggcccaacaaatacaagaca

SEQ ID NO: 553441 - DNA, 523 bp, Homo sapiens
gaagtatttaggcatgaaggaccataccggtaactacagcacatgcctcagggggaaggtagacacagtccctcctcagtcttcagtcagtgtctgtgactttgccagctttgcagtgagccgagatcgcaccattgcactctagcctaggcaacaagagtaaacctctatctcaaaaaaaaaaaaagaaagctgggcgcggtggctcacacctataatcccagcactttgggaggccgaggtgggtggatcacctgaggtctggagttygagaccagcctgaccaacatggagaaaccccatctctactaaaaatacaaaattagctaggcgtggtggcgtatgcctgtaatcccagctactcaggaggctgaggcaggagaatggcttgaacccgggaggtggagattgctgtgagccgagatcgcaccattgcactccagcctggacaacaagagtgaaactccgtctcaaaaaaaaaaaaaaaaaaagctgggcatggtgatatgtgcctgtggtccta

SEQ ID NO: 553442 - DNA, 546 bp, Homo sapiens
cagctgggcttggtggcatgtgcttgtagtcccagctactctagtgtagagtggctgaggcagggagatctcttgagtttagtagtttgaagctgcagtgagctaagatcacaccactgcactccagcctgtgtgacagagtaagaccctgtctgtaaaataaataaataaataaataaactcttgttaaaagaatagataatacaagctactaagagataaaatgtgactatttccacccaaaagctatcatcatgtttgatagagacccaaattgaaatagcctcagaaattttaaagaggaagagcagtttttcctctctaccattagttaatattacagaatttttaataaaaaaggaaatatagacacaagttaaaattaacaaataataattctcatctacatatggtatttctgtaaaataaaataaatggatactgcttcacacaacaggaggttcagtaattagtgagattcaacaaaacatctggcatttaaygcaattcatagacacaaaaacaccaagttatcacaataacaac

SEQ ID NO: 553443 - DNA, 996 bp, Homo sapiens
gagatattctatgtaggacttcagaaagcaggtttttgtcagttttttttgtacaaccctttctgattatgtatttttgcttctcttcataaaatgtaattaaaagaatttttttaattttaaagaaattaccttcagtatatctgtatgtttttctacatgtttttattaaactatctattacatgctgaataatacccttgaataaatcagtattaaaggagtcaggaatatgaacctaattttttctaaacatgcaaaagcaaagactgtttgtttctctaggtttataagtcaaagattaggcagtttcactgtttaatttggcaagttgaacatctggctttaggaaacttcaatatatctactgaagaaaattagtcaaggatgctaggattactatttcatctagttactataatagcatcttgctgccttcaaaaaatgcattactgtgtcctcaggaatacatatctggacagatgtgggcagaatgtctcattgcggaagctatagacctaattgagctgaaggatttccaactttcatttacccttgttcacatatgaaaagaagttatgttcccccaaatractgatatttgaggattttattatcttcatttgggaagaacataacattattttccctccacaatgtagtttaaagtaaacagcaaaagccatttgaatgaaaacatcacagagctcttctatatttttggttttagtggacagattcaattttatattatgatcttccttgcctttcagaaccacattattcccaagtattagtggttgaaaagaatccagctttcttgcttcatttttgatagtttcccaaatgtaatctcagaaatgttttcactttatagatgacaaaatagaaatctaaactgattcattgattcattcaacaaatacttatttagtgcttaatgtttgccaagtactgccactaggtctatagcagtgagaataaaacatccatctg

SEQ ID NO: 553444 - DNA, 512 bp, Homo sapiens
actagcaattacaaagtaaaaagcctttttaaaataaatcacataggcattttcatgtcagtagaagcctcttgatggcaacaaagctttgtaattcacaggtgcccgtttttatcccacattttagcatggttatcagaaatatttctaattttctgttaagtacaaaaactattatataatcartttgttacctgaagggtggattatggctttgcatttttgtgaagttttaagctcatgcttcaaatgaaatatacatgcttgatgtaagtaatactcagttgcatttgttgtttaccatttcagaaaactgcaaaaaccacagtgttttaaatctgccatggaaagtgaaggcaccttgccagagattcaagatgctgtaaatgtaggagcagcaagaatgatatgtctaaaaatcctggacagattcctgagtatctcatgactgatagggtcagtaggtggctttgaaactctacaagctactgcaggaagtgttcaatttagat

SEQ ID NO: 553445 - DNA, 548 bp, Homo sapiens
tgtaaaattgtcaccaatagttgatgactcatgaacaaggtgtggaaatttatcaaagtatttatccaaataatgctaaatgacctggatcctgaaaacacactcaacataacatattttgaaaaagagccaatatttaatatgaatctgctatgactttggaggaccactgcacagaattatctcctaggacagagtacaaaattgctccccaaaatgccaagattattcggtcactactcaaaaagaatgtaaaactttattctgagcattttgattgaataaaatacgaaaatgtgaacacttttatgttttttcaataagagagatgcagaaagaaaaaggtatttagycttgtgtcctatcctttctttttaggatagtagattaaatatttgagacgggtagaagggagagtcattgttttaatacatttgtttcacagtgacaagatttgtcttgagactggaaattagggagaaaatattactagtggatcttgtaaaagactaagcgtcagcactaaggacaaaggggaatcaaaagta

SEQ ID NO: 553446 - DNA, 548 bp, Homo sapiens
tgtaaaattgtcaccaatagttgatgactcatgaacaaggtgtggaaatttatcaaagtatttatccaaataatgctaaatgacctggatcctgaaaacacactcaacataacatattttgaaaaagagccaatatttaatatgaatctgctatgactttggaggaccactgcacagaattatctcctaggacagagtacaaaattgctccccaaaatgccaagattattcggtcactactcaaaaagaatgtaaaactttattctgagcattttgattgaataaaatacgaaaatgtgaacacttttatgttttttcaataagagagatgcagaaagaaaaaggtatttagtcttgtgtcctatcctttctttttaggatagtagattaaatatttgagacgggtagaagggagagtcatygttttaatacatttgtttcacagtgacaagatttgtcttgagactggaaattagggagaaaatattactagtggatcttgtaaaagactaagcgtcagcactaaggacaaaggggaatcaaaagta

SEQ ID NO: 553447 - DNA, 1041 bp, Homo sapiens
ttttaaagcttagaatatttttaaggccagataaatgtgtttcttaattcactttttcaaaccagctcccttctacattcaacatttctgtcaagagtttgcaaactctaaacttggagatggtgtgtaaatcaaagctttaaatgatcagaagcctaattgattatgctgagttctgatttgggttctgcatttagcatgctctgtctcagtcatctgacaggctattctgtaaaaagtaggggtcttagtgatcgcactatggtctaagtggtcacactatgtctttgataatgaatcaagttttagaagtaatagtgaagcattcctcaatcggtgaaccagagtggtatagttcaagggtcaacaaactatgcccatgggtcaaatccagcccattgtctgttttttttttgtaaataaagtattactggaacacaagcatgcccatatgcttgcatgctatgactgctttccagctataatagcaaagttgacttgttacaacaaagccagaaatatttactatatgggactttagagaaaagtttgccatcaccyatgctgtaggaaacaagggaaggaacaaggatagcagtcagaaaacacatgtcctcagttctggacttgccacctactacctgagtaatactagaaaagccacttgacccatctaattgtgtttccttctctctataacacacttctttggccagtttgttagttaattggccgataacacttgttttctatttgtaaggactgtattaaagctgtagatgtggtttgtaaatggtgataaatgccttccttagagtggtgtgataaggacctgagacaatctgttttgtaaagatgcctgtcatgcagtatggacccccttctgtcccagtctgacgtggtttctgtttccttccccagaatactctggagcagtgcaatgtgtgttccaagcccatcatggagcggattctccgagccaccgggaaggcctatcatcctcactgtttcacctgcgtgatgtgccaccgcagcctggat

SEQ ID NO: 553448 - DNA, 1973 bp, Homo sapiens
cacactgtatgtctaaacatacacttagttttaaaatggaaacacgacatacaaacatacaaaaaaagcagtttgcttttttcacttaataataccctataatcatttttccagctcagcacatatagatctaccttattttttaaaaatagataattcctgtttcattcttttattttttatttttttttattttgagacagagtttcactcttgttgcccaggctggagtgtagtggtgcaatcttggctcactgcaacctctgcctcataggttcaagtgattcttgtgcctcggcctcccaagtagctgggactacaggcaggtgccaccacaggcagctaatttttttttttttttttgagatggagtcttgctctgtcacccacgctggagtgcagtggcgcgatctcggcccactgcaacctctgcctcccgggttcaagcgattctcctgcctcagcctcccgagtagctgggattacaggctcccgccaccgcgcccagctaacggggtttcaccatattgcccaggctgatctcgaactccctacctcaggtgatccacctgcctcggcctcccaaagtgctggaattacaagcatgagccaccatgcctggcctaattttgtattttattagagatggggtttcaccatgttgtccaggctggtctcaaactcttgacctcaggtgatctgcccacttcatcattcttttaaatgattgtgcagtcttttgttttatgtatgtactgcaatttgcttgatcattgttcccttggtggtcattcactctgttttctggtttggactattttaaacaatgttgcattgcaagtttacacttaatttttggtcccctcaacttcatgaaaagtggccaaaacatgttacctactcatctgcccagtgctttggttcctgcctataaattggccacaggggagaaaggctaaaggcaacagctcaccgccgctgagacgaaagcccagagcatgctgggggccccacccgcagccatgcatctttgttgttttttttttgaaacggagtctccctctgtcacccaggctggartgcagtggcgcgatctcggctctctgcaagctctgcctcccgggttcccgccattctcttgtctcagcctcccgagtagctgggactacaggcgcccactaccacgctcggctaattttttgtatttttagtagagacggggtttcaccgtgttagccaggatggtcttgatctcctgacctcgtgatccgcctgcctcggcctcccaaagtgctgggattacaggcgtgagccactgcgcctggcgcatctttgtttaaaaaaatttttttttgagatggactctcgctctgtctcccaggctggagtgcagtggcacgatctgggcccattgcaacctccacctcctgggttcaagtgattctcctgcctcagcctcccgagtagctgggattacagtgcatgcgccaccacacctggccaatttttgtatttttagtagctatggggtttcgccatgttggccaggctggtcttgaactcctgacctcaggtgattcgcccacctcggcctcccgagatgctgggattgtaggcgtgagccatcgtgactggccccacactagccctttttcagttttccaacttgtcaatgtcagtaccctcatacaatgctagtaggagtgcaattggtcaaaccactttggaaaactggtgtgaaagttgtcagaatcaaaatggagtcatctgtgttacaaaacaaaaaccaaaatcaccttgacgagcagagccagggaagctgatgaagggaggattctcatgcacgaatgccagataacaaaaactatcacaaaagcctgcaaaacccacaaccttgcacaaaggccatcacaatcttacattaaaaatactcgttcgaagacatctgcccagcaactgcctatctaaacttg

SEQ ID NO: 553449 - DNA, 1973 bp, Homo sapiens
cacactgtatgtctaaacatacacttagttttaaaatggaaacacgacatacaaacatacaaaaaaagcagtttgcttttttcacttaataataccctataatcatttttccagctcagcacatatagatctaccttattttttaaaaatagataattcctgtttcattcttttattttttatttttttttattttgagacagagtttcactcttgttgcccaggctggagtgtagtggtgcaatcttggctcactgcaacctctgcctcataggttcaagtgattcttgtgcctcggcctcccaagtagctgggactacaggcaggtgccaccacaggcagctaatttttttttttttttttgagatggagtcttgctctgtcacccacgctggagtgcagtggcgcgatctcggcccactgcaacctctgcctcccgggttcaagcgattctcctgcctcagcctcccgagtagctgggattacaggctcccgccaccgcgcccagctaacggggtttcaccatattgcccaggctgatctcgaactccctacctcaggtgatccacctgcctcggcctcccaaagtgctggaattacaagcatgagccaccatgcctggcctaattttgtattttattagagatggggtttcaccatgttgtccaggctggtctcaaactcttgacctcaggtgatctgcccacttcatcattcttttaaatgattgtgcagtcttttgttttatgtatgtactgcaatttgcttgatcattgttcccttggtggtcattcactctgttttctggtttggactattttaaacaatgttgcattgcaagtttacacttaatttttggtcccctcaacttcatgaaaagtggccaaaacatgttacctactcatctgcccagtgctttggttcctgcctataaattggccacaggggagaaaggctaaaggcaacagctcaccgccgctgagacgaaagcccagagcatgctgggggccccacccgcagccatgcatctttgttgttttttttttgaaacggagtctccctctgtcacccaggctggagtgcagtggcgcgatctcggctcwctgcaagctctgcctcccgggttcccgccattctcttgtctcagcctcccgagtagctgggactacaggcgcccactaccacgctcggctaattttttgtatttttagtagagacggggtttcaccgtgttagccaggatggtcttgatctcctgacctcgtgatccgcctgcctcggcctcccaaagtgctgggattacaggcgtgagccactgcgcctggcgcatctttgtttaaaaaaatttttttttgagatggactctcgctctgtctcccaggctggagtgcagtggcacgatctgggcccattgcaacctccacctcctgggttcaagtgattctcctgcctcagcctcccgagtagctgggattacagtgcatgcgccaccacacctggccaatttttgtatttttagtagctatggggtttcgccatgttggccaggctggtcttgaactcctgacctcaggtgattcgcccacctcggcctcccgagatgctgggattgtaggcgtgagccatcgtgactggccccacactagccctttttcagttttccaacttgtcaatgtcagtaccctcatacaatgctagtaggagtgcaattggtcaaaccactttggaaaactggtgtgaaagttgtcagaatcaaaatggagtcatctgtgttacaaaacaaaaaccaaaatcaccttgacgagcagagccagggaagctgatgaagggaggattctcatgcacgaatgccagataacaaaaactatcacaaaagcctgcaaaacccacaaccttgcacaaaggccatcacaatcttacattaaaaatactcgttcgaagacatctgcccagcaactgcctatctaaacttg

SEQ ID NO: 553450 - DNA, 2074 bp, Homo sapiens
acatccaaatccctcattccatttcccctgtcctaggaaatggtaccctcatctacccagtcatccaaactccaaaatgggcatgtctttacgtttctgagtatctcctcaacatcctccctccaacattttaccctgggtcatgaaatctggggtcaaactcagtccttttttcagggccctgcccatctaacccagccttcaacctccaggggcttggccctgggtctacccttggctgtcaactagctgggctcttgctccaaatcagaaaattatcctgaaccacaatgattyctttcacacacacacacacacacacacacacacacacacacatatatatatatatatatatatatatttttttttttttttgagacagagcctcactgtgtttcccaggctggagtgcagagtgcaatggcacgatctcgactcactgcaacccccgccttccagattcaagtgattctcctgcctcagcctcccaagtagctgggattacaggagtgcaccaccatgccaggctaatttttgtatttttagcggagacaggggttcaccatgttggccaggctggtctcgaactcctgatgtcaagtgttctacctgcttcggcctcccaaagtgctgggattacaggcgtgagccactgcacccaacctgattcttttcctttcatatgattgtaagtatcatcactgcccagagaattttgctactgtgtcctgctcattagatcaaatgttctttggtactgaccttagtctagaagaagcatcattctagacactgtcaaatgaactcccttcaagggctagctctacagatatgtccgtccaagctttttttcctttcatattggctcccactgaagccccagtatgttcctcagccaagctagcttctcagagttttaaacaggctatattagtcaggataggacaggcagtcctgctgtaacaaagtttaacacaacaaaggcttaattcttgctcatgtcagaacctgaagtggatcagatagtagttgtcctacataacatcttttcagatggcaaattgaggatccaagatgccttcactttgcaattctattgtctggaatacttgttcccaaaattgccaaagcaggaaaagtgaaagcatggagaaggtttatcccctcttaactgcctcagaccagaattgacatggcacttctatatgcattccattgttaagaattagccacatgacccaactacctgccttggggctgggaagtatagaagacttggatgtttgatgagctctaataaatattatttctgatatggtttggctgtgtctccacccaaatctcatcttgaattgtagctctcataattctcatgtgttgtgggagggatctggtgggagataattgaatcatgggggcagtttctcccatcctgttcttttggtagtaaataagcctcacaagatctgacggttttataagaggaaaccccttttgcttggttctctcatttctctcttgcctgtcaccaagtaagacatgcctttcaccttctgccatgattgtgaggcctccccagccacatggcactgtgagtccattaaacctctttttctttataaattacccagtctcgggtatgtctttatcagcagcatgaaaacagactaatacaatttcataattacttcaagaagctaaatattatctccaggggcctgaaagagataaaaacaacttaggttgatctaagaatcatagttatctacatcataacagttggccaagtaaaacagaaggctgatttgaggatacctccatatgcaactcatgcttggaaactatttagaaggctaactgacatatagagagtctgcttcagtagatgttcctgataatgaaataatgccttgtttatatttagggtgagactgagtaattggtggctgtctgacaaaccagcagaaaccatacagacattctgaaaagttcattaaaaatacacatttaaatatacgaaaattacttgtgactcttttcccgcctgcaacataattaaataaaactttat

SEQ ID NO: 553451 - DNA, 612 bp, Homo sapiens
ctttaaaatgagtataatacctcataggattgtaataagaatacgatatctgcctatttatataagatttagatgtcacattgccttgctcataattattcctcaaaaacagcacagattcaccttaattataaacaatccaagttaaaagaataattaaaggaagcctaagaaaactttagctaattaccacccaatgactgcaattggaracttctaataaatggaaggtttttctggattacttttaaatgagaaaaatttcccaaataaaccaatctgaaaccaggcatgtaatttaaaaaacttattcaagatgtgtcttgagattgtaacaattctgttgtcatcttttatatctctgtggctgtccaaaataaattggttctcagaatgtgaaccttttagctaagatatcaattcatcagtgattgttatgtttaatgcatatatgaggcaggaaactaaactcttttttttttgtgttgatactgaaccattagtttgtgagcaaagcacattattagcactactcattgtccaagcaatttgactagataaggttttaaattatgctttacatactagaccacaaacataaggaattggtta

SEQ ID NO: 553452 - DNA, 612 bp, Homo sapiens
ctttaaaatgagtataatacctcataggattgtaataagaatacgatatctgcctatttatataagatttagatgtcacattgccttgctcataattattcctcaaaaacagcacagattcaccttaattataaacaatccaagttaaaagaataattaaaggaagcctaagaaaactttagctaattaccacccaatgactgcaattggaaacttctaataaatggaaggtttttctggattacttttaaatgagaaaaatttcccaaataaaccaatctgaaaccaggcatgtaatttaaaaaacttattcaagatgtgtcttgagattgtaacaattctgttgtcatcttttatatctctgtggctgtccaaaataaattggttctcagaatgtgaaccttttagctaagatatcaattcatcagtgattgttatgtttaatgcatrtatgaggcaggaaactaaactcttttttttttgtgttgatactgaaccattagtttgtgagcaaagcacattattagcactactcattgtccaagcaatttgactagataaggttttaaattatgctttacatactagaccacaaacataaggaattggtta

SEQ ID NO: 553453 - DNA, 1272 bp, Homo sapiens
  misc_feature 1125, 1132, 1133, 1141: n = A,T,C or G
caggcacctgccaccacaccagctaatttttgtattttcagtagagacggggtttcaccatgttggccaggctggtctcaaactcttgacctcaggtgatctgcccgccttggcctcccaaagtgctgggattacagatgtgagctaccgtgccgggctggttacttatttttaaagcatttctgatcatctactaaaaccgcagtgttgaagcttttccaggatttcaaatgttgtatttcagaatacagcaaggctcatctctcctgagccattaggaccaggtggtactttcaccaggtccctctaagcacccagtcatcaggggcaggcccccatggagagaacaggcttgtttcagggaggaattcccagaagctggagctccagacagaggtgagggacagtggtcagcgcaaggcacactggacagagctgacttcagtcctatctggtgggttcataactcatgaatcatgggaaactgaggggaaagcccaggggaaaattgaaataattttcaaaatggttcaagaccactttctaattgagggtagcaaaagatgcagcttctactgttgggaaggtttggcagggagctgtggaaagaggtgacagaaactaagtctcttgtttctctgcaggagtttctccaagaagcttcttcctagaagctcatcatccctactcactttggggtgaaaatagctttgcaaaacctgctcagatgagtcagcaggccagacctccagagcggtggatgtagtccacacgaaattgcctttagtgaactgagcattgatgttataccatttgattgcattgatttggtttataagaaccagcacatccctagctgactctacagtagtttttattgtagagatatattgaaggacatagtctactttctgtaacacataattcttttataaggggccagagtaagtcagtcaataaatatgtattgagcacttatgtgccagacactgkgctattccctttattgagaataaagcagtaaataaagaaatcacatgagtgaagctcacattattgaaggaaggtaagatttttttcttgagtccctatgtcaggcaaagctgtgaatctcttaagcgattntacaatnntcccttcnttctttttttttttttttttttaagacagggtctcactctgtcccccaggctggagtgcaggggtgagatcttggctcactggaccctctggctcccacctttaaggggttaaaccgattctcccacttca

SEQ ID NO: 553454 - DNA, 1328 bp, Homo sapiens
tttctcattataccatcagcagactgaggtctgtaacttgatacttatgcaaaagattactaaattggtagctattcttataaaatattcactttaggaaagaaggtgagaatgaggccactgacgtcatcttggcttggtttacttaagcctgggcaaagagggaaaagggcactggagatttgcataggtaagtatttagaaggcactattgtttttaaaggctacagaaatgttcaatgtgcttatcttcaactcctcccaaatagttcctccaaatgccccatccctcaggggttattgtgaatcacagtccaaaatagtttggctgtctcttttttcatttgcttctaatgtggtgttctctctcttcttggtatgagaggaaaacaatggacatctctcaaagatgttttcaaatgggtttcttaatctaacatactatctcataaatataccttttctttgtctatcatcattgccttaaccttgcattgcacttctttttccatttttgggggtgaggaaagagatggcacattaagcttaggccattaaggagagattaatgcaggactatttttgagggtgtgagcagccttagtggaaaccacccagggaaggtagagtacattaatctcataggtctctcattctcttatctcctactggtgcttcccattgaccacacccaattgaaagctcaaggggctccttgatgcaggtcaacctttggagcacagagcagggtggaaaagattgatgtgtgtatagaggtggacaaatagaggttattcagtgcatggattacttctggaaagctatcagtttcttcctttcctagcactcaatgggcagctttcttattctgtcagttggtgtcttcagcaatccaaaacaaaagcataatttttaaagtgaattgggaattcacattcaaagggaagggaaaataatccaggattctactgtatttttgcttcccatacatagtcttaaccaacttaagcaaaacataggaaagtgaatctgctcaaatatgtaatcttcccttgtagtcccaagtgcagtataaatgaatatggaatgatatgttgtaaattattccagccacgtgcaagtaattgagagctcatcatagtaaaatttttagtttttcttactataattctatttaatttagagtattcctcccttttctctatttttattccttctccaatcagttttttcaatctgtactttcttgtcttatgcgcttttaaatacawaccctactttttttccctgatgctgatgaaaccattattgcaattagctaagatacc

SEQ ID NO: 553455 - DNA, 542 bp, Homo sapiens
tcaacctcttaagagaaaaatggattgtactccctttgcctggaatgacagtgccaggttttgtagaaagatggaactgaatctaatcctaactctcttataaaatgggatttagaataataggcccaatacctgtaytgccgcttatggctgtcttgagaattaaatgaacacaagcactcagcatgctgcctggcatatattaagtagctcaaatattcttagttccatcttccctactacctaccatcaaatgttcatctacagatataagaggcctagctcaaatgtcattgcctctgtgttgttcttgctcctctgccgtgctctgtatgtctttcttataaggggtctcattccattatcaaccagtcacttgtgcatctgtattacactcacctttaggctgctcaggtgcaggaaacactttatctgtcctttgttcagcaactagcagtcaattacacattgtaagaattctaaagtgtgcaaaattaaaatgccttttggtgataaaacaagctccatataaaaacagtctc

SEQ ID NO: 553456 - DNA, 553 bp, Homo sapiens
acaaacagggcctctgttcttagagatcttagtgtctaagtcttaacaaaggagaaaataggtaaaagtatgctgcacctgaggaaccttaagtcatcgtcaatgacttaagaaagggcagagaaaaggaatatggaagagagaattgacgcagaatttttacttgtattataacactttgttatctaaattataatcttttgatattaagctaactaaactgatatgaacacatggcaaacccttcccccctcacctttctgtgtttacacttcctgatgctgccaaatcagttagagatcataacttcacataaccttaaaaaggtaaggacttttcttcatagctaagttcccttgctagaacctctaaacaaataaagtcatgtgccgcgtgacatttcagtcaacaacacaccacagatacagtggtggtcctataaattataataccatatttttactgtatctgttctatgtttagatmtatgtttagctacacaaataccattttgttacagttgcttatagtattcagtacagtaatgtgtggc

SEQ ID NO: 553457 - DNA, 1075 bp, Homo sapiens
tgaaagggtgactcctaggattttggactgaataaccatgtgaatggagaataaggacagatgaagttggaaggaagatagcttatatgccacaattaaaaagagcctggatattgtcctgaaggcaagaagaagattgaaagattctaaggacagaaatgatatggaggastaactgatctttgtggaacctctcatacttgaaattcaattagtcttttaaatgattccctgagccagaaaccatgattccatctctttccttcttcctctaccctgtataatgatttggtttttagttcaattacagccttgttatgaaatatcaagaaagttttggacagctaaattttacattttatggtcttccttaggcctaattcacagtggattacataagattagaaaacaaaaagctcataaaaatagttgttctcctttataacacttagcccaagggcaagatcaaaataaaactagatggtggatagagtactttgtgatagtggcattagaaataagaagaagcctattgattctagaggtaaaaatgcataggagttggcaaagagattgcatgaaatggattaaggagaatgcaaagtttaggttgattcctaggtttccggttgtatcatgatgctattcactaaaaaggagaatcctggagcagggggaaggtggaaaggtagcagggaaagaatgttgtatttagtttgaacatactgattttttaaattaataaacttacttttttagataaggtttaaattcacagaaaaattgagtggaaaatacagacagttcccatgtagttcctgtcccaacacgtgcacaatcttccccactgtggacatcacgtgccacaatggtacatttgttacaatcagtgaacctacattgacacatcattgtcacccaaagtccatggtttacgtgagggttcactcttggagttgtacattccatgggctttgacaaatgtatgataacatgtatccaccattacagaatcacacagaatagttttactgacctaaaaattctatgtgttctgcctattcatctctccctt

SEQ ID NO: 553458 - DNA, 579 bp, Homo sapiens
cgcctgtaccgaaaatgttgcattttctggcacaaagtcactgataagcacactgcctagcatatagcagacactcaaaaatgctggttgaatgaacaaggagccaactgacacctgttactccctataaaatctttaactttcttaagccaaaactcaagaaagatggttgtcacattaagaactctactaaatatcctctgaacgaacgaatccttcaaattctcaattatgctaaatggaaaaacataaacaaccgttgagagaaatgctgaaccagcggaaaaaacttcaaagccaagtttcaacattcccgtagagctagatacacccactgactgctgccagggtcaatttcccggcctcttccagagctcataagcacccccaaaaagcgcttaggaaaaaaaacccagcgcctactctaccctggtacgctcgactcctcgcacacgtaaaccyttaaggtggatgtcagtgcagccagcattgaacagacgcgaacacggggagacaaaaaaagcatctccccatattcacaagggtcaccacagacaaactctgaaaagaccaaattat

SEQ ID NO: 553459 - DNA, 236 bp, Homo sapiens
ttccaagtagctgggattacaggtatgtgccaccacgcccagctaatttttgaaaccgttatttaattttcatttgctattttgcaatttaacatcttttgtaacatgtactatcttttatgtttgttagcatttgggttcttttatctaaacytcaattactagtcacaaacagagtttgtgtttttaatggcagctgttttttaatggctacctcttgatggcaaaagacagaa

SEQ ID NO: 553460 - DNA, 557 bp, Homo sapiens
tgaggagagtagatgaggtatttgtataatttctatggatattagataacccactattagggaatstgtaagtttcttcttgctgctctcacaatttgccacacacttagtggcttaaaacaacacaagtttgttatctacactcctgaacgtcagaagcccaaaatgggtcttatgaaactaaaatcaaggtgtcagcaaaactgcattcattatttctggaggccctgggggaaaatccatattctcaccttttccagttagtagagaccatctgtactctttggcttgtggccctttcctccattttcagggccagcagggtagcatcttcaaatctgtatttctgatctctgctttctgttgtcacacctccttctctgactgtgccactcctgctttcttccatcttataaggacccttgtgattacactgggcatactcaaataatatagattaaccctcccatatcaagattcttaaccttatcacatctgcaaagtcgcttctgctgtgtaaggtaacatattcacaggcttcagaaattttgaggcag

SEQ ID NO: 553461 - DNA, 557 bp, Homo sapiens
tgaggagagtagatgaggtatttgtataatttctatggatattagataacccactattagggaatgtgtaagtttcttcttgctgctctcacaatttgccacacacttagtggcttaaaacaacacaagtttgttatctacactcctgaacgtcagaagcccaaaatgggtcttatgaaactaaaatcaaggtgtcagcaaaactgcattcattatttctggaggccctgggggaaaatccatattctcascttttccagttagtagagaccatctgtactctttggcttgtggccctttcctccattttcagggccagcagggtagcatcttcaaatctgtatttctgatctctgctttctgttgtcacacctccttctctgactgtgccactcctgctttcttccatcttataaggacccttgtgattacactgggcatactcaaataatatagattaaccctcccatatcaagattcttaaccttatcacatctgcaaagtcgcttctgctgtgtaaggtaacatattcacaggcttcagaaattttgaggcag

SEQ ID NO: 553462 - DNA, 572 bp, Homo sapiens
ttccatagagaagttaaagaaaatgtaaagtgattgatttactttaaaaaatacaagtatcatttttcttttaatcatgactttttcaactggctccaaaaaaatgccaaagggataaactccatttgaaaaatgaaacattattttgtttttcaattaatgaatgcacaggaaggttatgtttcccagcttattgctacagtcttgcaaacctttaagaattctagtatcacttaacatcacagaagtgtggttcaaatgttgtatggtttagaaactaaattgcaaacaatctaataaaaataagtgacactactgagtatttactgtattccaggkactgttataagttactcactcttttattactaagaacaacactatcagatgttgttttcttttttctttgagacagggtctcacactcactgtcaccaaggctggaatgcagtggcacaaacaagacggctcactgcagccatgacctcctgggctcgagcaatcctcctgtctcagcctcccgagaagctgggactacaagcatgtgttaccatacctggctaatttttttt

SEQ ID NO: 553463 - DNA, 2325 bp, Homo sapiens
aaaaaatatatggaggtttactcaccaaataaaattgcagtaaatttttttcattgtaatataggctgcaggagtggagacagtgtggctttttcttacactgatatacctctagcacctaaaatagttctcagcatatatgggatctcaatatgtatttgttaagtaaaggaattagaactactttatgtgaaatccaaatgcaatatctcaattcataatataatttcttcatcatctaatttgccccttaaattacccccactagtaattttctcaatctcaataaaatatccaggcttttcaactattctaatattttttcttcaggtttctatcttccctgctcagctaaatatatacttaagacttatcatctaacctttcttttgccaatatatccatgtaagttgtttcattgcttttctgtcctaccactttgtgaaaagccactccaccccatgaatttaaaggtctcttatttcttatgtacattatagaatgaatctaccatatgctgagggctgccttagaaatatcatacagaacctcaaatgcctttacacgtggtcttcaacagcaactgtcccctcaaaccactcaagaatcctatttcatatgttcaggcagctctctcttgttctaaacagcaactcttytaaattttatccactaccatcaaacttctgactttctcacctgcctcctctctctgctgatgaactctccttttcacagccctgagaaaaatggaggccaagggaaagtacctttctcaacttttgctgcaaaacatactttctttatccacattagaccaaaatatgctcagatctttttcactttaggaaacatactcctgtaatcttatattcttctccattaccatattacattcttttccttcataacaacttatttttacttctcagcccattcaatgcacaacctattattttctggttttcacttccatcaaatctataaaagtgttcgtgctaaattatcaatgcccttcatgttgccatgcataactgtcatgttgaagtgttagtatgatttcactctatacagcactttcttcttaaaccattctattgcctgctatcctgtactccaaacacttatgtttcagacacactgaaatgtgtttctctctactgtcccataaatgtttacatggctcaaaactctgttgcataaactgtttttaatcagtctatatgttcatgctaggttttctcatattattctattcattaaattgtaatcttagaatccctactttttaaatctatcttcttgtccacttttctatacatccaactgtctgttgggcatctcttcttgtgtgtgctttcaacacttcaagttcaaaatttctaaaacagattttgttttcttctcacttaagctcatcctccatcctgtgttccctgttccagtgatctttggttactgaaaaatttttcagacgtgcttaattaaccactgttaggaactctgaaaggccttggaatttaccctatttttaacctaacaaactggtctgttactacttgatggatataggtagaggattggtggcttctgagtcagagacaaaagaagttattatttaagacaaaagtatttggagcttctacaccagttcaccatgaccctcaaattccatgggggcaatgcagatcaacccagagagatacagcccactcagtgtgttgcattaaaacagacaaaactgagtttgaggaacttactgcttttacagtgagtatttagtagtcctgctgtttatttcatccctaaagcttactttctgcaaccataatcctcagagtccaaggtagaatgcttctcccaacaaccactattcacatccaatcaataaccaactctagttgacttcaactcttaaatagcttttaaaataatccattggtcttgatcttcactgtcattatcctaattcaggccactacacattttctctcattagtattactaaaacagcctttactcattgtggccctgccctacctcacccatcaaatcctcaatgaatctcaaatctagaaccaaacaatccttatacaaattaattccaatcattttgtttttatatttattaatcttcttgctctcaggaaaaactgacaactccttaaactaatttaaattaatgccttttatgatcacccctgcctgcatttcatgacaggcatttaaattaatgccttttatacctttcatgatcacctctgcctgcatttctagattaatttatatcactgctccttctttatcattcccttttccatttac

SEQ ID NO: 553464 - DNA, 1302 bp, Homo sapiens
tgaattccaaacccagttcaaataaataatgcttacataaacttggaatgctgaaaacacaagttcttggagctcatgtccaagatagaactcacccaggaccccagttgttcaaagcgattaattagtacaagggacttggtaggttcctttgtttggtcacttggtgctcttgggaatcactggagatctactttagattccacttctgataccaagctatttaaaaaaaaaacactttagactaattaaattcagcagagtttattttagcaaagaatgtttgtgaattcagtagctctcagaaccgggagaggttcagagagctctatcctgcaatatgggcagggaggatttagagacagaaaagaaagtaatgtacagaaataacttgattgattatagctgggtgtttgcyttatttgggcatggtgtgatgaggcatttgccttatatggacatggtctgatcaattggcagcaagctattggctgaagctcagatgctatgattggctgaacacttggctattcatcagaagaatatactctcaaattaggttttagtttgttatttaggagttcaaagttctcaggcagctttcagccaaaattgatttattttaacagtattgaactttaattcctttccacacattttaaaacttttccttagtaatttcttctattgctgtgacatttattaatcacttcacctttcacagattaaataaatgctcatgcatacatattgaatagattttaacttattgatcactgtattattcttgtgcttttatcttttttttttttgagacagagtcttgctctgttgcccaggctggagtgcagtggcaccatctcagctcactgcaagctccgcctcccgagttcacgccattctcctgcctcagcctcccgagtagctgggacaacaggcgcccgccaccacgcccggctaattttttgtatttttagtagagatggggtttcatcgtgttagccaggatggtctcgatctcctgacctcgtgatccgcccacctcggcctcccaaagttctgggattacaggtgtgagccaccacgcccggccgtgcttttatctcttagtattaaatgttttgatcttaaaacaactgaaataaatatattcagtgtaatatctaaaattaggcagaatttttccaaataacagctaatttccttcaaacatttgctagtttattcatacttgccctaatgcttttagtaatgatttctcatcatatgttgaattcttaatatatttggatcaagatttga

SEQ ID NO: 553465 - DNA, 613 bp, Homo sapiens
tggcaaggaggtctgggagaaaatcaggaagtggcagactaagaccaagacagagagggatggatgtggctgtgccaagtgccctggcatcccccaagtctgggtggcaaatccactctccttagacttgctgcttgagaaggaggtttgggagaggaattccttcccaaaaagtgagggaggacatggcacggaagacccagccccttcccatgcagcctggtaccaggcagtaggtttgaggagatggcacccttgtctgtgctagctcagactgggtcaccacccagctacaaatgtatccttatttaatctatagcaattatattcacattctgctagacaaatagattttacaagccctcagttaaatgtggataattacgtctgctggtgtcragggaccgtatcgtccaagctcaggaggaagcgtggcatcctgagtcctcctaatgctgtaaattagcaggcaacattcccatggcagctaagcaattatccatgatttcatttttccccacgccccctcctcacctctgtgggctgcccggccatgcctgtgcacacatgtgtgtatggatgtttcaggcatacgtggctgggaatggctcat

SEQ ID NO: 553466 - DNA, 1091 bp, Homo sapiens
ggtcatgaatggtggggcacacagggctcaagacatccttagaccacaaactcgacttcagggaaaactgggttcactcctccaggggctccctgacccaggctgcccgccgaccagggtgctgccgcttttcctcagctccctggctcctactcaggtcatccaggagccccagcaggaggcccgcttgaccataggctccytggggcccacaggggcctcccagggccctcttgcccggatgctggcgtttttcaggcatcaggtcttcctctctctcttcctcctcctcctcttcttcccagctcctttgagccttgggatctgccagccttctgcctgggtgctgccgcttcgggacagcatatgcaagccagggggagcgccggccaggatgctgccgcttgtgctgggttacatcgactgaccatgaagcctcatcttctcgtcggccagggtgctgccgtttgtggggtcccacagcccccccttcttcctcttcctcttcttcaactccctcttcctcctcctcctctcttttgcctggatgctgacgtttggagagccagtcagattgaaagatctgggacgctgaggaaggaaagaggtcagtgaggggcccctgacccatgtaataggcaggcgcctgagtgcccactcctgcttttctcccaggcagggtacatttcctgcagctcccactcagaggcatggtcttgcacctgcccctcaggcctcacagatacacacattcacacaatagtcaaaggcattgcctctgggttccaatcccagctctggcgctccctagttgtctgaccataagcgactcaattgatctctgggagcctcagttttcttctgtgtaaaatcgtaataacagtacctaactaagaggttgttaggaagatcaaacagtgtgataaggtgtttgaagtgcttggaatagtgtctggcacagaagtgcctagacagtagtaattcaaactgtcacacacaaagaaactctctccctagcacacagaagcttccccacccagggcctgctctctgtgaaatattcccagcattgagacaggggaggaatctga

SEQ ID NO: 553467 - DNA, 555 bp, Homo sapiens
tagcactgcttcctcacatcagcaggagggagtctgttttccttcttgcaaaattcagtaggaaagcatgctctaatttataggaaaaggaaataggcacatttggcaattattaactctcatttatatcttattgtctatagcgatatctaaaagatgtaatgtctcttcaacggtgaagcgctgatggttgaacactaaagaatataaaggatggggtctggaaaaggggaccacaaaatgactgaatgcaaattggataggaaggtgaactatatttcaagtttgctattgcactcatgaaacatggagaatacatacattacacccagttagcaraaccagccctgtacttttgcttgtttcaacttgaggtagggttacttggaccagtacttcctttacatttttcttatcttttttatgccttttgtcaattgaatggaaagattattaattgaataactgattacagtttacatttgcagggaaactctggttgcaattgtaagatcagttttaagataagagaagtgaagtaaacttttttttttt

SEQ ID NO: 553468 - DNA, 568 bp, Homo sapiens
tagctcgtctttttatccttttaccatagagtctttcatggagttaaagttttaaattgtgatgaggtccgttttatcaatttttcctgttatggttcatgtttcagcatcaaatataagaacttaacctgaagatttatttttctcctatgtattatcttaaaaacattatggttttatattttattaaagtatcttttaattcaaagtggtagatcatttgttcttagtgtaactcactcaaawctttattagttttcttaactttttgatttcatttagtaccatacaccagtagctgtatgaatagtgtttgacatataattcccacatttgcaggtttcttggaatctcatttctatccctctctctgtctcttactctgtctctctctctttttccaacacttatttaataaaaaccctctgctaatcactgtagtgaatgcatgctgtgctaggtacttgtcatttaatatccacaaccagcctgtggaaaataagctattttaattacttccaatttttttaaggaagagaaatggagacagagttttaagaacttgctt

SEQ ID NO: 553469 - DNA, 1435 bp, Homo sapiens
ccaccaccaccaccactgccaccactatcttcatcatcttagagctccatagtgctgaaactcacagccatagtggctgatggaaaaatccatgcacagggaggaaatgtgactatctcagctgatagccctctgcatctgaggcagagcatcctgccctgacacgtctgtgtagctgtggcaccgccatctggaagcctcttctcccacctttaatgctgtcagccaagctagttgattagtttcttccattcagttgcgtcctgccgctctcttgctgcaaaaatgttcagagaacagattgcatagatgagcacatttcagaacttggtctgtttacttccctctgtttcccatcctgtgctggtgggtggtcttatgcgacaagcaaggttaacaacgccttccttgggctgatccctcctatagtgagcacggggagaatgaggcatctctccctagttacaaatgctgcaggcctctcctaccttagttcagattcaaggaccgagaaccgaaggtggaatgcccacagtcctccatggtgaacagataaagcaaataggatccagctgggtttccatgagcccaagtggcttgtgtaccctgattcctaaccttgagcacaactgtacccaagaagacgcttggaactctggaagatccagatgctaattaagtagggaagggctatggggagccaccatgatgatcattcaacctagayattccctatgttctcacaagcctcttttgtactggacaactccacaaaaccatccagcataagcactgatgatcagagaactctgatctttatggggagtaagcaaactccacattttctagatccaggcaaggaacaatacttaagtattgcctacactgaatggggctagaggttagcttattttgcaattaaaatgaagtgtggttctatttatataaagttctagaacagactaagagtctattgcagaaaaggtcaagaaggtggttgccttgaggtatccgggggagggaggagggaattcctgaagaagggccactagagaattttcaagggtgttggcaaagttctgtatcttcatgtggatttgggttgcaacaggtatctgcatttatcaacatttatctattgtactcttaagatttgtgcattttatcatatgtaaattgtacctcaaaggaaatctgtaacaaatcttgaaatctagttaatgatatccatgctggagtatttagggagaagtgtgctaatgcttataatttattttaaaatgcatcaaaaataggacagagtgatggatggatagagggatgtacagacggacaggaacatgagaatgcacatataggaaaatgttaatggaagaatttagttggtggagagatgtgtgtttgttgtaaaatcctgtcaactttgccttatgtg

SEQ ID NO: 553470 - DNA, 502 bp, Homo sapiens
ggtgccagatggttccgtggtggcattagtgtccaagcaggtgacagcctataacgcagtgaacaactccaccgtctccaggacctcagcaagtaaatatggtaagatcccaccgagtgtcctagggaggcccgggtgtcctgagcagctgttgtcatgacagcagcatagccagaaggcaggagactcttggagaggggagatggggcatcaggcaggctgaccatcggggaagagagccaggtgggggaagaggaccctggtttcagtcgggcactctgatgcataagcaagaccttcatccacgagcaaaagaagtaaagccaactttcatgaatgtcttccaggctgtgtgatagctattatctcacatcatgttcataacaatctagtgaattaaataattattatttccccctattatgcagattagtacattataactcaggtgcacagaggctaaatgatttgtaagagccactgttattttrcagtggagtgc

SEQ ID NO: 553471 - DNA, 1237 bp, Homo sapiens
tccatcaaattttgcagacaatcccaagaggatgcactttctccttcatttggtcctcatcgcattatatttttaccagtctcatgcacattatgcctttttgatgaccttgattgtattctatctgtcttgcattagaattggggattgcctcaacctcccctcacatacccaagaggatcataaattgcttcagctgagatcattctctgtgttctctrtgtggagatagtaactactggctgaatttaattggataataaaaagttgaagacaatgaatatattaaataaaatgaatgattaaatatattactttgatttccattatggaaaatgctttctgggggggggggaatactttataaattataaggtactcagctttaagcaactccctcaaggagtgcagctgtagaatattaatgtttggctcttttaagaattttctttaaaactgtaactgtaattatttgtcagttcatttacttgctaaaattcatttgtaacccccaaatcagtacctgtggtgcttttgtagtaatttgtgggcatgtgtagagtggcaaaaaatttgagctgcccaatgcacacattcccagctgaggttgaatgaagcgatgctctttttttcttgtttcacaagaaagtgacctttcacagtgtatttagtgccactttgtccaccttttgtgctttgtgtgggtaatttcactgtttaaaatggctcccacacacaatacactaatgctgtctagtgttcctaagtgtaagaaggctgaaatgtgccttacggagaaaatatctgtcttagataaactttattcaggtatgagttgtaacactcttggcctagagttcaatgttaattaatcaacaatatttgttaaataaggtgtctttaaagagaaataaacataaaacaaagtcatgtattgatcaactgagcaaaatattgtgaccagaggcttgcaggaacacaatcctgtatttatcctaggagcaatggtctagtattctctaattcagtgatcatggcaactatatagaacattttttctataaaaatgatgagaatcaactgtatcagttttcctcaggagtgtaggtaagccagagactcaagtggtaagccattatctcttaatgtgagctttaaaaggctgaaatttaaagccagccccacttgtactctctcatcacctccctggagcattttctaaattatacaggcttgt

SEQ ID NO: 553472 - DNA, 1237 bp, Homo sapiens
tccatcaaattttgcagacaatcccaagaggatgcactttctccttcatttggtcctcatcgcattatatttttaccagtctcatgcacattatgcctttttgatgaccttgattgtattctatctgtcttgcattagaattggggattgcctcaacctcccctcacatacccaagaggatcataaattgcttcagctgagatcattctctgtgttctctgtgtggagatagtaactactggctgaatttaattggataataaaaagttgaagacaatgaatatattaaataaaatgaatgattaaatatattactttgatttccattatggaaaatgctttctgggggggggggaatactttataaattataaggtactcagctttaagcaactccctcaaggagtgcagctgtagaatattartgtttggctcttttaagaattttctttaaaactgtaactgtaattatttgtcagttcatttacttgctaaaattcatttgtaacccccaaatcagtacctgtggtgcttttgtagtaatttgtgggcatgtgtagagtggcaaaaaatttgagctgcccaatgcacacattcccagctgaggttgaatgaagcgatgctctttttttcttgtttcacaagaaagtgacctttcacagtgtatttagtgccactttgtccaccttttgtgctttgtgtgggtaatttcactgtttaaaatggctcccacacacaatacactaatgctgtctagtgttcctaagtgtaagaaggctgaaatgtgccttacggagaaaatatctgtcttagataaactttattcaggtatgagttgtaacactcttggcctagagttcaatgttaattaatcaacaatatttgttaaataaggtgtctttaaagagaaataaacataaaacaaagtcatgtattgatcaactgagcaaaatattgtgaccagaggcttgcaggaacacaatcctgtatttatcctaggagcaatggtctagtattctctaattcagtgatcatggcaactatatagaacattttttctataaaaatgatgagaatcaactgtatcagttttcctcaggagtgtaggtaagccagagactcaagtggtaagccattatctcttaatgtgagctttaaaaggctgaaatttaaagccagccccacttgtactctctcatcacctccctggagcattttctaaattatacaggcttgt

SEQ ID NO: 553473 - DNA, 1420 bp, Homo sapiens
attcccataaaaatataatcaaattacctcttaacaagatcccagaaaaggttacacattaaaacattcaaggaacagtttacctggtataataatactcycttatcgaaatatttactgaattcctcttacttggccttgaattacatgctaagttcaaaaatgcaagcaaaaaaaaataccccctgccctcatggctcatgcaatccagtcctagaatatagattagtagaattgtatagtgggattgtagctggagaagattctgggaaagttctttcttactagaccttataatcattcaattaaaatatttctaatattaaatcatctttgcatttctggattaatgcttacccttttttttttccttaaatgaaacaaacaccttcagatgaaaaagagcagtactgatctaaaataacaggtaggaccaggcacaatggctcatgcctgtaatcccagcattttgggaagccaagacaagagaattgcttgagcctaaggagttcaggaccagcctcggcaacatagttaggcctcgtctctcaaaaaaaagaaaaaaagaaagaaaagaaataaaaaaattatctgggtgtggtgaagcacctgtaattccacctactcagaaagctgaggtgggaggattgcttgagcccagcaggtcgagactgcagtgagctgtgatagcatcactgcactccagcctgggtaacagagcgagaccccatctcaaaaaaaaaaaaaaaaaaaaatagcatgcagttacaaacactaataaaatgacagttttaatagtttgctatttcatttatgactctgacaaatcacaaaatatcattacaaacacaattttagctatataaggtttgggttggatctacctagcattacatattagagagatacaaggatggatggacataagcatagaaggaaggcagggaggttgggaacaatcaacagagtgaaaagcaatctatagaatgggagagaatatttgcaaaccatacatctgataagatactaagcaattagtatccagaatatataatgaactattaatacaactcaacagcaaaaaattaaataattttaaaaataggcaaagaatttgaaaagacatttctccgaataagatatataaatgtccaaacatatgaaagatgctcaacgttactcattaccagggaaatgcaaatcaaaaccacaaacagacatcacctcacagccactcagacgaccactattaaacacacacactcaaagaaaagtgttggtgaggatgtggacaaattgttcagtgctagtgggaatgtaaaacgatgtagccactatgaaaaacagtatgaagttccatcaaaaacttaaaaatagaatcaccatatgatgcagcaatcccacttctggctacatatcc

SEQ ID NO: 553474 - DNA, 1420 bp, Homo sapiens
attcccataaaaatataatcaaattacctcttaacaagatcccagaaaaggttacacattaaaacattcaaggaacagtttacctggtataataatactctcttatcgaaatatttactgaattcctcttacttggccttgaattacatgctaagttcaaaaatgcaagcaaaaaaaaataccccctgccctcatggctcatgcaatccagtcctagaatatagattagtagaattgtatagtgggattgtagctggagaagattctgggaaagttctttcttactagaccttataatcattcaattaaaatatttctaatattaaatcatctttgcatttctggattaatgcttacccttttttttttccttaaatgaaacraacaccttcagatgaaaaagagcagtactgatctaaaataacaggtaggaccaggcacaatggctcatgcctgtaatcccagcattttgggaagccaagacaagagaattgcttgagcctaaggagttcaggaccagcctcggcaacatagttaggcctcgtctctcaaaaaaaagaaaaaaagaaagaaaagaaataaaaaaattatctgggtgtggtgaagcacctgtaattccacctactcagaaagctgaggtgggaggattgcttgagcccagcaggtcgagactgcagtgagctgtgatagcatcactgcactccagcctgggtaacagagcgagaccccatctcaaaaaaaaaaaaaaaaaaaaatagcatgcagttacaaacactaataaaatgacagttttaatagtttgctatttcatttatgactctgacaaatcacaaaatatcattacaaacacaattttagctatataaggtttgggttggatctacctagcattacatattagagagatacaaggatggatggacataagcatagaaggaaggcagggaggttgggaacaatcaacagagtgaaaagcaatctatagaatgggagagaatatttgcaaaccatacatctgataagatactaagcaattagtatccagaatatataatgaactattaatacaactcaacagcaaaaaattaaataattttaaaaataggcaaagaatttgaaaagacatttctccgaataagatatataaatgtccaaacatatgaaagatgctcaacgttactcattaccagggaaatgcaaatcaaaaccacaaacagacatcacctcacagccactcagacgaccactattaaacacacacactcaaagaaaagtgttggtgaggatgtggacaaattgttcagtgctagtgggaatgtaaaacgatgtagccactatgaaaaacagtatgaagttccatcaaaaacttaaaaatagaatcaccatatgatgcagcaatcccacttctggctacatatcc

SEQ ID NO: 553475 - DNA, 1420 bp, Homo sapiens
attcccataaaaatataatcaaattacctcttaacaagatcccagaaaaggttacacattaaaacattcaaggaacagtttacctggtataataatactctcttatcgaaatatttactgaattcctcttacttggccttgaattacatgctaagttcaaaaatgcaagcaaaaaaaaataccccctgccctcatggctcatgcaatccagtcctagaatatagattagtagaattgtatagtgggattgtagctggagaagattctgggaaagttctttcttactagaccttataatcattcaattaaaatatttctaatattaaatcatctttgcatttctggattaatgcttacccttttttttttccttaaatgaaacaaacaccttcagatgaaaaagagcagtactgatctaaaataacaggtaggaccaggcacartggctcatgcctgtaatcccagcattttgggaagccaagacaagagaattgcttgagcctaaggagttcaggaccagcctcggcaacatagttaggcctcgtctctcaaaaaaaagaaaaaaagaaagaaaagaaataaaaaaattatctgggtgtggtgaagcacctgtaattccacctactcagaaagctgaggtgggaggattgcttgagcccagcaggtcgagactgcagtgagctgtgatagcatcactgcactccagcctgggtaacagagcgagaccccatctcaaaaaaaaaaaaaaaaaaaaatagcatgcagttacaaacactaataaaatgacagttttaatagtttgctatttcatttatgactctgacaaatcacaaaatatcattacaaacacaattttagctatataaggtttgggttggatctacctagcattacatattagagagatacaaggatggatggacataagcatagaaggaaggcagggaggttgggaacaatcaacagagtgaaaagcaatctatagaatgggagagaatatttgcaaaccatacatctgataagatactaagcaattagtatccagaatatataatgaactattaatacaactcaacagcaaaaaattaaataattttaaaaataggcaaagaatttgaaaagacatttctccgaataagatatataaatgtccaaacatatgaaagatgctcaacgttactcattaccagggaaatgcaaatcaaaaccacaaacagacatcacctcacagccactcagacgaccactattaaacacacacactcaaagaaaagtgttggtgaggatgtggacaaattgttcagtgctagtgggaatgtaaaacgatgtagccactatgaaaaacagtatgaagttccatcaaaaacttaaaaatagaatcaccatatgatgcagcaatcccacttctggctacatatcc

SEQ ID NO: 553476 - DNA, 535 bp, Homo sapiens
actgccccattaattgcttaaaaatgtcacatagctctttttcagatactaatattataatcttattttactgtcagtgcagcccaccccccaccccacccactgccccaatgtacaaaacaattatataagcttgggattttytggttgtgcacgactttattcccattttgaaagaacggtcaatatactttgggaaatatgaacacattttgacacaataaaactggtttcccttgcttattatactcctaaattaaaaaatgatgctataattacatgcatggttcacagctgccagagactaaatatacatgttttgtgttccctcactctcctgacaattggatagcagtgtatgacccaccagtaatagccaaggtacttctcatgagctaggggctaaggttaaaataaaatgtcaagaagctgggtgtggtggtatgtgcctgtaatcccagctactcaagaagctgaggcaggaggattgcttgagcccaggagttcaaattcaccctgggccacatagcaaaac

SEQ ID NO: 553477 - DNA, 714 bp, Homo sapiens
aaaaaagaaaagaaaagaaaatatttcaattccccctttagaacaatggcaataaaaccaccattttacagatacaacaaccaaagagcataggtaggaagcaaactgccaacgtctcagttagtaagtgacaaagccaagattcaaaactaagttttctaactccaaggccaatactctttccaaggccagctacatcatggctgctaaccgctttagacagtctttggctaataacgatacagaacactataactggaagaaraaaagctgtacgattaaattaatcaccctcacctttcatcttgtgggttttaagtttggagtttgatgaacctttaagtttggagagataaacctttgaattcacatgtgggaaaagtgttgcacatgaatatgtcatttcattaataacacgtaaaatgctttaaagtacatttgatcctcacacaatcctataaaataggtaaggctggatttgttataaccacttattaaaacaagaaaaatgaggctcagtgaggctaagttggcttgccaaagatgacatagtttttatattagagatggagctggaacaagaactcacattcactatctgaaggttttttacacttctatttctattttattattttacttacaaaagggcatatattataatcaaccacacagcttaaaaacctgaacattgacatttttgctgaagtccct

SEQ ID NO: 553478 - DNA, 3551 bp, Homo sapiens
atgcctgctgggccagcctctcgggggagtcctggggggccatggctaaaaccctgcctggccatctgcagggagctcgcagtctactggggtgacaggtgacacccgctcccatgtgatctctgcttgggaggtgaagggcaggacatctggggactgcccagccgagccagggtggcagaaaagagggaacttgcagcctcctgggcaggtgggactctggagccctgcacacaggttgaccagacacattgagtggtggtgggcagaggcactgggccaggacttgttccccaccgactcctaccacgggcaaacctggctccttctttgaggaaagtgacctcttcccaagtaagcatcattcctctctggagacaggatacttttcagggcacggcagccacacctccctgtacaggtggacatcattcattgtaatacaggaggtgtctggttcaggaccctgaacttcaagagactgctgacctttatgaggtgactgttttgcataagaatttgagtgattgtttctgaagctgtctttttgggacatctcgttgggttggttatcagccttggaagcagcacatgatctggactcgctgctaattgctgcatgttaatagtaaacaatcagtttaatgggagctggacactgtttatagtcatccatggccatgaaatttgctgtcagtcagaatggcccaagaacacatatagccctgggcaggagagctccccctcagttgaatatttatttactgagttatagagaaaaataagacacgattccaggcagcaaagcgcttacagttaactggagtgtgagcagattattctagtgtgagcaggacggtttggtaataggaccatgcaagccaaagaggcagcaacaaagaagaggatgtgatcacttctgtgggtagatgcaggagtcatttcacagaggaagtgaggtgtgagctgggttttgaaggatgcataggagtttgttaggtgatcctatgcagagggagaaacactggcaaaggtttggaagtaatggggcatgatgtgatcattttaaccatatcctctaaaatagccatgatgatatgtgatacttggattcccagtaaaatacaaaatgaaaatataatggaatcctgttgtcaagtactggagactttattttcttacttttaataggagttctaaaagtgtgaactatttctggcaaaaggtatagatgagatcacaagcaaacaccttgtgcccaccacacagtagatgaagcatcacaggtagaatcgaggcccctgcacctgaatctgggggaatgatttccaggaatgcgtttctgtttctatctcccatgcatgtgatgatgaccgatatagtgggtctgcatgaacactgaaaaggttttctattctctgccttccaatgacttggggtcaaggaccctcttagaaggggccatgcttccctgcagacctcactatgctgtgcactgagagcttcagtgacagaataacgacgaagggtattttgcttatattctatcttttcctcctatagactttcatagctgggcagaaccaacaatgttctctcaatggcttaaaacccacctctgccaagccccgtgcattcccagaggagcaggaagggggtgtggccatggggaggggagcctgcggctgcaggtgggtggtgctccagtttcctctgggcatcggtacacaagcccattggcaggaaatggttcttcgcccagtgtctcattttgtagcacaggaaggagatctagggaaagtgaatgacttcagagagctgaagtgcctgtacccacactggccccctctcactgacagtacagggctcctctgcatgcaggctgtgggctggccgggattccaccacacctggagtgtgctcttcaggtgaggacggctgggagggagggggcgggacacccagtgaaaggcactgagggtgttgctggggtagaagggagttctctcttttcttttccttaccttttaaaaagtcctgatgatttgatgatatattcatttattccgcaccctcaatgttggaaagactctgagattccaaaggttcttagaaactaagaacctcctggagaggtagtgagtgtcccagcatggggagagtgtaaactggggctgggggccctctgcgggagatgagatgctggaagagattttgggactggaggcaggtgacaaggcacccttttaaagtcctcatccagctatagcctgggtcccacagttggtgacaaaccaccagttcatgccttaaccccatactgtgccaagaatggcagaagagctgtgtgtcagtttaaaatttctgatttatagacagtgcaagcacaccaatactgagtcctcaggaacagtctccagccccttttctcaatcacgtatgttcatgggtttgtgttcaggggagctgtcatcacatggtgggaagagaagcctttggagagaggctgccctgagtgattctgggctccccatttgtttgccatgtgaccctgggacaggtggttactgtctccaagcctctagcacctcacctataaaatgggggtattcccatatctgccgagagttagaattaaacaagcaagtgagctaaagcatgtagcagcttatagtttctgtaataggatacttgtaaaatgtgttcttctgttataggaaaaatgtatatgtaagagaagtaaaatgggggaaraaatactctgtgtatttgcacaagagacggtttgagcttaatttaaaatgtgccagggatccagtatcacaaaggctccgtttccatttcagtgccaaacaaaaatctccccccattcaggtatctcattgtgtggatggttttcacccaaaatggtccacttaggagaaggagtgaaaaaatcaaacgttcatttctcctattcacccacaccctgtctgataaatgtcactccttaagcaaacctgttgcccatggcaacacattcagaagatgggctgctggtttcatttctttgtcagctggcttggattagaaatgcaagaaggcttttggacttgtgtctacacattaggatgcatcttagtaaaagtcaagaagaaaaggtggttatggtcaacctggggtggcgatgctctagtttaaggcagtcatggtcaacgtggggttttgacactctaaggacgtcatggtcaacgtggggttttgacactctaagggcatcatggttaacatgggacagtgatgttctagtttaaggtggttatggtcaacatggggagtgacactctagtttaaggtggttatggtcaacctggggcagcgatgctctagtttaaggcagtcacggtcaacatggcgttttgacattctaaggcggtcatggtcaacgtggggcagtgacgctctagtttaaggtggttacggtcaacatgaggcggtgacactctagtttaaggtgatcatggtcaacatgggacagtgatgttctagtttaaagtgatcctggagcccat

SEQ ID NO: 553479 - DNA, 1086 bp, Homo sapiens
catcagtgtgattttcccagactctgccggaaagattgtgtgcttctctcatttgtgttctcagaactttttatacacatacagtgtgatatttgtttgtgtagtttttccttaagcagatcttgcccactagagactggggacacgggacacagtgaggtggcctgagagatggtcccactttggtgggggctctgttttcctggggaggtgaccacacagacactgcccgtgctgtcagagagtcatgtgcagggagagakggggacaggcggcccggccaggaaggctgcacgaggaagtggcaggaccgtggccccactctcttggtgtgtaagggtggattgggctgtgggacaagtggcagagggaacaatttctaatgcttaagccagcagcaattgccactgcaggctatggctatctgtttaactcctcgagggtgggaccttgtgtctcttcaggctctgagccagactgccagggttcccattcaggccctgcctcacttagctgtgactgggcaagtgcctccctgctgggctttctaactaaatgggggcttcccttggggagtctgaggatgactgcagtgtgtcccagttctgctgggtcactcctctccccatagtggcgacgggatcaacctgcagggcttctgaagttggacttgcctgtagtttatcccttgtcattgtgtgatcttgggtaagaagattaacctctctgagcctccatttcctgtataaaagggggcagtggcatctctttggctaggttggtgtggggatcagaggtgtggtctctgagcaaaggtagccgatttatgaggggtgatgatggtgaagaagctatgagaatatttattcatttagccttgtcacagagcaaactcccacgcccacatttggggtccttctttagctaacgatgaaactaatgatcagagcagtggccaccattgtggtgggctgagaggtatgagggaccaggctaggtcagtggaactgtgttgaggaccagctcccaccctactgacagtgtgacgttgggcaagtcgcttagcccctgtactcacttcttttg

SEQ ID NO: 553480 - DNA, 1178 bp, Homo sapiens
tgtgacatgctcccatacatattgtattttccctgccgtgtaatgatctgtctccctttctagactatgagctccttaggggccccagcgaggtctctgtatttttcataacaaactgcacaattctttgcacagaatatactctcagtaaacactggtttgatgtgtgggtgaatacacacactttgatactcttatgactatggtgaaaaggccactaattgtgatttcaacttaaaggttaaagccaaaaaaaatccattttttagtgaaatgaaactcttagcgttttcacttccagatgcatcagcattacataaaagatgttgaaactattttaaaaaatagtcatgctgcgcattttcctgtctgagaattagactgaaaataccaaattccccaggggcccctgggtgttctaaagacaaatgttcagttagctattgattccatgcactcatttaatggaaatccggagtaagactcaacctccccaccaccagcctgtcactcattattctgctcagctgtttcagaataagcgacgactcccgggagagctctgcccccctcccagtactggccagcacttcagtgatgatgaatccgagcagcagagaatttcagtactcaaagcagcagaacatcagtcccaacttacattttccacttccattgtcattcttattcctatatgggcttatttctcacatatccacctttgatttttcaagatcgaacctttgagcaggtgagggcctggctgcctaacatattacatcatcacgcatatgccggactcctgcctcactcagaagaccacgtgttgctcagaaaagaaaggtgggcaccaaaagaacaggtttctcataatatcctacccaggcccacagttagacgtattagtcacygttgggacaatgaatatgggttttccaagaggtgatcaagcctttacttgatggattttcttttctccacgccccaagattttctaggcttttggtaggaagcactatacagaaagcacccacgtctcctagctgattctgtgtctggagttggttccttctggtgggttcgtggtctcgctgacttcaagaatggagccgctaacctttgcggtgactgttacagctcttaaagatggcacagacccaaaagactgaacagcagca

SEQ ID NO: 553481 - DNA, 1178 bp, Homo sapiens
tgtgacatgctcccatacatattgtattttccctgccgtgtaatgatctgtctccctttctagactatgagctccttaggggccccagcgaggtctctgtatttttcataacaaactgcacaattctttgcacagaatatactctcagtaaacactggtttgatgtgtgggtgaatacacacactttgatactcttatgactatggtgaaaaggccactaattgtgatttcaacttaaaggttaaagccaaaaaaaatccattttttagtgaaatgaaactcttagcgttttcacttccagatgcatcagcattacataaaagatgttgaaactattttaaaaaatagtcatgctgcgcattttcctgtctgagaattagactgaaaataccaaattccccaggggcccctgggtgttctaaagacaaatgttcagttagctattgattccatgcactcatttaatggaaatccggagtaagactcaacctccccaccaccagcctgtcactcattattctgctcagctgtttcagaataagcgacgactcccgggagagctctgcccccctcccagtactggccagcacttcagtgatgatgaatccgagcagcagagaatttcagtactcaaagcagcagaacatcagtcccaacttacattttccacttccattgtcattcttattcctatatgggcttatttctcacatatccacctttgatttttcaagatcgaacctttgagcaggtgagggcctggctgcctaacatattacatcatcacgcatatgccggactcctgcctcactcagaagaccacgtgttgctcagaaaagaaaggtgggcaccaaaagaacaggtttctcataatatcctacccaggcccacagttagacgtattagtcaccgttgggacaatgaatatgggttttccaagaggtgatcaagcctttacttgatggattttcttttctccacgccccaagattttctargcttttggtaggaagcactatacagaaagcacccacgtctcctagctgattctgtgtctggagttggttccttctggtgggttcgtggtctcgctgacttcaagaatggagccgctaacctttgcggtgactgttacagctcttaaagatggcacagacccaaaagactgaacagcagca

SEQ ID NO: 553482 - DNA, 1342 bp, Homo sapiens
gaagccctctgtyttatctggtattcctcctgttaacatggcttctctttcttagtctatttgtgacctgctcttctgcccaacttccaaataatctttccagtctcaaggcttttgtatgtatgctctgaatcttggaaaaagaggaaacagggaaaatatttatttattgtacttttttgcccagatgaatgaatggactcagggttttaaagagaatctttgtctgcaaagataaaagaaaacagaggtacatttgaaaatgttattagcatattttaaaaatatattctctgtatttatttaaaatcttttagattccccttaattttcagtttattcttgccttctcagctgagctcctgacttctatcgccactgccacttggatgtccagtagtcatttcaaacttaacttggtcaaaacagaactacttatttccctactcccccatttccgtgtcttgtttaagtttaaatgtgcctattttaaaaaaaggtggcctggcgtggtggctcacgcctgtaatcccagcactttgggaggccgaggcgggctgatcaccaccaggtcaggagatcgagaccatcctggctaacacggtgaaaccccgtctccactaaaaatacaaaaaattagccgggcgtggtggtgggcgcctgtagtcccagccactcgggaggctgaggcaggagaatggcgtgaacccgggaggcagagcttgcagtgagccgagatagcgccaccgcactccggcctgggcaaaagagcgacactccgtctcaaaaaaaaaaaaaaaaaaaaagaaagaaagaaagaaaagaaaaggcacatcattcacctacttgcttcggcaacacgactatgcatcatccttgattaaatctctatcatctactcttttcatcattactaggtgatagtcttgccttctgcattacgttaaaaatagacacaaatgataactaatcaatttccttatcaccaaacccaatatcatacttgtaacttgatccacgtactcttctttctttcctgatacaaaaatctctcaattcataccccacatttgttttatttccaaaatatgtacaaccctagtccaagctgccatcatgtcccctggactctccaagtagcctcccaactggcatttctgccaccatttttctctctcaatatccatctgctccatcttccacatctcagccaaagtgagcttttaaaaatttacgtggtggctcatgccagcactttgggaggctgaggcgggtggatcacctgaggtcaggagtttgagaccagcctggccaacatggtgaaatcccgtctctacttaaa

SEQ ID NO: 553483 - DNA, 1342 bp, Homo sapiens
gaagccctctgtcttatctggtattcctcctgttaacatggcttctctttcttagtctatttgtgacctgctcttctgcccaacttccaaataatctttccagtctcaaggcttttgtatgtatgctctgaatcttggaaaaagaggaaacagggaaaatatttatttattgtacttttttgcccagatgaatgaatggactcagggttttaaagagaatctttgtctgcaaagataaaagaaaacagaggtacatttgaaaatgttattagcatattttaaaaatatattctctgtatttatttaaaatcttttagattccccttaattttcagtttattcttgccttctcagctgagctcctgacttctatcgccactgccacttggatgtccagtagtcatttcaaacttaacttggtcaaaacagaactacttatttccctactcccccatttccgtgtcttgtttaagtttaaatgtgcctattttaaaaaaaggtggcctggcgtggtggctcacgcctgtaatcccagcactttgggaggccgaggcgggctgatcaccaccaggtcaggagatcgagaccatcctggctaacacggtgaaaccccgtctccactaaaaatacaaaaaattagccgggcgtggtggtgggcgcctgtagtcccagccactcgggaggctgaggcaggagaatggcgtgaacccgggaggcagagcttgcagtgagccgagatagcgccaccgcactccggcctgggcaaaagagcgacactccgtctcaaaaaaaaaaaaaaaaaaaaagaaagaaagaaagaaaagaaaaggcacatcattcacctacttgcttcggcaacacgactatgcatcatccttgattaaatctctatcatctactcttttcatcattactaggtgatagtcttgccttctgcattacgttaaaaatagacacaaatgataactaatcaatttccttatcaccaaacccaatawcatacttgtaacttgatccacgtactcttctttctttcctgatacaaaaatctctcaattcataccccacatttgttttatttccaaaatatgtacaaccctagtccaagctgccatcatgtcccctggactctccaagtagcctcccaactggcatttctgccaccatttttctctctcaatatccatctgctccatcttccacatctcagccaaagtgagcttttaaaaatttacgtggtggctcatgccagcactttgggaggctgaggcgggtggatcacctgaggtcaggagtttgagaccagcctggccaacatggtgaaatcccgtctctacttaaa

SEQ ID NO: 553484 - DNA, 1342 bp, Homo sapiens
gaagccctctgtcttatctggtattcctcctgttaacatggcttctctttcttagtctatttgtgacctgctcttctgcccaacttccaaataatctttccagtctcaaggcttttgtatgtatgctctgaatcttggaaaaagaggaaacagggaaaatatttatttattgtacttttttgcccagatgaatgaatggactcagggttttaaagagaatctttgtctgcaaagataaaagaaaacagaggtacatttgaaaatgttattagcatattttaaaaatatattctctgtatttatttaaaatcttttagattccccttaattttcagtttattcttgccttctcagctgagctcctgacttctatcgccactgccacttggatgtccagtagtcatttcaaacttaacttggtcaaaacagaactacttatttccctactcccccatttccgtgtcttgtttaagtttaaatgtgcctattttaaaaaaaggtggcctggcgtggtggctcacgcctgtaatcccagcactttgggaggccgaggcgggctgatcaccaccaggtcaggagatcgagaccatcctggctaacacggtgaaaccccgtctccactaaaaatacaaaaaattagccgggcgtggtggtgggcgcctgtagtcccagccactcgggaggctgaggcaggagaatggcgtgaacccgggaggcagagcttgcagtgagccgagatagcgccaccgcactccggcctgggcaaaagagcgacactccgtctcaaaaaaaaaaaaaaaaaaaaagaaagaaagaaagaaaagaaaaggcacatcattcacctacttgcttcggcaacacgactatgcatcatccttgattaaatctctatcatctactcttttcatcattactaggtgatagtcttgccttctgcattacgttaaaaatagacacaaatgataactaatcaatttccttatcaccaaacccaatatcatacttgtaacttgatccacgtactcttctttctttcctgatacaaaaatctctcaattcataccccacatttgttttatttccaaaatatgtacaaccctagtccaagctgccatcatgtcccctggactctcyaagtagcctcccaactggcatttctgccaccatttttctctctcaatatccatctgctccatcttccacatctcagccaaagtgagcttttaaaaatttacgtggtggctcatgccagcactttgggaggctgaggcgggtggatcacctgaggtcaggagtttgagaccagcctggccaacatggtgaaatcccgtctctacttaaa

SEQ ID NO: 553485 - DNA, 669 bp, Homo sapiens
taaaagtacatcactagtatatctgccttactgaaaatgcttaggggtgtctcttccactgaaaataaaattctagaaaaaacctacattatataaaaaacayataactctctaataaagacatgcacataacaggaaattgtattaaaattataatacagaaaacaattctattttcaaaatttgatagacaaaaacatgaaagtagttataaacacaatatgacaatataatttgtgacttacaaagttgagagcagacatactgaaaaaaactatgcatctgaatatcttaccaattcaaaatatattgtaattttaagaagatttttgtaatcttcatgataaccacaaatattagagaaatacaatatagaaattgagaaagaaatcagaccatatcaccagagaaatcagtgagacagcaagaaagatgaaaaaggaacaaaatggctacaataataaaacaatgattaatataataatagtaagttccatttcagaatactttaaaaatattaatggactaactttcccaatcaaaagacatatttcatgaagagattctaaaaattgtatcaacagcatcaactatattctgtgtacaagagaatcactggatccaatcacaaagatagactaaaagcaggatggaaaaagatattccatg

SEQ ID NO: 553486 - DNA, 669 bp, Homo sapiens
taaaagtacatcactagtatatctgccttactgaaaatgcttaggggtgtctcttccactgaaaataaaattctagaaaaaacctacattatataaaaaacacataactctctaataaagacatgcacataacaggaaattgtattaaaattataatacagaaaacaattctattttcaaaatttgatagacaaaaacatgaaagtagttataaacacaatatgacaatataatttgtgacttacaaagttgagagcagacatactgaaaaaaactatgcatctgaatatcttaccaattcaaaatatattgtaattttaagaagatttttgtaatcttcatgataaccacaaatattagagaaatacaayatagaaattgagaaagaaatcagaccatatcaccagagaaatcagtgagacagcaagaaagatgaaaaaggaacaaaatggctacaataataaaacaatgattaatataataatagtaagttccatttcagaatactttaaaaatattaatggactaactttcccaatcaaaagacatatttcatgaagagattctaaaaattgtatcaacagcatcaactatattctgtgtacaagagaatcactggatccaatcacaaagatagactaaaagcaggatggaaaaagatattccatg

SEQ ID NO: 553487 - DNA, 669 bp, Homo sapiens
taaaagtacatcactagtatatctgccttactgaaaatgcttaggggtgtctcttccactgaaaataaaattctagaaaaaacctacattatataaaaaacacataactctctaataaagacatgcacataacaggaaattgtattaaaattataatacagaaaacaattctattttcaaaatttgatagacaaaaacatgaaagtagttataaacacaatatgacaatataatttgtgacttacaaagttgagagcagacatactgaaaaaaactatgcatctgaatatcttaccaattcaaaatatattgtaattttaagaagatttttgtaatcttcatgataaccacaaatattagagaaatacaatatagaaattgagaaagaaatcagaccatatcaccagagaaatcagtgagacagcaagaaagatgaaaaaggaacaaaatggctacaataataaaacaatgattaatataataatagtaagttccatttcagaatactttaaaaatattaatggactaactttcccaatcaaaagacatatttcatgaagagattctaaaaattgtatyaacagcatcaactatattctgtgtacaagagaatcactggatccaatcacaaagatagactaaaagcaggatggaaaaagatattccatg

SEQ ID NO: 553488 - DNA, 1533 bp, Homo sapiens
gaattaatccatcatcaccattgccagcactggcaccattagtcaggttttctggtaatcccacaggattacttccatgcttctttatttcttcttcaaccttgagtggaagtttgatattaaggatggttatcactttattgaataaaaataacctttttaattgattttatcaattgactcagtttgccattattttagtcattaaaaatatttcacacttaaatttgatcatatatacagaactataaccgtataattttaagatgtaattatcatgtcattagtatatcactgaaatttttgtagtttgcttgattccagctgtttgactgaataaaacagaattttccaaaattcaaaaagggccctccttcattttgtgcttttattcccaaaaactcttcagaatcttatatatgaatttaccccatttgactcgtgggaacacaaaaataaaacgacatagacacaaaatgtgtcttctgtctttaccacctagattttacattaaacactcagatgtagaggatgagacactggggggcttcaggaatagaaaggaagatggcccttttctgcactaagatattctcctcycccactgcctttgatcgttcttttttcatttggttcctggatatcaaaaacatgatggtgctcactgaaacatgaaaaccaaagtttgccacaacacaaggagcagagtgaaactgctgaggtgcaagcatggaattccagaaaattagatgctccccaaatttcacattcaatagctatacaattttccagctggaaattacaaagaataagtaattatcttctttagccacattatctagtgataatcagactaaaaccaagaaagataaaaggattggtccaaatctcctaaagaggcattacctagcattttatggcaccattcaggattgttccataataatgaaagaatctctctagggtttgtatctcttgaaaactcaatgtacagaattctttctgagttaaatattaaatttttcactggtgatttatgctacttacatgataggatcatgtatgcgtacacttactacactttgttaaacagcataacataaaaatctaattccacagaaacatttgaacataaaggtatacctctctatcacagtccttatttatttctggttcttgagacattttctgcagatgcaaaaatagaaggttaatttgcttgttgtatttccgtgtatgtctcctcttttggaatgcatgttaaaataattttattcttaagtaatcaagtatggacatgaaaaattagaaaataaaataaaatttaacttaaaataattaaataaataaataattaaaattaagaattaactttttaatctatgtttagctactgccacatcattggcttctgactaacatgggaaaataattcaccttagacaaagggagaataaaaacatgaaccagcaaacttaactttgtcaccatttgtttggactaaacttaatttgttatgtgttaaatctacca

SEQ ID NO: 553489 - DNA, 1533 bp, Homo sapiens
gaattaatccatcatcaccattgccagcactggcaccattagtcaggttttctggtaatcccacaggattacttccatgcttctttatttcttcttcaaccttgagtggaagtttgatattaaggatggttatcactttattgaataaaaataacctttttaattgattttatcaattgactcagtttgccattattttagtcattaaaaatatttcacacttaaatttgatcatatatacagaactataaccgtataattttaagatgtaattatcatgtcattagtatatcactgaaatttttgtagtttgcttgattccagctgtttgactgaataaaacagaattttccaaaattcaaaaagggccctccttcattttgtgcttttattcccaaaaactcttcagaatcttatatatgaatttaccccatttgactcgtgggaacacaaaaataaaacgacatagacacaaaatgtgtcttctgtctttaccacctagattttacattaaacactcagatgtagaggatgagacactggggggcttcaggaatagaaaggaagatggcccttttctgcactaagatattctcctctcccactgcctttgatcgttcttttttcatttggttcctggatatcaaaaacatgatggtgctcactgaaacatgaaaaccaaagtttgccacaacacaaggagcagagtgaaactgctgaggtgcaagcatggaattccagaaaattagatgctccccaaatttcacattcaatagctatacaattttccagctggaaattacaaagaataagtaattatcttctttagccacattatctagtgataatcagactaaaaccaagaaagataaaaggattggtccaaatctcctaaagwggcattacctagcattttatggcaccattcaggattgttccataataatgaaagaatctctctagggtttgtatctcttgaaaactcaatgtacagaattctttctgagttaaatattaaatttttcactggtgatttatgctacttacatgataggatcatgtatgcgtacacttactacactttgttaaacagcataacataaaaatctaattccacagaaacatttgaacataaaggtatacctctctatcacagtccttatttatttctggttcttgagacattttctgcagatgcaaaaatagaaggttaatttgcttgttgtatttccgtgtatgtctcctcttttggaatgcatgttaaaataattttattcttaagtaatcaagtatggacatgaaaaattagaaaataaaataaaatttaacttaaaataattaaataaataaataattaaaattaagaattaactttttaatctatgtttagctactgccacatcattggcttctgactaacatgggaaaataattcaccttagacaaagggagaataaaaacatgaaccagcaaacttaactttgtcaccatttgtttggactaaacttaatttgttatgtgttaaatctacca

SEQ ID NO: 553490 - DNA, 595 bp, Homo sapiens
ctcctgcctcagctaggattacaggtggctgccaccaatcatggctaatttggtatttttagtagacacggggtttcaccatattggtcaggctggtcttgaactcctgaccttaggggatctgcctatcttggcctcccaaagtgctggaattacaagcatgagccactgctcctggcccagttttttctttttcagttttcaaagaaagtcttctgcaaggtgggtggttgtgagatcttgcccacataagttgataaattcccaaagaatgaaaagaaacaagtttcagaactactatcttatttttgactttgtagtttctgacctccttaaagggagaaacagatgagagctggggcctagtcrttgtgaggatacagagctcaaccattgctataatcactcaagaaggaggaattaatgaggttgagtctgaggtctaggattcaacccccaaactttcaactgggaaactggggagagtggggctcaccaaaggctcctatgatgtaggaggaagttccatgttcaggacatgctgccctcaccctcctatgtgccattttatcaccattgccgctccatcatcaca

SEQ ID NO: 553491 - DNA, 595 bp, Homo sapiens
ctcctgcctcagctaggattacaggtggctgccaccaatcatggctaatttggtatttttagtagacacggggtttcaccatattggtcaggctggtcttgaactcctgaccttaggggatctgcctatcttggcctcccaaagtgctggaattacaagcatgagccactgctcctggcccagttttttctttttcagttttcaaagaaagtcttctgcaaggtgggtggttgtgagatcttgcccacataagttgataaattcccaaagaatgaaaagaaacaagtttcagaactactatcttatttttgactttgtagtttctgacctccttaaagggagaaacagatgagagctggggcctagtcattgtgaggatacagagctcaaccattgctayaatcactcaagaaggaggaattaatgaggttgagtctgaggtctaggattcaacccccaaactttcaactgggaaactggggagagtggggctcaccaaaggctcctatgatgtaggaggaagttccatgttcaggacatgctgccctcaccctcctatgtgccattttatcaccattgccgctccatcatcaca

SEQ ID NO: 553492 - DNA, 595 bp, Homo sapiens
ctcctgcctcagctaggattacaggtggctgccaccaatcatggctaatttggtatttttagtagacacggggtttcaccatattggtcaggctggtcttgaactcctgaccttaggggatctgcctatcttggcctcccaaagtgctggaattacaagcatgagccactgctcctggcccagttttttctttttcagttttcaaagaaagtcttctgcaaggtgggtggttgtgagatcttgcccacataagttgataaattcccaaagaatgaaaagaaacaagtttcagaactactatcttatttttgactttgtagtttctgacctccttaaagggagaaacagatgagagctggggcctagtcattgtgaggatacagagctcaaccattgctataatcactcaagaaggaggaattaatgaggttgagtctgaggtctaggattcaacccccaaactttcaactgggaaactggggagagtggggctcaccaaaggctcctatgatgtaggaggaagttccatgttcaggacatgctgccctcaccctcctatgtgccattttatcaccattgcygctccatcatcaca

SEQ ID NO: 553493 - DNA, 1290 bp, Homo sapiens
caggagtctggagtcatgttctcaccatgtccccctctggtgagctggaggcaggaggtcacagaggggactagactaacgacaatggcctgatagaacacatggttactttctagaccatatttcaccccagtgctgttaatttctcatcttctcattctcaccttaataagtatattggtgtagtcttgaaaggatgctgtttcttgactgccaagtattttttaaaatgtctattcccccactgtatgtttagcttttaaaatacactgttgacagtaaaaatcatctagagatttggcagtatcaagaattttatgaaaaatacactttttttcacgtgccacctgtcatggtcagggttcttggtagcaaatgatagaaacttactccagataatttaggagtctctgtggtacccttcagtctttgtagagaatttatgggaaggctactgggtattttacagaattgatgaaaaatgcaaaagaatgaggtttagaaagtggttcaagaatgaaagtaagttggtagtagaggacccagccaaggttatgtccctggaatattctagataggacagcacttctacacgagaccccacctccatgggtgccatctccactagacaattgctgcctccagaatcccagctctgtccttgccaccacgaactcacaatgcattgtctctagaactttgcatctgtttctacacgttcaactctggtgggagtttttgaattagtggagttaaggcgtgatgtcacactctgtttgtggttggaggagtatctgtggtacccttcagtctttgtagacttaaataaaggagttattcctcaatagtgagatctaaataatgtggagcaaaaaatatgtgtgtatatgcttatcaactactacctctaatttttccccaacacatccatatgccactctgtaccactccctaatgaatatttttattcacaatccacttacycatattctccatttattctgtttatcaattttctcactaatgattccacgatccactttttttgcatttttccttctatttcttttcctagtggtattttgtttccatttgcctgaatgccagtacaaaacttccatgtataatctgctatccctttataaatgatgaatcttcaaggccagatcacaaaagattatttcatcatagaaagtatgatcataaaaagctgatctcagccagaattctatacccagttcctgcatctttacttgaagatcctatttgatattctacaaatgcaaatat

SEQ ID NO: 553494 - DNA, 1290 bp, Homo sapiens
caggagtctggagtcatgttctcaccatgtccccctctggtgagctggaggcaggaggtcacagaggggactagactaacgacaatggcctgatagaacacatggttactttctagaccatatttcaccccagtgctgttaatttctcatcttctcattctcaccttaataagtatattggtgtagtcttgaaaggatgctgtttcttgactgccaagtattttttaaaatgtctattcccccactgtatgtttagcttttaaaatacactgttgacagtaaaaatcatctagagatttggcagtatcaagaattttatgaaaaatacactttttttcacgtgccacctgtcatggtcagggttcttggtagcaaatgatagaaacttactccagataatttaggagtctctgtggtacccttcagtctttgtagagaatttatgggaaggctactgggtattttacagaattgatgaaaaatgcaaaagaatgaggtttagaaagtggttcaagaatgaaagtaagttggtagtagaggacccagccaaggttatgtccctggaatattctagataggacagcacttctacacgagaccccacctccatgggtgccatctccactagacaattgctgcctccagaatcccagctctgtccttgccaccacgaactcacaatgcattgtctctagaactttgcatctgtttctacacgttcaactctggtgggagtttttgaattagtggagttaaggcgtgatgtcacactctgtttgtggttggaggagtatctgtggtacccttcagtctttgtagacttaaataaaggagttattcctcaatagtgagatctaaataatgtggagcaaaaaatatgtgtgtatatgcttatcaactactacctctaatttttccccaacacatccatatgccactctgtaccactccctaatgaatatttttattcacaatccacttacccatattctccatttattctgtttatcaattttctcactaatgattccacgatccaytttttttgcatttttccttctatttcttttcctagtggtattttgtttccatttgcctgaatgccagtacaaaacttccatgtataatctgctatccctttataaatgatgaatcttcaaggccagatcacaaaagattatttcatcatagaaagtatgatcataaaaagctgatctcagccagaattctatacccagttcctgcatctttacttgaagatcctatttgatattctacaaatgcaaatat

SEQ ID NO: 553495 - DNA, 621 bp, Homo sapiens
gttctttaggatttcaaccattttttttttcacccaatgaaaattgctgggtcatctgtgacagcctcttttggaaacctgcagttgtcctcagctggggtgagaagttcatattctcccaggcctgccttgagataaagtaaagcactacactttagaagtgcttccttttcatcctaaccaggagtttgaattaggaatagaaacattcctggagcccttcgtctctgccagagtggagagtggyccccttgggagccctccttccttccacccacaacctcagacagcattcaaaccatacaacagccaccccaaacgagctaggtagactgaaaggaaggaagagaaggaaggactaatataaaatgccttagaacatatacttcataattgatgggtcaccaacaagaagtgattacttcacactgcagggaaatacttttctggaaaacaagagacaaaaataattttcggatacctgcgcgctgactctgatctaactctgtagcctgtcctcatcccagtcacctttgttaaggtgtctttgttgagcctgagttctgtacagaaaccagaaaagctcgatattcataaacatttctttaaatgcagaaacat

SEQ ID NO: 553496 - DNA, 781 bp, Homo sapiens
agttgttccacgtgcatagcttgggcacctagcttgcaagtgacaagggaagcccaatgccacccacaccagtgtggttctttgcctccagccctggctcctttctccaaccatcttccctctctgccccgggcaggtggggagaaaaggaagaaagagaggcccacgtcatgtgtttcagcttccctttccctctctgctggtgcccactggccctcacacccatttcttgttgcaggaaggtgaacaagtgctaccggggccgctcctgccccatcatcgtgcactgcaggtgggtggagaggagattcatctctctggtcccactccctgtgtgygtctcctgtgcacattgcctgcctgtccccttggtgctagcaaactgcaggcatagtccaaatccagcacaccacctgtttttaatggccaagacctaagcgtggcattcacagttttaaatgggtgaagaaaaaagaagaaaagtatgtgatacaaactgtatgtggcccacaaagttgaaaatattgaccattggccccctatacacaaaaagctggctgaaggctagagaggcccatccaattccctcctgctgcctctgcttctgggctgagccatggctctcctctttggttgtcccattgcccaaatgacacccacaggtcacagactcccctctcaaggcccaagtcccagcgtgcaggtgctatgagctttccttcatcctcggctcactgtccctctccaagccaaccccaacgggtcacccagtgtcctcccc

SEQ ID NO: 553497 - DNA, 781 bp, Homo sapiens
agttgttccacgtgcatagcttgggcacctagcttgcaagtgacaagggaagcccaatgccacccacaccagtgtggttctttgcctccagccctggctcctttctccaaccatcttccctctctgccccgggcaggtggggagaaaaggaagaaagagaggcccacgtcatgtgtttcagcttccctttccctctctgctggtgcccactggccctcacacccatttcttgttgcaggaaggtgaacaagtgctaccggggccgctcctgccccatcatcgtgcactgcaggtgggtggagaggagattcatctctctggtcccactccctgtgtgcgtctcctgtgcacattgcctgcctgtccccttggtgctagcaaactgcaggcatagtccaaatccagcacaccacctgtttttaatggccaagacctaagcgtggcattcacagttttaaatgggtgaagaaaaaagaagaaaagtatgtgatacaaactgtatgtggcccacaaagttgaaaatattgaccattggccccctatacacaaaaagctggctgaaggctagagaggcccatccaattccctcctgctgcctctgcttctgggctgagccatggctctcctctttggttgtcccattgcccaartgacacccacaggtcacagactcccctctcaaggcccaagtcccagcgtgcaggtgctatgagctttccttcatcctcggctcactgtccctctccaagccaaccccaacgggtcacccagtgtcctcccc

SEQ ID NO: 553498 - DNA, 1021 bp, Homo sapiens
acatcacataacttggcgcacgggtctgaactgaatctggctgaatccagaacccagctttttccatttggattcagattaaaatggatattmagtttggccctggcaggaaaaaatagtcagtcagcctgtctgtggggatctcaacttattagcaatatcttttcccattcaaaatgtcttaatcctttattttagtaaatgggtccatcatccctcatgtcaaccagaatccctgactcctctctcctggagtccaattcatcaccaagtcttctacgcaacctggaatccatccgctttttgtcttctctctgctctgcccttggcaggtctccatcacttctcatgtggttcctgtctcaagcatggtctggcccctgcctctttctcttacctcatttctcttatctcttgcccatgaattctgcaatgcagttatagccaactattttcaggtcttctcaggtgttgtgtcccctcacctgtgtctggtaggttgcaaggcaagctgttcccttggcccatgcactcttccccaattccctttattgcccagttaactccatttattattcagagctcagattaaatgctgcttcatgcagggagcttttcctgagctcttaaatctggattaagtgtcctcctgcccccatgactcccaacccagcttgaacttcacccatcacaccacttcactttattccaactcaataaatatttattgaatatgtacataaatgagtgaataaacaaaagaatgagccgatggtcccttgtccccttcaaagtcactgctgttggtcaggagtgagaaagtaaaacctagacttgaagttcctgaagaataaaaatggagtatccgctcttctgtttgttctctgctatgactgccatattctccaatttacaaacacattgattcaaacaccaaaaatgtatgaggccaatcccttatcctacctcagttccagccaaccgtagctgggaatggtgatcactgcatcagatgagcaat

SEQ ID NO: 553499 - DNA, 1021 bp, Homo sapiens
acatcacataacttggcgcacgggtctgaactgaatctggctgaatccagaacccagctttttccatttggattcagattaaaatggatattaagtttggccctggcaggaaaaaatagtcagtcagcctgtctgtggggatctcaacttattagcaatatcttttcccattcaaaatgtcttaatcctttattttagtaaatgggtccatcatccctcatgtcaaccagaatccctgactcctctctcctggagtccaattcatcaccaagtcttctrcgcaacctggaatccatccgctttttgtcttctctctgctctgcccttggcaggtctccatcacttctcatgtggttcctgtctcaagcatggtctggcccctgcctctttctcttacctcatttctcttatctcttgcccatgaattctgcaatgcagttatagccaactattttcaggtcttctcaggtgttgtgtcccctcacctgtgtctggtaggttgcaaggcaagctgttcccttggcccatgcactcttccccaattccctttattgcccagttaactccatttattattcagagctcagattaaatgctgcttcatgcagggagcttttcctgagctcttaaatctggattaagtgtcctcctgcccccatgactcccaacccagcttgaacttcacccatcacaccacttcactttattccaactcaataaatatttattgaatatgtacataaatgagtgaataaacaaaagaatgagccgatggtcccttgtccccttcaaagtcactgctgttggtcaggagtgagaaagtaaaacctagacttgaagttcctgaagaataaaaatggagtatccgctcttctgtttgttctctgctatgactgccatattctccaatttacaaacacattgattcaaacaccaaaaatgtatgaggccaatcccttatcctacctcagttccagccaaccgtagctgggaatggtgatcactgcatcagatgagcaat

SEQ ID NO: 553500 - DNA, 876 bp, Homo sapiens
gaaagagtatataacatgtaattagcagagatattccaattgttaaatgttaaattataaattaaaaagagaaatatctagaaacctgacttttataattaaatgaaaaacgtgaggaaaatcaaagatgcaggaacatggaaatggattgatcgattcagtcaagcctttggtttttatgattctagcatgaaagcatcttgtgtgtctttcatgtcactacaatgccttcatttaactatgattaccaaaaaacaagtacagtagcaacttctgcagtacaaactgatggaaaggactgctgaggagacagagaagcccaaggaagtagtaccacctaggggctgaatttgtttctaacaagaaatcagcttttcattaggtaaccagatcactagatcctattctacctggccattagcaagctgataagagattttagactacaagagatgaccctggaaaagacaggggaaatttctatggagcccattccttaataagttgtgattggatatttgagacccttcagcagaaatggcttagcatttgtccatattatcatattataatttttaaaaaatacactcagaataacattctttttccatatcatcctgtgaatgaagaagagactaaggaattcattacccattgtgtaggtgaggaaacaaggcattgagtmgtaaaatactgaatctgggcctcacagaacaggaagtgggtccagggattgagtcccatatctctcagtcagagaatttcagacatacaatagacattagggataattgaggccctggttcccggctcagggcgcaggtctacatcaaaatcacctgaagatttctttctttttttttttttttttttttt

SEQ ID NO: 553501 - DNA, 1881 bp, Homo sapiens
aaattgttttgcttagagcctccttataattgtcttacttgttttatagatataagcactagaggacaagctctacctgatctagctggcctagacatatgcagattcattaattgtagaagaaagaattatagctttcaggtaaaatggctacaaaaaataattagttgctgtttttgagacaagttctcactctgtcacccrtgctggagtgcaatggcacaatcagaactcactgcagttttatagtcctggactcaagcaatcctcccaactcagcccctgagaagctgggacaacaggtgcacaccaccactcaaggctaattttctgtttattttttggtagagataaggtcttactatattgcccaggctgatctcaaactcctggcctccagtatttttctgccttggcttgccaaagcactgggattataagtatggccactgtaaccagctttagatcaattttatttaatacagataccttcccaattaaaaatatgttattagaattctcttaatccagcaaagcaatgttattactgacccagtcttcacttattttcagcttacatgcaggaacaaaattacctttattttttaatttgttttattttatattttcaaggtgcacaatatgttgttttgagatacatgtgcataaggaaatgattactataatgaagaaaattaacaaatcgatcatatcacttagctctgcttcttttttatgataagaacatcaaaaatctagtccctcagaatatttcccaaaaacaatacaagattatctattatacctacaggttgtacatcagattcatttattctacattactgcacctttacaacttttgcccttcatttacctattttcttcccaccaatgtaaccaccttttttaatgtattaaacttataaaaatagatttcaaatatgagtgggaccatgaagtatttttctctgtgtgtctgtcttatttcacttaggaaacctaccatttacatgtctcctaaatttagtacagaaataaagtgctagtcaagaatgtgtctccgttttgtaagattaatttttttccaagttatcctctttatcaatttttactttttgtattatagaagagtgaaaattcttgtattaaaaaaactgtaaccaggctattgataaataacttcctttagggataaaaatctcaggaagttcaagatttatgtattaatgattgacgatgttcttagtggtctctctttgatttatttcaattgtaagtaattcttggtggtattctaacataaattctgacaggtgaagagaataaataaagtaagtatctctaggagaatcaatacaataagattatcttggttaaatggctaagaaaatatggtaaatagacacaaaaactgtttcatcttccaaaatcagagtcaaatactaagtgatcgtaaagtagctaattctgtctttccgccaaagtgaatctgagctaaattagaagaatgtcaggaataatttttccttgaaatctagcaacaaataatgtaattaaattatgaggctttgactgttgcatagagttttagcatcaacagaaaagctcacaaaacataggtgaaaatcaaaaaggagtgctgggttggagccctaaggtgagtaattttatcatctcagatcacttggaaaaaagcagcgagtccaaaagaagctggggataagctttctctctgctaacccctaatgttctgcatgaaatatgtggaggcagaagagagacagtttattatagtctacatggtatagagtgaaggaataagagaatatttctgataagtattttcaaaatttggagaatcattcctatccaaatcattca

SEQ ID NO: 553502 - DNA, 1881 bp, Homo sapiens
aaattgttttgcttagagcctccttataattgtcttacttgttttatagatataagcactagaggacaagctctacctgatctagctggcctagacatatgcagattcattaattgtagaagaaagaattatagctttcaggtaaaatggctacaaaaaataattagttgctgtttttgagacaagttctcactctgtcacccgtgctggagtgcaatggcacaatcagaactcactgcagttttatagtcctggactcaagcaatcctcccaactcagcccctgagaagctgggacaacaggtgcacaccaccactcaaggctaattttctgtttattttttggtagagataaggtcttactatattgcccaggctgatcycaaactcctggcctccagtatttttctgccttggcttgccaaagcactgggattataagtatggccactgtaaccagctttagatcaattttatttaatacagataccttcccaattaaaaatatgttattagaattctcttaatccagcaaagcaatgttattactgacccagtcttcacttattttcagcttacatgcaggaacaaaattacctttattttttaatttgttttattttatattttcaaggtgcacaatatgttgttttgagatacatgtgcataaggaaatgattactataatgaagaaaattaacaaatcgatcatatcacttagctctgcttcttttttatgataagaacatcaaaaatctagtccctcagaatatttcccaaaaacaatacaagattatctattatacctacaggttgtacatcagattcatttattctacattactgcacctttacaacttttgcccttcatttacctattttcttcccaccaatgtaaccaccttttttaatgtattaaacttataaaaatagatttcaaatatgagtgggaccatgaagtatttttctctgtgtgtctgtcttatttcacttaggaaacctaccatttacatgtctcctaaatttagtacagaaataaagtgctagtcaagaatgtgtctccgttttgtaagattaatttttttccaagttatcctctttatcaatttttactttttgtattatagaagagtgaaaattcttgtattaaaaaaactgtaaccaggctattgataaataacttcctttagggataaaaatctcaggaagttcaagatttatgtattaatgattgacgatgttcttagtggtctctctttgatttatttcaattgtaagtaattcttggtggtattctaacataaattctgacaggtgaagagaataaataaagtaagtatctctaggagaatcaatacaataagattatcttggttaaatggctaagaaaatatggtaaatagacacaaaaactgtttcatcttccaaaatcagagtcaaatactaagtgatcgtaaagtagctaattctgtctttccgccaaagtgaatctgagctaaattagaagaatgtcaggaataatttttccttgaaatctagcaacaaataatgtaattaaattatgaggctttgactgttgcatagagttttagcatcaacagaaaagctcacaaaacataggtgaaaatcaaaaaggagtgctgggttggagccctaaggtgagtaattttatcatctcagatcacttggaaaaaagcagcgagtccaaaagaagctggggataagctttctctctgctaacccctaatgttctgcatgaaatatgtggaggcagaagagagacagtttattatagtctacatggtatagagtgaaggaataagagaatatttctgataagtattttcaaaatttggagaatcattcctatccaaatcattca

SEQ ID NO: 553503 - DNA, 1881 bp, Homo sapiens
aaattgttttgcttagagcctccttataattgtcttacttgttttatagatataagcactagaggacaagctctacctgatctagctggcctagacatatgcagattcattaattgtagaagaaagaattatagctttcaggtaaaatggctacaaaaaataattagttgctgtttttgagacaagttctcactctgtcacccgtgctggagtgcaatggcacaatcagaactcactgcagttttatagtcctggactcaagcaatcctcccaactcagcccctgagaagctgggacaacaggtgcacaccaccactcaaggctaattttctgtttattttttggtagagataaggtcttactatattgcccaggctgatctcaaactcctggcctccagtatttttctgccttggcttgccaaagcactgggattataagtatggccactgtaaccagctttagatcaattttatttaatacagataccttcccaattaaaaatatgttattagaattctcttaatccagcaaagcaatgttattactgacccagtcttcacttattttcagcttacatgcaggaacaaaattacctttattttttaatttgttttattttatattttcaaggtgcacaatatgttgttttgagatacatgtgcataaggaaatgattactataatgaagaaaattaacaaatcgatcatatcacttagctctgcttcttttttatgataagaacatcaaaaatctagtccctcagaatatttcccaaaaacaatacaagattatctattatacctacaggttgtacatcagattcatttattctacattactgcacctttacaacttttgcccttcatttacctattttcttcccaccaatgtaaccaccttttttaatgtattaaacttataaaaatagatttcaaatatgagtgggaccatgaagtatttttctctgtgtgtctgtcttatttcacttaggaaacctaccatttacatgtctcctaaatttagtacagaaataaagtgctagtcaagaatgtgtctccgttttgtwagattaatttttttccaagttatcctctttatcaatttttactttttgtattatagaagagtgaaaattcttgtattaaaaaaactgtaaccaggctattgataaataacttcctttagggataaaaatctcaggaagttcaagatttatgtattaatgattgacgatgttcttagtggtctctctttgatttatttcaattgtaagtaattcttggtggtattctaacataaattctgacaggtgaagagaataaataaagtaagtatctctaggagaatcaatacaataagattatcttggttaaatggctaagaaaatatggtaaatagacacaaaaactgtttcatcttccaaaatcagagtcaaatactaagtgatcgtaaagtagctaattctgtctttccgccaaagtgaatctgagctaaattagaagaatgtcaggaataatttttccttgaaatctagcaacaaataatgtaattaaattatgaggctttgactgttgcatagagttttagcatcaacagaaaagctcacaaaacataggtgaaaatcaaaaaggagtgctgggttggagccctaaggtgagtaattttatcatctcagatcacttggaaaaaagcagcgagtccaaaagaagctggggataagctttctctctgctaacccctaatgttctgcatgaaatatgtggaggcagaagagagacagtttattatagtctacatggtatagagtgaaggaataagagaatatttctgataagtattttcaaaatttggagaatcattcctatccaaatcattca

SEQ ID NO: 553504 - DNA, 1494 bp, Homo sapiens
atggatatgtaagctagggacagtcatcaatgtcaacggagcaatggcccaactcccagaagaacaaagaaacagaactgacaggggacctgaaggaggggcaagagagacaatctaaaacatacactcggtagtatatttccaaggttagttgtaaggagaggccaagtaagagaactacattgcaaggttcttgaacctaaacagaacacaggtggctaggcatttgaattttacccacaagctaattgttccctctatccaaaaacatcttcccctgcctaaaactttactacctggatgttctttttattcattaaacaatctctttttggcatttgaaggaagattgtaagtcattcataccttaacataaacgatgaagaaaccagtcagttccaaactataytttaaaacatgggactgttgggtagtagcacagctacttgggaggctgaggcagaaggtgtccaggagtttgaggctatagtgagctatgattgcaccactgcattcaagcctgagtgacagagaccctggtctcttaaagataaataaataggctggaagcagtggctcatgtctgtaatcccagcactttgggaggtagaagtaggagaatggcttgactccaggagttcaagtccagcctaggcaacataatgaaaggaaccctgtatctacaaaaaaaaaaaaaaaaaaaaaaaattagccaggtgtgtgtgcctatagtcccagctactcaggaagctgaggtgggagaatcgcatgagcccaggactttgagactacagtgagctatgattgtgccacagcactctaacctgagccacaaatgagacccagtctctgaaaaaaaaatttttttaatagaaataaataaataaaatgtggaaatgtccttttttttttaagacggagcttctctgtcgcccaggctggagtacagtggctcgatctcagctcactgcaagctcggcctcctgggttcacgccattctcctgcctcagcctctcgagtagctgggactacaggcggccgcaccacgcccggctaattttttgtatttttagtagagacggggtttcaccgtgttagccaagatggtctcgatctcctgacctcgtgatctgcccgccttggcctcccaaagtgctgggattacaggcgtgacactgctcccggctggaaatgttcttatggctagggagaaggaagaattaattttgaaataggggggtattttgaggggcaggcaggcccagttatgacaggaaggcagcattgatgacacttagtactaaagtgctagaattatggacaagaattggaagacaaacagaagaaagcctttaaattcaatttttctagtttacattttctacagtttatccatcccacaagatgactcccagaacccagatggaaagaacaatatatagtacctttatgcaaagtacatcctttcccccaggtggtgaagaggcatgcca

SEQ ID NO: 553505 - DNA, 604 bp, Homo sapiens
agcagctggctataactggcttggacagtctactacgcatatttctcccaccctcatactcagtatagtgaagttggtagcttgaaattgactatgatgaaagcatttacaccaagaaaactggcaaatgctacaaatcaaattttttttcagaatcaactattgaacgtttaccagcacaccactatttataaccaagaactactgattttcgtagacattatcacagacccaaggaactacccaaattttatttctggtgaaatgaawcaggactaaggaaaagaaaaaggtgatcatggttgtcctatggaaaaggggaaaatgagtagatgagttgggattgaacacatcagtgcagacatggggagcctaagttgatgcaagtgtacctcagcctcttgaactcagattcatatgagcaagatcctagtagctactattataaccaattcgtagacatggaaagtaagaactagtgtatcgcagctccaagagaaagaaagagagaataattcacctttcctttgtttttattctagcccccacccaattacatggtgcccccacacaatgagagaaaatctcccttagtataatcgga

SEQ ID NO: 553506 - DNA, 533 bp, Homo sapiens
ttaaattaggaatgtactattaattttcactgtttgtgaggtagactacagtactgtattttccagagaaattgtgtaattattatttaatcaaagctaaatcatatggtatcattgcagaactaagtaatgtataacatatgtttctgagacagaaaaaattaaactcaactaaaactttacattataaaatataactatatgtatttctttttttaaatttctcaaatttttcctgtgtatccaaaaggttttcgatgttattctcaataatatattaagaaagacacagaacaacatattctggagttaaaagtaaattaatgagaaatacatcaagagacgataagtaaaatctrggtgaaggatagcaaggttaacttttttattgttcttgtaatataagtacttttttaatgaatgtatgcaattgaggacaataaatataagagcacataaatgtagaaattcaaatacaatacgaattgtcaaattatagactgtcttctataaagacattattgttttcttgg

SEQ ID NO: 553507 - DNA, 633 bp, Homo sapiens
gggtgtaaactcacctgtgtgtctccagagcaaacgtgatccagagaagggttcagcctggtggttcataaaaggcatccagggccgggcgcagcggctcactcctgtaatcccagcactttgggaggccaaggcgggctgatcacctgagatcaggagtttgagaccagcctgaccaacatggtgaaaccctgtctctactaaaagtacaaaaattagccgggtgtggtcatgggcgcctgtaatcccagctacttgggaagctaaggcaagagaatcacttgaaccctgaggcagaggttgcagtgagctgagatcacaccactgcactccagcctcggygacaagagtgaaactccatctcaaaaaaaaaaaaaaaaaaaaaaaaccatccaggcccacccatggtcctgaggctagtggggcaggatgtgccaggaacatggagtcacacgtgagtgacccccaccttcgccaggtcctcaaatccctcaacaagacctatcagaacctgaagaggaagccggtcgccgtggacctggaccccaaggccgtcacctgcgacgagctctttggcatcatcaacccagtgaccagggaatggaaagatggtaacgagggtggtcccgggac

SEQ ID NO: 553508 - DNA, 543 bp, Homo sapiens
ggcaaaattagctcgtgaggaggatttggggagcattttttctccgcataattcagactttttatgtcaggggtgatgcaagttttaaatgccccaaatccaaaccagactcacctttaactttggggttaacgctagtgttaactaagagtttttttcctttttctttgagagggagttttcgctcttgtcgcctaggctggagtgcaatggcgcgatcttggctcatttcaacctccayttcctgggttcaagcaattttcctgcctcagcctcccgactagctgggattacaggcacaagccaccacgcccggctactttttgtatttttaatagagacggggtttcaccatgttggccaggctgaactctgacctaaagtggtcggtctcctgacctcaagtgatccgcccacctcggcctcccaaagtgctgggatcacaggcgtgagccaccgcgcccggccaagagtttcttaaactttaagcagtgtcaggatctcccagggaggttttgaaaatgtcaatgccccactcactcc

SEQ ID NO: 553509 - DNA, 1470 bp, Homo sapiens
ttagctccagagctttcacccctagtcattaatcaatactgtaccacaataggctctagatgaagatgcagacaagactagtagctattgactagagactgatgagtattaattaaacaattgacaatttaaaatcagtagttactatatttactatattttaacatatacacattaaaatctttctctaaaatctgaatatttgggaatttataagcttccttaaatttctaggaaatatggtgttaagaagactaatgacagaaacaaactgttccaaattaaaaccagatcaaaggttaaaaatcaagtcagcatacatacttccatatgcaagtatgacaagctaaaatttgctgaaygatccccagtctcagcacacacacacacacacacaaagctataaaacctctacctaacactaaaacagctacctaaaaaatactagagagtaaataacagtagggatgtgggggagtgggttgcacataccccttgaggacggcatacagagtacaaaccacacaagtacttcctgtcttccatttgacctggtgctaactaccatctatcctgaaagagcagtgactccagtaggtacacgacaaaacaacctttgtattctggctggagaaccagattagggaagctagaaaaccatgtatactgaaaggagtggagaatcatagaagggaatgagctagagaaggaacccaccaactcttcctagtcacatccctgactgatcccaaagccaaacatggctgaacagcatcaaagtggttcatgtaaagacaaagatttgaattgagtctgaggctgctacaccagaaacagtgtttgttcagggcaaaaccaacaacaacaaaaaaatcacatactaacaccaaagaaataacaccgattgaagaaaaaatgaaagaatacagaatctgaacagctgaacatttgtaaagcccacaatacaatgctttgaaaactaagagtgttgtcacagataaagggaatcacttcacaatgataaaaggataaatccatcaagaaggcatgcaattgtaaatgtgtaaatatccattaatagagcttcaaaaaatataaagcaaaaaaatgacagaataaagtgtgaaatgggcaattttaatgaaatacttgtagatgttaatacccctccatcaccgcttgatacaagaattgtcaaaattcatgaatgagaattgatataattactacacaaggataaggaatgtatgcatgatacaaccaaacactttaacctaattaatatacatgcatagaacactaagctgtaaaacaagacaatacgcatattcatttcaaatacacatggtattacatgtttaacaggatagaacagtctgcatcataagatatctcaataaagataaatcatttcaagctaaactgagcatgctttcttaccatgatgaaattatatttaaaataaaaaaa

SEQ ID NO: 553510 - DNA, 469 bp, Homo sapiens
aaaacctgtttgatcccctactatttcccagagttaatcttcatgtgcccccaggttgttgacccacacagtccttcaccaaaaccactacttaaaatgaaggtggattaaatgcaaaagaaagcacacacacagagagacacacacacatacacacacaatcctaactttytctaaaacaggcattcagcaaaattttattttctggtgcattcccccgagattttcctgaggacattttagaacatattctccagacgtactaatgacctgctaatgaactgacacagactgtacttatgtaaattatgaagttgctgaacctggagttaaaggttggtacatttcaaggatatgaaatcaatctccctgatattaataactgtcacctatatgcccttcacgtctgtgttatttcatgtccctccacctgatgagtgtcataggtgactttgaaagcctggacatt

SEQ ID NO: 553511 - DNA, 483 bp, Homo sapiens
  misc_feature 356: n = A,T,C or G
ttacatgcaagaggagagaatattatatcatccttttaccctcttcaccagttcttggtttcattacttagatcttctcagaagataagatccataagtaaatttgtgactctaatggtattttaacattactcagaataaagtgattgtttcattaatccagagtaactataaagggaggcctttcagaagaacagagtagatgagtcacatttgcaccactttttacctaataaagttccatttgtcttggatgagtgtctctattaaataacagcagaaaataaaatgacagcaatatatctcttttcctttgcttgtgctagagagagaggagcagtaccaggcaaagcganacagcatctagctcttatttgatgtaaaaagtttttcccctgcaatcagttgctgtttcaagttagctatgatcttctttttcctccttctttgtattgttaaatgcwgaaaaggcacctctgcccc

SEQ ID NO: 553512 - DNA, 1234 bp, Homo sapiens
gaaagcaacgtactatagtaacattaagaatctttcttctgaaaaaaaaaaaaaaggttatgaaacaatcagtttaccagaagaattaattttgagctggatacacctatttttcaggattgtgacattaaatttcttaaaacaatgccctggaaatctttgcctatcatcgagtatttgagcattccctactcacatatccctgccccatttgaaaacaactggatgatgacatctttaggaatcattctaccttaagtaccccagaatttttcagttctgtccctgaatgaatgaagtactattatttttcaaagaaatcwttgaaactagaggagagctaatctgccaagccaaatattttgaagtgggtagatctaaagctctcatacaggaatattgtagatataaacaataactggaatggctatcagataaaaatattgttgaattccatgagtagatgatgaaataaccaatggactgaaaattttaatttcaggaacttgaaagatggtttaaagctaaaccatctttacagctgaattggattaatttaattcactagtgagttctacatttgatgtttgtattagtctgttttcacactgctataaagaactacccgagactgggtaatttatgaagaaaagaggtttaattgagtcacagttccataggcttaacaggaagcatggctgggaagcctgaggaaacttacaatcatggcagaaggcaaagggaaagcaaggcacattcttcacatggttgcaggagagtgagggagcaaacagggaagtgctacacatttttaaaccatcagatctcatgagaactcactgaccatcacaagaacagcaagggggaaatccgctcccatgatccaatcacctcccaccaggcccttcctccaatacatggggattacaattcaacatgagattgggtggggacatagagccaaacctcacaatgtattagacatgggcaagaaccatttgagctttcatcatagagaatgtttttccagaggatcaagttaactaaaagacttatctctggaggcacggcttggctctacttttcctaacttaactacatcatcaaccacatagaaaatttgtaacatcaagatgtctgtttatagagttctattgcaaaatagagatatgacgttaactattgtcttcccaattcctagtgcttatcatgtactatgtatgatgacctatgc

SEQ ID NO: 553513 - DNA, 627 bp, Homo sapiens
gttaataaaggtgacaatttgtaatattatttaaaatttggaaacaaatatccagtaattaggaaataatcatactataataaaccaagttaaaagactatttttagctactaaaaacaattatgaatatatagcaagatggcagctaattatgaattagttggaaaatggaaaaacaaatgtttttacacagatgactacattataatcccaacaaatctgtcgatataaaacaaaaactactatgaaccaaggtaggaacaaaatgaaatatttgcgtaagtagtgagtaatgagtatattgtttttctttttaatagtgtccttaactgctgggcgcggtggctcatgcctgtaattccagcactttgggaggccgaggcgggtggaacacgaggtcaagagatcaagaccaccatggccaaccaacatggtgaaaccccatctctactaaaaatacaaaatttaactgggcrtagtggtgcacgcctgtagtcccagctacgtggcaggctgaggcaggagaatcgcttgaacccaggaggcagaggttgcagtcagccaagattgcgccactgcactccagcccgggcgaaagagcgagactccgtctaaaaaaaattaaaa

SEQ ID NO: 553514 - DNA, 912 bp, Homo sapiens
atgaactttgtgagataattatggtctaaacagtacacaaatggaaaaatggtgtcccctcaggtatattggctgtcataacaaaatgtcttccaaacttgagttttaaaatgattgtcttaatttataccttactctgtttaaattatcgcacactccacattttaaaagaatagatctgcttctgcttcaaaatcatgaaagaggaatatgagaaataacctacctgtcaagtgttaggtgtatcttttgttcttattgacattcatacactgtaatacattctgatactttctgaaggatgttgtatatgctactgtgttatccctaccttcaaaatgttgcagggcagagtgcaagacaatttccatgcataaggaactgattaatataattatttctcaggttggcataatatatttatacaaaataattttggatacagaatgaattaaaaattaaaatgcaaaacatgtaaacaaaatcattttttaaaaaatgatttctgtcattctccatctgcccaacaacttcacatggcccaggccacccactgttattagcttccttccaacatttttttcaggtatgtattctttttttttttttttgccttaatarcatattatataaactcttctgctcctttatttttcacttaataatttttgtagtcaagtctcgttttctaatagctatatagaattgcagcttgtatatgtactataattatttagctagttctctttgatgaggtttggcagtttaatttacctctattcgattctgggccagcctttgttgtttgcttccctggaatagaatgaggtagaagtgactgtatgtgacttctgaggctacattagaagaatacagttttctcctctcatcttcctcttctcttttctctcc

SEQ ID NO: 553515 - DNA, 431 bp, Homo sapiens
actcaggagttggaggttgcagtgagccaagatcgtgccactgcactccagcctgggcgacagagtgagactccatctcaaaaacaaaacaaaacaaaacaaaaaaacaggcattaccagcctgccacagaatatgcctagagaaatctacaggtgaccctgatggggcatgcagaacccagagccgtggaaatcacctaaaaggaggggaccacctaaaaggaggggacaggagagcatctgagcagactgtctgttgcctggagcaacaggaggactctctggggtcagctgaaagggaagcagtcagggracttgcaaggggggagtaccactcgggcaagggcaggagaataacaggcggtgccctggaggaacactgcatgctgctgaggaaggagggcggccttggcgatgatgtcaccatgaag

SEQ ID NO: 553516 - DNA, 648 bp, Homo sapiens
catcatgcaacagcctcaagacagcagaatcaaaccaccatgatccttttcgctgacatcacacggcgcctggtgtggatggaccatggtgcacacagccatcacccttaggtgggcatcaattgggtccagtccctgtccccactgccacacagcagcactgcaagaaaacaaaactccttttgaactggttcctgtactccttgcagggcatcgtccaggatgggggtggcagggtcaccttctgtgtgcccttttagtttaaacggatgctgcacactgcyttttccagaagcggaagcaattcacaccctgccagccatctctacgcatgtgtttttcccgacaacctcaccagcatcagaggttagagctttgcatctgctttcgcgttataaaacatgaacacaggtctacttaagaaacaccacagcaggaaagcagaaatgactctgaattcttctgtgcaagcagagagagggagcggcctgggagccaaggccgcaggtcggccgctccaccacaccagggatccccggcccacccgtggactccctgcctcgcacgccgcgcccggctgcccgccgcttaccttctgcagaaggtcaatttcctgctgcttggcactgagaacagccagggcctggt

SEQ ID NO: 553517 - DNA, 648 bp, Homo sapiens
catcatgcaacagcctcaagacagcagaatcaaaccaccatgatccttttcgctgacatcacacggcgcctggtgtggatggaccatggtgcacacagccatcacccttaggtgggcatcaattgggtccagtccctgtccccactgccacacagcagcactgcaagaaaacaaaactccttttgaactggttcctgtactccttgcagggcatcgtccaggatgggggtggcagggtcaccttctgtgtgcccttttagtttaaacggatgctgcacactgctttttccagaagcggaagcaattcacaccctgccagccatctctacgcatgtgtttttcccgacaacctcaccagcatcagaggttagagctttgcatctgctttcgcgttataaaacrtgaacacaggtctacttaagaaacaccacagcaggaaagcagaaatgactctgaattcttctgtgcaagcagagagagggagcggcctgggagccaaggccgcaggtcggccgctccaccacaccagggatccccggcccacccgtggactccctgcctcgcacgccgcgcccggctgcccgccgcttaccttctgcagaaggtcaatttcctgctgcttggcactgagaacagccagggcctggt

SEQ ID NO: 553518 - DNA, 613 bp, Homo sapiens
tgtatcaactggattatactgtaagtctaataacgttcaccaaagagacatttataaaagggaaaataaaaatcaggaacaaccaaaatttctagcagtggaggaacactaaacagagtatggaagatttgtagtttggaagactatgcactcattaaaagaagagacatgtcatgacacaaaagatgttcatgataattttatatgaaacagcaagttataaaatartatgatcaagtttctgtaaacacaaaaatatacatctatagaataaaacaaaaggggtcaaaagaatgctgtttctgcagaatgacagagatttgtgttttattttgcatttgtatttccagaaatttctacagtgaaacataacttctgtaataagcacatgttaaagcaaatatgcctcaccacaggctaaatgctttaacaaaaattacgtaaaatttgaaaaccacacgataggtttctaagaaccagccaggggctggtctatttagcacttgatgcctctataatttttgtcttgggtacgtgcatttaaaaagcgccccaatctggagtgggaggtggggagctgctgaggctcacatactctttgggccgcgctatc

SEQ ID NO: 553519 - DNA, 613 bp, Homo sapiens
tgtatcaactggattatactgtaagtctaataacgttcaccaaagagacatttataaaagggaaaataaaaatcaggaacaaccaaaatttctagcagtggaggaacactaaacagagtatggaagatttgtagtttggaagactatgcactcattaaaagaagagacatgtcatgacacaaaagatgttcatgataattttatatgaaacagcaagttataaaatagtatgatcaagtttctgtaaacacaaaaatatacatctatagaataaaacaaaaggggtcaaaagaatgctgtttctgcagaatgacagagatttgtgttttattttgcatttgtatttccagaaatttctacagtgaaacataacttctgtaataagcrcatgttaaagcaaatatgcctcaccacaggctaaatgctttaacaaaaattacgtaaaatttgaaaaccacacgataggtttctaagaaccagccaggggctggtctatttagcacttgatgcctctataatttttgtcttgggtacgtgcatttaaaaagcgccccaatctggagtgggaggtggggagctgctgaggctcacatactctttgggccgcgctatc

SEQ ID NO: 553520 - DNA, 651 bp, Homo sapiens
cctctacactattcctacatttatatgattgcactaaattatttatgtggatctttctgcctcagcctcccaaagtgttgggattagaggcaagagtcactgtacccagccctataaattatttcaaggtcaaattttgtccttgaaatcaattaaattcaaactgccaatatccaactctataaaagcatttaagaattaaattattcatatagagttttttttaaatgaaaacctactagcttaaccacttgctattagaccaggtgtccamataaatcccaagcaaattcaagctcagtatcttttgagctaagccaatgtcagatatggggttttaaaaggaggaacattaaagccaatgaccaggctccattagcagaaagagctgaaagaaaattcctatagctattttattttttgaatccagcagatattatgctcaaaaccagtgttttccaacctaggttctcatcagaatctcttggagaaaatttaaaaaatacaaagatcaggtctccacactcagaattttttaacttaattagtctatatgaaacaggacatcattagataattctaacgtgtagtcagttttagaaaaccattattataaataaagcctccaaaaggcagttaagcatgccatca

SEQ ID NO: 553521 - DNA, 651 bp, Homo sapiens
cctctacactattcctacatttatatgattgcactaaattatttatgtggatctttctgcctcagcctcccaaagtgttgggattagaggcaagagtcactgtacccagccctataaattatttcaaggtcaaattttgtccttgaaatcaattaaattcaaactgccaatatccaactctataaaagcatttaagaattaaattattcatatagagttttttttaaatgaaaacctactagcttaaccacttgctattagaccaggtgtccaaataaatcccaagcaaattcaagctcagtatcttttgagctaagccaatgtcagatatggggttttaaaaggaggaacattaaagccaatgaccaggctccattagcagaaagagctgaaagaaaattcctatagctattttattttttgaatccagcagatattwtgctcaaaaccagtgttttccaacctaggttctcatcagaatctcttggagaaaatttaaaaaatacaaagatcaggtctccacactcagaattttttaacttaattagtctatatgaaacaggacatcattagataattctaacgtgtagtcagttttagaaaaccattattataaataaagcctccaaaaggcagttaagcatgccatca

SEQ ID NO: 553522 - DNA, 534 bp, Homo sapiens
agaccagtcactctcaggaacaccagcagagccgggcagacacatgtcctaattttcccaggagcagactgattgaaccataggagggtctgtctgatgtttatcttggcagaattctcagatgagttagcaaatagtggctggagataaactgaaactttgagcaacctctggactgactctgattaccctccacaccctacctgcacagggaggagagaccacaaagccagcagcaaacagtaaacttttccaagaatcagagaggaaggagttcctgacaccctgcagcaaaaacaacctcaaaattcccctgaagacagacccatgggagctggggtcaaggtggccttgcgcttcaccgaggaggtgtcattaccaaacgtgctggacattggctacctacggaagaaagattaaggactgaaagaaaatagtggagaacatgcttatgacatgggggtaggacagggaaggccttgagcaagacacaaatcacaaaarcaaatagagaaagagtgatgtctaccttca

SEQ ID NO: 553523 - DNA, 2153 bp, Homo sapiens
cgcctaggtgtcagctcaatcatcacctcctttgcaaatcttccttgacccctagacctccctttcacaaagtaccttgagtttacactttgatgagtgtcttatgtctactgtaatactatgtcccaatgaagatgtactggcaatcataatasgtagtattgggttaaaagcattagtttgctgtaggtacgttaggagtactccccatgtgattgatcagtgaatttaaaaatggctaaagtgggtaaccttaaatgatggtgcaaatataccttaaacattttatattttcattgaaaacacaagtgtacttgacacctcttgatgtagagcagaggctttttttcttcgaatatggggtcaccagtagaaggtctctggtgcatttcctgcataaactatgctctagtgcaacatctacaataattactttccttatttttgaagtggaccatatctcgacatttattaatcaatctgcatgtgtaaaacctttagatttttatgaattcctcctcaagctttatagtcaactatatgagtggattgccctctgtggatctgatagcaattttttaaatgattcacgtttcaacttgttaaaaacatttaatttagttaaaaaccaaacaaaaaagagctttgtttcttttcacattcatttctcagtttagatcatctttaattaaatataaatgtaagaaagttggaaaatgcaaagaaacgactcgttgtaagcacataactcacgtggggggaacagacatgggtgggcacactagcaaacacctgccagctgcatgtggacccaggtgggcaccggactgttttaaacacaggagagggcccattgtctaactggtgagttggttgagtggaagctggttgagaacttttactgcaaaccatttacagtagaccacaattttatagtcctgtttggcactttttcatatcactgggagcctgaagaaatagaagtgggttggatctctttcagcctcggaaaagcctgccattcccccatctaaaaaccctttccccattctcttactctgtctcatcatgtatgtaacatgtatccatgtatcatcattaagtgatctcattttatattgtttacttgaatatttcctgtaacccccctgtctgattccactagaatgtgagctctatgatggccaagcctctggctgcactgtgccccgtgtgtccccagcatcctggtggggctcaatacacagagagctcataagtagcatttgaatacatgaatcaaagtatggaatggcccagtttactgcagcctttttgcaggtgcaaaagatgatcttttagaaagcagaaacagggggtctggtgcatgagatctttttctcaatgtgactgtgctgtgcagaccttcacgtggtgtcttgtgaaagactttgaccactgtgtggactttccttcagtgtatctttcagagtgcaagactgggaatggaaagaactacagagggacgatgtccaaaacaaaaaatggcatcacctgtcaaaaatggagttccacttctccccgcagacctaggtcagacttttcctttcatctttgtgttcatctactgtaaagtgtccgtctgtgtctgtgagggattggttccaggacccctgtggctaccaaaatccatgcttctcaagtcccttatgtaaaatggtgcagtatttgcatataacctacataccttctcttgtgcaatccctaatataatgtaaatgctatgtaatcgttgttatactgtattgtttttatttgtattatgttttattgtcatattgttattttctctcatctttttcaagtcttttccatccacagttggttgaatttgtggatgtggaacccatggatacagagggccaactgtatttaggataatttcatcacttttaattcaaaccagaatatgtgaataagcagacagaaagaatctttttgatgtcgatgttcaactatttttggcaccatagtagaacatggttgctttctattttttcttgggtatggaggtttcttgaagacctagaacatagaagaatgcctagttaaaaaaaaaaatcaatgaaactacgagttttaggccaaatctgagaaaagaccaaagatgacta

SEQ ID NO: 553524 - DNA, 2153 bp, Homo sapiens
cgcctaggtgtcagctcaatcatcacctcctttgcaaatcttccttgacccctagacctccctttcacaaagtaccttgagtttacactttgatgagtgtcttatgtctactgtaatactatgtcccaatgaagatgtactggcaatcataataggtagtattgggttaaaagcattagtttgctgtaggtacgttaggagtactccccatgtgattgatcagtgaatttaaaaatggctaaagtgggtaaccttaaatgatggtgcaaatataccttaaacattttatattttcattgaaaacacaagtgtacttgacacctcttgatgtagagcagaggctttttttcttcgaatatggggtcaccagtagaaggtctctggtgcatttcctgcataaactatgctctagtgcaacatctacaataattactttccttatttttgaagtggaccatatctcgacatttattaatcaatctgcatgtgtaaaacctttagatttttatgaattcctcctcaagctttatagtcaactatatgagtggattgccctctgtggatctgatagcaattttttaaatgattcacgtttcaacttgttaaaaacatttaatttagttaaaaaccaaacaaaaaagagctttgtttcttttcacattcatttctcagtttagatcatctttaattaaatataaatgtaagaaagttggaaaatgcaaagaaaygactcgttgtaagcacataactcacgtggggggaacagacatgggtgggcacactagcaaacacctgccagctgcatgtggacccaggtgggcaccggactgttttaaacacaggagagggcccattgtctaactggtgagttggttgagtggaagctggttgagaacttttactgcaaaccatttacagtagaccacaattttatagtcctgtttggcactttttcatatcactgggagcctgaagaaatagaagtgggttggatctctttcagcctcggaaaagcctgccattcccccatctaaaaaccctttccccattctcttactctgtctcatcatgtatgtaacatgtatccatgtatcatcattaagtgatctcattttatattgtttacttgaatatttcctgtaacccccctgtctgattccactagaatgtgagctctatgatggccaagcctctggctgcactgtgccccgtgtgtccccagcatcctggtggggctcaatacacagagagctcataagtagcatttgaatacatgaatcaaagtatggaatggcccagtttactgcagcctttttgcaggtgcaaaagatgatcttttagaaagcagaaacagggggtctggtgcatgagatctttttctcaatgtgactgtgctgtgcagaccttcacgtggtgtcttgtgaaagactttgaccactgtgtggactttccttcagtgtatctttcagagtgcaagactgggaatggaaagaactacagagggacgatgtccaaaacaaaaaatggcatcacctgtcaaaaatggagttccacttctccccgcagacctaggtcagacttttcctttcatctttgtgttcatctactgtaaagtgtccgtctgtgtctgtgagggattggttccaggacccctgtggctaccaaaatccatgcttctcaagtcccttatgtaaaatggtgcagtatttgcatataacctacataccttctcttgtgcaatccctaatataatgtaaatgctatgtaatcgttgttatactgtattgtttttatttgtattatgttttattgtcatattgttattttctctcatctttttcaagtcttttccatccacagttggttgaatttgtggatgtggaacccatggatacagagggccaactgtatttaggataatttcatcacttttaattcaaaccagaatatgtgaataagcagacagaaagaatctttttgatgtcgatgttcaactatttttggcaccatagtagaacatggttgctttctattttttcttgggtatggaggtttcttgaagacctagaacatagaagaatgcctagttaaaaaaaaaaatcaatgaaactacgagttttaggccaaatctgagaaaagaccaaagatgacta

SEQ ID NO: 553525 - DNA, 2153 bp, Homo sapiens
cgcctaggtgtcagctcaatcatcacctcctttgcaaatcttccttgacccctagacctccctttcacaaagtaccttgagtttacactttgatgagtgtcttatgtctactgtaatactatgtcccaatgaagatgtactggcaatcataataggtagtattgggttaaaagcattagtttgctgtaggtacgttaggagtactccccatgtgattgatcagtgaatttaaaaatggctaaagtgggtaaccttaaatgatggtgcaaatataccttaaacattttatattttcattgaaaacacaagtgtacttgacacctcttgatgtagagcagaggctttttttcttcgaatatggggtcaccagtagaaggtctctggtgcatttcctgcataaactatgctctagtgcaacatctacaataattactttccttatttttgaagtggaccatatctcgacatttattaatcaatctgcatgtgtaaaacctttagatttttatgaattcctcctcaagctttatagtcaactatatgagtggattgccctctgtggatctgatagcaattttttaaatgattcacgtttcaacttgttaaaaacatttaatttagttaaaaaccaaacaaaaaagagctttgtttcttttcacattcatttctcagtttagatcatctttaattaaatataaatgtaagaaagttggaaaatgcaaagaaacgactcgttgtaagcacataactcacgtggggggaacagacatgggtgggcacactagcaaacacctgccagctgcatgtggacccaggtgggcacsggactgttttaaacacaggagagggcccattgtctaactggtgagttggttgagtggaagctggttgagaacttttactgcaaaccatttacagtagaccacaattttatagtcctgtttggcactttttcatatcactgggagcctgaagaaatagaagtgggttggatctctttcagcctcggaaaagcctgccattcccccatctaaaaaccctttccccattctcttactctgtctcatcatgtatgtaacatgtatccatgtatcatcattaagtgatctcattttatattgtttacttgaatatttcctgtaacccccctgtctgattccactagaatgtgagctctatgatggccaagcctctggctgcactgtgccccgtgtgtccccagcatcctggtggggctcaatacacagagagctcataagtagcatttgaatacatgaatcaaagtatggaatggcccagtttactgcagcctttttgcaggtgcaaaagatgatcttttagaaagcagaaacagggggtctggtgcatgagatctttttctcaatgtgactgtgctgtgcagaccttcacgtggtgtcttgtgaaagactttgaccactgtgtggactttccttcagtgtatctttcagagtgcaagactgggaatggaaagaactacagagggacgatgtccaaaacaaaaaatggcatcacctgtcaaaaatggagttccacttctccccgcagacctaggtcagacttttcctttcatctttgtgttcatctactgtaaagtgtccgtctgtgtctgtgagggattggttccaggacccctgtggctaccaaaatccatgcttctcaagtcccttatgtaaaatggtgcagtatttgcatataacctacataccttctcttgtgcaatccctaatataatgtaaatgctatgtaatcgttgttatactgtattgtttttatttgtattatgttttattgtcatattgttattttctctcatctttttcaagtcttttccatccacagttggttgaatttgtggatgtggaacccatggatacagagggccaactgtatttaggataatttcatcacttttaattcaaaccagaatatgtgaataagcagacagaaagaatctttttgatgtcgatgttcaactatttttggcaccatagtagaacatggttgctttctattttttcttgggtatggaggtttcttgaagacctagaacatagaagaatgcctagttaaaaaaaaaaatcaatgaaactacgagttttaggccaaatctgagaaaagaccaaagatgacta

SEQ ID NO: 553526 - DNA, 2153 bp, Homo sapiens
cgcctaggtgtcagctcaatcatcacctcctttgcaaatcttccttgacccctagacctccctttcacaaagtaccttgagtttacactttgatgagtgtcttatgtctactgtaatactatgtcccaatgaagatgtactggcaatcataataggtagtattgggttaaaagcattagtttgctgtaggtacgttaggagtactccccatgtgattgatcagtgaatttaaaaatggctaaagtgggtaaccttaaatgatggtgcaaatataccttaaacattttatattttcattgaaaacacaagtgtacttgacacctcttgatgtagagcagaggctttttttcttcgaatatggggtcaccagtagaaggtctctggtgcatttcctgcataaactatgctctagtgcaacatctacaataattactttccttatttttgaagtggaccatatctcgacatttattaatcaatctgcatgtgtaaaacctttagatttttatgaattcctcctcaagctttatagtcaactatatgagtggattgccctctgtggatctgatagcaattttttaaatgattcacgtttcaacttgttaaaaacatttaatttagttaaaaaccaaacaaaaaagagctttgtttcttttcacattcatttctcagtttagatcatctttaattaaatataaatgtaagaaagttggaaaatgcaaagaaacgactcgttgtaagcacataactcacgtggggggaacagacatgggtgggcacactagcaaacacctgccagctgcatgtggacccaggtgggcaccggactgttttaaacacaggagagggcccattgtctaactggtgagttggttgagtggaagctggttgagaacttttactgcaaaccatttacagtagaccacaattttatagtcctgtttggcactttttcatatcactgggagcctgaagaaatagaagtgggttggatctctttcagcctcggaaaagcctgccattcccccatctaaaaaccctttccccattctcttactctgtctcatcatgtatgtaacatgtatccatgtatcatcattaagtgatctcattttataytgtttacttgaatatttcctgtaacccccctgtctgattccactagaatgtgagctctatgatggccaagcctctggctgcactgtgccccgtgtgtccccagcatcctggtggggctcaatacacagagagctcataagtagcatttgaatacatgaatcaaagtatggaatggcccagtttactgcagcctttttgcaggtgcaaaagatgatcttttagaaagcagaaacagggggtctggtgcatgagatctttttctcaatgtgactgtgctgtgcagaccttcacgtggtgtcttgtgaaagactttgaccactgtgtggactttccttcagtgtatctttcagagtgcaagactgggaatggaaagaactacagagggacgatgtccaaaacaaaaaatggcatcacctgtcaaaaatggagttccacttctccccgcagacctaggtcagacttttcctttcatctttgtgttcatctactgtaaagtgtccgtctgtgtctgtgagggattggttccaggacccctgtggctaccaaaatccatgcttctcaagtcccttatgtaaaatggtgcagtatttgcatataacctacataccttctcttgtgcaatccctaatataatgtaaatgctatgtaatcgttgttatactgtattgtttttatttgtattatgttttattgtcatattgttattttctctcatctttttcaagtcttttccatccacagttggttgaatttgtggatgtggaacccatggatacagagggccaactgtatttaggataatttcatcacttttaattcaaaccagaatatgtgaataagcagacagaaagaatctttttgatgtcgatgttcaactatttttggcaccatagtagaacatggttgctttctattttttcttgggtatggaggtttcttgaagacctagaacatagaagaatgcctagttaaaaaaaaaaatcaatgaaactacgagttttaggccaaatctgagaaaagaccaaagatgacta

SEQ ID NO: 553527 - DNA, 1501 bp, Homo sapiens
tattactcagattttctaaaaaagtattttcaaataatttggtattgaattcttctggcatgttgagggctagtgcaattatttcattcaaatacaggacacaaaaatacaacagaaatggcacttaaaatggcagatttatataaaattctgtttttctctcaagggccaatttataaaaaaactcctttcttctctcaaagacagaaaattctataaatctgcaaaacagaattaatttcactgaaggwgtagaagagatagttttctccaatacacagaagtctttaaagtattaaacaaaatactgatggactaaatatgaaaaaaatatatcactttgacttccctgccctgtgctgccctctctatagcaagaaaagacacgtttcccagacctctggtcgccacataattgtcaactgaacaatgctagaactcagatcctgttgagatgaatgactccttatttgttgagacacaacttgagacttaggcctttaactttttaaaagcaggacgtggagcatagcacactcatttcttataggaggtctttggtgccattgcgtttctggacaatttcccctttgtagcctgtgcctagtcctgccatttaaaaagcttctctcaggggaagccttgactcatggactctcaatttagctacagagaattgtctattccaatacaaacaatcatccatgtctcaagatttattaggcttaaaaaataactgatggatgaatgattaagaatgaggaaataaattttaaaaatgtaaacataaaagctttaaagaaaggaatgaactgcttatacgtgcaacagcatggatgaatcttggaatcaggcacaaaaagctacatatggtgtgatttcattttcatttgcctttctaacattgtagaaaggcaaaactaaagaaatggaaaacagttcaatggtgccagggatgggaatggaagaaagagattgactccaaatgcgtggaaatttttgcagtgaagaaaatgtcatataatggcagtcacattattgtatacattgtatacatttgctaaaacttaaagaactgtacacctaaaaagatgaaattatgtaaaccacatctcaataaacataatataaaagaagaaaaacacagcagaatgagagggtgagtggacatagtgtggtacaggattaaacttccctctagttagcctggggttttggtctttaagtacattttaatagtaacttttttttttgagacagagtctcgctccgttgcccaggctggagtgaagtggcgcgatcttggttcactgcaacctccgactcccgggttcaagcaattctcctgcctcggcctcctgagtagctgggattacaggcgcccaccaccacgcccagctaattttttgtatttttaatagagactgggtttcaccatgttgatcaggctggtcttgaactcctgacctcagttgatcagcccacctctgcctcccaaagt

SEQ ID NO: 553528 - DNA, 1501 bp, Homo sapiens
tattactcagattttctaaaaaagtattttcaaataatttggtattgaattcttctggcatgttgagggctagtgcaattatttcattcaaatacaggacacaaaaatacaacagaaatggcacttaaaatggcagatttatataaaattctgtttttctctcaagggccaatttataaaaaaactcctttcttctctcaaagacagaaaattctataaatctgcaaaacagaattaatttcactgaaggtgtagaagagatagttttctccaatacacagaagtctttaaagtattaaacaaaatactgatggactaaatatgaaaaaaatatatcactttgacttccctgccctgtgctgccctctctatagcaagaaaagacacgtttcccagacctctggtcgccacataattgtcaactgaacaatgctagaactcagatcctgttgagatgaatgactccttatttgttgagacacaacttgagacttaggcctttaactttttaaaagcaggacgtggagcatagcacactcatttcttataggaggtctttggtgccattgcgtttctggacaatttcccctttgtagcctgtgcctagtcctgccatttaaaaagcttctctcaggggaagccttgactcatggactctcaatttagctacagagaattgtctattccaatacaaacaatcatccatgtctcaagatttattaggcttaaaaaataactgatggatgaatgattaagaatgaggaaataaattttaaaaatgtaaacataaaagctttaaagaaaggaatgaactgcttatacgtgcaacagcatggatgaatcttggaatcaggcacaaaaagctacatatggtgtgatttcattttcatttgcctttctaacattgtagaaaggcaaaactaaagaaatggaaaayagttcaatggtgccagggatgggaatggaagaaagagattgactccaaatgcgtggaaatttttgcagtgaagaaaatgtcatataatggcagtcacattattgtatacattgtatacatttgctaaaacttaaagaactgtacacctaaaaagatgaaattatgtaaaccacatctcaataaacataatataaaagaagaaaaacacagcagaatgagagggtgagtggacatagtgtggtacaggattaaacttccctctagttagcctggggttttggtctttaagtacattttaatagtaacttttttttttgagacagagtctcgctccgttgcccaggctggagtgaagtggcgcgatcttggttcactgcaacctccgactcccgggttcaagcaattctcctgcctcggcctcctgagtagctgggattacaggcgcccaccaccacgcccagctaattttttgtatttttaatagagactgggtttcaccatgttgatcaggctggtcttgaactcctgacctcagttgatcagcccacctctgcctcccaaagt

SEQ ID NO: 553529 - DNA, 901 bp, Homo sapiens
aaaaaaaaagaaaaaaatcaaaagccaagttgaaaactaattctgtatgctttgtaactgggcaaaaattaagtgtttgaaggcacagttgaaactaagtcaatagtcttctttacccttgaggtttcttctgcaaatgagacagccaggtcagatcctaagtatgatccatgagtactgctcttttatgtattcaagtgaatagaaaacatcaaaacagcccaactctgaaggaaggggaggaggacccacatgaaagacaaggaaagcaggctgtggcaagttgatgcggacaccaggcacatgttcatgtgagaggaagaaacttaacaaaacatgagaaaaaaaatgcagcaatggcttcagaatactgattttgtcctggtgcaagtccccttacatttcattgactcagggtcttcatctgtaaaatgagttctaacattttctaattctacttttagttttatagcttgtgctagagagctcctcttcttatatgcatacataccccagttccttccagagacttttaggcaccttataaagaatgtgaatattaagataaaacaaattttaaaatttaaggaaaaatcaagacagtgttaaagtgagcacacagaagtgcatacatgcaccaaggaattgcacaactcttcgagatgggctcttagtttaattcagaatgtcctrcaagagaaaaactagaagtgacaagtttcatagtatgagaaatgtaactggccctcgggggcttaggagcagaaaggcatgtttggtgttgatgtatacaacaaaccctatgctagctcactgtgagaggctgctcacattgtcctggtaattgcatggatgcggagtatgaccacacatcatatctggctgaatacctctttcatcc

SEQ ID NO: 553530 - DNA, 574 bp, Homo sapiens
gctttctcttgcactcagcattaaaacaaactttgttatatgcaatgtgacccctgactgattttctcaatctgggcttattctgctttcgatccaacctgctcttggtatttcttgactatgtcaaaatcattctggcttcagggccttgttgcttcctcttctgcagtattcttcatcagctctttctcatggttaccagctcagctgatatcagagaggccttccgtgaccacacgacttacaggggtaccccctccccattcatcactctgacagtaccaacctatacatagcagcctgtaagatacatatattttaaatctttttcccctttctagaatgtgcgttccatgagggcagggaccttacctatgttatttaccattgtatgcttaacacctagaatagtgccttgcagtaaatatgtgcaaaacaaatagagcaaatatctttttttggggggrcggagtctcatagagcaaatatctttttgagtgcttgagaactcttcttgcctaaaatggaagagagggttgtgtcacgagaccttggggcagtcccttaaaccttt

SEQ ID NO: 553531 - DNA, 721 bp, Homo sapiens
gcaccagagtagacatggaaaatctcctgcagacaacaatgagaaaacattgctgaaatatgaacaattgactaaaaatgttagaagtaggaaaaaaatgtggaggaatggttacttgaaaaactgcaactgtaatgaataagaataataaagttgtatacgtcttgcctgagggtattccacaatccctgtgactatggttgtgaaaaaccacaccattatgagcttggggtagcagaggataggttccagcctgggraaaaaaaattataaatttaatagaaagtcttagaaataacatgatcacagaagttgtgaagttcaaaatgagggtataagctctactcaaatccccgtctggctgtaaaaatatgcaagcatagaaaaaccccaggagaccaaatggaaaagcaggaagagacaatggagatatctgtgtttaaagtacagatttttggccaggcgcagtggctcacgcctgtaaccccagaactttgggaggcggcggtgggtggggatcacaaggtcaggagatagagaccagcctggctaacatggtgaaaccccatctctactaaaaatacaaaaaaattagcagggcgtggtggcaggcgcctgtattcccagctacttgggagcctgaggcaggagaatggcgtgaaccctggaggcggagcttgccatgagccaagatcttgccactgcactgcagcctgggcaa

SEQ ID NO: 553532 - DNA, 850 bp, Homo sapiens
ggaatgaaagtagttttatttctaaaagtcagccaatagttcctgctgtcagtgaaaaaaagaataatgcctaatacttacagagacaggttaatgaacagataaagacataagaataaagcataatgagaaattgttctattttttcttaactttcttaaatccacttgcaaattcatcattcrcctttgaaaggcaataatgtgttgtgaaactagtggatcaacattgcctggaggacctgaagcagctctcagcttccctggaccagccttctcaataaaacagagcagctgtgtgacataaccccagctaacctcacaatctttctacatctgagaagactaatacaaatcagatgagaaattgagatgctgaccctaaactcccgatgacaatgcctgctttcaaattcacatagtcttcctttaatacaattcacccttgctccccttgttttaatgaaatcttgaatgaaatatatattttccctgaaaataagatttctagttacatttggctttttacaccctcaaggtttctgcaaattgctaaatatattactcatcagttgctttatgagccttcaggagagatgtgacaaatcttaaaccatgcccagtatgacttcttttaaatcacagccaatcattgatttttcttactcttcttttaaatctaactctagtagttccttgaattaaacacctgatttaaagtgaatacactggcggctagcaatgactttttaacaaggcatggtatcctgagattttactggcattcagtcttcaacagatttttttgatttgtgcattgaggtttgtagagatttgccttactatcctat

SEQ ID NO: 553533 - DNA, 508 bp, Homo sapiens
gaattctattttaagatatattcaagagttattaaaatcttagtctactttcacttattttaaaccatctggtattttatcattcatatttatcacaaggttcattgattgatttttgactattcttgaggaatggtgaagcccattagatactaaacaatgattaagcacttttttctttccatataaatcaaagaaaaaattttattctcaatttcagtatcaagttttcattaacttccacacgttaatatgctccaattaggtccttagattttattttcaatgtcatgccatagagaaatgtaaagtgtgccaaaatcatcattatattggcagggttgttaaatcaataactaatttttatcatgtaggataccctttcttttatgaatamgtcatagaggtgtttacgttttttaaatctatagatgttcttctagcatatcctatgctcagtgattctgtgtgatcagaataatctgtaaactcattcaatcctttattt

SEQ ID NO: 553534 - DNA, 530 bp, Homo sapiens
agtctgaacccagtcagttcagtatttttttaaaaatccttgctcacagaaaaatttcttggagattatgtatcagaatgttcacagcgcacatcccagaatagagggactgctactctcttctctgtattataatcagaaaatttttttaaaaagtggaaattttaacaggccagaaaaatcttcttctgcctacataattcccgaggatgttataatatctgagagctcatcaggaggagagcactctgattgagcactctgaaggactcagagagagcgagccccctgccacccagggcagcccgggctcaccatgccacagggcagcttccctcagctcccgtcccctcatgcccaaggtggtgctgtagctggaaggcagcatttaacccaagagccctgggacaggccacagggccccggamttttgagtaaaaagaatctgtgggcagttgctggccgtgtgaccctgagcaaatctcaatcactctgggacatattttgttcatctattacaatcccagaca

SEQ ID NO: 553535 - DNA, 524 bp, Homo sapiens
ccaaaaataatctcacatttggaagggcattgttcaccagctgcctttacacaatgtctagcaccttccragtttctgtctgcacaaatgccccatggaagcttcctggagttagacctcttcacagggtgcctttcctcagcaagatcaggcagctaaatataaatgaggtctcagagaccctggatcacagacagatacaaatcaatctgaactctggttggactgataaataggaatgttaattatatattttttaatttattttgagatggagtctcactctgttgcccagggtggagtgcagtggtgccatctcagctcactgcaacctccaccttccggattcaagcgattctcctgattcgcctcctgagtagctgagattacaggcacccactaccacgcccagctaaatttttttttgtatttttaatagagatggggtttcaccatgtttaccaggctggcctcgaactcctgaccttcagcgatccacccgccttagcctcccaaagtgctgg

SEQ ID NO: 553536 - DNA, 524 bp, Homo sapiens
ccaaaaataatctcacatttggaagggcattgttcaccagctgcctttacacaatgtctagcaccttccaagtttctgtctgcacaaatgccccatggaagcttcctggagttagacctcttcacagggtgcctttcctcagcaagatcaggcagctaaatataaatgaggtctcagagaccctggatcacagacagatacaaatcaatctgaactctggttggactgataaataggaatgttaattatatattttttaatttattttgagatggagtctcactctgttgcccagggtggagtgcagtggtgccatctcagctcactgcaacctccaccttccggattcaagcrattctcctgattcgcctcctgagtagctgagattacaggcacccactaccacgcccagctaaatttttttttgtatttttaatagagatggggtttcaccatgtttaccaggctggcctcgaactcctgaccttcagcgatccacccgccttagcctcccaaagtgctgg

SEQ ID NO: 553537 - DNA, 596 bp, Homo sapiens
tctgttgtttaagccatgcagtctctggtattttgatatggcagctcatgcaactaagatactcaatatctttattttaaaatttattgtgagttgaaaaagaaggtkatcatggctgagaaccaagttaatgacccaaaagaccaagagctcaaccaaaagcaaggtttttgcacaaccaaaagcaaaaacacagtaagatgaaaatcctaagggaaaagatcagagttttaaagaaggtttatccatgctatcaggccatgatatctcttactcgctgcctatatgcaaggattcaggatatcttaacatcagtgttcctagccaatgaaaatagaaaacagttaaccaaatgtcaactgactcaaatcagacacctgaagacaggaaaagatcaggggaaaggaaatgggggcgagcaatgaaactttcgatctgtagctacaccagatggaccacagcagtgtgtcagggggtctataatggaatagtggagaagaatacttcaaatagaagacatatacttacggaactgcaagaaaaactttttgaacattataaaaggaaatttcaatatgcatctttcagattttgac

SEQ ID NO: 553538 - DNA, 596 bp, Homo sapiens
tctgttgtttaagccatgcagtctctggtattttgatatggcagctcatgcaactaagatactcaatatctttattttaaaatttattgtgagttgaaaaagaaggtgatcatggctgagaaccaagttaatgacccaaaagaccaagagctcaaccaaaagcaaggtttttgcacaaccaaaagcaaaaacacagtaagatgaaaatcctaagggaaaagatcagagttttaaagaaggtttatccatgctatcaggccatgatatctcttactcgctgcctatatgcaaggattcaggatatcttaacatcagtgttcctagccaatgaaaatagaaaacagttaaccaaatgtcaactgactcaaatcagacacctgaagacmggaaaagatcaggggaaaggaaatgggggcgagcaatgaaactttcgatctgtagctacaccagatggaccacagcagtgtgtcagggggtctataatggaatagtggagaagaatacttcaaatagaagacatatacttacggaactgcaagaaaaactttttgaacattataaaaggaaatttcaatatgcatctttcagattttgac

SEQ ID NO: 553539 - DNA, 1013 bp, Homo sapiens
tctcaaaacacaccaccaccaccaccaccaacaccaataacaacaaccaaaaccccacatatattataaacaaaatataaaagctaaaattaaaaaggctactatgacatttcccttgtccaatgccacttatatacatgaaacaaccgaagcaaattataagaatggatcaaaatattgtctgcattcttgcctatataaatgaatggatttaggaagaatagaagtctttactatttttagagcaattagcaaaggctttaattgtgaaaatgtattctagtgtttattttgacacataatttttgtaacatgtcttcaaaataaaaaattataaataatgttatgtgtgtttccaaatatattgctagtctttaggagataatttagcctgmttttctttactacaattcattctccaccctctaaaagagaaatatcaatcacattcataattctaaaatgtaattgagccaaaatgctgaggatggaattttagtgcttaaaaacaaagaagatgaatgcttgggtatctttggagtatggtctgtttttgaatttttctcttctctttgaaggtattcacttaaccattatagtctctagatttcttcagtcatctgttaggtgaatcgtatagtatggatatatattaaaacttatttacattatatacttccacattgaaacagtatgctcaaaaacattaagactagaaatataaaaggtgaagatgaagcaatttacttgaatctataattcacaatgagcagaagtgaaaatatttgcacaggacatttttatgagaataaaaagtaattgataatgtatattttaacacttactacatgtcttatattgaggagcgatgtatatacctgccatgaaaaaaagggaaatgatctaggaagcttcttcatagaattaaaccttccctcagaggtgttaaatgggccagtacattcctccccaggtcattcttggtcactgctgcttgctaatacccaccaatg

SEQ ID NO: 553540 - DNA, 538 bp, Homo sapiens
tgtgagctttgatacatgggatatawgtacattgaattactttccacttttaaatctccttttcatgtaaatatatgaccaggcatgtgtataaattcctttatatgatatattggattagtttttcagattagctcccttccacttctcttggcatgtgaagtccttcactgtccaactgactttggacttcaccatgtagcttgttttggttaatccatgttagttggcataatgtgaagagaggctttaaatgtgtttgcacagttgagtttagtgtcttgcactactgccattcattagtgcaaagaaattgaagaaagacacaaggaacaaacctgaaccaagcagcttgaagttaatagaagcccatcccatcggagttcagcaaaggcccggccagctcacagataaaagatctgagcaccaaccacaatgtttattaaaagatcactcaaagatcacacagtctgttttcaacatatgtatgtgtgatcagaaactgaatctcacaggatctcagcggaacagttaatac

SEQ ID NO: 553541 - DNA, 1400 bp, Homo sapiens
aataaccaccccaaaaggtaggcatggtttttactgttttacagatgagaacctgtgactccccaaggtaacccaatcagtaggtgcaaagttgggatttcaatcaggtctgtcttgttccaaagctcatgccatcacccatcagtattcacaggtcctcaaagaggccccagggttctggaagggatcacaaagagcagcgagggaagggctgttcgagacccttctaggagatgggtggaggctactggcataagatgtgagcactggagcagaggggtgggccgcagtgggggtcaacaccctaacactcttaccaagaactgtgctatgagaatcaaagaacttcagccctgatgggaacttaggcattgagcccacctcccttggaagaatgaggaaacagacatttagagaggatgtgtgactgcccaggtcagcccacgacaaggccaggaggtttcatgagctccaggcctctgctccttccctaacatctcgtggcatcctctttgctagtgctccacagtcaccggagcactaaatgtctcctcccctcctgtcttgccttcttcacagctggggtggcagcatcaatgtgggtggaggacacaccagtgcaggtggtgcctgggaagcaggtgatcccaaggtggagtcctgggccccagagacagagcctccctgttcttccttcttctgctgggctttattgaccttaagggagagctctgggcacagtgtgttcccttgacctttccctgaagggacacagtgcctgctgctatgtagatggcaccttccattcttataagtgttgggcaaacattctccgggagggagggatgccargagtcctgggtgggaggggttcccctgaagactttggccttgaggatgagatcatgggctttggaagcaaatgcattttatagatccaataaattagacacaatctggctattaatgtgctgtcaggtgtcatggaaccatgccttgctttctccagtggaggaggaagcagaaatagaggcatagctgggttcaatgacctacccaaggtcaccaagcagatacaggtgacatcaaggcatcaaaggtcactgccttgagtcattaggctgctgtgactccccacctgatgcatacaagtctctacatccatctctgtctggcaggcagaactccaggggtgcatttccaactgagaagttgccatgtctgtgctatgacctagaagagtgataatggcaaacacttatactgtttcaacacatttagtcatttaaccctctcaattgctctgcgattatatacagctattgttcccaagcagagatgttcagcaatttgcctaaggccaaatagctaataaatggcctagttggccctacctagct

SEQ ID NO: 553542 - DNA, 1400 bp, Homo sapiens
aataaccaccccaaaaggtaggcatggtttttactgttttacagatgagaacctgtgactccccaaggtaacccaatcagtaggtgcaaagttgggatttcaatcaggtctgtcttgttccaaagctcatgccatcacccatcagtattcacaggtcctcaaagaggccccagggttctggaagggatcacaaagagcagcgagggaagggctgttcgagacccttctaggagatgggtggaggctactggcataagatgtgagcactggagcagaggggtgggccgcagtgggggtcaacaccctaacactcttaccaagaactgtgctatgagaatcaaagaacttcagccctgatgggaacttaggcattgagcccacctcccttggaagaatgaggaaacagacatttagagaggatgtgtgactgcccaggtcagcccacgacaaggccaggaggtttcatgagctccaggcctctgctccttccctaacatctcgtggcatcctctttgctagtgctccacagtcaccggagcactaaatgtctcctcccctcctgtcttgccttcttcacagctggggtggcagcatcaatgtgggtggaggacacaccagtgcaggtggtgcctgggaagcaggtgatcccaaggtggagtcctgggccccagagacagagcctccctgttcttccttcttctgctgggctttattgaccttaagggagagctctgggcacagtgtgttcccttgacctttccctgaagggacacagtgcctgctgctatgtagatggcaccttccattcttataagtgttgggcaaacattctccgggagggagggatgccaagagtcctgggtgggaggggttcccctgaagactttggccttgaggatgagatcatgggctttggaagcaaatgcattttatagatccaataaattagacacaatctggctattaatgtgctgtcaggtgtcatggaaccatgccttgctttctccagtggaggaggaagcagaaatagaggcatagctgggttcaatgacctacccaaggtcaccaagcagatacrggtgacatcaaggcatcaaaggtcactgccttgagtcattaggctgctgtgactccccacctgatgcatacaagtctctacatccatctctgtctggcaggcagaactccaggggtgcatttccaactgagaagttgccatgtctgtgctatgacctagaagagtgataatggcaaacacttatactgtttcaacacatttagtcatttaaccctctcaattgctctgcgattatatacagctattgttcccaagcagagatgttcagcaatttgcctaaggccaaatagctaataaatggcctagttggccctacctagct

SEQ ID NO: 553543 - DNA, 1400 bp, Homo sapiens
aataaccaccccaaaaggtaggcatggtttttactgttttacagatgagaacctgtgactccccaaggtaacccaatcagtaggtgcaaagttgggatttcaatcaggtctgtcttgttccaaagctcatgccatcacccatcagtattcacaggtcctcaaagaggccccagggttctggaagggatcacaaagagcagcgagggaagggctgttcgagacccttctaggagatgggtggaggctactggcataagatgtgagcactggagcagaggggtgggccgcagtgggggtcaacaccctaacactcttaccaagaactgtgctatgagaatcaaagaacttcagccctgatgggaacttaggcattgagcccacctcccttggaagaatgaggaaacagacatttagagaggatgtgtgactgcccaggtcagcccacgacaaggccaggaggtttcatgagctccaggcctctgctccttccctaacatctcgtggcatcctctttgctagtgctccacagtcaccggagcactaaatgtctcctcccctcctgtcttgccttcttcacagctggggtggcagcatcaatgtgggtggaggacacaccagtgcaggtggtgcctgggaagcaggtgatcccaaggtggagtcctgggccccagagacagagcctccctgttcttccttcttctgctgggctttattgaccttaagggagagctctgggcacagtgtgttcccttgacctttccctgaagggacacagtgcctgctgctatgtagatggcaccttccattcttataagtgttgggcaaacattctccgggagggagggatgccaagagtcctgggtgggaggggttcccctgaagactttggccttgaggatgagatcatgggctttggaagcaaatgcattttatagatccaataaattagacacaatctggctattaatgtgctgtcaggtgtcatggaaccatgccttgctttctccagtggaggaggaagcagaaatagaggcatagctgggttcaatgacctacccaaggtcaccaagcagatacaggtgacatcaaggcatcaaaggtcactgccttgagtcattaggctgctgtgactccccacctgatgcayacaagtctctacatccatctctgtctggcaggcagaactccaggggtgcatttccaactgagaagttgccatgtctgtgctatgacctagaagagtgataatggcaaacacttatactgtttcaacacatttagtcatttaaccctctcaattgctctgcgattatatacagctattgttcccaagcagagatgttcagcaatttgcctaaggccaaatagctaataaatggcctagttggccctacctagct

SEQ ID NO: 553544 - DNA, 540 bp, Homo sapiens
cctcgggcgcagcctagcagcggaaagggcggagcttcactcctcctttccatcrgtcacccccaactttcccaggctacacctcgtaggaaactgttctcctgctttgatttcatgcgccacctttgggacaatctaagaacttacaggttttcttggccagatttattaggaattgtatgcactgaaacactgaaaaccaactagtggttctgtgcttcccacgttgtggttttgacaccagcagcatccttgccacaatcaaaccccggagatccgcagatctgtgttgtaacaagacctccccctgaccctgatgcatggcagttgaagaagtctttccgtgtaagcgaaaagactttgaagaaaaggtggagatatgcgtagtataaacattctttggctctggaaccacgtagagacttgggagccagttgggtggagcattcgttggatgagggtgctcgggttaggaatatcaagctgtggctccagataatccaatcatctaattaagattccagttatgctcatctgttt

SEQ ID NO: 553545 - DNA, 540 bp, Homo sapiens
cctcgggcgcagcctagcagcggaaagggcggagcttcactcctcctttccatcagtcacccccaactttcccaggctacacctcgtaggaaactgttctcctgctttgatttcatgcgccacctttgggacaatctaagaacttacaggttttcttggccagatttattaggaattgtatgcactgaaacactgaaaaccaactagtggytctgtgcttcccacgttgtggttttgacaccagcagcatccttgccacaatcaaaccccggagatccgcagatctgtgttgtaacaagacctccccctgaccctgatgcatggcagttgaagaagtctttccgtgtaagcgaaaagactttgaagaaaaggtggagatatgcgtagtataaacattctttggctctggaaccacgtagagacttgggagccagttgggtggagcattcgttggatgagggtgctcgggttaggaatatcaagctgtggctccagataatccaatcatctaattaagattccagttatgctcatctgttt

SEQ ID NO: 553546 - DNA, 540 bp, Homo sapiens
cctcgggcgcagcctagcagcggaaagggcggagcttcactcctcctttccatcagtcacccccaactttcccaggctacacctcgtaggaaactgttctcctgctttgatttcatgcgccacctttgggacaatctaagaacttacaggttttcttggccagatttattaggaattgtatgcactgaaacactgaaaaccaactagtggttctgtgcttcccacgttgtggttttgacaccagcagcatccttgccacaatcaaaccccggagatccgcagatctgtgktgtaacaagacctccccctgaccctgatgcatggcagttgaagaagtctttccgtgtaagcgaaaagactttgaagaaaaggtggagatatgcgtagtataaacattctttggctctggaaccacgtagagacttgggagccagttgggtggagcattcgttggatgagggtgctcgggttaggaatatcaagctgtggctccagataatccaatcatctaattaagattccagttatgctcatctgttt

SEQ ID NO: 553547 - DNA, 540 bp, Homo sapiens
cctcgggcgcagcctagcagcggaaagggcggagcttcactcctcctttccatcagtcacccccaactttcccaggctacacctcgtaggaaactgttctcctgctttgatttcatgcgccacctttgggacaatctaagaacttacaggttttcttggccagatttattaggaattgtatgcactgaaacactgaaaaccaactagtggttctgtgcttcccacgttgtggttttgacaccagcagcatccttgccacaatcaaaccccggagatccgcagatctgtgttgtaacaagacctccccctgaccctgatgcatggcagttgaagaagtctttccgtgtaagcgaaaagactttgaagaaaaggtggagatatgcgtagtataaacattctttggctctggaaccacgtagagacttgggagccagttgggtggagcattcgtyggatgagggtgctcgggttaggaatatcaagctgtggctccagataatccaatcatctaattaagattccagttatgctcatctgttt

SEQ ID NO: 553548 - DNA, 1096 bp, Homo sapiens
gtctcatttcctgactcctccatctcttccactctgtctccccaacacccaggttgggcaagtcacctcacttgttttctttctgttctttctttctttcttttctgttttgtttttacatctcaaacatgttaaagaattcacatgttttctcacctgtaaatggcatagtgacgtcttgccacctggccattggaaggataatgaaggagaacatgtgtgagtcagcacttggctcacaggaggttcttgagagttactggtttcctccctttcctctctttccctatgaagcctgcccattgcccaaagcccttccctccctccacttgcaagctccttatccaggatccatcactctgcattcacagcagggcccagcccaactcctctatcagttccagaaggcatgagatgtcctaattgcccttctcagaaagaggtgggccatgcagggccagaacggcccttccagccagaacaagaggagatgagacagcacaggccaaaacagctaataagaaagccccacaccggacacctggccttctgcctgctgctgaagatgctgactcagcctctccaaactaccctgactgcaaacacaggttttctgactttcaggattgtggcccttctttccctcctcatctgtaaatccagggccgtgaaaaaaaaaattctgagccccggaatttgttccttcagtccccgcagccttctcagattttgtgccctggtcaaacacagaaagaaagcaacgctccccctcaccccaacttgggcagcctgggagcaggttttatgcgaccagcctctgagacaactggataccccccagcctgacctccgctggggtgtctttcctttcctgccctttctcccatgggcagccagaggccccagggttgatgttttactcttctccccagaggccactcctgttccctgctctgtacaactgctttagcacctacatttgcttaattccccttgcccagtgcttcccatctcccataatgacgctaatggayaaaagagaacaggcaggagagccgcccccagcttccgccctgccgactggcctgacctattg

SEQ ID NO: 553549 - DNA, 1513 bp, Homo sapiens
ttaaatgcttactcatttcttaatgccaagtattctttctttgtatttatatatatttgatttcatcctgtgagcaaagagtcatagaagtctagctaatcccttaaaatgtattaaccagatgatttttaatttttgattttagataatttaatagtttactataaataaaaatattattttaaatacactatactttaaaacaaartgatcttcaatccaatttaaagcagttctacatttttcatgttgtaaatgtatagagttcagaacgctacacaaatagtcaaaaattttgcataacaccacaatccaaagttatcttccttaggctgaaagacaggcaaagagagcaattttagagagttttattcacttctcacagctttgaaataatgaatattatactgacttaattttccaatccattactgctttcattgttttatttctctttttatttttattaggagacagtctcttcatatttactgtaagaaattaaatagacattattagaaattaatttacaaatattgcttgtcatgtcaccatatattcaaagatctagaataaaattatgtgctatatcatttcactgaaatatagtagctcccacgagtttagcaaatatttccttcattaaacaaatttgtacttactagactttgtttcaggaagtgggattatattagtgaataatttaaacaaataaccagctatcatgaagtctacaatctgatggaagagacagctaataaatgaaaacaaacagaaataactaacttaaataatattataaactgtgtaataaaataaagtagaacaaggggttagataatctgggaataattatctcagagattttataagagtagagaccaaaaccattggcaggattaaccaaattgatgtgctctattaagtaacttacatgctattaaatccacagaacaatggtatgatgtagatatttttgtacatttgaggaaatgatgctcagataaattaaatgccatgcacaagaccatgcaactataaaatggaataaccgggatttggttgcaggttttactgataataaaatctgtaggcaatataaaaatattaatggtgacataaaacatcaaaatgtgaggagtggggagagtggaatgaaagtgtaaaagtttatttgtgaataaagataaattgataacagcttaaactaacctgttacgactatatgatgtatttttaaagcttcattgtaaccatgaagcaaaaactcataataggtatgcaaaaaataaaaagggaggaatcaaaacttaccactagataaaatcacttacccacaaaggaaggtagcaagagaggaagaaagaaaaaaaggatctagaaaacagattagaaaacaatgaacaaaatggcagtgggaagtcctgatctatcaataatttctgtgaatgtagccaggtgtgatggctcatgcttgtaatctctgcactttgggaggctgaagtaagaagtt

SEQ ID NO: 553550 - DNA, 1633 bp, Homo sapiens
cctcgaaagaagctctcatttttctaatgttttcccttaggtactatgtgcactacaactatggacagagtgactactggcagaaatgaacccatgtgagaattctgggatcgaagagaacaaggagctaaaggaagtcagttggatgatgtaggagggaggctcctgtttttctgacatcactgccagatgaagcaccaaataattagaaagctttcactccatttgccttggatagatttaaaggctaggcacagtcatttgtgttagttaaaatctctgaaaccttaaaaataaataaataaataaataaaatcaagtctgtggtagtatacagcaatgtcctcggccttcacattccctcaccagtcactcactcactcacctagagcaacttctagtcctgacagcactgtacrtgccctgtataggtataccatttttatcatttatactatatttttattgtatcttttaagtgtttaggtttacaaatactactgtgctacaattgcctacaggattcagtacagtagcaatctgcacaggtttgtagcctaggagccataggctatgccatatagcccagacgtgccataggcaatatcctccaggctctgtaagtgcatgctatgatgtttgcaccacaacaaaatcacctaactatgcatttatcagaaggtactcctgtcactaagcaaagcatgactatacctataaccttgaattactagctgtgtgacctttatataccccttaacctctctgagctgcctttgcaatttgacatcaataaccaactccaggtttgctgtcaggattaaagaagaagagtagctaacatttactgagctcttactactgtatataaaaggtcctcatacaatatacagtactatcaggtataagatattattgtgcacagcagctggttaaaggattctcaacagaagaatgaaattcacattcacttcacaatcaccctctgattaaaatgccacttgggaagtacagacctttcattctgaaatgatccacattccaaacaaaaggttaaatagaaagttaccactttgacttcgcaatcaaaggtaagttcaatctgtcagcctgtatttatgaggcagagagggagcaatgacaatactctgaaatgaagttcaccttgttcaagagatgcttttctgtggaacactgaaaaccaatactctgaagcctctggcacagttgaactctccttccaggtgaaagagagggcacagaaccagtaggatatatatgtacacacacacacacacacacacacacagagagagagagagagagagagagagaaagagggattttaaggaatcagcccctggttttggggctagtaaatctgaaacttgtagggcggactagcagactggtaactcaggcaggatttctatgctgcagtcttgaggcagaataccttctttttcaggaaacctcagtctttgcttctccccaccccccctgctgagacggaggttcgctcttgttgcccaggctggaatgaaatggcacgatctcggctcactgcaacctccgcccctggggttcaagtggttctcctgcctcagcctcccgagtagctgggattacagac

SEQ ID NO: 553551 - DNA, 610 bp, Homo sapiens
gaaaccctgtctctactaaaaatacaaaaatgagccaggtgtggtggtgggcgcctttagtcccagctactcaggagattgaggcaggagaatcacttgaaccgggaggcagaggttgcagtaagccgagatcacgccactgcactccagcctgggctgcagaacaagactcctttcaaaaaaaaaaaaaaggaaaactttttttcacaaatgcatcaaactgtttggaatgacaagattgagtgatttctgaaggcttcattttataatgcccgaaagaacaacactttgttycccaattacaggcttctgttctgtctttgtcctgcagctgcacagtggggcaagacttgggtttggttttgttgctgctttgttgcttcttcatttgactgtttccccatgagtcttataatgaattatgttctcctctgacattgttcctcacctaagaaaatccacagctgtctcttccttgaggcctgaagtcaacaacattacaacctcatttcccttttatccacctccttttcccatctgggtggacaccccagccaactagtgattcagtgttatcagttcagacagaccagtttaggagctacactcc

SEQ ID NO: 553552 - DNA, 1600 bp, Homo sapiens
acttggaaggctgaggcaggagaatcacttgagccccaggaggtggaggctgcagagagccgagatcacgccactgcactccagcctgggcaacagagtgagactccatctcaggaaaaaaaaaaaaagatcttggtgccaggcactgttttcagcactttccattatcacccaataacacattgaggtcagtatagttattgccccactttagagatgagaagactgagtgaggtttagtaactcattccagaaccctcaggtagtcataaacgcctggcacccacagtttgattccagagcctgaattcttaatcattacacaaaatccccctattgctgctaattatctttcagtttaatgtctccaatataatctataaagaatgttctaaaacttatatatgtaattctttatcaataaaaactgtatttctgtcatcacttcctgtgaaaacagctagatacatttcaccaaatttggagggtttgtttgagataggctggcctgaaatatgaggctactggaaasacaaaaaaaaaaaaaattactttttaaagtgactccaaaaagatgccccattttccccaagagttgctgaaactgggttacggagttgcaaagaaagtccataggcatggatataaaatatgaagccctaatcttgtcatcgagggagcacttttaattagatgcattgatttttggatcctcctggctaagagggtcttaacattcccctcagcttgaattaactttagacaacctaaacttgactaaataaacaaactaaacaggcttcctcctgcctctaggccctttcttcctttttcttaaagcattttatttagagaacttgtcattgtaaattctttatcagcccctttgagatgtaaatcttttaaaaaagcttcttgctagttttacatcccaggacagtctctcaaagacctggaagccatccttttgaaatgtaatcatcaagaaagatagcatccctatcaaccagttctgtggaaggtaggagcctaatctaggggggcaccttgcttaaagtgctaaaaagctattacagtttactattattataattttagtgcattattataagtcctacattgttgtttatatctattaaaccctataaaaacgtgggctatttcataaaatattgcagttcaccaactcatctcaatttccctcagcctttttgttcttacaattgagaacatttgggaaaataaaaggacaaatcattatctataatctcatgatcctacagatattttttctattatattatcctttttttcataaacatgtataattttaactgaaaaatgtagtcaaacaagaaaaatatgctccagtttggaaaattagcaaatgagcaaaatgaaaagtcctggaaactctatctagagatataaattatcgtgcatgtgttcatttctataaacagatggagcctcatccagtttcccagcggcctacaaagtgcctgttgcagcagctctgaaactgtatgcccttagtgggggtcttggacaggtcttctgggtctcttagagcacaggaggaaaggggaattgagtggct

SEQ ID NO: 553553 - DNA, 1742 bp, Homo sapiens
cagtttgtggtactttgttacagcagcctaggagactaacacagtgtctatcaggggcatgtcttcagccttgactcagcaagtggcgtgctaatgagtccgtttcccagtgactgtataatcagtctgggagtaaactgggtgcttttggggggaagtgacatgagctcttctcagctgtgaaattgctcatcagtcaatgtgttcgagtgataacctcacagatggccccccagtgaccataaagagttacatactctttcccaaaatggcccattgctctgggcggctgtttgccatggaggggtatctggacgtgctgtccacgggggcccagggaggaggaaggggtgggagccagttagacatgactgttgctgctgctgctgcccaacctcaagtgcatgagtctgtactgcctgccacactgtgggaacacgctctttggatgaaactattttcccagttaaaagagcttcatcaaggctgggcacggtggctcacacctgtaatcccagcacttttgggaggccaaggcgagtggatcacctgaggtcagaagtttgagaccagcctggtctacatggtgaaaccccatctctactgaaaatacaaaatttagccgggcgtggtggcacatgcctgtaatcccagctactggggaggctgaggtgggagagtcacttgaacttgggaggtgaaggttgcagtgagctgagatcgcgccactgcactccagcctgagtgacagagcgagccttcaaggctgaatagggctccatctcaaaaaaaagaaaaaaaaagagcttcattggaaccccccatctgcttcctcttgtcaccccagtttctgatgtaatagtaaactaagtgaagcgtgtcttgattcagaaaggccaccygtcagttggccatgatggaatgcatattgaatggattcgataccaccaaggagccgggctctgccaccccttgctgtgcaatgttggctgggttagtcaacctccctgagactcagtttccccatcaggaaaatgaggatttttccacttcccctgcagctttgtgacaaagcttaagctctggaatgcatgacagagtggcttctaagttgaagagtgctattctactgtcggggaggtggtggagaaggttcctagcagcccaggctggcagaagctgcggtgaagctcctgatccatctgtttggagtttgtggtgggaaatgccccttgatcttcctggtattgacggatacatctgaagaggacatttctcccaccatgagggagggtgcaacaggagacatctcccacctcaagtattgttttgagttttctcgctggctttccctttcagtaaaatattaaaataatataataataataataataataataataatacgctgggtgcggtggctcatgcctgtaatcccagcactttgggaggctgaggtaggtggagtccttgaagtcaggagtttgagaccaactttgccaacatagtgaaaccccatctctactaaaaatacaaaaattagccgggcatggtggtgcacacctgtaatcccagcttctcaggaggctgaggcacgagaattgcttgaacctgggagacggagtttgcagtgagctgagatcgcaccactgcactccagcctgggcaacacagcaagactctgtctctagtaataataataataataatgatgataataataataaactagtgtgtctaca

SEQ ID NO: 553554 - DNA, 633 bp, Homo sapiens
tcaggtgctatgcagtgtgctgagcacattatacatactttacgctattggatgcttgcaacctgagaggagaatgtgattgtcactgttttacagatcagactccaggaaatgttatttgcccagggttccatgggtgtaagcaacagaagcatttgagcttctgtttgagcaagaggctggggtgatctgatgaaaaataaaagggcatgaaaacaaaacgtttgggttttggtcttggagggagggcgacatccaccatgtgctgcctctagggtttgagttaaacccatttccttgatggaaaatggggccagctattcccacccaccttcagtgtgctcaacatgatgtgatagcttccaygttggtgaggggactgcataaggactgacacaaggtcaggattctggtgcgggccaattcacaattgccaagacacggaaccaacctaagtgtccattgaccaatgagtgaataaagaaaatgtggtatatatacaccatggaatactactcgtccataaaaatgaactaaatcatgtcttttgcagcaacttggatgaagctggaggccattattaagtaactcaggaatggaaaccaaacaccatatattctcacttacaagtgg

SEQ ID NO: 553555 - DNA, 530 bp, Homo sapiens
ttttttagcttattttctttatggctgccccayagccagccccctagcaactgtctgctcttcggcctgatgcaaaatgtcaggtcacttgctgggaacagagtttggagggcgggggtctggaaatgaatttagagccgtaggatgcaggttcacattttctcctggatcagctatgtttctccaggcttccgggtacggatcttcagggaagaagtagctaggcactcccaagaaagctctcagtctcttcaacttcctcatttcagcttccctgcactctggaattaaacttttgtgcagccaggctgtgagaactgatgcataaatcatgagatagggctttattagggggagtaaagaattctctcacatggaaaatgttcacaaacagatcctcaacagttgtttagaatgcctgaaatttgttattaatatatatgtaccactgaagagttacagtgaatgtcaatagaagaatataattttgcacgtctccattttgtcaccgtatcttcagtgtttcaaaa

SEQ ID NO: 553556 - DNA, 576 bp, Homo sapiens
attgactactcaaataacaactttgatagtatatgaactgtgactgtgttagtaggttttaattagcaggaactttttgtaaattggacaaaaactttttttattatgactaggaaaactgctgttttctatttttgttttgctcttttaartgataccgaactttagttaatccctcagtcctaaattatggctgttgcgaatgagggctataatagttatcccattttattttaaattttgtattaatgttgatagagatgaaagaagaaaaatatttgcactcatgctgaaattgcaaaggaacatgtgtgaatgacctcttggatacttgttgcttggaaatgcgagcaatagtttctttatttttattttattttagttttttgagacatggccttgctctgtcacccaggctggagtgtagtggtatgatcagggctcactgcagcctcaacttccctggttcaagcaatcctcccacctcatgcctggctaattaaaaaaatttttttttgtaaagacacagtcttgccatgttgcccagactggtctcgaaggcctgggctcaagcga

SEQ ID NO: 553557 - DNA, 576 bp, Homo sapiens
attgactactcaaataacaactttgatagtatatgaactgtgactgtgttagtaggttttaattagcaggaactttttgtaaattggacaaaaactttttttattatgactaggaaaactgctgttttctatttttgttttgctcttttaagtgataccgaactttagttaatccctcagtcctaaattatggctgttgcgaatgagggctataatagttatcccattttattttaaattttgtattaatgttgatagagatgaaagaagaaaaatatttgcactcatgctgaaattgcaaaggaacatgtgtgaatgacctcttggatacttgttgcttggaaatgcgagcaatmgtttctttatttttattttattttagttttttgagacatggccttgctctgtcacccaggctggagtgtagtggtatgatcagggctcactgcagcctcaacttccctggttcaagcaatcctcccacctcatgcctggctaattaaaaaaatttttttttgtaaagacacagtcttgccatgttgcccagactggtctcgaaggcctgggctcaagcga

SEQ ID NO: 553558 - DNA, 992 bp, Homo sapiens
tgttgcccaggttggtctcaaactcctgggctcaagagatcttccctcttcggcttttcaaagtgctgggagtacaggcatgggtcactgctcccagccactttcttaagtttttaaatgggctttatttagaacagttttaggttcacagcaaaattgagcagaaagtagggagtctccatataccctgccaccacacatgcacagacttccccactatcaatattcagaatcagagtggtacgtttgttgcaatagatgaaactacattgamatatcatttttctttacttttaaagtgtacagtgccattgagcacttttggtcagacttctaactcagcctatggcaatgaaatccaactctattagtaatattttatatcccaaattatttaacgttattgcttatctttattaaaatcaaatgatcaattagcagcaaacatctaataatgttaaagcctaatgttcaggtagttcagattcattttttatcagatatcattgatacatcctgaagggtcatctcagatccagaaaatcagaagtttcttatcttgcattactaggaaaagaatgtgacatggctgtttatactgtctgggatttgtgactttgtcatacgcttggcaatctccaaaaccaaaatttcattttgtctttgaaacattttgctttttggctactgtgaccataaaatattttctccaagaaacatcaaatcctgcacaatttaaaacataaataggctatttagggtcctgctgttttacaaagaaaaggccatttatatttcagtgacctctatgttaatgcagctgatgtgagtatataaaacaggctaacggatgtatagccaaatgtgaccagctaacactatttttttcatgatggatttatttatagagtggaaagtcaaattgtaaagttgaaaaacatgattttccaagtaaggtgaacctgggtttgaatccctcctttttttttttt

SEQ ID NO: 553559 - DNA, 992 bp, Homo sapiens
tgttgcccaggttggtctcaaactcctgggctcaagagatcttccctcttcggcttttcaaagtgctgggagtacaggcatgggtcactgctcccagccactttcttaagtttttaaatgggctttatttagaacagttttaggttcacagcaaaattgagcagaaagtagggagtctccatataccctgccaccacacatgcacagacttccccactatcaatattcagaatcagagtggtacgtttgttgcaatagatgaaactacattgacatatcatttttctttacttttaaagtgtacagtgccattgagcacttttggtcagacttctaactcagcctatggcaatgaaatccaactctattagtaatattttatatcccaaattatttaacgttattgcttatctttattaaaatcaaatgatcaattagcagcaaacatctaataatgttaaagcctaatgttcaggtagttcagattcattttttatcagatrtcattgatacatcctgaagggtcatctcagatccagaaaatcagaagtttcttatcttgcattactaggaaaagaatgtgacatggctgtttatactgtctgggatttgtgactttgtcatacgcttggcaatctccaaaaccaaaatttcattttgtctttgaaacattttgctttttggctactgtgaccataaaatattttctccaagaaacatcaaatcctgcacaatttaaaacataaataggctatttagggtcctgctgttttacaaagaaaaggccatttatatttcagtgacctctatgttaatgcagctgatgtgagtatataaaacaggctaacggatgtatagccaaatgtgaccagctaacactatttttttcatgatggatttatttatagagtggaaagtcaaattgtaaagttgaaaaacatgattttccaagtaaggtgaacctgggtttgaatccctcctttttttttttt

SEQ ID NO: 553560 - DNA, 992 bp, Homo sapiens
tgttgcccaggttggtctcaaactcctgggctcaagagatcttccctcttcggcttttcaaagtgctgggagtacaggcatgggtcactgctcccagccactttcttaagtttttaaatgggctttatttagaacagttttaggttcacagcaaaattgagcagaaagtagggagtctccatataccctgccaccacacatgcacagacttccccactatcaatattcagaatcagagtggtacgtttgttgcaatagatgaaactacattgacatatcatttttctttacttttaaagtgtacagtgccattgagcacttttggtcagacttctaactcagcctatggcaatgaaatccaactctattagtaatattttatatcccaaattatttaacgttattgcttatctttattaaaatcaaatgatcaattagcagcaaacatctaataatgttaaagcctaatgttcaggtagttcagattcattttttatcagatatcattgatacatcctgaagggtcatctcagatccagaaaatcagaagtttcttatcttgcattactaggaaaagaatgtgacatggctgtttwtactgtctgggatttgtgactttgtcatacgcttggcaatctccaaaaccaaaatttcattttgtctttgaaacattttgctttttggctactgtgaccataaaatattttctccaagaaacatcaaatcctgcacaatttaaaacataaataggctatttagggtcctgctgttttacaaagaaaaggccatttatatttcagtgacctctatgttaatgcagctgatgtgagtatataaaacaggctaacggatgtatagccaaatgtgaccagctaacactatttttttcatgatggatttatttatagagtggaaagtcaaattgtaaagttgaaaaacatgattttccaagtaaggtgaacctgggtttgaatccctcctttttttttttt

SEQ ID NO: 553561 - DNA, 1492 bp, Homo sapiens
gaaccataatttatcaatctcattttgtatcaaattttatgctgtttaaacaatgttatggtcaggtgtcatggctcgcacctgtaatcccaaaacttcggaaggccgagtggggagggttgcttgagctcaggagtttgagatcagcctgggcaacatagtgagacccctgtctctacaaaagaaaaaaaattagttggacatggtggcacacacctgtgatctcagctactcacaaggttctggtggaaggatctcatgaacccaggagttcaaggttgctgtgaactatgatagcactactacactccaggctgggtgacagagcaagaccctgtgtctagaaaagtaaaattaaaaaaataaaaaatgttacaatctctgccattatccatgaatattcccttaggataaattcctagaaaggtatgtaaaagtttagattcctctaggcagattatctgaactttactcccatcaccacttggagaaggctatttctctgcactcttactaacactggcttttttttttttttttttttgagacagagtcttgctgtgtcgcccaggctggagtgcagtggttcgatctcgactcactgcaaccaccgtctcccaagttcaagctattctgccatctcagcctcccgagtagctgggattacaggcacccgccatcatgcctggctaacgtttgtattttttagtagaaacagggtttcaccaggttggtcttgaactcctgacctcaggtgatccatctgcctcggcctcccaaagtgctaggattacaggcatgagctaccgcgcctggccgacattggctattttttaaaaaaaataaatcttaatctatttgtaaggcaaaacatgaaacaggaagctttacatactcttaaatctcacactaggctttttttgtatttggactgtttagcattttgtctatgttgctgaaaccctttgaagttacaagatctatttgtgttcttcatgtaattgttcttccccccaaccttgggctaacagtctgtggccttccttggtaactaaatgcaagagtgatattaataccttacaagttcctcccttgcaaatgggagccctaagtcaaggcacagatagaataggaaaaagcttctggttgctcttcaagaagtttatcgagttagatacagtgaaaagcaatggagatattaggagaataacaagatgggcatggaagagtttctgtttgctcttcaagaaatatctattgagtcagatattgtgaaaagcactggagatataataagacgggcatggtgcctttccttatttagctcatgggcaggttccaagaagcttctaaaggckcaacattttgttttccatatctggcacctagatatacctattcagtaagtcaacaatatttattgagcatgtactatggattaggcattatcaaggccctgaggatagagcagtgaaataaaacagacaaaacc

SEQ ID NO: 553562 - DNA, 1492 bp, Homo sapiens
gaaccataatttatcaatctcattttgtatcaaattttatgctgtttaaacaatgttatggtcaggtgtcatggctcgcacctgtaatcccaaaacttcggaaggccgagtggggagggttgcttgagctcaggagtttgagatcagcctgggcaacatagtgagacccctgtctctacaaaagaaaaaaaattagttggacatggtggcacacacctgtgatctcagctactcacaaggttctggtggaaggatctcatgaacccaggagttcaaggttgctgtgaactatgatagcactactacactccaggctgggtgacagagcaagaccctgtgtctagaaaagtaaaattaaaaaaataaaaaatgttacaatctctgccattatccatgaatattcccttaggataaattcctagaaaggtatgtaaaagtttagattcctctaggcagattatctgaactttactcccatcaccacttggagaaggctatttctctgcactcttactaacactggcttttttttttttttttttttgagacagagtcttgctgtgtcgcccaggctggagtgcagtggttcgatctcgactcactgcaaccaccgtctcccaagttcaagctattctgccatctcagcctcccgagtagctgggattacaggcacccgccatcatgcctggctaacgtttgtattttttagtagaaacagggtttcaccaggttggtcttgaactcctgacctcaggtgatccatctgcctcggcctcccaaagtgctaggattacaggcatgagctaccgcgcctggccgacattggctattttttaaaaaaaataaatcttaatctatttgtaaggcaaaacatgaaacaggaagctttacatactcttaaatctcacactaggctttttttgtatttggactgtttagcattttgtctatgttgctgaaaccctttgaagttacaagatctatttgtgttcttcatgtaattgttcttccccccaaccttgggctaacagtctgtggccttccttggtaactaaatgcaagagtgatattaataccttacaagttcctcccttgcaaatgggagccctaagtcaaggcacagatagaataggaaaaagcttctggttgctcttcaagaagtttatcgagttagatacagtgaaaagcaatggagatattaggagaataacaagatgggcatggaagagtttctgtttgctcttcaagaaatatctattgagtcagatattgtgaaaagcactggagatataataagacgggcatggtgcctttccttatttagctcatgggcaggttccaagaagcttctaaaggcgsaacattttgttttccatatctggcacctagatatacctattcagtaagtcaacaatatttattgagcatgtactatggattaggcattatcaaggccctgaggatagagcagtgaaataaaacagacaaaacc

SEQ ID NO: 553563 - DNA, 638 bp, Homo sapiens
cagctaactttaattttttaaaagcagaggagtgggttgtataggtttagaaatacatccatcaagctagttaagtgagatggattcaagccttcaactcactggaatatttaccaaattgactattcattagctaaaagagccatataaacaaggtactttttaaaattcaaaattatgtaaggtcttgtttcctttttatgttgttatgaattggattgtagaggttataaggtaaaataagattacttttacagtaaaacatacaacatattgtcacaagagaggcagccatttgaacacgaattgcttctcaggcattccttgaaattttgagacagttactttaattaacacaacaaaataataaaacactacagaagatctaagaagatactttgacttatgcatattgttacttttytattactgctagtggaagatgtaatcgacaaggaaggtaagggctgaatttgttttatgtaaaaagacaaatttctttgggttttagctttcaaacatcaagatagtaggtcaatgtctaaatgagtgtatcaaagttctcacaatggcacatgtaaatccacctcttgtctacccaaaactctaaccaagcaaaggcaagttggaagaatcag

SEQ ID NO: 553564 - DNA, 1029 bp, Homo sapiens
cagggccactgaaaggagttaaatgttgtgtatactgtgggctggccaagagcctagcctgtggtaagtgtgcaataaacagctgttgttattacggttgtaaatgctttctctaagtggtgacgggatgtgagaagggcttccagttgaaaccacaggcttgcagcagtcaaactgctggtataagggccatgcaggaaaatttaggtacttgaggtttgttaagtctccaaggttctcatttcagctcagttattcctattttatcccaagttagataagaagtttctatttcttttgtctccaggtcatagcagattcatggaaggcatatgcggtcatggtggtagtggtggttgtggtcattgtggcgaggaggaatgcccttcacagccatatcgccaacagtgggtatgtgtacccgagggttagcaaaaaggaaaagaacaacagaaagacacccatgcccctgtctctgcttttacaatgcactcaactcacccaaggtggtyggagtgggaaatgttaaacaagctgctgcagcccacctgaccatcagattgtcctcgggctttcattccacctgccttgatggttccctggtgctttcacccatcaggctccattggcatccccacctgtattgcccttcaggtcttgtgtctgtgccacgctctgaactcacattccttctgtataacactttggatccaaaccccacctccaggttgccctgattcgctaggtgggccaaggtcaaaagaaaagctgctgagaggctgggcgcagtggctcacacctgtaatcccagcactttgggaggccaaggcgggcagatcacaagggcaggagtttgagaccagcctggccaacatggtgaaactgcgtctcaactaaaaatacaaaagtatcaggcgcggtggtgtgcacctgtagtcccagctacttgggaggctgaggcaggagaattgcttgaacctaggaggtggaggtggagattgcagtgagccgagatcacaccgattgcac

SEQ ID NO: 553565 - DNA, 1788 bp, Homo sapiens
ccttttccttcctctgcatccccattgctccccgaggctctggacttgaaaactgccctggccatggtgttctggaggggcagggtggacctttccccacccacaatcagtgaacagtgaggccccccatgaccaagccctccctttggggacagcagggttctgactatgtgcttgccatcctcctctcttattagcgcctctgtctgaggccggagctgaggaggacgtggctgaccccgtccctgcggccacagctggggtttgtcccctgtgcacctcagccctggcccaggctgccgtccccatggcccctgtgcctatttgtgacgcwggaagggggactcgaatgtgtccttctgtgtcttctgacaggcgacggagcactgttccgggagcacggtctgttgggtgtgacggcccagcaaagaggcagtgaccggctcctgaggaggggcacaaggcacccaggggttctgcctcgacagggaaggggactccaggcagaaaaccagcgagaggaggccccgtggaggaagggagcacagcaaacccgagatagggaggggaggcgcagcagcggtgcgggatcacgcccaccacaacacggtgcacggtgcggtgaggggctcgctggatctgaaaggtgcaggcgctcagcaacgctggtgttctctttctggaccccaggcctggacacaacctccgtgctggttctggaggggccacctctcctgaccacaccccctctgtccacagggccaggcatgtgaggtctctgcgggtcatggagaacctccctgccgtgaccactgaggagccgacccccatggggaggggtcctgtgggaccctcaggaggtggcagcacccgggaccaggtccggactgtggtcatgaggccctctgtgagctgggagaaagcggggcccgaggaggccaaggcgccagtgagaggcggtgagttcattccaccctcaccacccgccctccatcccacccacttctccaccccacccgccccgtccatccatccctcaccaccctgcctgcctccaggcctcttggggctggggctggagtctgctctccatcacttctcgtttccttcccccgcgtgtgtttaacaggagccactgtgcccgctgagtcacttgagaggccagggcccagctcgtgtttttccagggacgcgtcagtgataacaaaactggcaaagaacgaggcaggggcctttgaacccccatgttcagagaccgttccagaaacagtccgatgggtttggccttggaacccctgagagtcctcaggatgaggcatcctcgttctccaggaggcacccaaggtgcagagagggaagggccgggccaggccaccctgtggtcaggggccgggccaggacgtgtgcccagtttcctgaattcccgggagacctgaagagtgacctaggtgatctccaggatcccctcttacccccatcctgagaccctgaaggggacgaggggagaggcaggggagaccaaggcctgcacggcccctcccggcaggagacagctgcggttgtgacccgtccctgggcctcgtcctcccagtgtccagcctcagcccagtctcctcttagctgcctatgtccctgtcttgggactccagggcttggcacatggtaggtgcttcgtcactgttcaagggattgatgaatgaaggatgtgtttggacagtggcgtggaaacctcagatgctgtcgcctggctcacagccaggtgtgggagtgttttatacctgcgatcct

SEQ ID NO: 553566 - DNA, 1051 bp, Homo sapiens
tcctgaaaacttaaatgatcaagtagaagcataattgcatccctaagagaacagtgaggctgggatggatgacatttatctgaggcagctcaatgcaggccccatcagatgcagggaaaggtctggatgacttatcatggtccattccaggcctatgattttaaaagaggcccataaatatcccatggggccttcttactttttaaattgataacttgcttctgctcaagaagagctttgtgggtctactccattaattatatccgcggagagccttccatctacagatctcaaggtgctttgccgatagcagccgcagcgccattccatttggactgggtggaaacgctgaggcgtgcagccactaagagatgtttccaagatcacacggtgccctgtttaagaagatctgaaaatagacatcacgtgcctctagctgttagccaactgatttgagggtttggttttctgacaccactctttctctcctcccaagtctctgatttaaaaatgatttgttttaatttagaaaataaatatgggatagaggatttttgaagtggagtgtttatttgttttgaagggatgtggccaaatcaaacaaatggcaactcctttcaactctccatcctcatgattctgtggtgaagcccagctccacaataatgagcctagtgggttaagccatgtacaggctcatcctgcatgcagaacttcactgaagaggaggctttccaggaaaatgtgtacctctcagtccttggactgaacatgtaggaagccaatttccctcaagatgaagagtaaggcctagggcggattgtggagagcgccagtctggacatccaagtctggtgaccaggcgccgtccatgcaggctccagtttcctagtccctgcagcaaggcacttaatctctaagagcttcarttccacagttgtgaaactctgtgaaatactctagtgaataagctggtgcctgaggattttctgagtcccttggaggtcatccttacattaatgtgatgaactcagtgcattccttccactcc

SEQ ID NO: 553567 - DNA, 1594 bp, Homo sapiens
aattaaaatattgatacaaaggctgagatctttatatcttctcttatttaaattcctggagcaccagataacttcctctattataattcttactgtatacaaccataactctcatttgaaaacaatgaatacataattataaaatcagatatatcataaaatgattggtatcaatatgtgaaaaaaatcttcaatgttgaaagtacaagattacaagccatctgaaagtatctaaacatcaatcagagaaaaatgctcatcattttttgatgaaaccaaaagtaagagaatttggtattaatctactacatcattggtaaattacatattaattattgtgagaaagaaataattgatggaatttaaagaaaatcggttttcctttatttttattattctacctaaaagtattatatctaattaaaataatgattttaaaattatcccaagtatgtcatcacactaawatccattgtatttaatttctcaactgagaaattgtattcaattgtattcagtttctctactgaaaaattaatatgaaagcaatcacatagcattcagaaattaataaatatttaaagaaattaaacagcattagattttcttgttgtaaaatttttttcttctctcagtatggcttatgtctcattgtttctattgaacatagtgcaattcaagtattaatacagcacctttataaaagttgtgaatctcagaaatgaacaagcttacctccctagttatttattaaaagttacaagtcacttttttttaacttcctaataatcttagaggggtatattttgtgtttttgtttgctatatcttttataaagaagatccctaatgatttgaaagttagaaccaattttctgaaggattgagccaagctccttgaacttgtgtgtttgtgggtggcacactatgtcttttgcagacccagtacctaccccttggtctagaacatattttcctccacctgccttttaagtttttatttcagcaggggtgggtggtttgtggttgaccgaaaatagaacgggctacaaaagcccttcctgtttgatattgaatctgctatttgagtcccccttacattatgaactgactgttaattaacacatttggtaagagaatatcctgatctgctttgcatgtgaggctctcccagtaataaacaccataatcaaacaagattttaatttctctatgccctgttagaaattcagatacaattcaagtcatcatcatcttggaaattttaagttgcattccgatgtcgtctctgttctggccattgtgcaatgggccttcaaatgttgtagtagaggccaactgatattccattgtcattcatttatacacaggtatatatatggtgtgtgtacgcaaatatatatataaatattcatatatgtgtacatgtgtacatacatacatatggaggtaatacaagtttgcattgtttttaaaatttttttacccaaattaacaatgactctattgcatatctttattggttatatcacatttatataaataaatttatatcagtgagaattttcaagtaagtgaaatttgaattggattca

SEQ ID NO: 553568 - DNA, 552 bp, Homo sapiens
ggtctgacttatatgtttatagtatctctggctgctgtgtgaggaaggaggtgattgagttgtgcagcccagctgagagatgatgctggctccgatcagaattgttgtgatggaagtggtgggaaagggtgagatgattgatatatattttgaaagtggaatcaagaggatttgctcacagaccggaygtggggtgtgaaagaaagagagaaaggagtcaggggcaaatctaaagtttttaatcagagaaattgtaaagataaagctataatttttaaaaggtggaaactttgagatgagcacttaaatagttgtcataagtaccacaattcttcagtctttacagtagctctattaagaacatcttactagccttatttttaaaactgcaaagttgatacctagtaatgttaggtggcttatccagggaaatagttcagattataaattcctaactttgaaattagatacactgataattacaaagcatattccttctattcttctggtttggtgattaaccagatcctgatacatttttaagttttatat

SEQ ID NO: 553569 - DNA, 1443 bp, Homo sapiens
ttttattgtctttaagcatcaatttcaatccgatgacttttgttttctgtttgggatgcaatgatttttaagatttcaaacagtttttggcctttagcacagtacctcaagtacctaatggatatggtaataaacctcaagcttttttgaaaaaagtcaccagctgacagagctcccttctccactggttctgtctcccaggaaccaaagtccaggtggggctccctctctgtgagtctagagcaaaagcctcaacgtgcttttcttcagggtgatattttgctacaggagatcaagacagagacaacagaggcattactaagcgttgaaagctcatagtgaggcccaatacatttttgttcaatggacaaacggattcatactgtccaagagtccaagaacctgcatgtagggaggagtcatattccttatgaagttggtcactgactctcctgcaatgtcatataactaagaattctcttccacatccttgcttaatgactggaaatggccatttcactgtggccctccaatcaaccctttcccatgagctatgtaatattttaccaccttctaagattgaaactgcccactaataacttcagcctgaagctatttcataattaaaaactgttaagtatttggtattggtgacagtgcctttatctttttccctcttccatattcctagtgcttttacacacctaagtgccaccaagatagaaatgatttgctcaacagtgctctggacataaaagaattcttcgatcacaaaaatggaacccccttttcatgcttctacagtccagccagccaatctgaagatgtcattcttataaaaaagtatgaccaaatggctatcttccactgtttattttggccttcactgactctgctaggtggtgccctgattgttggcatggtgagattaacacaacacctgtccttactgtgtgaaaaatatagcactgtagtcagagatgaggtaggtggaaaagtaccttatatagaacagcatcagttcaaactgtgcattatgaggaggagcaaaggaagagcagagaaatcttaagacggtggccaaattaaagtgctggccttcagatgtctgtgatttctgcaactgaggacctaattatgcctgtctgcaaactaayaatgtaaaaggtaataattaaagtatcatattttcatgtgggaaaaaatttaaaagcctcattttgtattctatttatttctataaatacatacaaattcaccatcttttctaatcccaatctctttccaaatgagctaaggaagcactgttttttttcctgtatagcaaaatgagttcaagatattctttgcctaatttcagctctagctagaaccagtcaatatggaaataaacaatgagggtatctaatctactgaacactgaaccatcagcctaactctatg

SEQ ID NO: 553570 - DNA, 766 bp, Homo sapiens
ggagaaaaaagaagatacaattcagaaagggcacaaaaagagagcctatgtggtgaatacaaatatattctttttactttttttttggagatagcatcttgctctgtgacacaggctggagtgcagtggtccaatcttggctcactgcaacctccacttcccagcctcaggtgatctcctgcctcagcctcttgcatagttggaattacaggcacacaccaccacacctggctaatttttgtatttttagtagagagggggttttgccatgttggtcaggctggtctcaaactcctgacctcaagtgatccacccacctcagcctcataaagtgctgggattgcaggagtgagccaccatgcccrgccctttttattcttaacttaaaaatgttatcctcttgtttgtaaattttacaattaaacattttaaaagaaattaattttttttactttaacaattgttaattctcttcactagaaacatcttgaggagcagattgctaaagttgatagagaatatgaagaatgcatgtcagaagatctctcggaaaatattaaagagattagagataagtatgagaagaaagctactctaattaagtcttctgaagaatgaagataaaatgttgatcatgtatatatatccatagtgaataaaattgtctcagtaaagtgtatttttctctctcatttcttactaatttcaaatggtgagaaggcaaggtagtatgatttaaaccagaagtcggcaaaatacaggttga

SEQ ID NO: 553571 - DNA, 766 bp, Homo sapiens
ggagaaaaaagaagatacaattcagaaagggcacaaaaagagagcctatgtggtgaatacaaatatattctttttactttttttttggagatagcatcttgctctgtgacacaggctggagtgcagtggtccaatcttggctcactgcaacctccacttcccagcctcaggtgatctcctgcctcagcctcttgcatagttggaattacaggcacacaccaccacacctggctaatttttgtatttttagtagagagggggttttgccatgttggtcaggctggtctcaaactcctgacctcaagtgatccacccacctcagcctcataaagtgctgggattgcaggagtgagccaccatgcccggccctttttattcttaacttaaaaatgttatcctcttgtttgtaaattttacaattaaacattttaaaagaaattaattttttttactttaacaattgttaattctcttcactagaaacatcttgaggagcagattsctaaagttgatagagaatatgaagaatgcatgtcagaagatctctcggaaaatattaaagagattagagataagtatgagaagaaagctactctaattaagtcttctgaagaatgaagataaaatgttgatcatgtatatatatccatagtgaataaaattgtctcagtaaagtgtatttttctctctcatttcttactaatttcaaatggtgagaaggcaaggtagtatgatttaaaccagaagtcggcaaaatacaggttga

SEQ ID NO: 553572 - DNA, 681 bp, Homo sapiens
ccgggtatggtggtggacacacataatcccagctactcgggaggctgagacaggagaattgcttgaacctgagaggcagaggtttcagtgaaccgagatcacgccactgcgctccagcctgggaaacagagcaagactccgtctcaraaaaaaaaagggggatcaacacatgaacacacagaggggagcaacagatactggggcctactggaagatggaggtcagaggatgggaggagggaaaggatcaggacaaataactaatgggtactaggcttaatacctgggtgatgaaataatttgtacaacaaaaccccatgacacaaatgtatctatataacaaacctatacatgtacctgtgaacttaaaaattaaaattaaaattaaaaaaaagaagaatatgcacaagaaaaaagtcacaatattaaaaagttccatttcagaaaatgtattttctttattactttccttattctaattctcaacaaactttcgtatttaatatctttcttcttcaccgaattataagatccatcagggagggattatgtttatcttgtttcatcactctgcatacaatggcacatagaaagagctcaaacgtttgttcggtgagtaatgaatgttaatcctatcactaaaaaagaaaatgttgaggccgggtgcagtggctcaagccga

SEQ ID NO: 553573 - DNA, 822 bp, Homo sapiens
  misc_feature 310: n = A,T,C or G
gctgtgatcctgcgtggaggagaaaatctgttttgttgccttctccagcttctataggctgcccacaagctttggctcatggccatccaccatcttcaaagccagcatgactagtcagctctttctcatgatgccgtctctctggctctgcccatcacatccccatttctgactcggactccctcttcacatttaaaagatccttgtgataagattgtgcctatggggactctgcagtataatctcttagtctacaatctttaattcctcttggtcgcttaaggtaacatagttgctttaagggattggnatgtggaggtttttgggggccactgttcttcctgccatggtagtggaacccctgtgagtccacttaccccagctttatttatttatttattwtttatttatttatttatttatttatttattttgagatggagtctgtctctgtcgcccaggctggagtgcagtggcgtgatctcggctcactacaagctccgcctcctgggttcacgccattctcctgcctcagcctcctgagtagctgttgactacaggcacctgccactacgcccggctaattttttgtatttttagtagagacagggtttcaccgtgttagccaggatgaacttgatctcctgacctcgtgatccgcttgcctcagcctcccagagctctgggattacaggcgtgagccaccacgcccagccaccccagctttattaaagttcatctgacactgcgtggcacatggtgtggaggactcggtgcagggtggggtcttcctgtagcccctcaccatcatgtactctcatc

SEQ ID NO: 553574 - DNA, 822 bp, Homo sapiens
  misc_feature 310: n = A,T,C or G
gctgtgatcctgcgtggaggagaaaatctgttttgttgccttctccagcttctataggctgcccacaagctttggctcatggccatccaccatcttcaaagccagcatgactagtcagctctttctcatgatgccgtctctctggctctgcccatcacatccccatttctgactcggactccctcttcacatttaaaagatccttgtgataagattgtgcctatggggactctgcagtataatctcttagtctacaatctttaattcctcttggtcgcttaaggtaacatagttgctttaagggattggnatgtggaggtttttgggggccactgttcttcctgccatggtagtggaacccctgtgagtccacttaccccagctttatttatttatttattatttatttatttatttatttatttatttattttgagatggagtctgtctctgtcgcccaggctggagtgcagtggcgtgatctcggctcactacaagctccgcctcctgggttcacgccattctcctgcctcagcctcctgagtagctgttgactacaggcacctgccactacgcccggctaattttttgtatttttagtagagacagggtttcaccgtgttagccaggatgaacttgatytcctgacctcgtgatccgcttgcctcagcctcccagagctctgggattacaggcgtgagccaccacgcccagccaccccagctttattaaagttcatctgacactgcgtggcacatggtgtggaggactcggtgcagggtggggtcttcctgtagcccctcaccatcatgtactctcatc

SEQ ID NO: 553575 - DNA, 822 bp, Homo sapiens
  misc_feature 310: n = A,T,C or G
gctgtgatcctgcgtggaggagaaaatctgttttgttgccttctccagcttctataggctgcccacaagctttggctcatggccatccaccatcttcaaagccagcatgactagtcagctctttctcatgatgccgtctctctggctctgcccatcacatccccatttctgactcggactccctcttcacatttaaaagatccttgtgataagattgtgcctatggggactctgcagtataatctcttagtctacaatctttaattcctcttggtcgcttaaggtaacatagttgctttaagggattggnatgtggaggtttttgggggccactgttcttcctgccatggtagtggaacccctgtgagtccacttaccccagctttatttatttatttattatttatttatttatttatttatttatttattttgagatggagtctgtctctgtcgcccaggctggagtgcagtggcgtgatctcggctcactacaagctccgcctcctgggttcacgccattctcctgcctcagcctcctgagtagctgttgactacaggcacctgccactacgcccggctaattttttgtatttttagtagagacagggtttcaccgtgttagccaggatgaacttgatctcctgacctcgtgatccgcttgcctcagcctcccagagctctgggattacrggcgtgagccaccacgcccagccaccccagctttattaaagttcatctgacactgcgtggcacatggtgtggaggactcggtgcagggtggggtcttcctgtagcccctcaccatcatgtactctcatc

SEQ ID NO: 553576 - DNA, 822 bp, Homo sapiens
  misc_feature 310: n = A,T,C or G
gctgtgatcctgcgtggaggagaaaatctgttttgttgccttctccagcttctataggctgcccacaagctttggctcatggccatccaccatcttcaaagccagcatgactagtcagctctttctcatgatgccgtctctctggctctgcccatcacatccccatttctgactcggactccctcttcacatttaaaagatccttgtgataagattgtgcctatggggactctgcagtataatctcttagtctacaatctttaattcctcttggtcgcttaaggtaacatagttgctttaagggattggnatgtggaggtttttgggggccactgttcttcctgccatggtagtggaacccctgtgagtccacttaccccagctttatttatttatttattatttatttatttatttatttatttatttattttgagatggagtctgtctctgtcgcccaggctggagtgcagtggcgtgatctcggctcactacaagctccgcctcctgggttcacgccattctcctgcctcagcctcctgagtagctgttgactacaggcacctgccactacgcccggctaattttttgtatttttagtagagacagggtttcaccgtgttagccaggatgaacttgatctcctgacctcgtgatccgcttgcctcagcctcccagagctctgggattacaggcgtgagccaccacgcccagccaccccagctttattaaagtwcatctgacactgcgtggcacatggtgtggaggactcggtgcagggtggggtcttcctgtagcccctcaccatcatgtactctcatc

SEQ ID NO: 553577 - DNA, 655 bp, Homo sapiens
ttgccacaacttactaaaaagcagagcagtggttaaatgaaaagatttatgatatttgcattgtttattttgaagcatctaattaaataattagttcagtcttctagctgtttttagaaacaagtctttagaaccctacagagagattttctgggcccaggaactcatttggggaagtgattggcctttgaacagtaagtagaaagtcatcaaggtagctctgcccacctggtgtttgcttatggaaaccatctgctggttaaagttcctggctcagaacagccctagccaggcagtcacagcctgcacagaggtgcagtgatggccatagtgtgccgaagsggctgatcgcttcaagagcgtctggaaagttgatggtctatctgtcactgcgatcttgacatcctgtgtggttcagtctggttgcagttggactcatgctgggtctggcgggtaggtgagaatctctaccttgctgttgctgtccaggtttcaaggcaagcgtgagagtagtcctacacagaggaaaacacacattaggctcaagcacctgcctgtgctttgctgctgcttgtttaaaggagtgcttggaaatgccagctgcccagcctctagagagctggggggatggacccctatcctgtgagaagttgag

SEQ ID NO: 553578 - DNA, 607 bp, Homo sapiens
  misc_feature 507, 508, 509, 510, 511, 512, 513, 514, 515, 516, 517, 518,519, 520, 521, 522, 523, 524, 525, 526, 527, 528, 529, 530,531, 532, 533, 534, 535, 536, 537, 538, 539, 540, 541, 542,543, 544, 545, 546, 547, 548, 549, 550, 551, 552, 553: n = A,T,C or G
  misc_feature 554, 555, 556, 557, 558, 559, 560, 561, 562, 563, 564, 565,566, 567, 568, 569, 570, 571, 572, 573, 574, 575, 576, 577,578, 579, 580, 581, 582, 583, 584, 585, 586, 587, 588, 589,590, 591, 592, 593, 594, 595, 596, 597, 598, 599, 600: n = A,T,C or G
  misc_feature 601, 602, 603, 604, 605, 606: n = A,T,C or G
aaaacaaaaggtgcttttaagtgagcccaggcagaactgtgagggcggcccatgctgcaggctgtggctgtcagcaggctgcttctccacagctggcccagtcctaggattcacagggcagcagcagggtacactgggtgactgctgccctctcgtggtggcacagggcagacctgctggtgaccagagatgcacccttttggggagaactagggagaaagcaggtattggagaagcaggggattgtttatttgttaaaagtgtggccctttcactcagcaggtctgctactgcctactaaggaatggcctctcgacatcctcatgtcaaaccctgcatgttcgggcccatctttaaaatccatcctaggccaggtgcggtggctcatgcctgtaatcccagcactttgggaggccgaggcagrcggatcacctgaggtcaggagttcgagacgagcctggccaacatggtgaaactctgtctctactaaaaatacaaaaactaacnnnnnnnnnnnnnnnnnnnnnnnnnnnnnnnnnnnnnnnnnnnnnnnnnnnnnnnnnnnnnnnnnnnnnnnnnnnnnnnnnnnnnnnnnnnnnnnnnnnng

SEQ ID NO: 553579 - DNA, 680 bp, Homo sapiens
tgcttattgggtctgttctttatgatatttttggatgattttttttctaagatagcaaggagcgccccctccccacccccatcaagtgaaaatattctgattagattacttaacgttcaactttagagaaatgcatttttctartatagcatctaggtcctcaaaagagttttaagtcaagttaaaccagggcccctatcctgatcctgtcactttcagctgtaggatgttgggcaagttctaaattttatctagggcttattttgtccgtttataaaatggcatatagtacctcctctcccacagttattgtggacttaaacacacacagcattctccatccctaggtttgaaaagacagaaaacacaacttctatggaagaacctctaatggaattacccaggaggaaagggggctcagaaatccagcaagttaccaggataatgaaatcatgtatttaggtgctcctggcccgagggatgtaaaatgcaacttactccagctcatcctcggagtcgtagcccactggcccggattcgatggcaatgacctcattcctcgtctgactttgtttccaggtgctacttcctgtggacgacggcgattcttttctcttcttcttcccaaaaaacttcttaaaagttttgaatttagattttttctttcctatacagattag

SEQ ID NO: 553580 - DNA, 680 bp, Homo sapiens
tgcttattgggtctgttctttatgatatttttggatgattttttttctaagatagcaaggagcgccccctccccacccccatcaagtgaaaatattctgattagattacttaacgttcaactttagagaaatgcatttttctaatatagcatctaggtcctcaaaasagttttaagtcaagttaaaccagggcccctatcctgatcctgtcactttcagctgtaggatgttgggcaagttctaaattttatctagggcttattttgtccgtttataaaatggcatatagtacctcctctcccacagttattgtggacttaaacacacacagcattctccatccctaggtttgaaaagacagaaaacacaacttctatggaagaacctctaatggaattacccaggaggaaagggggctcagaaatccagcaagttaccaggataatgaaatcatgtatttaggtgctcctggcccgagggatgtaaaatgcaacttactccagctcatcctcggagtcgtagcccactggcccggattcgatggcaatgacctcattcctcgtctgactttgtttccaggtgctacttcctgtggacgacggcgattcttttctcttcttcttcccaaaaaacttcttaaaagttttgaatttagattttttctttcctatacagattag

SEQ ID NO: 553581 - DNA, 923 bp, Homo sapiens
ttcagccaaaccagacgagtattttgaagtgttacattctggtgaccccaatcactcagccttcaagacagggaagtttggttccttgaaagtcaggacctgcacactttctttgaccaaacagggtgacttaggggcamaattgggtcaaatcattcaatgctgctttgaacctgcctctccttatcttccctatcttcttctgtatattcttcaattcttttgctaggaatccttgaaagcatgtctactctggcctttgaaagagaatatgtcgggtaactagatcatctttttgaaaaaaacctttaaaaatgcctttagttgaatagtaacaatagtagaaaataattccagatgaaaaacaggatgttgcctgtttcatagaatcccatattcataaaagttcatacatacgttatattttagcaaggtaaaccatactgaactcagttatgaacaattggttgctacaatatagagtactctattttcttcttctctactacacttcctctatgggtttagtgttctatctttaaaaataggtaatatagataataaataagtaaaaatacattaagctatttgttcaactaaaatgaaccaccaacttatttaatcctgcagttccatataaacatgaccataattcaaaattctttcagctttaagagaaaaaattccttatgcacactgctagctgcaaaagctctacttcatgtctacacatctacatatggaatgtaacttacagctagccttttgtatctatcatattgacaaatttctaatagtaataatgatgttttcatgagtataagatgttttgtgagtataggaactctcagtcactatacttcatagaagtataaattgctatatatattctggaagccacatatatacagtcaagcatgaca

SEQ ID NO: 553582 - DNA, 923 bp, Homo sapiens
ttcagccaaaccagacgagtattttgaagtgttacattctggtgaccccaatcactcagccttcaagacagggaagtttggttccttgaaagtcaggacctgcacactttctttgaccaaacagggtgacttaggggcaaaattgggtcaaatcattcaatgctgctttgaacctgcctctccttatcttccctatcttcttctgtatattcttcaattcttttgctaggaatccttgaaagcatgtctactctggcctttgaaagagaatatgtcgggtaactagatcatctttttgaaaaaaacctttaaaaatgcctttagttgaatagtaacaatagtagaaaataattccagatgaaawacaggatgttgcctgtttcatagaatcccatattcataaaagttcatacatacgttatattttagcaaggtaaaccatactgaactcagttatgaacaattggttgctacaatatagagtactctattttcttcttctctactacacttcctctatgggtttagtgttctatctttaaaaataggtaatatagataataaataagtaaaaatacattaagctatttgttcaactaaaatgaaccaccaacttatttaatcctgcagttccatataaacatgaccataattcaaaattctttcagctttaagagaaaaaattccttatgcacactgctagctgcaaaagctctacttcatgtctacacatctacatatggaatgtaacttacagctagccttttgtatctatcatattgacaaatttctaatagtaataatgatgttttcatgagtataagatgttttgtgagtataggaactctcagtcactatacttcatagaagtataaattgctatatatattctggaagccacatatatacagtcaagcatgaca

SEQ ID NO: 553583 - DNA, 990 bp, Homo sapiens
taaaggcataaccataatgccccttttactgagccctgacccctaatatttttctaggcaagaccttaagagaggtagaaaattgagagggtgaaggggaaaatcttcaaaagcagcatgtctctaaattgataccatgtaaacctctcatagtattgggaaaccactgctgggggtaaatgaaatgaattcactggggcatctaatcctattcttggaacatttaaactgtttaaatgcactgacgagcaaacaaacttcaaagcgatcattacgccccagacactgttgcttgtgtggctgaaatctttatgagattagccccccacagagagagaagttaaacacagccagaaccactttgaaactgtcgggaggatacccatttaccggctgaggatcagggcaaatgtgcctaattcccaatgtggctctgccccagacccaagagtaacctattgagcttaaaaccccacttcactctctgcagccttcatttcttgcctctgcaacctcaacagcactgacaaccctggacctgcacaaatattcaaagttcctaagcacatctttggcaaagtattcatttccctgtcactattgtcttcaccgaagaattaaatgatggatagcacatatcgaacaaatattgtaaaacagtacaactaagaagttgttgttgtcgttgttgttttcttctgtttggtttcaartatatgaaaaataattagcaaaaatagaaaaatgtactgtcaagctttttttctgtcaacttttacactattttcctcaagtatctccccaatttttattccttccttatctcaatcttaaattcataatgcaacatcaatatttcatttgttaaccaatttaagaataaaacttctagttattcctaaactagcaacgtgatttttacttatatagaaggggctaaaaaaaaaagcaacattaatttattcaaccagtattgacttgcctatcatg

SEQ ID NO: 553584 - DNA, 772 bp, Homo sapiens
gactcccccattccatgattggcatgcccagagtactgtttttaacatggggaattgctaatggtaaagtggcctcattgcatttgagctgaatatgtgtgcagactaaaaattagcctaacttgcctgtagtatttagagctatagacctaaaatcctaagattaaacatattaattgttccatattagcagcatttaaagcagtggcctcttcaggtttgaatctatagttaacaggtcactattgtgcctctaccttcacccttttttattgtattatctccctgcctgctggaggtgattgctgtagagcaggggtacccaacactcgggccgctgaccagcacaggttcatggccygttagaagctgggccacacagcaggaggtgaatgcacatcacccacctgggctctgcctcctgtcagatcagcggcggcattagtttctcataggagcacgaaccctattgtgaactgcgcatgtgagggatctacgttgagcgctccttatgagaatcctaactgattcctcatgatctgaggtggaacaaggaacagtttcatctgggaacaatccccgcacccctctccactcagtccatggaaaagttgtcttccacgaaacctgtccctggtaccaaaaaggctgattactgctgctttagacaactgcactgtttaaagtttatatacttaatttaccacaaatctagaagcacttaagataatcgcacagaacacctgaagttttcttactagaaaaaaacatt

SEQ ID NO: 553585 - DNA, 772 bp, Homo sapiens
gactcccccattccatgattggcatgcccagagtactgtttttaacatggggaattgctaatggtaaagtggcctcattgcatttgagctgaatatgtgtgcagactaaaaattagcctaacttgcctgtagtatttagagctatagacctaaaatcctaagattaaacatattaattgttccatattagcagcatttaaagcagtggcctcttcaggtttgaatctatagttaacaggtcactattgtgcctctaccttcacccttttttattgtattatctccctgcctgctggaggtgattgctgtagagcaggggtacccaacactcgggccgctgaccagcacaggttcatggcccgttagaagctgggccacacagcaggaggtgaatgcacatcacccacctgggctctgcctcctgtcagatcagcggcggcattagtttctcataggagcacgaaccctattgtgaactgcgcatgtgagggatctacgttgagcgctccttatgagaatcctaactgattcctcatgatctgaggtggaacaaggaacagtttcatctgggaacaatccccrcacccctctccactcagtccatggaaaagttgtcttccacgaaacctgtccctggtaccaaaaaggctgattactgctgctttagacaactgcactgtttaaagtttatatacttaatttaccacaaatctagaagcacttaagataatcgcacagaacacctgaagttttcttactagaaaaaaacatt

SEQ ID NO: 553586 - DNA, 847 bp, Homo sapiens
acccggtgccccaacccagttaccctttgatggagatgttagtgagcagtgaattggccaaaaatctgtgggaggaaaaagaaagaaggaaagtcgatcaatcttcaaattaataaaagctatttttatgtgatgcttctgcaatggaaggtcctgccacacgtagaatattgtctgggttaatgttcttatcatacatacttgtacaataaacccacctcaatagttttattaaattcatataggtaagcaaaatagcaattcactttgttcaaaaatattaaaagttgcagatatggttgaagtttcttttgaatttaccttcaatctctcagatctgcctccttactcaaaaggagcygcatcactctgatatctacttattattagacaaaatgtccagctttttatccaggttttttctatgaatttacatagaaatttagtcagagaaaataagcacattcttttgtttttacagtaataatagcctacctacatagtttagctgtgtggggtgacactgttacgcgttgcccaaatctcccttcagtgaaggactcattgcctcatcagggagcacttccagcagactgtctgcgtctctcagccccttcttggaccacctctgccacaatagccccctcaccctcaggctcacccctgcagagacaggcaatggtcagtggctgatccagttccatttggtaccaatgtactagttctcatgcaagctcattgtaagactataaatgtcttgccatgttggccaaaactgggttaactcagaaagatcttcctagcctcagagctgcctgtggggtggctgaggttgctgtggagccca

SEQ ID NO: 553587 - DNA, 847 bp, Homo sapiens
acccggtgccccaacccagttaccctttgatggagatgttagtgagcagtgaattggccaaaaatctgtgggaggaaaaagaaagaaggaaagtcgatcaatcttcaaattaataaaagctatttttatgtgatgcttctgcaatggaaggtcctgccacacgtagaatattgtctgggttaatgttcttatcatacatacttgtacaataaacccacctcaatagttttattaaattcatataggtaagcaaaatagcaattcactttgttcaaaaatattaaaagttgcagatatggttgaagtttcttttgaatttaccttcaatctctcagatctgcctccttactcaaaaggagctgcatcactctgatatctacttattattakacaaaatgtccagctttttatccaggttttttctatgaatttacatagaaatttagtcagagaaaataagcacattcttttgtttttacagtaataatagcctacctacatagtttagctgtgtggggtgacactgttacgcgttgcccaaatctcccttcagtgaaggactcattgcctcatcagggagcacttccagcagactgtctgcgtctctcagccccttcttggaccacctctgccacaatagccccctcaccctcaggctcacccctgcagagacaggcaatggtcagtggctgatccagttccatttggtaccaatgtactagttctcatgcaagctcattgtaagactataaatgtcttgccatgttggccaaaactgggttaactcagaaagatcttcctagcctcagagctgcctgtggggtggctgaggttgctgtggagccca

SEQ ID NO: 553588 - DNA, 619 bp, Homo sapiens
attcccattttatacatatatatgaattatatacatatatatatacacacacacacaaacatatgtatttcatatatatttcatattggttctgtttgtctggagaattctgactaatccagtgcccttacaaaagagatcccagaaaactctctatcccagttttccattatctgaggatacatctagtagttggcagcctacaaccctgaagaggcacctcactagtctctgtctatgctgggaccctgatctcagactcccaagcttcagaactgtgagaaataaatttctgttgtcttttatatatgtctttagttgatttgaagattactctagttgatgagtttggctcccatttataaagaagtcacacattttcaagaaaaccaacagcttcaaaatatgagtagtgtcttyttcaataagactgcaacaaacctacctgagttgattctttcctcttgtacacaaatgtattgattgctacagttgattttggaagacaaaaaaatgtacaatgatttgtggataagataaatgatagaagctgcaggtggttaaaatatgctaacactgcaatcgtaaataaaattttgaaacttttggcagacagggc

SEQ ID NO: 553589 - DNA, 1445 bp, Homo sapiens
tcaaaaaatagagaagtagggtaaataatttacagtatatctccagcatggaaaattaygcaatcatcaaaagctatactctgaaaattattttataacctaaaatatttttagaagttaaataaagcaatgcataaggttttatatgcagaaaaatctcaattttgcaaatgtatggatataaataaagatatcctgtggatgtcataatttactggccttggaagtcttgatttcctttgtgtcaaattacaattgcccaagtgctcatcaactgttactgaaagaatccttgtttttgaccacaagttaatctcctcagtcacccccaggttgcctagtaaatggttccatatcttaaattcatcccagcttacacttgtctacctacttctttctgaggcagaagtcttgcaaagctcaagtgttttctgtttttctttgtaccacttcaagcaaaacacgggatgatcctttgcccttgaatatacagtagtcagacgcttccattatttaatgagagggtacaacagaactattggaatgaaagtgcaatgcagaaaatcactcaaaaactctgcctgtgattgggttctctggaaacaaattctgagactaagaagtagatgcagaaattgtactagtaaatgtccttctgaaataaaaagtgaggaaggcaagattgggcagaaggagaagctgatctattaatacacttgcaaatgcaagctctgctgattctatagggagctctacaccttggatactgtttagccttgttccaatttgcaggaaaggccggggtctttgatattcttgactataagccacaccctgagaaaagacacattcttgtataagataattttctgtggctgtattagtccatttcacactgctgataaagacatacctgagactgggtaatttatgaaaaaaaaaaagagatttaatgaacttacatttccacgtggctggggtagcctcacaataatggtggaaggcaaagaggagccagtcacatcttacatggatggcagcagacaaagagagagagcttttgcaggaaaactcccatttttaaaaccatcagatattgtgagactcattctctaacagaagaacagtgtagggaacacccgcccccataattcgatcactttccactgggttccttctatgacacatgggaactgtagaagttacacttcaagaggagatttgggtgaggacacagccaaaccatattattccaccccaggcccctctcaaatctcatgtcctcacatttcaaaactaatcttgccttcttaacagtcctccaaagtcttaactcatttcagcattaactcaaaagtccacatttcaacctcttacctgagacaagccaaggcccttctgcctatgagcccgtaaaatcaaaagcaagttagttacttcctaga

SEQ ID NO: 553590 - DNA, 661 bp, Homo sapiens
aagctgaaaaacatcatttctttaatcaagaaattacctcactaaaagctrtgacactttagtcaacttaatcattaaagtgtcagtttcttcacttcatttgctttctgagtgataggcccaagttcttttgatttattttcattaagcaaaaaaggactataagtcacaaagaaaattatatcacaaaacccacatttgatttgaaacataacaccttaaaagtattttgttcattttttagacctgaatactacatcattaaatatatatctttcattaaaataacttgcatttattaaaaattttcaaaaaaaacaatttggagaaaggtaagaaatatgcttccatttatacagttaagaaacacatattagtgcagtgatactcaaacctggttacacattaaaatcacctgggagactctgtaaactaacaacatcccaccccacacggatcaaatcacatctctgaggctgatgcctaagtattggtatgtgctgtttttgggggttgtttaagttacccaggtgattctaacgcagccaggtttgagaatcccacctagggcattgactctcaaatttggctgcatattagaatcacttgggggaagacagtggccgattaaaaacactgatgctttaatcctgttataagt

SEQ ID NO: 553591 - DNA, 1120 bp, Homo sapiens
gaaagtatcactgaagtggtcatgtttgagacaactcaaataacattttctaagtgaagaagtgtgagaagtaccttacatgtgcagggttcaggaagcttgagagtgtgagatgtgtgaggatctgttccacctgcagtgtggctggagcttactgtgaaagagggtgaagcattggtttctaaagtctctctgggttcctacagtcctccccagcagtgaaaaccaaaactgagcagtctcctagctcctgccacctcttcaacagaacttccaatggccctaggacttcaatacattttctttgaacttccttaatagtaatgttactgtctctctcaatatcttaaagtgtgtgttttcatgaatgtgatgctacatgtccactaaactctaccagatttttgccatgtttttgtactagtgaaaactttgtgaatggacgccatgctctgacctttaaaacactcttgtgtaattgatttttagatgagtttttccttacaggattcaaaactggtacattcatatgggaaaccaatgtaaaaccaacaccctctactgagtttgcatccttttataagtgtttttctgctataatttcagtagggtattaaaaaaatgtgattctaaataattctgacctctttaggaagacaacaaatggtgtatttgattcaaagcatttcccatggttgtttaaagacaagtaagaaaatgagtagtccagccatatggagatgggataactcaaaggcaggcccatctcagagggcccattcactcagcagcagacagagtgttctaacagaggagagcagggtgaggagagagcccttgggtttgaggttagagggaagagatggaaggttgtccaagagttttacaaatgggcctctatgagcctctattaggcttcttgctttataagtaacagaatctcaatttaaactaggctcaagaaaaagaatcctttttaaatgatccactcgttatcttagctgaaaaattctgaggtaggactgatcagacatgcgtgaatatagatactcaaaggatatcgttgcaatgtatctgtatctctcagctctgctttcttacttgtcacmttcattctcaa

SEQ ID NO: 553592 - DNA, 528 bp, Homo sapiens
tttcttttcttaataacaggggtaggcactgagtgcagagtgtgatgctgccagtagagtgtcaggtcttgataacaccttttctaaagtgggaatcatgtggtgatggaatgctcccactgaatgatgaacttaaagaacagaarttcaacaggggaagacagtccaaacaaaaaggactggtccaggtctggtatgcaggatacttttacataacatcagagatactgtcaggctgggaagggaagactgttcttcaagcagcctttggagggaaacgtggagttcttctgactgaagaaattaagggaagacgaattctaggaaaaaaaaccttaaatctgaccatggtagttttatggaaatcacacctgtaaggctggaacaactgagggaaaacttttctaaaacttataaatagaggagacatcatcaagattgctgactagaggtattcagcacttgcctgctccacaaagaaagaccaaaacaaaaaaatagttaaccacaagttaaataaagtatcta

SEQ ID NO: 553593 - DNA, 628 bp, Homo sapiens
ataaaaggaatcttttattagatacttgaagactatgtagatttatatgtagatttattttcaaatctaccccttccctccaatctggcagacattaatactttttgcttgaatatacttttactataatggttgcaaaattataatttttttgctccattattccttctatatttattaattggcattgtgttccaaggaagtaggttgtaatccattactttattttggtgtgtgctcatattttcccagatttagacagacagagcctcttcatgctggcttttataaccttttaccttgccttcagacacacacacacacacacatacacacacacacacgttttagtatactttattgctttctggcacaggtgctttccctaacctagtcataaaattagccatttctttaaaaatttctagcttattttaatgaggaatggaaactagaaaccaaaatataggggrcagatatgctcattacagtaaatatcttttaaataaaatttgaatgccattctctcttctcgtctctggaaaataaatcaaccaaccaagaaatagacaaacggaaatgttaattcttaaattgagctgatatcaaatgatacaatttaagtaaa

SEQ ID NO: 553594 - DNA, 1148 bp, Homo sapiens
gtaaaaacaaaagaaactccagttcatattgagaaaggaatatcatatttaattttcataactttattttactttcaaagtcatgttagtctagacattagatagagaagaaaaggaacttaaaataggaactttgatatataaaacagtaattgcaatgcaatgtagtaagttgtataaaaaagctaagtacaatgatctttactcatgcagaggattatgtaacctgtactggatttaaaggaatagaatatttactatctggagaacagaccatttcaggcaaagaaatcacaggtgtaattgtatcaatatatgaaaacacactgatatcacgaaatttttcaaatacttttcagtcggtctccacacrcaagctaattacagtgctgctcatagtgtgattccataaactcagtaaacatttcctaacaaaatcatggcttccctatatgtctgaagaactgtgtccgtttgtcaactcagactgtcaactctgatggcgactgtaaaaattaaaagtctatcttgttgtctgattaaattaagccatttcccattttaacattgtaaattgagtaattttgtatttttgtaaaatagcatagaaggaagcagaagatgaaaaagggggaaacagaaaagataagtagataattctatcagcagccacagacatcacaagaactcaaagagcacagcactggcagggtgtgggaggcattttgcaaacaagcttgccatgctacaaaaattattctccataatgggtttagttgtgagctgtcgtcttttcttattttgcttttgtacttagccaagggaaatcctttaccttcatgctttctcattggcagagagcacaggggacaagtccgttggattgaaagtttaaagaggactatagaagcacaaagaaataagggagacacgaggtgagaaacaggatgagcatggtattggaaaggtcaccagttctggaattaggcagtcagtgaaaccagtactcattatttacaagctctgactaacattggacaaggtacttaacttcttgatatctcaactataaaaaaaagggtattttttttgctttgtttggcagttttgaggactccgtaatcctttgctttatttttctttgtaac

SEQ ID NO: 553595 - DNA, 572 bp, Homo sapiens
agcaaacttacttcgattcatgctgcaacttccatcctttacagcagctctagtcgtaactgcttaacaggtagtcacactggagagattagccctgatcttaaaatattgccagtctctttaggttgctggtgagtttatgtaaaatactgcttaaaacattcttaacacagttattgcaagagtaagacctcaataaatgttacccattgatatggtttggctttgtgtctccacccaaatgtcatcttgaattgccatctccaggtgttgaggaagagacctggtgggaggtgactggatcatgggatgggggttcccccatgttgttctcatggtagcaagtgtgttctcaggagatctgatagttttataagtatgtgacatttcctcctacatacactcttctctttcctgctgccacgtgaagaasgtccttgcttcccctttgccttatgccataagtgtaagtttcctgaggcctcccagccatgtggaagtgtgagtttattaaacctctttcctttgtgacttatccagtcttgggtagtatatttatagcagtgtgacaa

SEQ ID NO: 553596 - DNA, 572 bp, Homo sapiens
agcaaacttacttcgattcatgctgcaacttccatcctttacagcagctctagtcgtaactgcttaacaggtagtcacactggagagattagccctgatcttaaaatattgccagtctctttaggttgctggtgagtttatgtaaaatactgcttaaaacattcttaacacagttattgcaagagtaagacctcaataaatgttacccattgatatggtttggctttgtgtctccacccaaatgtcatcttgaattgccatctccaggtgttgaggaagagacctggtgggaggtgactggatcatgggatgggggttcccccatgttgttctcatggtagcaagtgtgttctcaggagatctgatagttttataagtatgtgacatttcctcctacatacactcttctctttcctgctgccacgtgaagaaggtccttgcttcccctttgccttatgccataagtgtaagtttcctgaggcctcccagccatgtggaagtgtgagtttattaaacctctttcctytgtgacttatccagtcttgggtagtatatttatagcagtgtgacaa

SEQ ID NO: 553597 - DNA, 774 bp, Homo sapiens
ggcaaagccattcaacaagctctaggaagttccaaactttcccacacattcctgtcttcttctgagccctccaaactattccaacctctgcctgttacccagttctaaagttgctcccacattttggggtgccttttcagcaatgccccactctactggtaccaatttactgtattagtccattttcacactgctgataaagacatacctgagactgggaagaaaaaaaggtttaattggacttacaattccacatggcttgggaggcctcagaatcaaggcaaaatgcacttcttacatggcagcggcaagagaaaatgaggaagatacaaaagcagaagctcctgagaaacctgtcagatcttgtgagacttactatcatgagaatagcatgggaaagaccagcccccatgattcaattacctccccctggggtccctcccacaacaagtgggaattctgggagagagaattcaagttgagatttgggtggggacacagccaaaycatatcagtgcactctcttcatttgaccatgcaatgcatgtttttaataataaacatctccatccaatatgaaaactcatactgtaactgtgatttataaaacctttggcccaatctttttcctacaactacacttctctttatctaccttttatttttactttttgcttacttgagcacatgctatacatgcccctttttatgcctctcaggaggtttacagtggtggaatttcatcactcagatagctttccactccacgccctt

SEQ ID NO: 553598 - DNA, 1572 bp, Homo sapiens
ccctcatgtgtcatgaccataggattatgatctacattttatgattaacatcttaatgagaagtttctcacacttgagtgtaggatcaaatgtaatgaaatctaaacaactgggatagatgatctggcatcctgatgaggttgaatccaggagaatcctttctgttttccctttctctttagattcctctgaagactctattctggtctttgtcaacagttaatatgaggctagatttctccaagtactggctttgggaatattattttgcaacctcacaaggagctgggattgacttgttttctatataatgtgggagtgtaatttggatttatgagaatttgagattgaatgaatccaacttcagaacttcttatagaggtgtatatttcagtggaagatggtttaggctgcatttgatgaaggagtttcaaatatattgacatacttcatgatgacattgagcagattacttggagagtaaggattttggactgtaaagcatgtggactttggagttgctatgggctttaatttataggaaatcaagaatttgaggtttgaatttcagtttctttctgcatattggataatgagcagaggtcatatttgaccttgtgtgtttgatattggagggtctttatgttgcttttttatttctatgagatatttggggagctgtattgactaaagtaggtatgcataatttgggatgggaattagagtcacggaaaaatttagcttaggatacaaggtggccttcgatttaattattaatcagctattgctgcaataatgctgtctaacagatgacttcaaaacttagtgaactatgacagcaagcatttattttcctcatttatttagcctgcaggtcagctagagaatttctagctgctggttggctaggctcggctgcaggttgggtttaggtgtgcttcctatgtctctgtattcttcctgaatgaaccagctgccatattcttttcatgatcaacagcaggtgctcaagagggcaaaaacacatgacctcttatgaaattggctcagaactggacactgtcatttcattcacattctattggccaaacccaacatcatttgaccaggaaaatacactgtgcccactcttgtgcactgcaagatcttacaataggacatgaatgattgaaaacaatgtctaatcaatgacaagtaatatgcttcttgtcttgttgcatctgttatttcatcttttattcatttagaagtgtggtcaaatatcatcctttaagtcttctatagttcctacaaatttaggcttattgactgctttctttaggggcttacyccaaaattatagaattagaatcttcctggatgggcttcaggaatttacgtgtttaacaatcttggtagatgatttcaatgaactgttagatttcagtagtggtctgtttagctcaggaactcagcttctattcaacagtgagttaattatcacctagttgttaattggttgaaaaattatgtatgtgtctaactagttcaagctacattagacttttcacaatcttttggacccatcttgca

SEQ ID NO: 553599 - DNA, 2258 bp, Homo sapiens
cttttcatgttggcagagtagcaggtgtcttcttggtgaaaagcggacttcaggattctctacacctggacatctcccttgctctggttcctgatagattccttttgactttaattctttgagagaacagctttgccaatgcttttcaatgaaaatttcatccaactttaaaatataaaatatataaaacatgttgcctctgtggctgaagtagaggcaggcaccccattctcagccaccactgggtactgccatcctcaccttattcaccctgccacacacagacacacacacacacacacacacacacacacacacacacacgcagagtcatccctcctaaaatccctagattaaccacctcatgctggtttgcccagggctttccaggatttagcactgtgtgttctatactctggaaaaccccagttccacgtacactgggatggtcagtctcccacacaaccctaaacacacttccataatggtttgaaaatcactgatttagaaacaatgcattgactcatcaatacagggcacatgtttagttactattggttattgcagattagtataaattagtttatcaactaactttccaagtggaggcaggtggaaaaggggatttgatgaagagaaagaagagcttggccacttcatggcatgccttgttggcgctctcatcagagtcaaattcattcacaaggttctagcccccaggaccctgcagggatgcactagctgaacacctctgtaatttaagtggtacctggatccatgcctgcctcaacaggaagaaatgtgagaaggctggaacaagatgctcccaattcctatacccactccttccctaagcagtgtgttctctcctcatattaggaaacaggtaatcagggttgcagagcagactgaaactaaagcccatgcagagagcaaacttcagaccttgacttcattagaatagcgctctaaccaaactaagcagcctcagagaagcctgcataattgacttggaaacacgttcaggcacaggagtctctcacagcagctggaatcaaggcccaaaccagagaacaagtgcccagaagagaaagggactgttcaaagatacccagatgatcccctgtcttggcaaagttgtccagatgctcatgcagctttaatgaagcccaattctaattaatctgtgaccttattcaaaccaactgtttcctcgtgcctcraatgcctctccagattcagatgccctttccctcaagtggaacgcaaaggcctgttttcttaataagtttaattgaaagatggctgaaccatgggtctctcataaacagggaattccccaccaataggagttgcagaacagagaggtgtcaaagatgtggcagagacataattcagcttctacaaccaacattgatgaaaggctggcttcagcctgtctcttccgtcaacagcccatcagacacttggcaaatcaaaagcagcacgttgtgtttagaatggacacactcgtggaggcagcaaggagactgtggagagatggattgagaccatgaaggcaggtaagagaggtgcagtccaaagaagggagcagcagtgaaagggttaaaatctacctgctgccctctaaaccagagtatcagggcatcttttgtgctacaaagggcttccaggtgtcccagatgttgagccccttacttaggctctgagcaatcttcttcatttccccaatatgctataggaatgtaatcatcattatgtgtgctatgttaaatgatgttaaaagtgttgggaagcactgatataaagcattacttctctgtctctgattcctgcctcctaaaaactgcatctgttcttcttttctatcagaacaaatacccgcatcaaccaaaactaaccaatggggtatagaaaacgcgggcagcactgaggcctcaccatccctgtaagatattctgagtggatttgaatgtatgtcactctccccaaaatcttctaatccaaacacttacatggcttcctgttttccttaggataaagatcaaagtccttaccagggtttggagggctgcccagagtctgacttcttgtggcagcaaggagccttagttactcacaaaggagcccactctacctggactcagcaacgtgtctcatccttcacttcatttgatcctctcatactccgtcaaaaagattatttccttcccgttgcaccaagttgctagtccagcctgtgtgagcacctagctctg

SEQ ID NO: 553600 - DNA, 601 bp, Homo sapiens
ttttatgcatatctagaatagaaaaaaatgttatacttattataatttatcatgaatatataataaatggttacggtgttataaaaatgtggaataagatgtgacaggtaatccttctacatatacaaaatgtaacataacttcttgtacttatataagtcttctttgagtagtcttagcacttacattgtgttccatgggctgacagcatggacaacatttggaagcttgtgagaaatttataatctcaggacccaatccagacttagtgaatcagagtctgcattttaaggaagttcccaggtgatgcttaagtgagctaaatttggaaaaacattgttgcaaagcatttgattgttgctttgcaaaaaaaaawatatatatagaataacggtcattcctctaataaaaaggaatttgtttgcttagtataaaatttacaaaacatcattttctttaagtgtattcctgtgaacatagtaagttttttttaatgccaactcacagaacaagaattttggaagatattttaaagaacgactaaactaaatatatacagtagaaacaatgaagcaaattccattgtaataatgacaacctg

SEQ ID NO: 553601 - DNA, 663 bp, Homo sapiens
atttctccattttggtcagttatcagagactttaaagtagttgttttgatattttttccattcactatttgttttttgggggagaaaattttctgatcctttcactccatctttaaaaaagtatattggtatgggtgttttagttagaatagtatagttaggaaaaagtccagtgaaaaagttactatatagaaaagaaaaacatgatataataattttacagtccattttatctggcatcttctaattctgtcattcactatataacatttttttcttgacaaaggggacacttctatgtttagctgcctcgagccctgtgaatgtcgtgaatcctagaatgtacatgctgagggaakggttgaactcatgtgctgatgagctataggagtttcttacatccatcagcacatactaatcctagcttctttcagcggtgaaaaaataatcaccagggatttttgataaaagaaaccttgatttactttcttctccaatcttgatttgaactttgatctccaaattgaaactgcaagtgccttttcctttagttttaatcctaatttacacagatatattgagaggcttatgagaagtcatcttgaagtgcttagaaaatgtacaaagctgagcattctaaggtacacctttttttcctccctt

SEQ ID NO: 553602 - DNA, 567 bp, Homo sapiens
accatggttgaaagtcttcttgattgaaccaaagtgtcaggtaaacaaagcagaaaaacagaaacacactgagcwgtttttacagctcagtgtagttgtatcaagagaatatacatccttttccttttttattatgaggagcccattctgagcaatgaatataattagttaataaataactcctgttgtatgccttaaggaacttagcttcagggcagttgttaatagcaggcagctggaaaagacatgggcattctatcaaagagacatactgaaagttagccaacagaagctgattctttcaagttatgctataaatctaagtcaacaacagatagcttgtttacaaaaagtgataggaaatcaaaagctttgtggagtatatctatagaatgaatatactgataactatgaagattagcagattttttttatgtcactagaaattataaaagtgttgcgagtaatacatttggtcaagaaaattatagactagattttgaactgctttaaaagttatataatatagttatattaatacttaagatgtattaatataattaagaa

SEQ ID NO: 553603 - DNA, 624 bp, Homo sapiens
gggttgatgggtgcagcaaaccaccatggcatatgtatacctatgtaacaaaactgcatattctgcacatgcaccctagaacttaaaatataataataataaaaataaagaacgaatgataggcagtatagaaaatggtattggtgatgcagtcttggattacggaaatggaagagcgtattgagaacatgatcaactcctaaaaactttcaaattcatttttaaattaatctaacctcttttcttctgtaggtgaaccagcttttcctcaaatctgctctaactcatgttccattttagcatttaattaccgctccctggggatctgccacatcatacaaatctgtgtgtaccggatgggcctgtgagcagaggagctaggcgggaaggcacaagtgacctggtgctttaagctgacacctggctattcactcttaggaaaataaagataaagaaaaatcattagctgcccagccagtgactttcatggggggaggggtacactcttacaggagaggtgsgatatacatgattaaaatttttctgtgatttatttgttttttttttttagcacttgacccatgattcatgttcagtgaatgtcattttgaatgaataaaacac

SEQ ID NO: 553604 - DNA, 565 bp, Homo sapiens
tgcccgaacgtgctgccacaggtcagatggggcagaatgaggcagattttcacattgtattaagttagtttttaatgagtttaatcttcagtttgcacttttcaaaaactgtgtatacagatcacctgggatcttgttaacctgctggagccgattcggtaggtcttggaatagagcctgcgttctgcatttctttcaagcctccaggtggtattgatgctgctggggcttggatcacacttgctaaatggtgagggctgtagaaaagggctgtattctccattccaatggagartagcccccattccaagtctaaaacaggaggctcttttttttttagatggagtttctcatcacccaggctggagtgcaatggagcaatctcggctcactgcaacctccacctcctgggttcaagtgattctcctgcctcagcctcccaagtagctgggattacaggcgcccaccaccacgcctggctaattttcgtattttttagtagagacagggttttaccatgttggccaggctggtcatgaactcctgacctcaggcaatctgcctg

SEQ ID NO: 553605 - DNA, 602 bp, Homo sapiens
tgaattacccacgtcagagacactcaagctcattctctttcagtcacacattgtcagggtgtatggcttgtttcctggtgtttccaaggtgtcaccctcagcaccagccatctttctttaaatagctatatctggcagggcgcggtggctcacccctgtaatcccagcactttgggaggccaaggtgggcggatcacgaggtcaggagtttgagaccagcctagacaacatggtgaaaccccatctctactaaaaatacaaaaattagccgggcatggtggcacatgcctgtaatcccagctactcgggaggctgaggcaagagaatcgcttgaactygggaagcggagggtgcagtgagccgagatctcaccattgcacacctgggtgacagagcgagactctgtctcaaaaataaataaataaatagctacatcccaggtaagaaggcggctcaggtcaccctctctcattaaagaacaaactgctttccagaagcccctccaattgagtcccattggctataaccaggtcaaaagtccacagctgaactaaccatcagaaagagaaatagacggagcagggtggctcccgccttaatcc

SEQ ID NO: 553606 - DNA, 602 bp, Homo sapiens
tgaattacccacgtcagagacactcaagctcattctctttcagtcacacattgtcagggtgtatggcttgtttcctggtgtttccaaggtgtcaccctcagcaccagccatctttctttaaatagctatatctggcagggcgcggtggctcacccctgtaatcccagcactttgggaggccaaggtgggcggatcacgaggtcaggagtttgagaccagcctagacaacatggtgaaaccccatctctactaaaaatacaaaaattagccgggcatggtggcacatgcctgtaatcccagctactcgggaggctgaggcaagagaatcgcttgaactcgggaagcggagggtgcagtgagccgagatctcaccattgcacacctgggtgacagagcgagactctgtctcaaaaataaataaataaatagctacatcccaggtaagaaggcggctcaggtcaccctctctcattaaagaacaaactrctttccagaagcccctccaattgagtcccattggctataaccaggtcaaaagtccacagctgaactaaccatcagaaagagaaatagacggagcagggtggctcccgccttaatcc

SEQ ID NO: 553607 - DNA, 646 bp, Homo sapiens
gagagcagaagtggagggaaaggagattgaaggtagataaaaagagagagaagagggagaggaggaagatgaacaacagagcatggaactggggagactctccttaaagtttggagcacaccttatgacacctcctggaagttatttgaaagtacaatactcaaaatccactgtgccaagattaaaaagaaggtcaattttctaaccacagtcctgagccatcccttcaatacaccctcccastttatacactctacaattttgctcagaaatcaccaggggctccctaaggagggagggtgaggcgaggggcagtgccgtttcctcccctctcttctaagctgggatctgatattaggaccacatactttaaggccagaccatgacacatgagccagcagagatggatgacatgggaggaagctgcagaatcactaagctgccaggagtggggttgaactgtgatcgaggcagtctgcaggggccttctgtttctcatcactgggtacgtaatagggtttctctgaggaaggacgagctcactggacccagtgctcgtcccagtggaaattgcttgaaaccaaaacaacctgaagaagaacagctctttaaactcccttgctctgaagaagggcgattttcagca

SEQ ID NO: 553608 - DNA, 676 bp, Homo sapiens
acttccaagccgggttctttaatgagtgaatgaagttaataaacatgtagataccatctgaaggaagttatgaaagcctacagactctgggtattttatccttaaattacaaatgaggaaagagttcctgatggaggactctggatatccagctaaacctccctccctttactccagagcaaccacccttgttgctgggcccatggctgcccagtcagataccacatttccaagtcatccttgcagaaccgatgcaacggttctcaccaatgacatgagaataaagtgatgtttgccactcccggtcctggccttcaagtatcgggcaagcacccttccatactttctgtcygtctctctctaaaatgctgaggtcctattggaccctggggaaaacaccccagggaatggaggaaaagaagatggaaggagctggttccctggaatgcccccatggagagggccacaccgtcaattcagacccctcaccgcagtgcgcttacgtgacagtgaaagaaacgttggtttttaaatagcatgaacatggtttcaatttgttttacgtctgttgtcttggcatcattttaaatggcattccctttcgctgtccaagtgaattacacgtcaccctattttaactcggggtatcatggtacctctttatatcggcagctta

SEQ ID NO: 553609 - DNA, 706 bp, Homo sapiens
ccatctcaaaaaaaaaaaaaagaaagacgtatatctctaagtgctaataaggaaagatggccacagtacaatgataaatgaaaagagcaaggtacagagctatatgtatgttatctcatctttgttttaaaaaacaaaaaacaaaaaccttctactttatatgttcacatggacaaagaaatgaatttaggagcctttacatcaagcagttaatagtaacatctgaatagtgggaatagtggtagagaaaagggataattcggccgggcgcggtggctcatgcctgtaatcccagcactttgggagaccaagatgggcagatcatgaggtcaggagttcaagactagcctagccaacatggtgaaaccccgtctctactaaaaatacaaaaattagctgggcatggtggcagatgcctgtagtcccagccactcgggaggctgaggcaggagaattgcttgaacccgggaggcagaggttgcagtgagccaagatcgagccactgcactccagcctgagtgacagagcaaggctccatctcagcggggccaggggcagggcgggggaaggaaagggataattcacttttaccatacaaacttctgttctgcttatgttttttcaaatgtaacaagcatattttacttgrgtcaacattttgaatcactaaatatcctttaaaataacaaaaataaggatttgtaca

SEQ ID NO: 553610 - DNA, 627 bp, Homo sapiens
gaggaaggtcattttaggattggtttaaacataagatatctatttgattacagttgattcaattccgctatgaaaatgtctgaagttttggattgactgttcttcgggcttatttttctgtctagacataacctaaatggcagacgacaagaggctccgtaaatatcagttgtatctgcaaaccgaaaggcggccttgggccacacatttgtcatttccaccacacttacacaaagagtatgtcaatctcagccttgctcagccctgctcagtatcaggccctaaagagcttcagctggaaaaaagtagttacattcaatctttgtgtcaattctaaccaaatctgttggatatttagcacctcgccttctccaggaggtgaggagagaaactagtcaagtgtctgcaacttgagctcctaaaacagctacagtsaggactccaatatcctcaacacagctggatatgcccacactaaaaagtgggctggaactagaattctgtttgactggggccccagcaatctgcttcaacagatcttctctctgttctggaactttcaactgctgactggtgtcttgcttcatcctggacacattacctttttgtttgtttgtttgtttgttt

SEQ ID NO: 553611 - DNA, 627 bp, Homo sapiens
gaggaaggtcattttaggattggtttaaacataagatatctatttgattacagttgattcaattccgctatgaaaatgtctgaagttttggattgactgttcttcgggcttatttttctgtctagacataacctaaatggcagacgacaagaggctccgtaaatatcagttgtatctgcaaaccgaaaggcggccttgggccacacatttgtcatttccaccacacttacacaaagagtatgtcaatctcagccttgctcagccctgctcagtatcaggccctaaagagcttcagctggaaaaaagtagttacattcaatctttgtgtcaattctaaccaaatctgttggatatttagcacctcgccttctccaggaggtgaggagagaaactagtcaagtgtctgcaacttgagctcctaaaacagctacagtcaggactccaataycctcaacacagctggatatgcccacactaaaaagtgggctggaactagaattctgtttgactggggccccagcaatctgcttcaacagatcttctctctgttctggaactttcaactgctgactggtgtcttgcttcatcctggacacattacctttttgtttgtttgtttgtttgttt

SEQ ID NO: 553612 - DNA, 773 bp, Homo sapiens
cttccttctccttccttccttctccacttcaccaactctttcacagccagcaagggcccctgtactcaatttctttgtcctgtcctagtaactccactgttggacgactccattgtttttattttctggtgttctacatcctgtttttactgttctgtggcagacccccaacgtagaacataattgcaagtactcggtggtgccaaagagcagttagtgcctaagtacagacgggaaacacgattcttttgttttaagtaaaaacttaaacattgcccaggtcctacaagcatccagactctaggtctgagtagcggagtgcccctcccgtgggcccacaaggacccctgggttcccgccctgcggtgatcaagatatggaaccgaagccacagttggatcacgagacatcccttttctagagcctttcccagccctctacaggcaggatccaccrggaaaaagatgactggaatttctcgaaggtcaatggtctgcacagttgaggattctgtgtggttctctcttggttcccttggtgtctggaggaggccagggcccttagatgacctttcagctcctcacacaggaccagcgagaggggcccccaggcctgaggacgccggcccagcgccctggaagaaggccttgtctcctcatctttaacggtctttccccaacagccgagggtgccgtgtacgtgatgtgagctgctctgagcccaggctgcaccatcgtctgccacaccgcgtggaaggggtgggagctgcagcc

SEQ ID NO: 553613 - DNA, 613 bp, Homo sapiens
tgtctctggtgaacattctctgtccccacgcccacccttcaccctgctcttgcttcctctctttctgggtgaggggagcatgtgtgcgctgtcccatcagctcccttccttgctcatctcctggcctggcctcccacgccggaaacctgcaagccattctcttcctttcatctcacagtcagggagtccccaagttctgttgcttctgtcttcgttcttgcttctctcccccgtgtactgcgttgatttctgccattatttcttcacgcggctcttgcggttatcctctccccattctccctggctccccaagtccatctcccacatcaccgtcagagatcacatctaaaaccatgaatgtgatcccatttccctgcataaaccgtttatttagtacagcctcatcacttgtgaagtccgctttgtactgagagcgtaggctttggaataggaggaggcagccagagtagaggggcctacgatgggataaggggcccgggaaatgatccagggagatacccgggccaccactgggcaygctgtggccgctgccttcttattacagggcagagagcatcggtacctgacaagtgttaagcaggccgtctaattg

SEQ ID NO: 553614 - DNA, 1179 bp, Homo sapiens
tgcactacactgggtcttccttgagtccactacaaagaaataaatcagtgactcttttcttctttattcttcagttgacccttgaacaaagaaagggttaaggatgtgaagttcaggctcatctctgaggtaaaaatccaagtataacttttgactccccaaaaacttaactactaatagcctcctttgactggaagccttaccaataacataaacagttaattgacacgtgtattgtgggttacacttattgtatactatattcttacaaaaaagtaagctagagagaagagaaaagaaaatattactaagaaaattataagaaagagaaaatattcttactacacattaagtgggagtgaaacatcataaaggtcttcatcctcatcatcttcatgttgagtgggctgagaaggaggagaggaggggttggtcttgctgtctcaaggatggcagaggcagagtaaaatctacaaataagtggacccctgtagttgaaatctgtgtcattcatgggtcaactctgtgtgcgtgtgtgtgtgtgtgtatgtgtgtattaattcggtttagactacaaagggcaacccgctctccaggaaccaagactgatgctggatgatgccatatatacaagatggcatataggaggtgatcatggaggaccttcagtagcagaggctaggaaccacagggttgaggggaggaggtaagtgaaataatggggctaggctagaatagaaagtagtatcatagcgttcatttttatattgcaaatatcttttctctgtgcccttataaaataatatttaaatgtgtttttaatcagtcctaagtaattggcaaattattacatcatcatcataatcatattttctcattcatggaaaagatatttactgagcctttaatgaatgccaatcactgtgcaggttttagagattcactcgtgaatgaggtaaatctactccatgtacttaactgatagagatttaaaactatactcatgtaaccatgtcattcattcccctgtcaggacaaccccgctgcttcccattttcattcctctacatttaattacaacccggtcttctactctaatctctccctgcgatcttgatctatgagatacttgccccttcgtcatcstttcccttctgttgaaagcaaacctcctctcaa

SEQ ID NO: 553615 - DNA, 944 bp, Homo sapiens
  misc_feature 686, 687, 688, 689, 690, 691, 692, 693, 694, 695, 696, 697,698, 699, 700, 701, 702, 703, 704, 705, 706, 707, 708, 709,710, 711, 712, 713, 714, 715, 716, 717, 718, 719, 720, 721,722, 723, 724, 725, 726, 727, 728, 729, 730, 731, 732: n = A,T,C or G
  misc_feature 733, 734, 735, 736, 737, 738, 739, 740, 741, 742, 743, 744,745, 746, 747, 748, 749, 750, 751, 752, 753, 754, 755, 756,757, 758, 759, 760, 761, 762, 763, 764, 765, 766, 767, 768,769, 770, 771, 772, 773, 774, 775, 776, 777, 778, 779: n = A,T,C or G
  misc_feature 780, 781, 782, 783, 784, 785: n = A,T,C or G
gttgtgtttaagattccatttccattctcctagtgctctgccccatgaagtttggagctttatcattgtacacttgtatactcatacaaacccctatcacaacacctgcttgtgtctctgatggttaaactatgaactccttgataacaaataccttactttttacttttgtatcctaggatctagcattctgcccccaaatctgtatgcaccaaaaattaaatgggattacaatggyaataataataactacaacatattttataacttacaaccttgtggctgtctacctctaaagtatcacttgtttgttgtttgaattttattttgttcttccagcaaaatggcccacctgtacactggtgagattcagctgtatgaaaccagacagtggatttctgagctagagtggcctgtgtagatcatccttaatcttatgtagtaaaggctaggtttgtcacccactcttctgggcttcctggaagttgttaagagcaagagctgtttcaaagttacaatgacacttgtatccatagatattgcctactcattctgtagccctgggcaagttgattaacccttctcaacttgtttcctcatttgtaaaatgaagataataataccaatctcataggcttgttgtgataattatatgagctaatgtgttaaggagattagtgctgtgnnnnnnnnnnnnnnnnnnnnnnnnnnnnnnnnnnnnnnnnnnnnnnnnnnnnnnnnnnnnnnnnnnnnnnnnnnnnnnnnnnnnnnnnnnnnnnnnnnnngactctagaggatccctggatgtaatcacaaagggttatttacatgaagaataagaattataaaatcatcatgtattttcacataatctgacagatgattcctgacattctaccctctcaccaaagtatctttcctcttctcctgcccattggtttaac

SEQ ID NO: 553616 - DNA, 628 bp, Homo sapiens
tgcacattccacaggcatacacacactactacataccaatacatacactgcatgccatacaaatatatacatatacacatcatgcatacaccatatacaccatgcacgtgcatatacaacataaacacataacgcaaacacataccacagactatacacaccacatraatttatcacaaactcatatacacatcaccccaaatgcaaatatacacacatatatcacaaatacacagacatatgcatatgcaacacatatagacatagccccacactacatgcaaatataccacatacacacatgtacacataacacatacaaattcactacatacacatatgaaccacatacaaacacacccccatgcccaaatgcacaacacagaacacacaaactccaaatacaaatgcatagacatacatatcacaaacagtcgcacactgtgtgcaaatacacaccacacatacacagccaccatgtatctatctgtcccctatacaaatacacaaatgccacacacatatacacacactccaaaacacacatatgcacaaacacaatacacatatacacacccccaaaccacttacaaatacacacatacacatgtcacatcacacataacac

SEQ ID NO: 553617 - DNA, 1394 bp, Homo sapiens
  misc_feature 104, 105, 106, 107, 108, 109, 110, 111, 112, 113, 114, 115,116, 117, 118, 119, 120, 121, 122, 123, 124, 125, 126, 127,128, 129, 130, 131, 132, 133, 134, 135, 136, 137, 138, 139,140, 141, 142, 143, 144, 145, 146, 147, 148, 149, 150: n = A,T,C or G
  misc_feature 151, 152, 153, 154, 155, 156, 157, 158, 159, 160, 161, 162,163, 164, 165, 166, 167, 168, 169, 170, 171, 172, 173, 174,175, 176, 177, 178, 179, 180, 181, 182, 183, 184, 185, 186,187, 188, 189, 190, 191, 192, 193, 194, 195, 196, 197: n = A,T,C or G
  misc_feature 198, 199, 200, 201, 202, 203: n = A,T,C or G
aacactaggaattataagcagtacattaattttaaacaagacacaggaaataacatttgatgaaggaacaaagaagaaataaatgttaattttaagttaagatnnnnnnnnnnnnnnnnnnnnnnnnnnnnnnnnnnnnnnnnnnnnnnnnnnnnnnnnnnnnnnnnnnnnnnnnnnnnnnnnnnnnnnnnnnnnnnnnnnnnatttctctattttattaaaaaattaaaatttgaaaagtaatcatatagcccattcctaaattttcccttaacattatgcagactctataattcttatttcaagtcttggcagtcagctaagaactaaaacaacaacaaaaaatgctataagaatttctcagggagcttcaattatgcattccactttagtgcacaaaatagttccttgtaaaatgaaatatctcactaaagctaagagagaaggttgatgaaagaagtgaactttgcttttcaaggtcatttcatactatgtccttttgactatgttctaatctcttccacatcctgcgattatttttttggtgagaaaaataggaaattactttcaaaagatttatgtttgtgtctatcatgaacccactttaaatatatgtttaagaactttgatcagaagattttctaagatgaaaacaggtccagagagttccttgagaacctctgtcggagctgctagtaaactcatagataaccaagtatatagctaagaaattgtaatactcagtgtgatattggagcttaattttttttttcttcattacatgaaagaaaattcaacatgtgttcacagcttggaaaaaatattataaaggtaaaatatcaaactccagtatattgattaggataggaagactgctatagcaaacaaaccttataataaatattggctcaattacaatagatgtttgtaacagctttaggctactgtaayggtccatggagtggccccgatccatgcaatcattcaaggatccaggctctcagagaatcttctgtctgagaacatgtggtccccaaggtcaccctctttgttataggcaaccatcagagaaaaagtgtaaaggcacacaagtgttgatggagcaggtctggaaaagacatagactacttttgctcatatttgccagtcatgtgaccgcacatgaaggtgggagtgggttggcagatctacaattctggacttggcagcaacttcccagtagccattctacaatgtagaagaggaagaacaaatatctggggacagtttgtcgtccctatcatgatcctgtacattgcagggagtagtcataagtacaaccacttcggtcaaaatgtcttgttccgtgcagggaaatctggagtcagataagttcagaatatgtctccaagttc

SEQ ID NO: 553618 - DNA, 1394 bp, Homo sapiens
  misc_feature 104, 105, 106, 107, 108, 109, 110, 111, 112, 113, 114, 115,116, 117, 118, 119, 120, 121, 122, 123, 124, 125, 126, 127,128, 129, 130, 131, 132, 133, 134, 135, 136, 137, 138, 139,140, 141, 142, 143, 144, 145, 146, 147, 148, 149, 150: n = A,T,C or G
  misc_feature 151, 152, 153, 154, 155, 156, 157, 158, 159, 160, 161, 162,163, 164, 165, 166, 167, 168, 169, 170, 171, 172, 173, 174,175, 176, 177, 178, 179, 180, 181, 182, 183, 184, 185, 186,187, 188, 189, 190, 191, 192, 193, 194, 195, 196, 197: n = A,T,C or G
  misc_feature 198, 199, 200, 201, 202, 203: n = A,T,C or G
aacactaggaattataagcagtacattaattttaaacaagacacaggaaataacatttgatgaaggaacaaagaagaaataaatgttaattttaagttaagatnnnnnnnnnnnnnnnnnnnnnnnnnnnnnnnnnnnnnnnnnnnnnnnnnnnnnnnnnnnnnnnnnnnnnnnnnnnnnnnnnnnnnnnnnnnnnnnnnnnnatttctctattttattaaaaaattaaaatttgaaaagtaatcatatagcccattcctaaattttcccttaacattatgcagactctataattcttatttcaagtcttggcagtcagctaagaactaaaacaacaacaaaaaatgctataagaatttctcagggagcttcaattatgcattccactttagtgcacaaaatagttccttgtaaaatgaaatatctcactaaagctaagagagaaggttgatgaaagaagtgaactttgcttttcaaggtcatttcatactatgtccttttgactatgttctaatctcttccacatcctgcgattatttttttggtgagaaaaataggaaattactttcaaaagatttatgtttgtgtctatcatgaacccactttaaatatatgtttaagaactttgatcagaagattttctaagatgaaaacaggtccagagagttccttgagaacctctgtcggagctgctagtaaactcatagataaccaagtatatagctaagaaattgtaatactcagtgtgatattggagcttaattttttttttcttcattacatgaaagaaaattcaacatgtgttcacagcttggaaaaaatattataaaggtaaaatatcaaactccagtatattgattaggataggaagactgctatagcaaacaaaccttataataaatattggctcaattacaatagatgtttgtaacagctttaggctactgtaacggtccatggagtggccccgatccatgcaatcattcaaggatccaggctctcagagaatcttctgtctgagaacatgtggtccccaaggtcaccctctttgttataggcaaccatcagagaaaaagtgtaaaggcacacaagtgttgatggagcaggtctggaaaagacatagactacttttgctcatatttgccagtcatgtgaccgcacatgaaggtgggagtgggttggcagatctacaattctggacttggcagcmacttcccagtagccattctacaatgtagaagaggaagaacaaatatctggggacagtttgtcgtccctatcatgatcctgtacattgcagggagtagtcataagtacaaccacttcggtcaaaatgtcttgttccgtgcagggaaatctggagtcagataagttcagaatatgtctccaagttc

SEQ ID NO: 553619 - DNA, 638 bp, Homo sapiens
atgtttcaattgaaataaatgtaatacaggcaaaaaacaattgaaacatccagacttacattaatttgttttttttcaacaaggatatactttagattacattttttcataaaatgagttgataatgacggtggtgaatctggctcgataggtacataagcagccgggacttggagaattctaaagaaaaaagtacacagtcagcatagaatgtctgttgatttagtatttgtttaagcatttctatttctctatgcactttatttattttttgtagcagcataaaaatggtttccggagcactttattgctgatcagaaatttccaatgttttcactgacacatagttggtaataaacgctgtcattttagccgggcacggtggctcacgcctgtaatcccagcactttgggaggttsaggcgagcgaatcacctgaggtcgggagttggagaccagcctgaccaacatggagaaaccctgtctctactaaaaatacaaaatcagccgggcgtctgcaatcccagctacttgggaggttgaagcaggagaattgcttgaacccgggaggcggaggttgcggtgagccgagatcacgccgttgcactccagcctgggcaataagagtgaaacttcatc

SEQ ID NO: 553620 - DNA, 638 bp, Homo sapiens
atgtttcaattgaaataaatgtaatacaggcaaaaaacaattgaaacatccagacttacattaatttgttttttttcaacaaggatatactttagattacattttttcataaaatgagttgataatgacggtggtgaatctggctcgataggtacataagcagccgggacttggagaattctaaagaaaaaagtacacagtcagcatagaatgtctgttgatttagtatttgtttaagcatttctatttctctatgcactttatttattttttgtagcagcataaaaatggtttccggagcactttattgctgatcagaaatttccaatgttttcactgacacatagttggtaataaacgctgtcattttagccgggcacggtggctcacgcctgtaatcccagcactttgggaggttgaggcgagcgaatcacctgaggtcgggagttggagaccagcctgaccaacatggagaaaccctgtctctactaaaaatacaaaatcagccrggcgtctgcaatcccagctacttgggaggttgaagcaggagaattgcttgaacccgggaggcggaggttgcggtgagccgagatcacgccgttgcactccagcctgggcaataagagtgaaacttcatc

SEQ ID NO: 553621 - DNA, 2629 bp, Homo sapiens
tcagaggagagctgcaagtcactggggcagggtgggccagtggttggggaccacaggtgggggcttagtcacaccattcagcatttgcttagtaaactctcatggggttccttatctgggccagcccttgccctgtactctggggacattctagaagccaaacagtgcagtcctgagggaatttaaagcaccatgacaaagggagacaatgacaaactagaaaagttggagctgttagagataggcagacatgatcttatggtgacacggagaaacccaggaaggctttctagaggaggggggcagctgagctcagcatgcagtttgtattgcgagcattatatgtaaacatccagccacagttggaatgctgactaatttcttaacccagcttatagccagtagaagactctcctatctggacccagacagttgaagagatgttggttctcatacctgggttcagggccataggtatgatcatgggttaataccaacatagggactcagagagaattgtgactctcatgcataccagttaaagcctcaggccagtaagcgtcctaacagggcctagtacacagatgagactgtaacactcatatgcacccccatcccacaataaagattgtcatccacacacatgaacacaactcactgttgaggttctgaatctcacagctggagacagttgaaagtttgaacattgactcttgtaagtggatccggtccaccagtgggttggcgactctcagaccaagattcaacacaccgtgaggcttttactccactgaggagacactgtctacaggaagaattgaggctctcagtatagattgtccaccattgtgtctcatgtacttagacccaaaatacaggtgttgacttcatacctaaaacaaggacatgttcagtattgttaatctcatccctgggccttcctgcaggagtgattttaacatctgcctctgctcaacacttgggtgattttattctccttccttagctcagcccacggatgggattgtgacatatctcttggccaccatccagctgatgtgactcttctctttttgctaggttctgctcaagaagagattctgacatattgttggaccaaacaccaaggttatgtcacttttgtgccttggccctgacctcagaaggcattgcgacatactgttgggttaatcaccaaggtgatgtgggwcttctgcctggaccctgcccacactgggcattgtgacatttagggcccatcaactatctggcatggccctcctctcttatctgaccgttgcctataggagagattgtaacacatctctggatttagaatgtagatgatgtgactcttctctcctgactgggccatggccagagaagggagagtgacttaccactggatccagcacacaggttatatgattcttctttgtgatctctgcacaaaggggtcattgtgagatatctcagggtttatcacctagatgatgtgatgctccttttcttcctggaacctgtctacagtgggcattgtgacatatcacttggcccagcacctacatgttgtgactctgatctcatgcctgggccctgcccactggggtgattgtgacatataagctgggcacagccatgaggttatatgacactcctctttttttgagttctactcacagggggcattgtgacatacctctgggctccttacctaggtgatgtgactctttccagggtcctcctgtcagtgggtattgtgcccaagatgtaattgtgatgcatcactggtcctagcacctaactgatgtgactctcctctccttccaaagccctgcatttattgtttattgtgacatattttcaaaacctaggttaggcaactcttttgcatgcgtcctgctaatagggctattatgacatatttttttttcacctaggtgatgtgactctccctttctgcctaaacactgtaaaaaggggagatcgtgacatatcactggacccagcatctaggtgatatggctctcctttttcaccttggcttcttgtattttgggtattatgacatatcactgggtcaaaccaaaggagggggaggctcttgcctaggccctgcccacaggagaccttgagacagatctctgcatccatcactttggaagtgtgactctcctcttctggctgctccatgcccgcacagaagactgtgatatatctccgggttcaccaaccaggtggtgtgtctcccatacctgggcttttcttgcagagataattgtgacaaatcgttgtgcacagcagcccaagtcacgtgactctcctctcatatcaaggctctgcaactagggtaattgtgacatacagctgggcctagcccctaggttctatgactcttttgatgattctgagccctatctacagaggtcattgggaaatatctcttggcccatctactaggtaatggaactcacctgcctgggctctttttttaggaggtattgtgacatagggctggatccagacctaggtaatgtgactctcctctactgcttgggctttactcaaggaggaattgtgatgggtcactgaacccagcacctgggttatgtgttatgtgactttcctc

SEQ ID NO: 553622 - DNA, 575 bp, Homo sapiens
attatttttaactaaactgtagctgtagctgtttagtttacttgttctaagttcttataattttgaaaatacagttgacacttgtatgacttatgaggtttttgatagtctaatgtcrtttgatgttcaaagaacagtatattttaaattaagaagaataaactgtgtgtatttgttttatatatttaaggcttagaggcacaatgcttctgcttatgatttgaaaacttcaaaggttggttttccatctgttcatacacaaaacagtgtatcgtggtgaaatgtttgttttttttaaagtggcagccacagttcctgtctgtccggatatattttggacttttgtatgttaagcagaagaaagaaacttcgttttgttttaggtaatctaagattgttgtacgcacacaaaaaaacttcacagattactgtagggttcagcaaactgtttatatagtgtaacattagtatctctattttctgatgtctagattttttttagaaaagattgttttcgtttttgtttttttaacaaatgtctccacaaattctggcttattttataaaattgcaga

SEQ ID NO: 553623 - DNA, 595 bp, Homo sapiens
aaatttatttgcatttattagaaatggtattatttgctaatttaaacaaaattatcttctctttttaaattttctttctcatgtcaaattttatttttgttatgattaattcatttttccaggagcttttccattttttgtttgttttcaaaatgaccacatttattttgggagaagggcttaaagaattcttttgtggatacttgaggactttctttaatgaagaaggagtgggcgtcgaggggaagatgaaaatccaagaatagcatgacccaaactcaaggcgatgaagactgttctgagtcaggaggggaagctggcagtcttgtttctctgcaggaacaggggcagtagatgaagcatagcatacctcattatgaaacgtggtcaggagctggcatttgtaatgatgataaatggtgtgctacwttaaaactttgagcaagatatggaaggacccaaattacgcagtttttaagtgattttaggagaaattcatgaaaaggcttaaagattgaggcaggaaggctttccaggaggctattaaagttctggacaaagggatgagtaagaacaaacagattaaagatttcat

SEQ ID NO: 553624 - DNA, 616 bp, Homo sapiens
ttcttcaacccctagtgtccccaaatcagcaagctcagatctcagcttagatccctttcctcaaaagggaattgattagtctctccataccaaaaccgccactctctttctgacatgctacaccacgttttctgcctattctgctctcccatgaaggttctgtctaaagttacatgtaatctccatacacaaagtaaatggatgaagttatgtttttgtctcattccaattctctgtccacctgcacagataagagcagagcagatcaacctatctgctgcctagaagcagatgcccaagaaaggacatggatagtaggctttctttagtctagggaccatttggattacggtagggttggacctatggttgcgaaggawagcaggcggcatcacactaccaaaaccaccactaacccctttccttgccttggccatcttcatatattgatagaaatttggggatgataattgagatgctggatttttgttgccttgaagaggttcttactgcaaatgtttgcagctattcttagaatgtgtaagtcctgtatatatctttgtcctcagatttggtttctaatccctgatttggagtcaatagaacaatcttacta

SEQ ID NO: 553625 - DNA, 610 bp, Homo sapiens
agtctagtgagacatagcaaccaatacacaaagtaatggtaacacagtgggctatggaagctcaaaagacctggaatagagggcatttgggggccaagcaaggcttcccagaggcaatgccctttaagaggaaagatgagtaagagcaggttacagaactgagaggaggaagagggcgccaggtgcagggggagcatcagggtgaaagttgggcttgggggggtggtgttttaaggaaatgaagacactattgctggagagtagaattcaagagtgggggtaaggtgagraagcaagaaactggtaacatcggagagggtggcagaggacaaagttctctttaaggagtgtgaacttcaccttaagaataatatggaaccactgataggttttaagtagggaaataatataatcaagtttacattttagaaagatcatttcaatggcagtgtgggaacggatgggaaagtgggcagaactgagttcagggagaccaggtggatatccagagggaagggcagggagcctgaactagggtaacagcaggaaggatggaagtaagtgcctggctttgagaggggtgtaagaggtaggatcaatcaatgaatgc

SEQ ID NO: 553626 - DNA, 610 bp, Homo sapiens
agtctagtgagacatagcaaccaatacacaaagtaatggtaacacagtgggctatggaagctcaaaagacctggaatagagggcatttgggggccaagcaaggcttcccagaggcaatgccctttaagaggaaagatgagtaagagcaggttacagaactgagaggaggaagagggcgccaggtgcagggggagcatcagggtgaaagttgggcttgggggggtggtgttttaaggaaatgaagacactattgctggagagtagaattcaagagtgggggtaaggtgagaaagcaagaaactggtaacatcggagagggtggcagaggacaaagttctctttaaggagtgtgaacttcaccttaagaataatatggaaccactgataggttttaagtagggaaataatataatcaagtttacattttagaaagatcatttcaatggcagtgtgggaacggatgggaaagtgggcagaactgagttcagggagaccaggtggatatccagagggaagggcagggagcctgaactagggtaacagcaggaaggatggaagtaagtgcctggctttgagaggggtktaagaggtaggatcaatcaatgaatgc

SEQ ID NO: 553627 - DNA, 609 bp, Homo sapiens
tatttacacgtttagcaatgagcaagtttattaaataacaaatgcaaaagtgatagagcaaaggtgtgtattttaaacagagaaatctgaggaattgtagacatgtgagttacaccatggcttcaatatttaatgcataagaatcacctgagttgagttccagacaaccatttccacccataaagattctgaacaggaaatcaagatggcctggggacatcccttttgacaaggtcttcaggtgattctgctgcatatggtttacagacaaccctttgagaaataccaagctggtatatttgttcagataaacatgggctggtgcagagcaccagtggtatgcaattgaggaccagcagattacatgaatcctgagtggcaaaagaggaagacaatccaataaagaccactacagatactatcccaagcactcttggcatggagacttgaaaatccattcatagaaatgaactgttaatcattgaattgtgctatataattttttaagttgcgaagtattaaaatatttagataaatattataaattttgtcacatattgctataaaatgatgcatacatatgtcatakgtataaagatacagagcata

SEQ ID NO: 553628 - DNA, 524 bp, Homo sapiens
aactctcccgaacaagacagcattactaaatgtccttctcttctaaatgaagccgcaggtttatcccaagtccaattgcctccaaagtactaaagctgccacctttctccaacggggaaaaatgagcaacattgagtctaagtaccaatcaagggatagaaagcctggttcttagacttcatgtctcagagctcagaggcatargccctggtaagaatgctctcagccggctggctaatagaaaataggaaactttagaatcccagccctaatttcattcagctcccagataaatatcaccccaggagagagccgccattgaccacctacataaagcagtctccccactcacaacccagcctattctgcttacactgatctatttctccatggcacaaatatttagttatttattctactagctcttgattatctgggtcttccaattagtgtaagttccatgaagtcagtgactatctgtttcattttgttgctttatctcaagttcctaaaatagtatctga

SEQ ID NO: 553629 - DNA, 999 bp, Homo sapiens
tctcagatagcacatgcatattcgatttgtccacaatgtatatctgagcctatgtattcataatagaattgcctaaaccttatacaccatagagatgcctcttaagaaataaaccagtaatgctactatattatagacatggttatttctaaataattaagaaagagacaatagcctatataatacatataaatcatggcatgcagcgaaaaccagtcactatatagtatgttaggaaagtcatattagtctacttatgtttaactcccaggccagagtttattaatgttgtttcctccatccacaatatccatcccattcatatcacacacacttgctcctgcccttgagtgaatttactcatttacttttccttcagattttactcagatttttgcttaatagaaatgtacttaacagatgaataaatgaatactacttgttatataactggatactatgataaaattatttgaaaagtatcaatagtgttataggtatccaaaagacacattagttagaaaagataacagaactatatmctactagaaaagggaaaaatggtcagattacataaaatataggtttacttttacaaagtatacttaagtagtattttgttaatcatttcagagttatatatttacttttatacaaataaatgtacttaaagtatgctgaaattttactgtgattatgttgcaatcaattattacagaaaagttgtgaatattcaagttggacttatttgtatcagctctttacaccaaagggctttttattgtatgcttttgttttatttcacatttaattaaagctaataatttgtttaaagtttgattagagaaaatattttccaaggtgagtgagaaacaacttctgaatattacttcctagatttttggacaatttggtaggatgaacttaagcctaaagcacctattaaacaagaaggaaaagaagaataatagtaaatctgaattttgttaagatttcatg

SEQ ID NO: 553630 - DNA, 973 bp, Homo sapiens
attcatggaagtcattttgctaaaattacaatatagatttaattcaagcttataaaacatacttaaatttataaatactctgtttaaggaaacctgggatggtttagaatatagaatcttaggggagcactccccagtgtaacttagaagtgtgtcttaggctgcaatcctcaagaaaaaataaaaaattaccgggtgcggtggctcacgcctgtaatcccagcactttgggaggccgaggcaggcaaatcacaaggtcaggagttcaagaccagcctggccaacatggtgaaaccctgtctctacaaaaatacaaaaaattagctgggcatagyggcggacacctgtaatcccggctacttgggaggctgaggcaggagaatcacttgagcctgagaggcagaggctgcagtgagctgcctgctgcactccagcccggtgacagagtgagactctgtcaaaaaaaagaaaaggaaaaaaatcttagagtaggaagggatgatggaataatggagaatatttaatataacttggtcatcttataaataaccccaaagagatcaagtcacttcccaagattacacaaaaaatgataaagcagaggcaaaagctcagacttttcttaatctagaggccttttgtcttgatgctcatggcatgtattatattttaatttacacatgtaggaatacgtattaaagtttaatcctcaaaattatgccatgtgatagatactatgattgtctacattttaaaattgaggaaatatagccaagcatggtggcgggcacctgtaatcccagctactcaggaggctgaggcaggagaatcccttgaagccaggaggcagacattgcagtgagctgagatcacgccattgcactccagcctgggcaacaagagcgaaactccgcctcaaaaaaaaaattataaaattgaggaaataaatttgagtctccaaaagggtagataa

SEQ ID NO: 553631 - DNA, 626 bp, Homo sapiens
  misc_feature 616: n = A,T,C or G
agtcttgttttttcatgtattttgcaagtttggattgtgaagtcatggttactgggactttgtatgtgagaatcttgggaggaagccatcctacatggaagattaagacttgcctttgtcaggaagctcagccttttttcattctgggaccactttaagctaatgtgttggtttggggtttctgggatgacacatgttgcataaaatcaaatagccttcccaggtctgtgatgtggtcccagctgcaactcctgccttgccaggtcacaaggcctttcttgtttcctgttgctccagtggccactaacacctgaacctcttggtttcaagatcaggaaaggctccaagatcagccatggctttagcatcagtccacttgccaccctcycttccagcaatctggtctgtttagctttctatttcccttcaatttctccttgtttatttcctttcccttttaaattttagaatgaacagatttatctgttcaattcctctcatccgagtatcagctcttagactctaatttttatcctattgttctgctgtattttgaataatttatttctgcttttagttttactttttaaaaattctgctctccactggtttgttntattgttatc

SEQ ID NO: 553632 - DNA, 556 bp, Homo sapiens
catatgttaccaaaaataattccttactgcacctcttacatctcataaaacatgatggttttcacataaggctgtgtagacacaatgtatcttctcgtcagggaggtgccaggtatattccatctctgctaattctgcttcaaaaagtgtaaaacctaaaataatatctccacttaatttatacaggtttgctcctactctactcttggacagacataatactaatggaaatctatagattcacaccacttaatcttgtctatgagtttgcttaaaattttctttgttatcttttttttccaagcctattgccaacagatgcagaagaagatgtaaataatatatttagtttgagtaaaacacagttgctgagctataagtagagataaattattgtccaaagcaggycacgtttgagggtgaatgcaacacattataattaaacccgaacaagtggcaaagtccagagcaatcctggccccactgtgtgacctactgaatagtgttatcaaaatcccacacttagcagttaatcttccatgaatgggtttactgt

SEQ ID NO: 553633 - DNA, 527 bp, Homo sapiens
gcgcctgtagtcccagctactcaggaggctgaggcaggagaatggcatgaacccgggagcttgcagtgagccgagatcrtgccgctgcactccagcctgggcgacagagcgagactctgtctcagaaaaaaaaaagaaaagaaaatgtagagattgtatataagtcatagtcatagtcatcatatattataaatcaaaggtattttataaagattaatttagtgccaggcacagtggctcatgcctgtaattcccagcactttgggaggccaaggcaggcagatcacgaggtcaggagttcaagaccagcctggccaacatggtgaaaccttgtctctactaaaaatacaaaaattagctggacgtggtgatggtggcgcgcgtctgtaaccccagctacttgggaggctggagcaggagaattgcttgagcccgggaggccccccaaggagcttgcagtgagccgagatcgtgtcattgcactccagcctgggcagcaagagcaagactcactcagtctcaaaaaa

SEQ ID NO: 553634 - DNA, 550 bp, Homo sapiens
gcctcctgagtagatgggaccaaaggcatgcactatcacacctggctaatttttgtattttttatagagaccaggtttcactatgtcgtcctggctagtcttgaactcctggtttcaagtgatctgccgcctgtcttggcctcccaaagtgctgggattacaggcatgagccaccgcatctggcttggaattgagttttcctaactctggagttatgctgctattgccctctgctactgttcatagtaacagccttattactgagtatttcccacttgctgagtagggtgctgagcactttacatgtcttatttcatttaatgttcacaataatcctatgaggtagattctcttgttattcgcattttacagatgaggtaacaggttcagagaagctaagcagcctccacaaatttatacggcaaagaaagccaacatttaaatccaggcctkcctgactctaaaatctgttctattgagtttgactgccaaacaggtgagcaggacgctcccaggaggatggcaacagtgattggtgatccatgacgtc

SEQ ID NO: 553635 - DNA, 550 bp, Homo sapiens
gcctcctgagtagatgggaccaaaggcatgcactatcacacctggctaatttttgtattttttatagagaccaggtttcactatgtcgtcctggctagtcttgaactcctggtttcaagtgatctgccgcctgtcttggcctcccaaagtgctgggattacaggcatgagccaccgcatctggcttggaattgagttttcctaactctggagttatgctgctattgccctctgctactgttcatagtaacagccttattactgagtatttcccacttgctgagtagggtgctgagcactttacatgtcttatttcatttaatgttcacaataatcctatgaggtagattctcttgttattcgcattttacagatgaggtaacaggttcagagaagctaagcagcctccacaaatttatacggcaaagaaagccaacatttaaatccaggcctgcctgactctaaaatctgttctattgagtttgactgccaaacaggtgagcaggaygctcccaggaggatggcaacagtgattggtgatccatgacgtc

SEQ ID NO: 553636 - DNA, 234 bp, Homo sapiens
ctgtacagcatgtgactgtggtgaatactataaccgactctaacagaatggtaagtatctgtgtatctgaacatagaaaaggtacagtaaaaatacagttataatcgtatgggactaccttccttcctataggcactcaagcactgacagaaccgtcattatgtggttcacatttggtttgtgactgtattgaaaattmttcactggcagaataacaggccaaattttggctca

SEQ ID NO: 553637 - DNA, 1188 bp, Homo sapiens
cttctttgtgcaacagaagttctttgtgcatacatgtcattttgttgcacgtacttgagttaagatttaataaagtcagtaatatttacagactcattaaagcatttgtaaagtgaagctggcattcttttatctgtgagtgcatggtgaggagaaatacagtgaatactagcagagtttggtgctattgccttggttcagactccagggtttttactcaccattgtttttgcatcagtgcaaatgtcaacacagtaaaaacggcaaatgtcttagtattattatgaaaatagtttgacctcatgggacccctgaaagtgtttcagggatttgtaaatcatactttgaaaacattaagttgtatttacattatatacattttaaaagtatatgtttccctataatcaaaaagacaaaattcctgtgctgccaagtaaatattttacagttttttggtgacctttgctaattgtataaaaagcatgttggatggggttttctcctattttcttttggccataccactccccacttcccatctcccaaccatgcaagcacttggctttttaaaaaaattgataaactttattttttaaagcagttttaggttcacagcaacattgagcaggaagtaaagagagtctccacataccttctgatatagttggctctgtgttcccacccagatatcaccttgaattgtaataatccccatgtgttgtgggagggacccagtgggaggtaattgaaacatggtggcagggctttcctgtgctgttcttgtgatagtgaataagtctcatgagatctgatggttttataaaggggagttctcctggacataccctcttgcctgtcaccatgtaagacatgactttgctcctcctttgccttccgccatgattatgacttccccagccatgtggaactrtgagtccatcaaacctctatttcttttttttttttttttttttttttttgagatggagtcttgctctgttgcccaggctggagtgcagtggcatgatcttggttcaccgcaacttctgcttcccagattcaagcgattcttctgcctcagcctcctgagtaggtgggattacaggcacctgccactatgcctggctaatttttttgtatttttagtaaaaatggggtttcaccatgttacccagtcttgggtatgtc

SEQ ID NO: 553638 - DNA, 1188 bp, Homo sapiens
cttctttgtgcaacagaagttctttgtgcatacatgtcattttgttgcacgtacttgagttaagatttaataaagtcagtaatatttacagactcattaaagcatttgtaaagtgaagctggcattcttttatctgtgagtgcatggtgaggagaaatacagtgaatactagcagagtttggtgctattgccttggttcagactccagggtttttactcaccattgtttttgcatcagtgcaaatgtcaacacagtaaaaacggcaaatgtcttagtattattatgaaaatagtttgacctcatgggacccctgaaagtgtttcagggatttgtaaatcatactttgaaaacattaagttgtatttacattatatacattttaaaagtatatgtttccctataatcaaaaagacaaaattcctgtgctgccaagtaaatattttacagttttttggtgacctttgctaattgtataaaaagcatgttggatggggttttctcctattttcttttggccataccactccccacttcccatctcccaaccatgcaagcacttggctttttaaaaaaattgataaactttattttttaaagcagttttaggttcacagcaacattgagcaggaagtaaagagagtctccacataccttctgatatagttggctctgtgttcccacccagatatcaccttgaattgtaataatccccatgtgttgtgggagggacccagtgggaggtaattgaaacatggtggcagggctttcctgtgctgttcttgtgatagtgaataagtctcatgagatctgatggttttataaaggggagttctcctggacataccctcttgcctgtcaccatgtaagacatgactttgctcctcctttgccttccgccatgattatgacttccccagccatgtggaactatgagtccatyaaacctctatttcttttttttttttttttttttttttttgagatggagtcttgctctgttgcccaggctggagtgcagtggcatgatcttggttcaccgcaacttctgcttcccagattcaagcgattcttctgcctcagcctcctgagtaggtgggattacaggcacctgccactatgcctggctaatttttttgtatttttagtaaaaatggggtttcaccatgttacccagtcttgggtatgtc

SEQ ID NO: 553639 - DNA, 1188 bp, Homo sapiens
cttctttgtgcaacagaagttctttgtgcatacatgtcattttgttgcacgtacttgagttaagatttaataaagtcagtaatatttacagactcattaaagcatttgtaaagtgaagctggcattcttttatctgtgagtgcatggtgaggagaaatacagtgaatactagcagagtttggtgctattgccttggttcagactccagggtttttactcaccattgtttttgcatcagtgcaaatgtcaacacagtaaaaacggcaaatgtcttagtattattatgaaaatagtttgacctcatgggacccctgaaagtgtttcagggatttgtaaatcatactttgaaaacattaagttgtatttacattatatacattttaaaagtatatgtttccctataatcaaaaagacaaaattcctgtgctgccaagtaaatattttacagttttttggtgacctttgctaattgtataaaaagcatgttggatggggttttctcctattttcttttggccataccactccccacttcccatctcccaaccatgcaagcacttggctttttaaaaaaattgataaactttattttttaaagcagttttaggttcacagcaacattgagcaggaagtaaagagagtctccacataccttctgatatagttggctctgtgttcccacccagatatcaccttgaattgtaataatccccatgtgttgtgggagggacccagtgggaggtaattgaaacatggtggcagggctttcctgtgctgttcttgtgatagtgaataagtctcatgagatctgatggttttataaaggggagttctcctggacataccctcttgcctgtcaccatgtaagacatgactttgctcctcctttgccttccgccatgattatgacttccccagccatgtggaactatgagtccatcaaacctctatttcttttttttttttttttttttttttttgagatggagtcttgctctgttgcccaggctggagtgcagtggcatgatcttggttcaccgcaacttctgcttcccagattcaagcgattcttctgcctcagcctcctgagtaggtgggattacaggcacctgccactatgcctggctaatttttttgtatttttartaaaaatggggtttcaccatgttacccagtcttgggtatgtc

SEQ ID NO: 553640 - DNA, 672 bp, Homo sapiens
actcttcattcatagaaagtcaaaactagcaaaattaatctgtggagttagaagtcaagatcatgattacccttgagtgggaagaaagagacgggcagggggcgggaagggcatctaaactactgctcatgttatttcttgattgtgtgctggttacatgggtgtatttattttatgaaaatttaagcatacaattatggtttgtatactctccygtatgtatattttacttcaataaaaagattcactcaaaatggaatgcattttagtaataaaggaataactacaatacttgcaataacacaggtgaatctcaaaaacatcttaaggaaaagaagtgtgacacaaaaaagtacataccataggaacccatttacttgaggttcaagaacaggcaaaataatctacaatgatagaagtaagaacagtgctgggggcagtgttgaagatgacatctggagagggcaggaggcactttctggaggaatagacagactgtttcttgatttggatattacatgactgcatacgtttgttaaaagtcattgaactacacactacactactcgggtgtgccttaagaccccaaagatcccctaatcacactaacacctgcactaaatattccttattctcttggaatccagtacatttcccaatagtacttgttct

SEQ ID NO: 553641 - DNA, 652 bp, Homo sapiens
tctaactccaaagcatcaatcagcctcactctccttacccattctgggttaataattcattttagagaacagacattaggaaagaaaactctttgttttatggtttattctttagggcttaatgggctctgaaaccacaactccctgaggcaaaggagcctataaagtatacaaaaacctggccattcattcctacaggtggaggaaaggggagataccttctcattaagaaagttttctaattcagtgagaacaagccaaaaatgaatgtcttagtttattacctcaccaaccagtggaaaccaagaaaagtgaactctagtaatcacagaaggcttcacagaaaaggaaaaagtttgaataaggttcatggggatgataagamttggtgaggagagaaaccacaataacttcagaactgcggaaaattcagcagaagagaagtaaaaatgaatgtaatccacacacaggaaagcaaaatggccaaccttttggattagcacagagattttattttagagaaaatcaaatccaaccaaatcagtgaagtgaaatcagataatttgaatgttagctatagctataggagacttctatagctcaatgtcttttttgacaatatgtaaataatataataaatattatacaaaag

SEQ ID NO: 553642 - DNA, 630 bp, Homo sapiens
catcaggtttacataattcatccgaaaccacccaatgcatacatcatatataggagtcgagtccatttgattccacagccccacacacatccaatccatgcttccccacagaaaaacaggaccaggtcagccaagcgtcccagaagccaaacaaggatgcactttctgaggacagacactgcagaagccagagcccagtccaaggaagccccagaatcaggaaggagatcgcagacaagaccatgaagagaaacaaattttaccctcaaatgcagcaaaggtcattttttcatttataaggagttcaccyttcttgtagaagccactgtttaacttttctttgcctttgaaagaggaattcattcaatctcattttttcagtttgtggattatttgaaattcttacttttccttctttttcttattatggacattgtgtcagttcctcggttctaaaaaataaaaataaaaaataaaaaaataaaagtaatccaaggaagaaaaactagactacttattagcagccagagcttttaatgggaaaagctggggtttgggaatttctgtgattttctccaaatggaaactttttaaataatccctgttgttacatataatagttatttgtat

SEQ ID NO: 553643 - DNA, 2157 bp, Homo sapiens
gggcctgtttttgcatagctggtgagccgaagaatagtttttacatttataaagcattgtaaaaaacaatatgtgatagaaattgtttatgtcctataaagtctaaaatatttactacctggctgacactttacaaaaaacgtttgccaactgatactcctagccagtgcacctgactgccttttaggatgtttacatggggtgtgcatgggggctagcctagttcgaggtagtggtggtagggaagagatgaattaaaaattgaatcagaggccaggcatggtggctcacgtctataatcccagcactttgggaggccgaggtgggcaggtcacccgaggtcaggagtttgagaccagcctggccaacatggggaaaccccatctatactaaaaatacaaaaattagcctggtgtggtggtaggcacctgtaatcccatctacttgggaggctgaggcaggagaatcacttgaaccagtgsggcagaggttgcagtgagctgagattgccccacttcattccagcctgggcgaaagagtgagactctatctcaaacaaaacaaaacaaaacaaaacaaaaaaacaaaaaatgaagaataaaaaaattaaagataaaaattgaatcaggcctgaaaggtgaataagagttgaatgaagaaaggagaggaagctggttccgtgaagaaaaaaatttccctgagtggagagatacttgggtttttagacaaactaccacccacactgtgtgaatgtgcaccgtcccctaagcccaatgtgggtggtggttgtcatcactgagtgctgtgcactgagccagtacgtgggaatagggacaaagatatgggacaaggtcttctgagaagacgtggctaaaatgtggccacttaaccacttacacagctctcagatcagaaacctaggagtcatccttgattcctttcttttccttatcccacatctaatttatctggaactatcttcagaatatatatggaatccaactgctagtaatcttcatcaccacccctgcattcccagccacaattagaacagcttcctaagcagatctaactgcattcactcttactgcttactttctattttccatgcagcaaccatagttttacttttagacatcaagtcagatgattttattctcctgcctcaatcctctgctggcttctccacacctttaaaataaaattcaaactccttcccatgaccctgtccacctcttcagctgcatttcttattctttctatccgtattcaccttggtttctcaagtcaatcttttcagagataccttctctgactaaccttactaaaattaactcatccctacaattatataagcctagaccctgctttattttctccatgacacatatcccttcttaaaagttatatttactggtttatttgcttaaaaacacaatatacatctttctcaatgagcaagactagaatatacttattagaatgaaggattcctgaaggcagggacttagtcttgtttagcactctattccttgtgcctgggaaagtgtttgctacatagttggaaggttaatgcatatttgttgaaagaatacacacatcatttaattaatttttgagcttcataagaaaacacacccggtatctcctatgattgaataaaatcataacagtgaagaagataagctgatcctattgatgacagaatttgacaagaacaacctgccttttctggttttaacattgagggcccatgaaagaagtagacaaggaggaagagataggtagatgcatgggccacataacatggggtgccaccaagcaaatccaaccttgtttttgtggctgtcatgtttgcagcctgcctttagtcgtggccactgcataactcccttggggtggatagtctactaactaggtggaatgttggaatgccacctggtggaatagaccacgctctccttaccagtagagttgataatgtgctgctgacaccaagtcagcctaatacttgccattggctcaggggctgagaaggacatactaacaattacctgtgagcctggtaaggatagcaaaatggttaacatggaatttgaatcagtatttccaggcctctaagtgaccacaaaaataaccagtaggggacttcaaaaa

SEQ ID NO: 553644 - DNA, 2157 bp, Homo sapiens
gggcctgtttttgcatagctggtgagccgaagaatagtttttacatttataaagcattgtaaaaaacaatatgtgatagaaattgtttatgtcctataaagtctaaaatatttactacctggctgacactttacaaaaaacgtttgccaactgatactcctagccagtgcacctgactgccttttaggatgtttacatggggtgtgcatgggggctagcctagttcgaggtagtggtggtagggaagagatgaattaaaaattgaatcagaggccaggcatggtggctcacgtctataatcccagcactttgggaggccgaggtgggcaggtcacccgaggtcaggagtttgagaccagcctggccaacatggggaaaccccatctatactaaaaatacaaaaattagcctggtgtggtggtaggcacctgtaatcccatctacttgggaggctgaggcaggagaatcacttgaaccagtgcggcagaggttgcagtgagctgagattgccccacttcattccagcctgggcgaaagagtgagactctatctcaaacaaaacaaaacaaaacaaaacaaaaaaacaaaaaatgaagaataaaaaaattaaagataaaaattgaatcaggcctgaaaggtgaataagagttgaatgaagaaaggagaggaagctggttccgtgaagaaaaaaatttccctgagtggagagatacttgggtttttagacaaactaccacccacactgtgtgaatgtgcaccgtcccctaagcccaatgtgggtggtggttgtcatcactgagtgctgtgcactgagccagtacgtgggaatagggacaaagatatgggacaaggtcttctgagaagacgtggctaaaatgtggccacttaaccacttacacagctctcagatcagaaacctaggagtcatccttgattcctttcttttccttatcccacatctaatttatctggaactatcttcagaatatatatggaatccaactgctagtaatcttcatcaccacccctgcattcccagccacaattagaacagcttcctaagcagatctaactgcattcactcttactgcttactttctattttccatgcagcaaccatagttttacttttagacatcaagtcagatgattttattctcctgcctcaatcctctgctggcttctccacacctttaaaataaaattcaaactccttcccatgaccctgtccacctcttcagctgcatttcttattctttctatccgtattcaccttggtttctcaagtcaatcttttcagagataccttctctgactaaccttactaaaattaactcatycctacaattatataagcctagaccctgctttattttctccatgacacatatcccttcttaaaagttatatttactggtttatttgcttaaaaacacaatatacatctttctcaatgagcaagactagaatatacttattagaatgaaggattcctgaaggcagggacttagtcttgtttagcactctattccttgtgcctgggaaagtgtttgctacatagttggaaggttaatgcatatttgttgaaagaatacacacatcatttaattaatttttgagcttcataagaaaacacacccggtatctcctatgattgaataaaatcataacagtgaagaagataagctgatcctattgatgacagaatttgacaagaacaacctgccttttctggttttaacattgagggcccatgaaagaagtagacaaggaggaagagataggtagatgcatgggccacataacatggggtgccaccaagcaaatccaaccttgtttttgtggctgtcatgtttgcagcctgcctttagtcgtggccactgcataactcccttggggtggatagtctactaactaggtggaatgttggaatgccacctggtggaatagaccacgctctccttaccagtagagttgataatgtgctgctgacaccaagtcagcctaatacttgccattggctcaggggctgagaaggacatactaacaattacctgtgagcctggtaaggatagcaaaatggttaacatggaatttgaatcagtatttccaggcctctaagtgaccacaaaaataaccagtaggggacttcaaaaa

SEQ ID NO: 553645 - DNA, 649 bp, Homo sapiens
tgtaatataaaccagtaaagaaaaaacatgttctaatttttgttttggtttgtttttgttgctttttttttttttttgagacagagtctcgctctgttgcccgggctggagtgcagtggcccaggctggagtgcagtggcacaatctcggctacctgcaagatccgcctcccgggttcacaccattctyctgcctcagcctcctgagtagctgggactacaggcacccgccactacgcccagctaattttttggtatttttagtagagacggggtttcaccgtgttagccaggatggtcttgatctcctgaccttgtgacccgcccacctcagcctcccaaagtgccaggattacaggcatgcgccaccgcacccggccaacaagttctaattttaaaaatatatactagttagccctcttgttaatcttaacaaatttaaataatcattattttaagttgatgaatataaaacaactggttcttatttttctgctcttatttctttgtgtttttcacactgctgcaacaaatctactctacagatatatctcaaaattacagattatttggtcattttgatggtcctcaattttccaagatggttagagatacagaaataatttttcaacattacaagtgcaagaggt

SEQ ID NO: 553646 - DNA, 667 bp, Homo sapiens
ttgttgaaagactttataatatttacagtttggttcattgtagcaaagccatgtaaccttaatttagttaaaactctccttaaagattaagattattctagcttcattactaactacataggtctgtcatttctccagatatccagttgttttacatatccagttttagttcttatacgccagtagatgtagaaatgtgcttaaccactgtttaattctgtatggatttgtaaatgattgcatttgagtctgtcttgaaattaactcttgcatcttttgatcttttgcagagtgcttcttttgccctgatatttgaattttggtgttaccaaaaaaaaaaaaaaaaaaaaaragagagagagagagagaactgacattctcttaaattaggtcatttgttattttttcaagattttaaaatcatatctagtgtcagctttcaacttctcaaactgaaaaatcctattttcctctttttagactttatggattctttcattttatcaaaattaaggccacattttaaactttatttatattattcccattcacgataggataaaacatactgagctttttgaccaaaaatgtctcaaatcctcaaaaaatgagtcattggctcctatgaagaggatcagactggacacagcaaaatgtttactgggga

SEQ ID NO: 553647 - DNA, 528 bp, Homo sapiens
ttacatgtgatgacttgactaatagcaaggtagacctagccagaatacagcagggtcctgtagaaaacttatattttggttggcgcagtgcctcacgactgtaatcccagcactttgggaggctgaggtgagtggatcacttgaggtcaggagtttaagaccagcctggccaacatggtgaaaccctgtttctaytaaaaatacaaaaattatctgggcgtggtagtgtgagcctgtaatcccagctactcaggaggctgaggcaggagaattgcttaaacccgggaggtggaggttgcagtgggccaagatcatgccactgcacttggatctgggtgacaaagcaagactgtctcaaaaaaacaaacaagagaaaacttgtgttttatttctattcctttctccccttcttaccctctataaattattctttttctttctcttcctcttttaatactttttttgtttcaggacaatattgttttctatttcttcatgaagctctcaaactgagaagccaaaatattt

SEQ ID NO: 553648 - DNA, 629 bp, Homo sapiens
tgtaacattctttctagtccacttcaagccttacatgtaacttaacatcttcccaaaagtatacagaagactatttaaggcatccacaatgctgacttattcttcttgaatgcttctttaatcgttttatgtatggcgttgagacaatacatctggatgacttatagaagtaatatatcttgcttggcttgacattttctaaccctctaggaattgagtaaaagactgttcattctacatagtcttagttcaaaaatgaatcctaaatgaaatattgttttttaaatattttaggcaaataagcagaaagcttcagctcgtaacctgtttctcaccaatagccgaaaggtaaaattgtagttttgtattttccatttcatgttttgctggaatatattcttcttctttggggtccatcttgctgctcttgtccgtcgtaacctgttgatcatgaatctaatagttcgtaagagagtttctgaatgttctcaagctgtttattttttatttttattttttgagacagagtctcagccrcccaggctggagtgcagtggcagtgatcttggctcactgcaaccaccgtctcccaggttcaagcgattctcccatctcagcctcccgagtag

SEQ ID NO: 553649 - DNA, 507 bp, Homo sapiens
aatccactcactctacattacactcagctctgtcagaattaaatgaggcaatgcagtgagggatgggcggggacagactgttagggactatttaagagacacatgatgatggaaggttgtttccacgatgatggaaggttgtttccaccttccatcatcaagtgatgatggtttagaggaagccagtagcagagcagataggtaggaagagtaagattctaaatatgttttcaatgccaastcaacaggatttgcttttttattgaacgttgggcatgaaagaggagtagaggaagaattcaagatttttagctttagaatgggattaatggagttccatttactttgatgaagactgaggttgaaaactttccagtggtaggtaagctcaagtgttaggtcggacatgttaagttttaaaatgtctattagacatcctaataaggatgataagtagggaggcctgatttatattatggaaaaatccctgaagacaggtgagaatgg

SEQ ID NO: 553650 - DNA, 558 bp, Homo sapiens
gacttcaaaaataagagttttgatgtgttttatttcctccatccatrgtgaaggaggaatttgctcacttctgactttttcaatctccaacattttactcaaatacctccaaccctctagccccaccaccttctcataggaatgcaaagaccccacaccacccccaacacctacagtgagagttagctgcaggctacagttatataatatcacagaaaaagattaagaattacattattgttgttgctggaaggctgtattatagctatttcagaagagagatttatagcagtatttaatgaatgcaactagtttcgttatcagtcagtaaccatacccatgttgtgcatatggtaagattaaattaagccattataataaccttacaaaaggtgactatttggtggtggcaagtctggctaaatgaaatcgtattagcttgatgccatggtattattcatttcgacacaggttgttggccaagtctgcccaaaatgtgccttataatttttaggcatttcccttattaaggaacatggaaagatctagcttgaggat

SEQ ID NO: 553651 - DNA, 594 bp, Homo sapiens
ggggggagctcatgtactaagcaccccagaaggatgtgcasaccacctctgcctttggtttatgtggaatgtcacccccagcaaaacccatcttgtgctaacaacacacagttatggtgtttctgtaagaaaccttaacttgtcctgagaatttgaagaggaatccttccgcttccagagatctttgttattcgctctcatgacctatctatcttggcatgatgtgatggttgtatgaatgccagcaaatcactatagactctaagttcactgacagcagagtctgccttctttgtaaataaatactttactcttaccacacatactgaaatatagtagagttcaacaaatgtttcttaaatgatgaggggtcttttggtcttatatagttcaggtggttggggtatggagtaaaggatttaaatatttggccaatcaaattaaaaagggaagctgtcctggatttgttttaagtgatgatccagggcagaggatttgctcaggacttagcagtagaatgatgctctacctgaaaagcttgtttgtttttgctgagtaggtactgagcactttctcactatttttctctccctt

SEQ ID NO: 553652 - DNA, 555 bp, Homo sapiens
tgcttcctcatttatactctgttctagataaatgagattgcgagatatttaacttcattgagtaatgaaattatattttaaatttgggacacaggattaataacaggaaacatcagacaaatgtaaaatgataccatctgaattgataatattccaataacattcaatctaaattcatgcattcacttattcttccatgttagacaaacaatttttgaatgaatgaattcaaacatcttcccttcacgttctaggcagaccacacagagccctgttgttttctgtttttagtcaaaaataaataaataaataagattatggtgaaaaaaaaccatgctatcagttcacaagggtaaaaagtaaaagaggaaaagccctgctcccctgttttcttatttccatttgtcaaaattaaatactactaacacagttatttttaaaaagattttcacaaataaatagtggtgtgaatttctgataytgactgagagattttgcaacaaggggaagttttaaaactctggcacacaattatggagttagtttgtttatcaa

SEQ ID NO: 553653 - DNA, 658 bp, Homo sapiens
ttttttgagacagagtctcactctgtcacccaggctggagtgcagtggcacgatctcagctcactgcaacctccgcctcctgggttaaagcaattctcctgcctcagcctcctgagtagctgagattacaggtgcgcaccaccatgcccagctaattttcatattttttagtagagacagggttttgccatcttgccagactgatcttgaactcctgatctcagatgatccatccacctyggactcccagagtcctgggattacaggcgtgagccaccagccactgtgcctggccaacattttaaaaatatgttccaccctccctttgtattaaggccaagtaaaccaaaagctaagaagttaatgtaaaattgtgtaagtttggtggttttatcttcatgattcaattcaagaagatcaggttccatatagaaaagaaatgtctctattggtcattcagtagcaaatgagtattcgtatcctcctattgcaaaagccaaaactcaatttccatttataaaagcagaaaggttatctaattgtcacagataaatttgctaaacctaactcatattacatactaaataaagcttcataattcaaagtctactgatatttagaaatcattacaagctaattaattacaatatttctcaat

SEQ ID NO: 553654 - DNA, 658 bp, Homo sapiens
ttttttgagacagagtctcactctgtcacccaggctggagtgcagtggcacgatctcagctcactgcaacctccgcctcctgggttaaagcaattctcctgcctcagcctcctgagtagctgagattacaggtgcgcaccaccatgcccagctaattttcatattttttagtagagacagggttttgccatcttgccagactgatcttgaactcctgatctcagatgatccatccaccttggactcccagagtcctgggattacaggcgtgagccaccagccactgtgcctggccaacattttaaaaatatgttccaccctccctttgtattaaggccaagtaaaccaaaagctaagaagttaatgtaaaattgtgtaagtttggtggttttatcttcatgattcaattcaagaagatcaggttccatatagaaaagaaatgtctctattggtcattcagtagcaaatgagtattcgtatcctcctattgmaaaagccaaaactcaatttccatttataaaagcagaaaggttatctaattgtcacagataaatttgctaaacctaactcatattacatactaaataaagcttcataattcaaagtctactgatatttagaaatcattacaagctaattaattacaatatttctcaat

SEQ ID NO: 553655 - DNA, 1179 bp, Homo sapiens
  misc_feature 498, 499, 500, 501, 502, 503, 504, 505, 506, 507, 508, 509,510, 511, 512, 513, 514, 515, 516, 517, 518, 519, 520, 521,522, 523, 524, 525, 526, 527, 528, 529, 530, 531, 532, 533,534, 535, 536, 537, 538, 539, 540, 541, 542, 543, 544: n = A,T,C or G
  misc_feature 545, 546, 547, 548, 549, 550, 551, 552, 553, 554, 555, 556,557, 558, 559, 560, 561, 562, 563, 564, 565, 566, 567, 568,569, 570, 571, 572, 573, 574, 575, 576, 577, 578, 579, 580,581, 582, 583, 584, 585, 586, 587, 588, 589, 590, 591: n = A,T,C or G
  misc_feature 592, 593, 594, 595, 596, 597: n = A,T,C or G
ggtaaagtctttctgggactgtgggcagcagctggaggcaggcccaggacaggaggagcctcctggcccagctccaggagctgtcggctggaaggagcacttcattatcagctgggctgctgtgaaggaggttatggggaagggaggcccaagggacccgaggtcagcctggagtcccctttccagccggctccaaacccctccatgcagctgggcaccccaggccctgcctgagcctatgaggtgcctccccacccaacccccactggaagcaccagccatacccaatcatgcccatgcatctgtaaggtgtaaggactagtgttgcctcctccaggaagccttccctgactgctgcatggtaggagtgactctgagcaccctgagcacacatcatctcatggaatcctctctgtgacctctgtgggaggctcaagggaatgaggccagagaagtgaaggcagctgctcaaggcactcagtgttgaagcttgaatcnnnnnnnnnnnnnnnnnnnnnnnnnnnnnnnnnnnnnnnnnnnnnnnnnnnnnnnnnnnnnnnnnnnnnnnnnnnnnnnnnnnnnnnnnnnnnnnnnnnnaaaaaaaaaaaaaaagagctgtggctgcccctaagcccaaaccagtagggaaggaccagacaccagaatcttttttttttttttttgagacggagcctcacattctcacccaggccggagtgcagtggcgtgatctcggctcactacaagctccgcctcccaggttcacgccattctcctgcctcagcctcccgagtagctgggactacaggcgcccgccatcacacccagctaattttttgtattttcagtagagatggggtttcaccatgttagccaggatggtctcratcttctgaccttgtgatcctcccgcctcagcctcccaaagtgctgggattacaggcatgagccaccacacctggcctgcattaggctatctttgtcttttgctacaaggagctcaggaggagtgttttagactttgcttattttcattacaaaatgttaaattatttcttcctttcagatatttcctgtcggtatttttttttttttgagatggcgtctcgctctgtcacccaggttggagtgcagtgatgtgatctcagctcactgcaacctctgcctcccaggtttaag

SEQ ID NO: 553656 - DNA, 1179 bp, Homo sapiens
  misc_feature 498, 499, 500, 501, 502, 503, 504, 505, 506, 507, 508, 509,510, 511, 512, 513, 514, 515, 516, 517, 518, 519, 520, 521,522, 523, 524, 525, 526, 527, 528, 529, 530, 531, 532, 533,534, 535, 536, 537, 538, 539, 540, 541, 542, 543, 544: n = A,T,C or G
  misc_feature 545, 546, 547, 548, 549, 550, 551, 552, 553, 554, 555, 556,557, 558, 559, 560, 561, 562, 563, 564, 565, 566, 567, 568,569, 570, 571, 572, 573, 574, 575, 576, 577, 578, 579, 580,581, 582, 583, 584, 585, 586, 587, 588, 589, 590, 591: n = A,T,C or G
  misc_feature 592, 593, 594, 595, 596, 597: n = A,T,C or G
ggtaaagtctttctgggactgtgggcagcagctggaggcaggcccaggacaggaggagcctcctggcccagctccaggagctgtcggctggaaggagcacttcattatcagctgggctgctgtgaaggaggttatggggaagggaggcccaagggacccgaggtcagcctggagtcccctttccagccggctccaaacccctccatgcagctgggcaccccaggccctgcctgagcctatgaggtgcctccccacccaacccccactggaagcaccagccatacccaatcatgcccatgcatctgtaaggtgtaaggactagtgttgcctcctccaggaagccttccctgactgctgcatggtaggagtgactctgagcaccctgagcacacatcatctcatggaatcctctctgtgacctctgtgggaggctcaagggaatgaggccagagaagtgaaggcagctgctcaaggcactcagtgttgaagcttgaatcnnnnnnnnnnnnnnnnnnnnnnnnnnnnnnnnnnnnnnnnnnnnnnnnnnnnnnnnnnnnnnnnnnnnnnnnnnnnnnnnnnnnnnnnnnnnnnnnnnnnaaaaaaaaaaaaaaagagctgtggctgcccctaagcccaaaccagtagggaaggaccagacaccagaatcttttttttttttttttgagacggagcctcacattctcacccaggccggagtgcagtggcgtgatctcggctcactacaagctccgcctcccaggttcacgccattctcctgcctcagcctcccgagtagctgggactacaggcgcccgccatcacacccagctaattttttgtattttcagtagagatggggtttcaccatgttagccaggatggtctcaatcttctgaccttgtgatcctcccgcctcagcctcccaaagtgctgggattacaggcatgagccaccacacctggcctgcattaggctatctttgtcttttgctacaaggagctcaggaggagtgttttagactttgcttattttcattacaaaatgttaaattatttcttcctttcagatatttcctgtcggtatttttttttttttgagatggcgtctcgctctgtcacccaggttggagtgcagtgaygtgatctcagctcactgcaacctctgcctcccaggtttaag

SEQ ID NO: 553657 - DNA, 559 bp, Homo sapiens
ggtccaaaggctccaacagggccctccagactcaatggcagggtggtgtctgcacaagctggaagtgtccttgtgatgagcccatcaggagcggcccggattgagcatccccctccacatctgcagcacagagtcccggcgggtggtgtagggtaaatgtttgattcggaacaagtgtctggggacgatgttcccgctgggtgtatacagcttctccccstctttgcccaagagactgcgcagggccaggttgcccgacagaagcttctcatagaactccactccaccacaggcataggctgcagagagggaggccgtgcggcggtccagccaggactccacggcatgagtgagagaatcctgggagaaggcgtaggccacaaagcctgccactgctgccaccaagctgaaggcagcccgtaaattcatggggcctgcatggagccccagggtgtacttggcacccacgcccagtgcccaggtccctgccaggcaagctggggccagcagggcgtgcacggcagtggtactgctttccaggtacaccacttccctggcc

SEQ ID NO: 553658 - DNA, 534 bp, Homo sapiens
tttccttcacagccctagagtatcaactttgatgttcattaaaagtttaatacagttaaatctttacctggactctttattctctaattaatttgctacatttattgatttggttatttttatgccaatatgtgtttttaatttctggtgcattctgataagtattgatatttggtaatgtgatttcttaattaaatttgcattctaccaatgcaatcaatgtagtcttttattttcatttaatttttttgaaatttttttcaataatatgatatttagcagatttgtacttctttatttagcttcattcccatgtatataatattttttggagctagtatgaataacacctgttgaaaaattttgttttctaaatattttttgctgatatagagaattaaaattaatttatatatattaaacttayacaagcagaagttttaatggtaaatttcactcattaattgctaacctcacttattaaatgaatttatttttgtatctattattttacattttctaagtgcataatct

SEQ ID NO: 553659 - DNA, 839 bp, Homo sapiens
ataaatgctaaaataggtagccacccctctatgttattttcagaatgtttctgtgttttcccatttatttaattttttaaataaattttaactcttgtttgatttcaaacaaattattgttatttgatatactcataagtaatttttaaagtatgattaatatttaatttttatttcagggcttttttttccagtttcattatcagtgttgactaatttacaaaaattatggtagatttctttttttcatgctctcaaaataatattctatactttaacttttttctctaatttttaattataatttatctattaaatgttttttaaataagagttttctgtaggtatatgaattcttttaaaaaccaatttattattaataataattagttttctcatattttctatgttttgtaaaaaaactttggtagtttttttttcatagaatactaacttcatccaattccacagaattaaaaaaaaaattgttacattctgctttgaactttatttataatttcatcagcttatgtgttgcctttggttattacatttttctattttataaaataacagaagtttttatatttaaattttatatttcatttttgactatgttagctaatggtctaattgtgtagttttaaaaatgtgtttattaaagaaccagcaaatacatgyatttataacgtatttcttagttctatggattaacttgctttctatttcatcaatttttaatttaatatttactaacttttcatctttctttttttcaggcttcctttgatatattttatatatactttctttctgaaactcttacaatgtatgcttaa

SEQ ID NO: 553660 - DNA, 592 bp, Homo sapiens
tgaggataaaaatgactatccaaaaaattatgaagctatatgatctttgaatctgaacaggaaatgacaaatacaatgcagcttttaaatataaacatggagagtctgaaatcaggctttccaagtatatccctcacaacttggtttacaatttaatttttttcagaaatttatttcctagtgttacaggtggatagttttaaactsaattatattcaaacgcttagggtctattgattactaatagttttcactaatcaaagcaagaattgtttctactactattactaaggttagtattaacccaaagcaagcaactgtcagatatttactgggagcatttgaatgaactaaaaagaatgaaaagatcaaggagtctactcctgaaaatcagtttcaggtgtatttaacacacagatacatttccataaatctaaaggccccatcgcttgcctcatgtaagtcagaatcacttctacactgttaacgagtaactacaatttccttgcaatcacaaatcctgctgatagaaagccaccactgtgacatcacatagctgtgcggtcccaggttttcaaaactgagttggtac

SEQ ID NO: 553661 - DNA, 630 bp, Homo sapiens
tttacatacttactttttgattttggtacatagtacacttagccactccttaaagaaaattttcaaacatctcatagtgggagtatggagggacggcacacagtggaagagaatccaaaacaaaatagctcttttagcataaattattttttgactagagtaataagggggcatgttgtgtatttaagaatctagtaattttgcattctcttctttgtcatccagwttcattcattcattcagccaagttcattcactcattcattcatttactcaaaaaatatgtgttgtgttgagtacctactatgtaccagatgttcacctagatattggcaagaaatctgagaacaaatggagcttgcattctaaggaattaatcagacaattgttcagaaatatttagaagattgaaaatataacctaccaataaaatacacattttactaacttatgattaaaaacaccacctatcacttacgaatgttcttcaagtggatgaagtgactacctacagcaaatgaatgagtagtgtgttctctgtatgtcatggcagtcagatgagtgtaggttaattctcgtttctaatttacactgttattggagatttatggaaacagttttgcaggaaat

SEQ ID NO: 553662 - DNA, 630 bp, Homo sapiens
tttacatacttactttttgattttggtacatagtacacttagccactccttaaagaaaattttcaaacatctcatagtgggagtatggagggacggcacacagtggaagagaatccaaaacaaaatagctcttttagcataaattattttttgactagagtaataagggggcatgttgtgtatttaagaatctagtaattttgcattctcttctttgtcatccagtttcattcattcattcagccaagttcattcactcattcattcatttactcaaaaaatatgtgttgtgttgagtacctactatgtaccagatgttcacctagatattggcaagaaatctgagaacaaatggagcttgcattctaaggaattaatcagacaattgttcagaaatatttagaagaytgaaaatataacctaccaataaaatacacattttactaacttatgattaaaaacaccacctatcacttacgaatgttcttcaagtggatgaagtgactacctacagcaaatgaatgagtagtgtgttctctgtatgtcatggcagtcagatgagtgtaggttaattctcgtttctaatttacactgttattggagatttatggaaacagttttgcaggaaat

SEQ ID NO: 553663 - DNA, 630 bp, Homo sapiens
tttacatacttactttttgattttggtacatagtacacttagccactccttaaagaaaattttcaaacatctcatagtgggagtatggagggacggcacacagtggaagagaatccaaaacaaaatagctcttttagcataaattattttttgactagagtaataagggggcatgttgtgtatttaagaatctagtaattttgcattctcttctttgtcatccagtttcattcattcattcagccaagttcattcactcattcattcatttactcaaaaaatatgtgttgtgttgagtacctactatgtaccagatgttcacctagatattggcaagaaatctgagaacaaatggagcttgcattctaaggaattaatcagacaattgttcagaaatatttagaagattgaaaatataacctaccaataaaatacacattttactracttatgattaaaaacaccacctatcacttacgaatgttcttcaagtggatgaagtgactacctacagcaaatgaatgagtagtgtgttctctgtatgtcatggcagtcagatgagtgtaggttaattctcgtttctaatttacactgttattggagatttatggaaacagttttgcaggaaat

SEQ ID NO: 553664 - DNA, 822 bp, Homo sapiens
tttaaataagcggctgctgatttgaagtccacctggggagtccgagttctaggaccggtccttggccctgccacacgccaatacaaccatcaaagtcaaaatcccttaacycaaatttaaatacattcctaaagcagaaagcatcccgataggaaaatcctacagctcacagcaagcagcagggaaacatttatctctggcggcactgatttaagcttaaaagatttggtatcgtttaaaaaaaaaaaaaagctgggtggggccgaggagaatccacccaaactttcctcaggaagtaggatgtttactgagtaaatatgcggtagtcacagaaacacctgctactcctttaagacctcaggagccaccaccgccacctcctggccacatccgggcacttctctgcaaactcctggcgtcccgacgcccgagtcgttgggcttatttgaaacacacgcacaaccaatcaagcggcgcctgccgggacttggagagcgtcgaccaatcaccgcccctctggagactcctgcctatgggaaagaggttgacatcacgcgccaatcggcatggctcttagagagagcagcttagtttttgaatcggttgtggcggccgccggcgaggaatggcggtatttgtgagaggagtcggcgtttgaagaggtggaactcctagggcttttttgagagtggtaaggactctgtgtgagtgagagaggtgcaagtgggcgagcggctccagagccaagggctcttttgcctgcggtcgacgtccccgcccctagtgaccgcgaattccggagcgccccagctcaggcttccc

SEQ ID NO: 553665 - DNA, 611 bp, Homo sapiens
ttttgattttataggctcataggcagaagggacttgccttgtctcagatgagactttgaagtgtggacttctgagtcactgctgaaatgagttaaawctttggggaactgctgggaaggcatgattggttttgaaatgtgaggacatgagatttgaggggccaggggtggaatgacaataatctgactctgtgtccccacccaaatctcatcttaaattgtactcccacaattcccacatgttgtgggagggatccagtgggagataattgaattgtggaggtggtttcccccatactgttcttgtggtagtgaataagtctcatgagatctgtgtttttatcaggagcttccgctttggagtcctctcctcattctctctttgcctgctgccatccatgtaagacgggacttactcctccttgccttccaccatgattgtgaggcttccccagccacacagaactgtaagtccaattaaacctctttcttttgtaaattgccagtctccagtacgtctttatcagcagcatgaaaatggactaatacacctccccaccaaagccagagaatttgtttgtgagaaagtctatcctttatggaagcaaaagc

SEQ ID NO: 553666 - DNA, 512 bp, Homo sapiens
ttttttwaaaaaaccaaataacataaagtagacctatatgtgctaacatagaattccatgacatactgttgtataaaaagtctctagtagtggcctggcgccatggatcacacctgtaatcccaatactttgggaggctgaggtgggcagatagcgtgagccttgaagttcgagaccagcctggacaatatacagagacactgtctctacaaaaatactaaaattagcccggcatggtggcatgcgcctctaacccaagctactcaggaggctgaggtgggaggatcacctgagcctgggaggtcaaggttaccgtgagccaagatcctgccactgtactccagccttggtgacagagcaagaccctgtctcaaaaaaaaaaaatcaccaacaggtatatttagtatattatcatttatgttaattccctcttctttatgtaggttccatataaatttataggaaaggaaagcaccaagtagttagcagtagttacgtgataaggctcaagc

SEQ ID NO: 553667 - DNA, 512 bp, Homo sapiens
ttttttaaaaaaaccaaataacataaagtagacctatatgtgctaacatagaattccatgacatactgttgtataaaaagtctctagtagtggcctggcgccatggatcacacytgtaatcccaatactttgggaggctgaggtgggcagatagcgtgagccttgaagttcgagaccagcctggacaatatacagagacactgtctctacaaaaatactaaaattagcccggcatggtggcatgcgcctctaacccaagctactcaggaggctgaggtgggaggatcacctgagcctgggaggtcaaggttaccgtgagccaagatcctgccactgtactccagccttggtgacagagcaagaccctgtctcaaaaaaaaaaaatcaccaacaggtatatttagtatattatcatttatgttaattccctcttctttatgtaggttccatataaatttataggaaaggaaagcaccaagtagttagcagtagttacgtgataaggctcaagc

SEQ ID NO: 553668 - DNA, 512 bp, Homo sapiens
ttttttaaaaaaaccaaataacataaagtagacctatatgtgctaacatagaattccatgacatactgttgtataaaaagtctctagtagtggcctggcgccatggatcacacctgtaatcccaatactttgggaggctgaggtgggcagatagcgtgagccttgaagttcgagaccagcctggacaatatacagagacactgtctctacaaaaatactaaaattagcccggcatggtggcatgcgcctctaacccaagctactcaggaggctgaggtgggaggatcacctgagcctgggaggtcaaggttacmgtgagccaagatcctgccactgtactccagccttggtgacagagcaagaccctgtctcaaaaaaaaaaaatcaccaacaggtatatttagtatattatcatttatgttaattccctcttctttatgtaggttccatataaatttataggaaaggaaagcaccaagtagttagcagtagttacgtgataaggctcaagc

SEQ ID NO: 553669 - DNA, 512 bp, Homo sapiens
ttttttaaaaaaaccaaataacataaagtagacctatatgtgctaacatagaattccatgacatactgttgtataaaaagtctctagtagtggcctggcgccatggatcacacctgtaatcccaatactttgggaggctgaggtgggcagatagcgtgagccttgaagttcgagaccagcctggacaatatacagagacactgtctctacaaaaatactaaaattagcccggcatggtggcatgcgcctctaacccaagctactcaggaggctgaggtgggaggatcacctgagcctgggaggtcaaggttaccgtgagccaagatcctgccactgtactccagccttggtgacagagcaagaccctgtctcaaaaaaaaaaaatcaccaacaggtatatttagtatattatyatttatgttaattccctcttctttatgtaggttccatataaatttataggaaaggaaagcaccaagtagttagcagtagttacgtgataaggctcaagc

SEQ ID NO: 553670 - DNA, 661 bp, Homo sapiens
ttgacagagccttgctccgtcccccatgctggagtgcagtggcacgatgctcggctcactgcaacctccacctcccgggttcaagcgattctcctgcctcaggctcccgagtagctgggattacaggcgcgcgccaccatgcccagctaattttttgtatttttggtagagacrgcatttcaccatgttggccaggctggtctcgaactcctgaccttaggtgatctgcctgcctcggcttcccaaagtgttaggattacaggcgtcacgactgtgcctggcccagatgtctctaattctaacatgagatgtattgcaggatcatagcagagtgagttgctgatgtatccagaaggaaacgagcatggaacactcacgacagctgtcctgagaagtgtgtgtgtgctgtgcttgaatatctcactgctcatttatacacaggctttctggtgactgagttaacagtatctgtttcataaataatgtagccctctttctttctttctctctctctctctcttttttttttttttttttttttttgagacagggtcttgctctgctacccaggctggagtgcaatggtgcagtctcagctcactgcaacttcaccatgcctggctaattttttcttttttttttttttgagacggagtttcgc

SEQ ID NO: 553671 - DNA, 661 bp, Homo sapiens
ttgacagagccttgctccgtcccccatgctggagtgcagtggcacgatgctcggctcactgcaacctccacctcccgggttcaagcgattctcctgcctcaggctcccgagtagctgggattacaggcgcgcgccaccatgcccagctaattttttgtatttttggtagagacggcatttcaccatgttggccaggctggtctcgaactcctgaccttaggtgatstgcctgcctcggcttcccaaagtgttaggattacaggcgtcacgactgtgcctggcccagatgtctctaattctaacatgagatgtattgcaggatcatagcagagtgagttgctgatgtatccagaaggaaacgagcatggaacactcacgacagctgtcctgagaagtgtgtgtgtgctgtgcttgaatatctcactgctcatttatacacaggctttctggtgactgagttaacagtatctgtttcataaataatgtagccctctttctttctttctctctctctctctcttttttttttttttttttttttttgagacagggtcttgctctgctacccaggctggagtgcaatggtgcagtctcagctcactgcaacttcaccatgcctggctaattttttcttttttttttttttgagacggagtttcgc

SEQ ID NO: 553672 - DNA, 573 bp, Homo sapiens
tgaatatatacatttttatttgcagttatatttcartaaaactagaaaaaaatcaagagtaacctgggtagtaataatggatttcagttctatgtatcaatctaaattcatgcttagcttaatatagatacagatatgtatagatacctatgtatgcatgggctagtaaatgcacatatagtttttctctgaagctgagaaggcctaaagaagtagcaacaaaaactcattaggtcccagaacttggtttcttttttttttcttttttttttttttttgagacggaatcttgctctgttgctcaggcaggagtccaatggcacaatcttgactcactgcaacctccgcctcccgggttcaggcgattctcccgtctcagcctcccaagtagctgggattacaggcaagcaccaaccatttccaacaaaaggaataagggatcctcaaagaaatggctagtttaagcctgggggaggaaatatacaagataagcctggagcatcttgtgtcaaaaagtaaggaagagctgaaaataaaaacaaaaagccacattgctatagacactgtgagaca

SEQ ID NO: 553673 - DNA, 550 bp, Homo sapiens
tgactaagttctttaatggtgatttgtaagatcctggtgtacccatcacctgagcagtatacactgcaccatatatgttgtcttttatccctcgaccccctcccactcttcctctcaagtcctcaaagtccattctatcattcttatgcctttgtgtcctcatagcttagctcccacatatcagtgagaacatacaatgtttggttttccattcctgagttaaagaagcagtgtcttttgcagaagagtcagcatatcacttgagcatatcatttgtttttccttctcccaaagggaaaaaacatcctaaagaaatggatattttctcaaccattttgatcaataattgggtaacttactgcatgttaagagctctgtaagaaaatatattcttcccgtttgatagtgtggttgccaaggagagctgttcatatctccctttaagagagaacttgctattctgctacagagtgtgggaaattgacacccttcctctacartattttctggattctcctcagcttttgttcaggctgaggacacactttgt

SEQ ID NO: 553674 - DNA, 1085 bp, Homo sapiens
  misc_feature 20, 21, 22, 23, 24, 25, 26, 27, 28, 29, 30, 31, 32, 33, 34,35, 36, 37, 38, 39, 40, 41, 42, 43, 44, 45, 46, 47, 48,49, 50, 51, 52, 53, 54, 55, 56, 57, 58, 59, 60, 61, 62,63, 64, 65, 66, 67, 68, 69, 70, 71, 72, 73, 74, 75, 76,77: n = A,T,C or G
  misc_feature 78, 79, 80, 81, 82, 83, 84, 85, 86, 87, 88, 89, 90, 91, 92,93, 94, 95, 96, 97, 98, 99, 100, 101, 102, 103, 104, 105,106, 107, 108, 109, 110, 111, 112, 113, 114, 115, 116, 117,118, 119: n = A,T,C or G
ttcttcttattgttattctnnnnnnnnnnnnnnnnnnnnnnnnnnnnnnnnnnnnnnnnnnnnnnnnnnnnnnnnnnnnnnnnnnnnnnnnnnnnnnnnnnnnnnnnnnnnnnnnnnnnctaccaaatatgattaggaagaatgatagtatcggcttgcgagtttaatcacatacaaaccatccattaggcatccagattcagagctttttgtggtactcagtcttctcaataacacctctagattttcacgtacatcctcctccttccttctcaccccattctgatataaaatcacctaatagggtgagaaactacacatgtgcacgtgtgctcgacacacacacacacacacacacacaccccttaacaactaaatagaaaatatgatactaatgaaatctttctttgcaagaatttcctttggcaacttctcttcctcctagtggccaagtcaagtaacacctatggtgaccatatcttctaaatcaaaacctaggatgtgtgattcaacaagatagaatatttyagtagaaaaacataaacctctagtgggttgcggcaaagaggcagttcaaatttttgtgctacttccaaatgtgtgactctgtattttaagggtgtcaaaaagttattatttctaaaatattccaaaaatttagaagaccaataaaaaatatttgaaaactgggttgcctgaagatacatggctcctagaatggtatctcaaaatcccatcacctgctatttgtctttttatatacattagctcaggtttcaaagttctaaataggagttctgagcaaatctcccccaaatatgactctttctcagaccattctccagggttgtttttgctaactgcctactagaaattcacttagatgtctcattggctctgccagttaaaaaaacaaacaaaaacatgggatgagcatggagcaggattaactaagagctagtaggtaagtcagaattgcaggacaaatagtaagaacagaattgaggggtcccatgataaatgttttatctgcattgtctcctttcatcttcacaatatcccttaaaggtagtagtaactattta

SEQ ID NO: 553675 - DNA, 542 bp, Homo sapiens
gtagttggcaacaaatacacgctggagttggcaagtgattgaatctttcttttaataaatgtcaagatgttcagagttacttctgtagtaatatcactttcatgcatattgctctgtattctttttttttttttttgagaatggaatctcgctctctcacccaggctggagtgcagtggcgcgatctcggctcactgtaagctctgcctcccgggttcacgcyattctcctgcctcagcctccccagcagctgggactataggtgcatgctgccacacccggctaattttttgtatttttagtagagacggggtttcaccgtgttagtcaggatggtctcgatctcctgaccttgtgatctgcccgccttggcctcccaaagtgctgggattacagatgtgagccactgtgcctggcctgctctgtattcttaaggggtatcaatggttaacagttgtggcactttatttatctgaaaaatatttctgagttttgtgaaaagtgtagatactcccaggggagtgtgtggaacaaatgagcat

SEQ ID NO: 553676 - DNA, 542 bp, Homo sapiens
gtagttggcaacaaatacacgctggagttggcaagtgattgaatctttcttttaataaatgtcaagatgttcagagttacttctgtagtaatatcactttcatgcatattgctctgtattctttttttttttttttgagaatggaatctcgctctctcacccaggctggagtgcagtggcgcgatctcggctcactgtaagctctgcctcccgggttcacgccattctcctgcctcagcctccccagcagctgggactataggtgcatgctgccacacccggctaattttttgtatttttagtagagacggggtttcaccgtgttagtcaggatggtctcsatctcctgaccttgtgatctgcccgccttggcctcccaaagtgctgggattacagatgtgagccactgtgcctggcctgctctgtattcttaaggggtatcaatggttaacagttgtggcactttatttatctgaaaaatatttctgagttttgtgaaaagtgtagatactcccaggggagtgtgtggaacaaatgagcat

SEQ ID NO: 553677 - DNA, 542 bp, Homo sapiens
gtagttggcaacaaatacacgctggagttggcaagtgattgaatctttcttttaataaatgtcaagatgttcagagttacttctgtagtaatatcactttcatgcatattgctctgtattctttttttttttttttgagaatggaatctcgctctctcacccaggctggagtgcagtggcgcgatctcggctcactgtaagctctgcctcccgggttcacgccattctcctgcctcagcctccccagcagctgggactataggtgcatgctgccacacccggctaattttttgtatttttagtagagacggggtttcaccgtgttagtcaggatggtctcgatctcctgaccttgtgatctgcccgccttggcctcccaaagtgctgggattrcagatgtgagccactgtgcctggcctgctctgtattcttaaggggtatcaatggttaacagttgtggcactttatttatctgaaaaatatttctgagttttgtgaaaagtgtagatactcccaggggagtgtgtggaacaaatgagcat

SEQ ID NO: 553678 - DNA, 1110 bp, Homo sapiens
ttttcaagagtgagattataattttacattctggaactatttgcaccacacaataaacctggcgactgaaataaaaatgtatccgtaatctaaagattaacatctttttgcaaaggaacccccctaatatatatatatatataaaattatttcaatctttttgggggaacaggtggttttttgttatacagccaagtttttttttttttttttttatgagacggagtcccgctgcgtcacctaggctggagtgcagtggcgcaatctcggttcactgcaagctccgcctcctggattcatgccattctcctgcctcagcctcccaagtacaagcgcccgcctgggactacagggactgcaggcgctcgccaccatgcccgggtaattttttgttttttttagtaaaaaaggggtttcaccgtgttaaccaggatgggctcgatctcctgacctcgtgatctgcccacctcggcctcccaaagtgctgggattacaggtgtgagccaccatgtcccacctacacagataagttctttagcggggatttctgagattttggttcatccatcacccaagcagtgtacagtacacccaatgtgtagtctttcattcctcaccctcctccaccctttccccggagccctcaaaatccattatatcattcttttgcctttgagtcctcatagcttatctcccacttataagtgaaaacatatgatattcagttttccattcttgagttacttctcttagaatggagtctccaactccatccaggttgctgtgaatgccattatttcattctttatgatcgaatagcattccattatatatatatgatatatacataatatacattatatatsatatatacataataatatacattatatatgacatatacataataatatacattatatatgagattatatatatcacattttctttatccactcatcggttgataggcatttaggctggtttcatatttttgtaattgtgaattgtgctgctataaacatgtgtgtgcatgtgtctttttcatataatgacttctgttgtggggaactgttaaaaatttaacttcttaaaaaacatcggttccta

SEQ ID NO: 553679 - DNA, 601 bp, Homo sapiens
agttttgttttgtttctttaagacagtcttgctttgtcacccaggctggagtgcagtggcatgatccagacggagtgcaacctccatctcccgagttcaagcgattctcctgcctcagcctcctgagtagctgggactacaggtgcgtgccaccatgyccggctaatttttttgtatttctagtagagatggggtttcaccatgttggccaggctggtcttgtactcccgacctcagatgatccacctgcctcggcctcccagagagctgggattacaggcgtgagccaccatgccaggcctgcagttttatttttaaagtaatatattacacagcccacttctcaatttgcctctccctccattcagcaaatattggttgtgagcttccatgtgctaggtatttgtaaggcactggaaatttaacaacaaacacattaagctatagtttctttcaaaaagagcttacagtctggaagacaggtaggaagtaggataaagtgttacacaaacagattcctagagtaatgaagtagctaaagggtggctaaatcaggtctgaaatacagtaaaggcttctttctagaaaaggtatcacctga

SEQ ID NO: 553680 - DNA, 498 bp, Homo sapiens
tggcctacacccaggaatgaacaagggcagcttgggaggctagaagcaagatggagttggttaggtcagatttttctcactgtcgtgatttttgcaaagatgatttcattattaaagttcttttgtaagcacaggtttttttttttggctttttttgccttatattctctgtcttttgggagaaggaaaaaatcttttttctttactctcttacattttatagttgggggcctacaaattatagcgacaaaagacagagtagcaagagaaaaaatagatttgatggtgtatatatgtacccaggaattcacaaataaatgtgactcaaatagttcraattttgggcttatatactatcttattagggggtggagagggtccttctgagagaaattcagattggatttttctttatgttggaggattgacaacccttgccttatcttggtctccttcaatgtttccacaattctagtacaagcatttccctcagaagcc

SEQ ID NO: 553681 - DNA, 567 bp, Homo sapiens
caggatatgcttaagagatggcaggaggaccaggcatggtggctcacacctgtattccagccctttgggaggccaaggcaggaggatcatttaagcccagtagttcgagactagcctgggcaacatgacaaaacccatctctacaaaaaattagccaggagtggttgtgcacgcctgtagttccagctactcaggaggctgaggtgcgaggatcgcttgagcctgggaatttgaggctgcagtcagctatgaccataccactgyactctagcctgggcaacagagtgagatcctgtcttaaaaaaaaaaaaaaaaaaaagtgatagtaattcacagccaaaaggcagtaccccaaaacgacaaccctcattattttaccctctccctaaacatactaccatcccccgcacccctgctcacacacacccactgtggggagcagcagcctgacacagtgcgatgaaccacaaatacccaatagcaggcagggcacacttgaggcttccttaccaggtcagtggccctggcaagcacacggcaacacccacagcaggcactcgcgggcca

SEQ ID NO: 553682 - DNA, 507 bp, Homo sapiens
tgccactgtactccagcccgggtgacagagtgagactccctctccaaaaaaaaaaaaaaggattaaaatgcataagaaaggaaaaggccagtaaagaaaacactatgcaacagtaaagaaaactgtaggccaagcacagtggctcacgcctgttcccaacactttgggaggccaaggcaggaggattgcttgagcccatgagtttgaaaccagcytgggtaatatagtctgtatctcttcaacaaaatttacaaattagcctggtgtggtggcgcacacctgtagttccagctacttgagaggctgataggaggttttcttgagcccagaggttgaggctgcagtgagctgtgattacaccatttccagcctgggtgaccaaaaaaccaaaacaaaaactacacagaaaagagttgaagaaaaaccttcaacttggagcactttatagagatctgaggagaagaccctcaccagagtactgggactgctggttgttgagaaggagtt

SEQ ID NO: 553683 - DNA, 641 bp, Homo sapiens
tatccctgtataccttaaaccatctctagatttcttataatacctaatacagttaaaagtgatgtaaacaattgttatagtgtattatttaaggaataatgacaaggaaatatgtctgtacatgttcagtgcaaatacaattttttcctccaaatattttcaatgcrtagttggtcaaatccacagatgcagagggctgactgtgtgtgtgtgtgtgtgtgtgtgtgtgtgtatgtgtgtgtacttataatctctgcaaaattacacacaagtaagagtgattgcctccagaaatgaaaactaagtgcccatgagagagggacataccattttaacattttggattgtatactgtatacatataacctatttaaatatcaatatgtcattaattacaaaatagttatttaaaaagcttagtaaatttagtgttgatagctcatgacatgtcattcaagtactctgagatatttagaaatgtaccttatatattttaatattaactgacagaagacaaactggattgtctctgtcagagaagaaacactgaagtggatgaatttttgagctaattgtcatggctttccttatattctagtttttacttgaacagaggcggacatgacaggaatggttagagg

SEQ ID NO: 553684 - DNA, 645 bp, Homo sapiens
gatatttgaggccatctcaatctttttcctttcaccctatacctgactctcccaggctaggctcagatcgtcactgaatgtgctcacttcgaggcacctctgtgatctttcaaggttcctgggcccaccttttactaccgatgtgactgccacatgttgcccagttgctaggatgggaccgtggccttgatttctgccgggactgaggctttgccttgtttcccacccaccctgctgcctgcccctgcactcttctggctggggcctgatctttccccgcagtctcccttcacctctagatcacaggcagtcatgccacagctgaggagcttgtcccaaacctcagtgcctgcctccctcctcggcttcttgtgctgctgtgtctcacccatcagtgaygctcttctcttccctgcccaagccctagctgactccataacacctggatacaatgtcctcttctgtctggttacctccgagaggccctctctctacatccctcattggctcccagtgtcattcctctcacccatggccctaaggtcactgtattctttggccagtgtacagggttattatgcttaacaatccacaaaggttgaaaggtgttgtaggatggtgtaaaaatgaatctgggtggtaatg

SEQ ID NO: 553685 - DNA, 987 bp, Homo sapiens
tacaggcttcagccactgtgcctggcctctatctttcttttaatattatcttttccaacattacattcttatatcagatcaaaccacagaaattatgagaatagattttcaaaactgtaacaaataagctataaaatgttcgatgtaaatgtaaaaaaatgtattacagttgtgttaaatctgggagacttacactctctccatagaaatatgcagctcacgtttctttaatttcactcttctattcaaattccagtcctcactgaggcagggttcttgaagaaccttctgcctcaaactggagtgcaatcttttcctcctattatcacttcattaaaatctaatgaggtgaggagggaaaaggggtcatgcgacagcctttacawctattccaaatacattgttggaagcagtgcttaaaaacaagcataaagataggcttgcaaaataaagttattgtctaaacttctttaaagcagttaaaatttgtggtgaaatttgagtttcattctttgtatgtcacctcattttccttctgacttcatcgaactgctctaacagagggctccagtttgtatctgaatcaaaccctccacactgttggtgtagaccagttggattagatcaactgaagtcccatctagataaagttgccctgagagacatgaaagggctacacagagaagtcaggtaaatcctgaatggagtcttctgtgtggaataaattaactacaaaaggccccaagtggcttctcctatcttccaagaattaataacgtttcattgttatttgaataaacttatgagattttttttttaatgacagaataaatgttgcatatacactacataattccttccatcctgacaggaaatggccttcagttttctctggggaactgtgcaaacatctggataatcttgaaatcttttaatatgaaaaaagtggtaattacccccaaacttattacttcccacatttatttc

SEQ ID NO: 553686 - DNA, 987 bp, Homo sapiens
tacaggcttcagccactgtgcctggcctctatctttcttttaatattatcttttccaacattacattcttatatcagatcaaaccacagaaattatgagaatagattttcaaaactgtaacaaataagctataaaatgttcgatgtaaatgtaaaaaaatgtattacagttgtgttaaatctgggagacttacactctctccatagaaatatgcagctcacgtttctttaatttcactcttctattcaaattccagtcctcactgaggcagggttcttgaagaaccttctgcctcaaactggagtgcaatcttttcctcctattatcacttcattaaaatctaatgaggtgaggagggaaaaggggtcatgcgacagcctttacaactattccaaatacattgttggaagcagtgcttaaaaacaagcataaagataggcttgcaaaataaagttattgtctaaacttctttaaagcagttaaaatttgtggtgaaatttgagtttcattctttgtatgtcacctyattttccttctgacttcatcgaactgctctaacagagggctccagtttgtatctgaatcaaaccctccacactgttggtgtagaccagttggattagatcaactgaagtcccatctagataaagttgccctgagagacatgaaagggctacacagagaagtcaggtaaatcctgaatggagtcttctgtgtggaataaattaactacaaaaggccccaagtggcttctcctatcttccaagaattaataacgtttcattgttatttgaataaacttatgagattttttttttaatgacagaataaatgttgcatatacactacataattccttccatcctgacaggaaatggccttcagttttctctggggaactgtgcaaacatctggataatcttgaaatcttttaatatgaaaaaagtggtaattacccccaaacttattacttcccacatttatttc

SEQ ID NO: 553687 - DNA, 987 bp, Homo sapiens
tacaggcttcagccactgtgcctggcctctatctttcttttaatattatcttttccaacattacattcttatatcagatcaaaccacagaaattatgagaatagattttcaaaactgtaacaaataagctataaaatgttcgatgtaaatgtaaaaaaatgtattacagttgtgttaaatctgggagacttacactctctccatagaaatatgcagctcacgtttctttaatttcactcttctattcaaattccagtcctcactgaggcagggttcttgaagaaccttctgcctcaaactggagtgcaatcttttcctcctattatcacttcattaaaatctaatgaggtgaggagggaaaaggggtcatgcgacagcctttacaactattccaaatacattgttggaagcagtgcttaaaaacaagcataaagataggcttgcaaaataaagttattgtctaaacttctttaaagcagttaaaatttgtggtgaaatttgagtttcattctttgtatgtcacctcattttccttctgacttcatcgaactgctctaacagagggctccagtttgyatctgaatcaaaccctccacactgttggtgtagaccagttggattagatcaactgaagtcccatctagataaagttgccctgagagacatgaaagggctacacagagaagtcaggtaaatcctgaatggagtcttctgtgtggaataaattaactacaaaaggccccaagtggcttctcctatcttccaagaattaataacgtttcattgttatttgaataaacttatgagattttttttttaatgacagaataaatgttgcatatacactacataattccttccatcctgacaggaaatggccttcagttttctctggggaactgtgcaaacatctggataatcttgaaatcttttaatatgaaaaaagtggtaattacccccaaacttattacttcccacatttatttc

SEQ ID NO: 553688 - DNA, 1537 bp, Homo sapiens
tcgccagcgcggcagaggacgcggatcaggcctccccscaacccggcgtccctctacagtccggccgagtccacgcagcaagctgtactggaggacggccctgcacggctcgcagaagcccgcggagcccgtcgagaggccccgtgttcgtccacgctgggcggcgcgccttccgggagcgcagagagaagcgcaggcagagcggcggccgcaagacccgccttggagctccacgagccggtgctgcacacggcagaatcccctcgacgtgggcccgcagagccggggacagagagagtctgagctctgttaacagtggtgctgacttggaaggtgcctcgtgtgcgttgggcctacaggccacgtctcctcccacccctgcgctgtgccgtcctgcacgcggggatgcgggtccctgcgaccatctcccctcccctcctggccccactgcagccacaccaggcagcggagcccgacccctctgcgggcccgcgcggcccagtggctgctcagactaaggagcacagcaactatcgggcagctctgcctccttcttccacgggttattggggaggcgacagggcagcccccagaggagcgccccagccgggccttcttatcctgccccgggccgctgtgctctcggcccgtgatggccatagatttgccttgtggtgttggatcaggaactgtgtctgctcttaagtgcttgtgtgatccagaatgttttgttttttaaggaaattggtcttttcagttgggtgttgagtggttttccagatcacgtctgatggatcctcggattataacagagaacatggcggcccagagggaatggacccagatggtgtcatctagagcaactgggatgagattgttgataactttgatgatatgaacttaaaggagtctcttcttcgggccatctatgcttatggttttgagaagccttcagctattcgacagagggctattattttctgcattaaagatccaaaaagtaattccggcacctggagactatatgggagcctgcattgtcttgcttgcattggtggaacaaatgttcgaaatgaaacgcaaaaactgcaggccgaagcatcacatactgctgttggtacaccagggagagtgtttgctttgttaaacagaagatattttctccagaatggatcaaaacctttgttttggttgaagcagatgaaatattgacccaagggtttaagaatcaaataatgagattttccaaaaattaaatacaagtattcaggttgtgttgctttctgccacagtgccaactgatatgttggaagtgaccaaaaaattcatgggagatccaatttgaattctggtgaaaaaggaagaattgaaccttgaaggaatccgttttatattaatattgagagagtaatggaagttggatacactttgtgacttgtacgagacactgaccattacacaggctgttatttttctcaatacaaagcacactgtcaactgactgagaaaatgcatgccgcggacctcacagtttctg

SEQ ID NO: 553689 - DNA, 657 bp, Homo sapiens
aaattacccagctatgggtatttcttcatagcagtgtaaaaatgaactagtacagttttgctttcaaaaatactggcagggtacactgtagcatcagttacaggtttttttttttcccaaaggcatcttgtgataatttggcattttttgtttatattcatcatccaactagtaccaattacatcacataatcctttggggaaaaaacacacactttaacacaaagcaaaggccatagaaaatatatttgactatttttttttccttctgaataccatgtttcatgttcttctagttcataatttcttcctcagctgtwttgtttactatttaactttttggcataaaaatatattgatgagagaaagaaattaaggtctaatttatgaaaatagacttcttgtacttcaggaaattcatgtggcgctatttggaaaaggtgatgaatgtgattttcagtagagtatctgcataaattatgattgatttgcaattcatcaccttcctttattgttcctcctcagtgcagagaccttatctgtgcattatcaaggagggaatatttttagttagtgattatttggcagaagtgctaataatgatggggaaatttttaagaaaatatttccaaactgggagtttctgcattttcaaaaa

SEQ ID NO: 553690 - DNA, 635 bp, Homo sapiens
atattgataaaaacctctcctaatttctcatttttagttgtcgtattctatagtgaactagaatagrcttgccaaagttgaatctattttattggtcatttccaagaaccagctttcatttttatggtttaagtcttctttattaatttctacttttatttttattaattccttcattgtatttatcttctttgactctgtaatcttcttggtatcttaattcacgtatttatttctccttctttcagtttttcttattttctaactcatgtattaaaatgtatttaatgtatataacgaatttaaagtttactctttcttctgaatagattttcagctgttaaatagcaaaattatcctaccaattacatctgttttagtatttgcacacagcctgagagttccatataaatagaacatttcaaagcattcaatttatttttatatttggtcttctagttttatgctttctatacttagtgtatttcttttacattatgtttaatttttcttttgtgattttaaaagtaaatattctgttttcattttgtgttaatttttttattttaaaatactgaacctgtgtccacagttatatcagtaatttcagagcatatcctgacctcttgtatgtg

SEQ ID NO: 553691 - DNA, 635 bp, Homo sapiens
atattgataaaaacctctcctaatttctcatttttagttgtcgtattctatagtgaactagaataggcttgccaaagttgaatctattttattggtcatttccaagaaccagctttcatttttatggtttaagtcttctttattaatttctacttttatttttattaattccttcattgtatttatcttctttgactctgtaatcttcttggtatcttaattcacgtatttatttctccttctttcagtttttcttattttctaactcatgtattmaaatgtatttaatgtatataacgaatttaaagtttactctttcttctgaatagattttcagctgttaaatagcaaaattatcctaccaattacatctgttttagtatttgcacacagcctgagagttccatataaatagaacatttcaaagcattcaatttatttttatatttggtcttctagttttatgctttctatacttagtgtatttcttttacattatgtttaatttttcttttgtgattttaaaagtaaatattctgttttcattttgtgttaatttttttattttaaaatactgaacctgtgtccacagttatatcagtaatttcagagcatatcctgacctcttgtatgtg

SEQ ID NO: 553692 - DNA, 560 bp, Homo sapiens
ggccaaggtggggagatcacttaagcccaggaatttaagaccagcctgcgcaacatggcagaaccctgtatctacaaaaaatttacaggcttggtggtgcacatgcagtctcagctaccggggaggcaaaagtgggaggatctattgagcctggagatcgcggctgcagcgagccatgatcacgccactgcacttcagcctgggctacagagtgagaccttctttcaagataacaaacgaacaaaaaatttcgttcttcttargaaggtatttaagcttaacttcaaactatttcttaaaagtaggcagaagtaaaatttcacatattttaatatgttgaattttcattatcgttcaattcaaaatatttaaaagtttctattttgtaatcagttaatattgttaatgaaataaagaccacagttcaatattatatatattcgcaaattaaacaagtcaattgtaatataataaaatgagaaaaaataaaactaatattaggccacatatttaccttttttggtgtctatattctttcctgcacatctgagtttctatct

SEQ ID NO: 553693 - DNA, 560 bp, Homo sapiens
tcagggtctggcaggggtttaaagctgactttttctctcctgggactcttcttgggtggttctctagaggctgtccctggaacatttggctgcatttcctgtgatgtgggtgaaagtagtgattcgacaggttggtcaattctctctctggtttttcagaagtttgcgccatagactcttgtcttctgatgtcccctcattctttcttgtggttccctggggcaggatttaaaatggcaatctggctctccactgagagggctcagtgagccttaaaaacacttacacatcctttgctctgacgctgtaggagcacaggccacctgcccttcactcccttgtctttatcctgcttctgcatgtaatgccagcctgaagtctctggcttcaggactttccaaatgggagtcaggcaccaatccactcacttgatgtaaagggagaagggccctccactactcccctgaggtgggcagagaracaatcacagaatcatattctgcaggtacatgtaccacaaattcttctccttttaaaaacaatttgcttcctttatgctc

SEQ ID NO: 553694 - DNA, 640 bp, Homo sapiens
agagcttgttttgtttgtggagaagagtttgaagaagagggtgggggacaccccactccttgatggcctgggtgttgggttcttgggggctggcaacccggcgtttggcggctggtggagcttctcttgggcttcactcacaactcacatgaaaactgctgaatttgctgttgccctttgtacaaaggagtcttgccctgttactgggtttctcaaagttgtgtaaaggtcagtaaggtgtgagggcggtggggctcctgtcagtactttcgtcattaaccatcatctcaaataaccacgtcatttccaagggtcgtagtagcagctattttgaatgtatggtttggggtctttttcttttttttcctagctagctcctagattttgccagttaatctgccaagcacctgtgtgtgttgtacctaatgatctcatgagggcaggctctgttaggcaacctctttattagttgaggaaagagaagtgaggggatttygcccaaaactacacggctggcaagtggcaggctcaggatttgcttgtttggctccaaagcccacgttcccttccccttggcccgccctgttttctctgcgtgtaaccagcactttctgcagatgccacccaaggaccgtgcagg

SEQ ID NO: 553695 - DNA, 1033 bp, Homo sapiens
agatagaacagtttggttgattagtttgccagagaaatggagccattgactgtttctactttgtcttcttaaacttttatattttttagattttcatttcccttttaaaataaaaataaatcatcagaagmaacaaagtgatctcttatttttcctggttactggagaaaattacacttcccccaaatgggagtagcattaacaagcatatatcctgtgaactgattccttccattctttagagactttggtttagcgctctgaactttctgattatcagatcttatgtgtttgctaatacataaaataacaaattagacataatgccctataattttctcagtttgattaattgcctgaaatttgatctatcagttagtgtttgattagaatagagaaatcacatgtaatttgaacaaggaaagattaatacgaagaactgctagctataacagggttttggagcaatgaggattggctagtaaaaagtgaagagaactctaaggaatataagaataacagataaaaggagcatcaacccctggggttgagatagaacatccagggcctctgggattaagatccagaccctgtttgagggggcatggctgtggctcactgaatgaagagaagttgctgtggtagaaatctgtctcatcggaatcactctgctataatactgccttgtggaggtactggtggaagatactgggtgctgctgactgctgtgcacttcaggagcctgacaatggagcaaactgcacgggttctggatctggacactggagaagctgtgttgcagtacagaagcctgccaagaggagcacacaagactcttggaaagaagaggaaaatctcctcttacaatgtcgatctaacatcatgccaactagcaaaggaaaaatgtttaaagggtccaagttcatttttgcagagcagacaggaaaggatgaattcagagctgagagacaataagtggacaactggcacatttggtcaaacttgtaattttatatcttagatggacaaattt

SEQ ID NO: 553696 - DNA, 1033 bp, Homo sapiens
agatagaacagtttggttgattagtttgccagagaaatggagccattgactgtttctactttgtcttcttaaacttttatattttttagattttcatttcccttttaaaataaaaataaatcatcagaagcaacaaagtgatctcttatttttcctggttactggagaaaattacacttcccccaaatgggagtagcattaacaagcatatatcctgtgaactgattccttccattctttagagactttggtttagcgctctgaactttctgattatcagatcttatgtgtttgctaatacataaaataacaaattagacataatgccctataattttctcagtttgattaattgcctgaaatttgatctatcagttagtgtttgattagaatagagaaatcacatgtaatttgaacaaggaaagattaatacgaagaactgctagctataacagggttttggagcaatgaggattggctagtaaaaagtgaagagaactctaaggaatataagaataacagataaaaggagcatcaacccctggggttgagatagaacatccagggcctctgggattaagatccagaccctgtttgagggggcatggctgtggctcactgaatgaagagaagttgctgtggtagaaatctgtctcatcrgaatcactctgctataatactgccttgtggaggtactggtggaagatactgggtgctgctgactgctgtgcacttcaggagcctgacaatggagcaaactgcacgggttctggatctggacactggagaagctgtgttgcagtacagaagcctgccaagaggagcacacaagactcttggaaagaagaggaaaatctcctcttacaatgtcgatctaacatcatgccaactagcaaaggaaaaatgtttaaagggtccaagttcatttttgcagagcagacaggaaaggatgaattcagagctgagagacaataagtggacaactggcacatttggtcaaacttgtaattttatatcttagatggacaaattt

SEQ ID NO: 553697 - DNA, 605 bp, Homo sapiens
ttaacttcaggaaatttagttaagaaaaaaacaaagtgtagaaatcaattttaattattttgtgttagtataggattttgtccataacacctgtatgaaaagaaatgaataaacaaatgttggttataagatgaagttcaaatggtaaaagattactgtagggattttttattttgcctaacttaaaaattaaagttatattcacaccaatttatctaactgctatgttcatcatcttcaacatattctctcataatgatttacccaatctctgattagccaaacttgctatggctagactagaacacagagacacaaccaattaatgaaacataatataaatgattacttaayttaaatcaaatacatatgtttaagtaactttttcaaggcactgaaagagtgctggtttgaatatacttattatctttgtacagttaaatttatacatatttaattttgttgtatattttatacatatattctaaattgtgtgtatgtatatatgtatacatgtatgtacaaatcatatgtataaatacctacgtatttgcatatgatgaggcttgagggaaaatacagaggtgatacattttaataatgtg

SEQ ID NO: 553698 - DNA, 647 bp, Homo sapiens
gacttctgctacttaaaatacaaaattaatataagcacctagtcagtactgttgtttatattaatgcaaagattcaatcaaagattgcgtaatatcagcatgaggaagaatagtcttaaagtaataaagaataaaatgctttcaccctttaaaaatacattctgagtgggatggttaaaattctgactctcagcctacttaaaaacaccccaggttataaaactctaatgttagaaagtaagtggagctcatctctaatgaatagatgtcaatagattagcattttaaatatgggatgacagcatgattgcagcaaacatctgtaaaattattgcttttcatctacattaatttgctaaatgactgccatgcaaatagccccaaaccataaataaaaaaagcattcaggaatcattagtaaattagactttcgttacctgattcaaaaatcaaaaaagacattaagtgtgttgatgcataacayacagtattagaatctgttgaggaggtacaatttagtggaaaccaaggcccttttgtgtccaaagagaatttcggagaatgagtgcatgctggttttagtggttattgttggctattataaagagattgatgtgtatcagtgtgttgtaaaagaatgtttacca

SEQ ID NO: 553699 - DNA, 647 bp, Homo sapiens
gacttctgctacttaaaatacaaaattaatataagcacctagtcagtactgttgtttatattaatgcaaagattcaatcaaagattgcgtaatatcagcatgaggaagaatagtcttaaagtaataaagaataaaatgctttcaccctttaaaaatacattctgagtgggatggttaaaattctgactctcagcctacttaaaaacaccccaggttataaaactctaatgttagaaagtaagtggagctcatctctaatgaatagatgtcaatagattagcattttaaatatgggatgacagcatgattgcagcaaacatctgtaaaattattgcttttcatctacattaatttgctaaatgactgccatgcaaatagccccaaaccataaataaaaaaagcattcaggaatcattagtaaattagactttcgttacctgattcaaaaatcaaaaaagacattaagtgtgttgatgcataacacacagtattagaatctgttgaggaggtacaatttagtggaaaccaaggcccttttgtgtccaaagagaatttcggagaatgagtgcatgctggttttagtggttattgttggctattataaagagattgaygtgtatcagtgtgttgtaaaagaatgtttacca

SEQ ID NO: 553700 - DNA, 943 bp, Homo sapiens
tcagaaaagaatgagtcactaaaatctgtgcaaacagttcaaatgtttcaatacatctgtactacttctgatatcgttgcaaccatagtttcaatagtttccacttgatagtgtcaaacagtccaatcaatgccatagtaccttttctagagcaaggtggcaagatcagattttaatcttttgaaaacattatattccttggttgaagtctcttgcttctgagaacttatttgtgaatacaacacagcttaaaatcacagggataagaaatacrtattttaaaagtcagatgtatgttatcagagacactaactctatcttcacatcctgatttgttggctcagtattctagcaagggaggaacagtctcctttatcatggatcatattatattattattattactattttttgagacagagtctcgctctattgcccaggctggagtgcagtggcgtgatctcggctcactgcaagctccgcctcttgggttcacgcattctcctgcctcagcctcccgagaagctggaactacaggcgcccgccgccacgcagggctagtttttggtatttttagtagagacggggtttcaccgtgttagtcaagatgggccggatctcctgacctcgtgatccgcccacctcggcctcccaaagtgctgggattacaggtgtgagccaccgtgccctgccggatcatattatatcttttaagctagctcttagcctcataatttagtatctaccagcttgtttagcgagcattttgtgatgtaaaatctttccttccagcaaatagagtgcatgatagtaacagcgagtcctattgacttgccccttttctttatcctttcttttctcctcctccttcttgttttaatctatgttcctgcattgggagtaatgatgtgaagaatactctgagggtagcaatgacacttag

SEQ ID NO: 553701 - DNA, 943 bp, Homo sapiens
tcagaaaagaatgagtcactaaaatctgtgcaaacagttcaaatgtttcaatacatctgtactacttctgatatcgttgcaaccatagtttcaatagtttccacttgatagtgtcaaacagtccaatcaatgccatagtaccttttctagagcaaggtggcaagatcagattttaatcttttgaaaacattatattccttggttgaagtctcttgcttctgagaacttatttgtgaatacaacacagcttaaaatcacagggataagaaatacatattttaaaagtcagatgtatgttatcagagacactaactctatcttcacatcctgatttgttggctcagtattctagcaagggaggaacagtctcctttatcatggatcatattatattattattattactattttttgagacagagtctcgctctattgcccaggctggagtgcagtggcgtgatctcggctcactgcaagctccgcctcttgggttcacgcattctcctgcctcagcctcccgagaagctggaactacaggcgcccgccgccacgcagggctagtttttggtatttttagtagagacggggtttcaccgtgttagtcaagatgggccggatctcctgacctcgtgatccgcccacctcggcctcccaaagtgctgggattacaggtgtgagccaccgtgccctgccggatcatattatatcttttaagctagctcttagcctcataatttagtatcyaccagcttgtttagcgagcattttgtgatgtaaaatctttccttccagcaaatagagtgcatgatagtaacagcgagtcctattgacttgccccttttctttatcctttcttttctcctcctccttcttgttttaatctatgttcctgcattgggagtaatgatgtgaagaatactctgagggtagcaatgacacttag

SEQ ID NO: 553702 - DNA, 392 bp, Homo sapiens
atgatttctgatgaaaccacatagtctatagtaatttactattgcagttagaaataagatattatgattcaataaaggcttcagggacccagattgcaaaatcttyctgtttttctatcttgtataggattgtctgagactggtccatctgtgtcaaatatagtaatatctagaccatacaatattctgagttttaaaaggggctccctctcaatcaatgagagcagaggcacatttgctagaagcccctcagaagtttccgttagtctcatttggcaaaattgtatcacatgatataggttaaaccaatgattggtaaggggaacagaaacattatgattgacttacatcaatcaagacccaactctgggcttgatatgtgcattgcagtt

SEQ ID NO: 553703 - DNA, 392 bp, Homo sapiens
atgatttctgatgaaaccacatagtctatagtaatttactattgcagttagaaataagatattatgattcaataaaggcttcagggacccagattgcaaaatctttctgtttttctatcttgtataggattgtctgagactggtccatctgtgtcaaatatagtaatatctagaccatacaatattctgagttttaaaaggggctccctctcaatcaatgagagcagaggcacatttgctagaagcccctcagaagtttcygttagtctcatttggcaaaattgtatcacatgatataggttaaaccaatgattggtaaggggaacagaaacattatgattgacttacatcaatcaagacccaactctgggcttgatatgtgcattgcagtt

SEQ ID NO: 553704 - DNA, 660 bp, Homo sapiens
tgaaaaaacccatcactttgaaacagacaaacaaaaaacactgggtcagccaattaatgctattttaagtaatgaagttaactgaagtaaaatattctaaggtttcaaaagctgtatrgagtcagattaactctgtaagcagaatgacgaaattctcttatggcaggtccagaggggaagcttcctggacccagccttagattgaatagtgatcatgtggacttgttcctcacacttgtttcaagtttgtttcaatatgactgtagttgttttgatactaatatgtgcctactagctgagtgctactgggcaagttagttaaccttagtgagcttgattttataagtaaaaatagagataacaactgctacttttggtggctgttttaaggattggaaataatttttttttttttttgagacatagtctcactctgtcacccaggctggagtgcaatggcgcgatcttggcttactgcaacttctgcctcctaggttcaagcaagtcttctgcctcagcctcctaagcctgagtagctgggattacaggtgcacaccaccatgcccggctaatttttgtatttttagtagagacggggtttcaccatgttggccaggctggtctcgaactcctgacctcatgatccacccgcctcggcct

SEQ ID NO: 553705 - DNA, 660 bp, Homo sapiens
tgaaaaaacccatcactttgaaacagacaaacaaaaaacactgggtcagccaattaatgctattttaagtaatgaagttaactgaagtaaaatattctaaggtttcaaaagctgtatagagtcagattaactctgtaagcagaatgacgaaattctcttatggcaggtccagaggggaagcttcctggacccagccttagattgaatagtgatcatgtggacttgttcctcacacttgtttcaagtttgtttcaatatgactgtagttgttttgatactaatatgtgcctactagctgagtgctactgggcaagttagttaaccttagtgagcttgattttataagtaaaaatagagataacaactgctacttttggtggctgttttaaggattggaaataatttttttttttttttgagacatagtctcactctgtcacccaggctggagtgcaatggcgcgatcttggcttactgcaacytctgcctcctaggttcaagcaagtcttctgcctcagcctcctaagcctgagtagctgggattacaggtgcacaccaccatgcccggctaatttttgtatttttagtagagacggggtttcaccatgttggccaggctggtctcgaactcctgacctcatgatccacccgcctcggcct

SEQ ID NO: 553706 - DNA, 596 bp, Homo sapiens
taatcccagcactttgaaaggctgaggcgggtggatcacctgaggtcaggagttcmagaccagcctggcgatcatggtgaaaccccatctctactaaaaataaaaaattagctaggtgtggtggtgggcacctgtaatcccagctactcaggaggctgaggcaggagaatcgcttgaacctgggaggcagaggttgcagtgagccaagatcgcgccactgcactccagcctgggcaagagaacgagattctgtctaaaaaagaaaaaaataaaatgccgttacatcactggtcaacttcagctctcagtcactgtggtggacaatcatctgggccaacccccaatcctgcaagctgtcacccgtccttttttcttttgtcgcctgagattttgaggacatagcgcagaaacacggaggctttagataagagtgtgtgactgcaggatacaaatctcctgtttggcccaggtgagatggctcactcctataatcccagcactgtgggaggctgaggcaggaggatcgtttgagcccaggagtttgagaccaacctgagcaacatatcaagaccccttctctagaagtaataaaaaat

SEQ ID NO: 553707 - DNA, 575 bp, Homo sapiens
caaagagactgagttgcctatagccacataaacaataatgtgaaacaaattttaatctcaaaacatattctaaacacaaataaaactatttttttaaagtgtctgatacagttttgctgtgtccccattcaaatatcaacttgaattctatctcccagaattcccacatgttatgggaggtacccagggggagataattgaatcatggggtccagtctttcccatgctattctcttgatagtgaataagtttcacaagatctaatgggtatattacagatttctgtttctcctcttcttcatttgctcttgccaccgccatgtaagaagtgtcttttgcctcctgccgtgattctgaggcctccccagccatgtggaactgtaagtccaattaaacctytttttcttcccagtctcaggcatgtctttatcagcagcatgaaaacagactaatacagggtcaaagtcttgatctacagctcttttcctttgtggtgtcctcagtaaccacacagatgcttttcatctttccttttccctctctttgttcctggccttcttcttattgtcctgagc

SEQ ID NO: 553708 - DNA, 578 bp, Homo sapiens
gtctgtcattttataataaggcagaataccctcatggcatatagaagcatcctaaagattgtctattccctatattttattccattcttagaatattttcttttcagttaatgctgacttttcccctaggtgtggcaaagctgagagattccaggtgtttccttctctcagtacttgagagaagcatcaattctgattttagcaatttctggaggatgttagtgtccaatcccattgggctgagaaagctggactccagcagctttcctcctcactcaatgcccaacccccacagtgataggcatggaacttccggctttggcattcattggcattcactggcattttcctgtggtcctcagccatgccttcttttcatctgtttgctccctgatatggtctgaatgtgcctcccaacattcatgtgttggaaatttaatccccaatgcagtgttgggaggtggggcctttgggaaagtatttaggtcataagggttccaccttcataaattaattaatgccactattaaaggattstgggagtgaatttgctttcacttgcccttctgccttcccca

SEQ ID NO: 553709 - DNA, 1461 bp, Homo sapiens
tcaatccagaaacagaatttggcctcaattaaaaataatcactcttaaagggcttttacataaataatagattttattgaattatcaataatgaaggggttgaacatataaaggcaacccatttaaatcaaatataagaaattcctgttcttaaattcttcacccacatacccgtgtgacttggccatcatctctctcatttccctttaactgccacactcccattcctatttatttcttggcagaacaagttcattgtctattttcttccctccttcagcaagccctcsctcaggggctcactttttatcctgggatcttattaaccgatttaaactgacttccttttagggacagttctcagttgaagaagaattctagtatcagctatcaagattctaatactgccttcccccatgctctactataaatcacttacaatctattagaaagagtttttaaggtgattttttaaagttgtgcatcaactacaaatcaaaacttccatggtaacttttttttttttttgagacggggtcttgctctgtcgcccagactggagtgcagtggtgcaatcttggctcactgcaacctctgctcctgggttcatgccattctcctgcctcagccacctgagtagctgggactataggctcccgccaccatgcctggctaattttttttgtatttttagtagagacggggtttcactgtgttggtcaggatggtctcgatctcctgacctcgtgatccgcccacctcagcctcccaaagtgctgggattacaggcgtgcagccaccatgcccagcctggtaacaatgtttctaagggaaaactcagaatgaaatttaccacttttactttataaaacttataccagggttgctctttagacaatgcaaagtgggagagagggaaatgagcacaaggaagagtgggtattatagataggaggagttgttaccatgaatgcaatggaacttgagctatcatttgatcacattgagcatgtactgattcctcctcggagccacaagtcatttgcttccttaaaagaatatttgagcctaaatcaaagcctatgagctgcaaacacagaatgacaataaatgaacatcagggcatgattgattaatatgtgcttatttcccaggtttccaacagctttaggctaacggctaaaagtgccaaccccaggatgaagtttgtcctgccagataatcagggaaggactcagaggaaaaagcatgaagcagcagctgttgtcaaaaatatgggtcgactatacaatactaagtgctgaggcaaagagccagggccactgagggaatgagcttcacttcctcctggtaagctactctgcgatgagatgacggaatacatgacatttggaaaataaaaagttgaatatatagagaacataacatgtacaatcttttaaaatacatgggttcaacatg

SEQ ID NO: 553710 - DNA, 602 bp, Homo sapiens
accagaatatttttcaaaatgtatcttggtagagtaaacaaacttttagttttttaataaggtaattaattacttgattttctggttcagtgcctttcactgaggaagaaaatacctatgctctttttatttcagtgcaaattgttaagtacagtacaagtggtttttatactgcagctcgcatactggttgtcagtggggtggatatcaagggttaatcatttcctggggagctttttcaaaaggcacctgtcttcctcaaaggaatatgtgcaatttaaaattcctccccagatgattgtgatcattgctccctcgccacacatccattgctctaatgagcataaagtaaaacagatgacatagactatacatttagtatgcagaggatagaacgatatgccwttgaaatgaaattattctaaatatgtgtgtgaaatacatttatattttatgtcacagtcacaccagtagttctctcatcttagataccaccttttatcagttgcactataatttgccctttattgtttgtttactttttcttttcaaagagctagaatgactaaagaattaataaaaattagaactgcaatttgaaa

SEQ ID NO: 553711 - DNA, 666 bp, Homo sapiens
aagaagaaaacaacatacactgggacctactcgaggatggagggtaagagaaggatgaggattgaaaaactgcctgttaggtactacccttattactaggtgacaaactaatctgtacacaaaactcctgtggcacacaagttaccaatataaaaacccatacagtacccccaatcctaaaataaaagttggagaaaaaaaygtaaggacataatgattatgaaaaattgggaaaatatgacacaccaaaagaaactaagaaattttcagtaatggaagaaaaatgaactttattcctaatgaaaaattagattagtcacagtatgcaaaataaatacatatgttccctgtggattttccaatattgtacatgatatctgatttttagttacattgataaacagttacatatttaaataaatgtcacaaatatataggcaaaaattgttcttgaatttatgtaatttagaatttagctttaaaagctactagatttattcagaactccgcagttctcaacctttttggcaccagggatcagtttcctggaagataatttttccacagatggtggggaagggaggacggttttgggatgaaactgttccacctcagataatcaggtattagattttcataaaaagcacgcaacctagattccttgca

SEQ ID NO: 553712 - DNA, 638 bp, Homo sapiens
gggttctaaggcctagggactgatgttgtgagtaaaacyctacaggtctggggcaaaatattctaaaggaactgatctccattagtgttttccaaccaccctcctgtgttctcagccctctgtgtgtatacggccagtgctgacccaagaaaacagcacatctgtgtgtctcctcagcgctactagaaggcttggggtaaagacagcacacaaaaacagccatgaggttctaaagaccagggccccatgtccagggaaaacaaggctttagcagaagacgaccttttttttccctcaatttgaaccactggacctccaggctcctgggccagccctgcgcggctcaacagggagtgacattaaggaccattttctctgcacgccacattccttccttctcccccccatgtattcctttataacaagtatttacataggccgaatgcactccagcaggcatgcagtaagttctagaggccttcctggctggttcactggtccattccaccgtctgctgctataaccagatcttctctattaccctccctggccaggactttacaatctgcagcctcctcctccctgttagggaacttgaggtttcaatgatcttcctctttcacaaaacacactggggg

SEQ ID NO: 553713 - DNA, 548 bp, Homo sapiens
ttatctggagtgctcacaacgtggtagttggtcccaagagacacaggcaaatactacaaagcttcttaggacctagccttggaggtcctagaatacaacttctgctccatcctgttggtaaagcaagtcattgtgatcagcacagattcaagaaatgggagattcgactctaactctccatgtaaagagcagcatgttcatgcagggaggaaagaaattgagggcatmatcttgaagactatcatattacaccattattccaactaatgaacattatgttttagatgggtagtactagctactcatctctcccccagaaacccaagctaagcatggacatattgaagagaatgtcaacaccattaaaaaaactctagaaaaatcacatgtgatgactgaggttaattcagtctgtcaattacatcaatataattccctcttgtaaccctaaatatggtgaagcagaattgaattctacaaaagtctttcatctgttttcctatggaataattaacaaacccaataaatgtataaatagtatgaagtcc

SEQ ID NO: 553714 - DNA, 1297 bp, Homo sapiens
tcaggaactttatatattttgttgtatttcttcactccatttcatatgccctaactcagaatataataaaatgcctgttataacccaagatagttatgaaaagatgtttgactttgttagaacaacaaatcaattatagtttggtcatatttttggacagtgtgatggaaagagagaacattttgaaaattttatctatctttccaaaataaatatttccagaaatcttaattatccttttgaaagtctatgctgacatgcacttttattttatttttatcacagtcatttctttatagctgcattgtctgtgaagctgagtctacttaactgacttgtgcacacaccatactgaaagagatgccagcatacaagaactaaagagcctgtctttgaatgttcatgacaaaacaaaagtagcaagaaagcaacatcrgcagaacatacaaaagtagcaaaaaataattgccaatcattctgtaaccttaaaaaaaatttactcattgaaaataaaatgaaaattcatccttaaagttggcataaaaaacagtgctaaaatttagttccccattggaatgaatgctttctcgacagggtaacaaatgaaaattggatcagggacacattttcagtgaaaaagacgcactgccagatggcttcttggcaaaggaaaaggaagagttgattaaaccgtcatgtgacgacttcaaattcagctaagtacagcttagcaactttttgttgagaaggagaaaggaggatattcaggttctaggcatgattgtaacattattaaggtttgagatcactttgcagcttcaccggttttctatcattggtttcgataaggaaaatataaaattagtcccacccaagaacaaaatactttgctgaataaaacttgaatttcctcagaactaattctttgaaatcatcgtgcaaacacactcctcatgaagtacattttacttttcaagacaaacatattgtacatgttcatttatagacactactatttcaagatgaattagaatcttgcacccttattgtctcagagagcaatgggaagtattataaaacttgtactaaaatgcaaacatattccctaaaggatttgcttcccttgtctttctttcatctctctcatatcttctggtaggacatcactagattgctttcaaacctgcactggcttcatctgttggtgttgtcaattacacagtttccaactcttctgccttgggagacccagtgacaatattccacatctttggattcaatgcttgatctaggagtg

SEQ ID NO: 553715 - DNA, 655 bp, Homo sapiens
aaatactttggagggtgaccccgttctgcagatggcctctggaggcctggatgttcacactctggggttgcagtttcctcaatcatgaagtgagagttaagtcccctccagtgtgacatccaagagcagttgtgggcccaggacagcagcctgtstttcctttgcagctttacctagcccctacacaagcgccaccttgcagtaggccttcagttcttggatttattggtggctgaaagttcttgcgagatggacttgaagttgttgccacttaacccttctgaggttcttctggctgggaggagctcctctttctggccagagtcttgcttgagccttcttagccatctcgtcacctgttataggcagccctgccatctctggtgaccctttttaaacattaccctggtgagtaatgtttagcatcactcattgtcagatcttttttatctttttttttttttgagtttcagtaccagtaagtctttatgtattcattatatctttccagggaaaggagaagggaagtgaaaagggtcagcatgtgtgttgcaaagtgattagaaaatgggaaaggaagtacctggtacagaaaaatcagccatccaatagatgcaccccagagatggagtaaccaaagcccaaggggccctgg

SEQ ID NO: 553716 - DNA, 635 bp, Homo sapiens
gctaagttttggcacattaaaacaaaactttctcgccgggcacggtggctcatgcctgtaatcccagcactttgggaggccaaggcgggcagatcacgaggtcaggggatcgagaccatcctggctaacacagtgaaacccgtctctactaaaaatacaaaaaaatagctgggcgtggtggcgggcrcttgtagtcccagctgctcgggaggctgaggcaggagaatggcgagaacctatgagacggagcttgcagtgaaccgagatcacacctccctctacactccagcctgggagacaagccagactccatctcaaaataaataaataaataaataaataataaaataaaaataaaacaaaactttcttatgctcgcttcagcagcacatagactaaagcaaaactttctcacatcaacaactgaaaaggtaggccggatgcagtggttcacatctgtaatcccaacactttgggaggctggggcgggaggatcgtttgagaccagcctgggcaacacagtgagaccccatctctacagaagaaaaacattaaaataaaataattagctggatgtggtgatgtgatcctgtagtcccagctactcagaggccgaggtgggaggattgcttgag

SEQ ID NO: 553717 - DNA, 635 bp, Homo sapiens
gctaagttttggcacattaaaacaaaactttctcgccgggcacggtggctcatgcctgtaatcccagcactttgggaggccaaggcgggcagatcacgaggtcaggggatcgagaccatcctggctaacacagtgaaacccgtctctactaaaaatacaaaaaaatagctgggcgtggtggcgggcacttgtagtcccagctgctcgggaggctgaggcaggagaatggcgagaacctatgagacggagcttgcagtgaaccgagatcacacctccctctacactccagcctgggagacaagccagactccatctcaaaataaataaataaataaataaataataaaataaaaataaaacaaaactttcttatgctcgcttcagcagcacatagactaaagcaaaactttctcacatcaacaactgaaaaggtaggccggakgcagtggttcacatctgtaatcccaacactttgggaggctggggcgggaggatcgtttgagaccagcctgggcaacacagtgagaccccatctctacagaagaaaaacattaaaataaaataattagctggatgtggtgatgtgatcctgtagtcccagctactcagaggccgaggtgggaggattgcttgag

SEQ ID NO: 553718 - DNA, 635 bp, Homo sapiens
gctaagttttggcacattaaaacaaaactttctcgccgggcacggtggctcatgcctgtaatcccagcactttgggaggccaaggcgggcagatcacgaggtcaggggatcgagaccatcctggctaacacagtgaaacccgtctctactaaaaatacaaaaaaatagctgggcgtggtggcgggcacttgtagtcccagctgctcgggaggctgaggcaggagaatggcgagaacctatgagacggagcttgcagtgaaccgagatcacacctccctctacactccagcctgggagacaagccagactccatctcaaaataaataaataaataaataaataataaaataaaaataaaacaaaactttcttatgctcgcttcagcagcacatagactaaagcaaaactttctcacatcaacaactgaaaaggtaggccggatgcagtggttcacayctgtaatcccaacactttgggaggctggggcgggaggatcgtttgagaccagcctgggcaacacagtgagaccccatctctacagaagaaaaacattaaaataaaataattagctggatgtggtgatgtgatcctgtagtcccagctactcagaggccgaggtgggaggattgcttgag

SEQ ID NO: 553719 - DNA, 935 bp, Homo sapiens
agaagtgtctgttcatgtccttcacccacttgttgatggggttgtttgtttttttcttgtaaatttgtttgagttcwttgtagattctggatattagccctttgtcagatgagtaggttgtaaaaattttctcccagtttgtaagttgcctattcactctgatggtagtttcttttgctgtgcagaagctctttactttaattagatcccatttgtcaattttggcttttgttgccattgcttttggtgttttagacatgaagtccttgcccatgcctatgtcctgaatggtaatgcctaggttttcttctcgggttttttatgcttttaggtctaacatgtaagtatttaatccatcttgaattaatttttgtataaggtgtaaggaagggatccagtttcagctttctatatatgactagccagttttcccagcaccatttaatttctccttttagtatgtcagattcttcacatttagaaggttcaatcttggggcacttcttctgtttcttcttttcttgttttctgttttcttttccagcaacacactatcccagtggtcaaggattttaaatatttatacttaatagagatagtctcccctaattactaatctttttcagcttttttgcaatttctaaatatttatttttcctaataaatcttagggctgttttgtaaagcttgaatacttttcataaaattatatttagggtttcatgaccctacttgtttattttgaggaaaatggtatactataatgtctcattttcctacctagaataagacacctattgtgaagtcttgattgataaatctcaatcaaaaagtgggcaaagacatgcacagacacttttcagaacaagacatacatgctgtcaaaaaacatatgaaaaaagtcaatattaatgatcattagagaaatgcaaatc

SEQ ID NO: 553720 - DNA, 935 bp, Homo sapiens
agaagtgtctgttcatgtccttcacccacttgttgatggggttgtttgtttttttcttgtaaatttgtttgagttctttgtagattctggatattagccctttgtcagatgagtaggttgtaaaaattttctcccagtttgtaagttgcctattcactctgatggtagtttcttttgctgtgcagaagctctttactttaattagatcccatttgtcaattttggcttttgttgccattgcttttggtgttttagacatgaagtccttgcccatgcctatktcctgaatggtaatgcctaggttttcttctcgggttttttatgcttttaggtctaacatgtaagtatttaatccatcttgaattaatttttgtataaggtgtaaggaagggatccagtttcagctttctatatatgactagccagttttcccagcaccatttaatttctccttttagtatgtcagattcttcacatttagaaggttcaatcttggggcacttcttctgtttcttcttttcttgttttctgttttcttttccagcaacacactatcccagtggtcaaggattttaaatatttatacttaatagagatagtctcccctaattactaatctttttcagcttttttgcaatttctaaatatttatttttcctaataaatcttagggctgttttgtaaagcttgaatacttttcataaaattatatttagggtttcatgaccctacttgtttattttgaggaaaatggtatactataatgtctcattttcctacctagaataagacacctattgtgaagtcttgattgataaatctcaatcaaaaagtgggcaaagacatgcacagacacttttcagaacaagacatacatgctgtcaaaaaacatatgaaaaaagtcaatattaatgatcattagagaaatgcaaatc

SEQ ID NO: 553721 - DNA, 935 bp, Homo sapiens
agaagtgtctgttcatgtccttcacccacttgttgatggggttgtttgtttttttcttgtaaatttgtttgagttctttgtagattctggatattagccctttgtcagatgagtaggttgtaaaaattttctcccagtttgtaagttgcctattcactctgatggtagtttcttttgctgtgcagaagctctttactttaattagatcccatttgtcaattttggcttttgttgccattgcttttggtgttttagacatgaagtccttgcccatgcctatgtcctgaatrgtaatgcctaggttttcttctcgggttttttatgcttttaggtctaacatgtaagtatttaatccatcttgaattaatttttgtataaggtgtaaggaagggatccagtttcagctttctatatatgactagccagttttcccagcaccatttaatttctccttttagtatgtcagattcttcacatttagaaggttcaatcttggggcacttcttctgtttcttcttttcttgttttctgttttcttttccagcaacacactatcccagtggtcaaggattttaaatatttatacttaatagagatagtctcccctaattactaatctttttcagcttttttgcaatttctaaatatttatttttcctaataaatcttagggctgttttgtaaagcttgaatacttttcataaaattatatttagggtttcatgaccctacttgtttattttgaggaaaatggtatactataatgtctcattttcctacctagaataagacacctattgtgaagtcttgattgataaatctcaatcaaaaagtgggcaaagacatgcacagacacttttcagaacaagacatacatgctgtcaaaaaacatatgaaaaaagtcaatattaatgatcattagagaaatgcaaatc

SEQ ID NO: 553722 - DNA, 935 bp, Homo sapiens
agaagtgtctgttcatgtccttcacccacttgttgatggggttgtttgtttttttcttgtaaatttgtttgagttctttgtagattctggatattagccctttgtcagatgagtaggttgtaaaaattttctcccagtttgtaagttgcctattcactctgatggtagtttcttttgctgtgcagaagctctttactttaattagatcccatttgtcaattttggcttttgttgccattgcttttggtgttttagacatgaagtccttgcccatgcctatgtcctgaatggtaatgcytaggttttcttctcgggttttttatgcttttaggtctaacatgtaagtatttaatccatcttgaattaatttttgtataaggtgtaaggaagggatccagtttcagctttctatatatgactagccagttttcccagcaccatttaatttctccttttagtatgtcagattcttcacatttagaaggttcaatcttggggcacttcttctgtttcttcttttcttgttttctgttttcttttccagcaacacactatcccagtggtcaaggattttaaatatttatacttaatagagatagtctcccctaattactaatctttttcagcttttttgcaatttctaaatatttatttttcctaataaatcttagggctgttttgtaaagcttgaatacttttcataaaattatatttagggtttcatgaccctacttgtttattttgaggaaaatggtatactataatgtctcattttcctacctagaataagacacctattgtgaagtcttgattgataaatctcaatcaaaaagtgggcaaagacatgcacagacacttttcagaacaagacatacatgctgtcaaaaaacatatgaaaaaagtcaatattaatgatcattagagaaatgcaaatc

SEQ ID NO: 553723 - DNA, 935 bp, Homo sapiens
agaagtgtctgttcatgtccttcacccacttgttgatggggttgtttgtttttttcttgtaaatttgtttgagttctttgtagattctggatattagccctttgtcagatgagtaggttgtaaaaattttctcccagtttgtaagttgcctattcactctgatggtagtttcttttgctgtgcagaagctctttactttaattagatcccatttgtcaattttggcttttgttgccattgcttttggtgttttagacatgaagtccttgcccatgcctatgtcctgaatggtaatgcctaggttttcttctmgggttttttatgcttttaggtctaacatgtaagtatttaatccatcttgaattaatttttgtataaggtgtaaggaagggatccagtttcagctttctatatatgactagccagttttcccagcaccatttaatttctccttttagtatgtcagattcttcacatttagaaggttcaatcttggggcacttcttctgtttcttcttttcttgttttctgttttcttttccagcaacacactatcccagtggtcaaggattttaaatatttatacttaatagagatagtctcccctaattactaatctttttcagcttttttgcaatttctaaatatttatttttcctaataaatcttagggctgttttgtaaagcttgaatacttttcataaaattatatttagggtttcatgaccctacttgtttattttgaggaaaatggtatactataatgtctcattttcctacctagaataagacacctattgtgaagtcttgattgataaatctcaatcaaaaagtgggcaaagacatgcacagacacttttcagaacaagacatacatgctgtcaaaaaacatatgaaaaaagtcaatattaatgatcattagagaaatgcaaatc

SEQ ID NO: 553724 - DNA, 935 bp, Homo sapiens
agaagtgtctgttcatgtccttcacccacttgttgatggggttgtttgtttttttcttgtaaatttgtttgagttctttgtagattctggatattagccctttgtcagatgagtaggttgtaaaaattttctcccagtttgtaagttgcctattcactctgatggtagtttcttttgctgtgcagaagctctttactttaattagatcccatttgtcaattttggcttttgttgccattgcttttggtgttttagacatgaagtccttgcccatgcctatgtcctgaatggtaatgcctaggttttcttctcgggttttttatgcttttaggtctaacatgtaagtatttaatccatcttgaattaatttttgtataaggtgtaaggaagggatccagtttcagctttctatatatgactagccagttttcccagcaccatttaatttctccttttagtatgtcagattcttcacatttagaagkttcaatcttggggcacttcttctgtttcttcttttcttgttttctgttttcttttccagcaacacactatcccagtggtcaaggattttaaatatttatacttaatagagatagtctcccctaattactaatctttttcagcttttttgcaatttctaaatatttatttttcctaataaatcttagggctgttttgtaaagcttgaatacttttcataaaattatatttagggtttcatgaccctacttgtttattttgaggaaaatggtatactataatgtctcattttcctacctagaataagacacctattgtgaagtcttgattgataaatctcaatcaaaaagtgggcaaagacatgcacagacacttttcagaacaagacatacatgctgtcaaaaaacatatgaaaaaagtcaatattaatgatcattagagaaatgcaaatc

SEQ ID NO: 553725 - DNA, 634 bp, Homo sapiens
tcccgggctcaagctatcctcctgcctcagcctcctgtatagctgcgatcacaggtgtccaaaccaggcctggataattttttgatttattttttgtggagatgggagtctccttttgttgcccaggctggtcttgaactcctgagctcaaatgatcctcttgccttggccttccaaagtgctaggattacaagtgcgagccaccrtgcttggcttaaatgtgtatttttaaagttatactcaaaacaacatgaagtaacatcatgaaaataagtaaatagctattcttcataaatctttttgaataacatcaaatgtcaaattcttctgaataattaaatgattaatgataaaaataatgaattggtttttgagtcatgtgatattatgagtaaattctattaaaatgtttataatgacatcacacaatgatcttgtgctcagtggatgggaatactgggagacacagtgggacagaatcaacacccaattaattattgatttatcaagctgagactatgtacattaggtaaaacatagatatttgatatatgtaaatcatggcttatacttttaatattatgattataaacttagcttatggaatatttaaagataattaagaagtccactc

SEQ ID NO: 553726 - DNA, 634 bp, Homo sapiens
tcccgggctcaagctatcctcctgcctcagcctcctgtatagctgcgatcacaggtgtccaaaccaggcctggataattttttgatttattttttgtggagatgggagtctccttttgttgcccaggctggtcttgaactcctgagctcaaatgatcctcttgccttggccttccaaagtgctaggattacaagtgcgagccaccgtgcttggcttaaatgtgtatttttaaagttatactcaaaacaacatgaagtaacatcatgaaaataagtaaatagctattcttcataaatctttttgaataacatcaaatgtcaaattcttctgaataattaaatgattaatgataaaaataatgaattggtttttgagtcatgtgatattatgagtaaattctattaaaatgtttataatgacatcacacaatgatcttgtgctcagtggatgggaatactgggagacacagtgggacagaatcaacacccaattaattattgatttatcaagctgagactatgtacattaggtaaaacatagatatttgatrtatgtaaatcatggcttatacttttaatattatgattataaacttagcttatggaatatttaaagataattaagaagtccactc

SEQ ID NO: 553727 - DNA, 543 bp, Homo sapiens
aggaccagagctctccttctcctagccagaataggaggctgctgacagatctcagtttatttctctctccaggaaytgccctctgccaaagttagttgccttgcccaagttcaggcaccctccctgaaggagctcacatctactgatttgccggtaaaagggtacaaaacttaattcccttgcctggattcaggacattccttaaggaccatcctatcccagctacataattcattgtaggatcagctgaatcttctgaaacttcatcacagttcatcttttgcctctttccagttctacttcccttactccaacataggtgtgagtccccagggtctgcctctacacccccagtaaatatcatgcatgcaaatctctgcctgagggcctggttcctgtggaaatccaaataatgactctaagtcatcctaccagcagttaacagaaacagaacttgaaggcaaattccatattctctccagagaacaccaatctggcacctgtcaggtgaattttgtgggcccccttccgtcaaaattcaaa

SEQ ID NO: 553728 - DNA, 684 bp, Homo sapiens
attgcccagctgttcctcctggctgcatctcccacctcccagcaaacaagctcttttggctcagctcccgcctgcgtttgtagaccccraagtttctgcaaccaagctcttcagacccacatcccttctcccagtgactgaacagtcccagctccggctggagaagggtgtctgcagaccccgctgttgcctcccaggggagtctccaggcccagctctcgccccaccgcgacctcccaggcccaagtccctgcctacctcccagcagcccgagtgcgatcctgttcctccctcacggtggcctgttgaggcagggggtcacgctgacctctgtccgcgtgggaggggccggtgtgaggcaagggctcacactgacctctctcagcgtgggaggggccggtgtgaggcaaggggctcacgctgacctctgtccgcgtgggaggggccggtgtgaggcaagggctcacactgacctctctcagcgtgggaggggccggtgtgaggcaaggggctcacgctgacctctgtccgcgtgggaggggctggtgtgaggcaagggctcaggctgacctctctcagcgtgggaggggccggtgtgaggcaaggggctcacgctgacctctgtccgcgtgggaggggccggtgtgagacaaggggctcacactgacctctctcagcgtggga

SEQ ID NO: 553729 - DNA, 682 bp, Homo sapiens
tgactgtggcaggagtgaacaaacaggcatggttcttacttgcatgtaattacagtcttatagtgaaaacaagtgttaaacaacaaaatctcccaattattttaaaattataaacttgattcgatactatgtggccatataattgttcctaatttggttggagaagggaggcagttagggaagccttccctgagttagtgccatttaacctgaattatgatagatgataagtaatttgtcaggggaaaaatactccaggaataaagaacaggtacaaaggtcaggttctgggaagagcttgtcttggtccaggagctaaaaaatgttagagtggctggatctgggaaagagacaaagagttattaaatgaggcagcaggcttcagcaggtgccacattgctcagggccttgtaggccatgctaaggatttgggatgttaatgtcagtacaaacaattgagtcrtaagcagaaagtaaaagcatgattccatcaaatgttattctctaaacagtaattttataaatacaggttaaatgtgtgtggtcccagctactcaggaggtcccagctactcagtattccttttcaacaaatattaggtgcctactattagccaggtacagcccttagctactttgaatgaagcatatattacaaactggcagaatttcttaaacaaaga

SEQ ID NO: 553730 - DNA, 759 bp, Homo sapiens
agcagagagtgggaggtggatgagggatgaaaaaactacctatttggtacaatataaactactcaggtgacaggtgcactaaaatctcagaattcactgctatataattcatccacgtaaccaaaaaccacttgtactgtaagtgatactgaaataaaaattataataaagcaaatttataataaaattaaaattatacttacataattataatataaacaaaaattataataaggagcagcttttttttttttttcttaaaaagaaaaacccagtgccacagttttgggttctagtgttttggatagaaagccccttttgctcagtaacacactcactactggagaagcaaaatcctgaaaattcaagaagaaccttggcataaacgrtatttctgacaagttatttatacactgcctacatgagtattgcagatatgttttaaagacaaagatccatgtagactgggtcagctttatgcttggtcattttatttccaattcttctcccctaaaatacaagtcatgggttgccatggtgattattccaactgcattgtggtcagatggaactggtgacctgttctaatttccccttcagttacaaaatgagcccgatgctcttagccatcaaaatctcaccaacacctactacttcagtttcaactctggttcctttttcaaggcaatcactcaaagttgcaaatcacagaaaggcaaaaatgttttaactaaaaacttaataaaaagttataccccc

SEQ ID NO: 553731 - DNA, 759 bp, Homo sapiens
agcagagagtgggaggtggatgagggatgaaaaaactacctatttggtacaatataaactactcaggtgacaggtgcactaaaatctcagaattcactgctatataattcatccacgtaaccaaaaaccacttgtactgtaagtgatactgaaataaaaattataataaagcaaatttataataaaattaaaattatacttacataattataatataaacaaaaattataataaggagcagcttttttttttttttcttaaaaagaaaaacccagtgccacagttttgggttctagtgttttggatagaaagccccttttgctcagtaacacactcactactggagaagcaaaatcctgaaaattcaagaagaaccttggcataaacgatatttctgacaagttatttatacactgcctacatgagtattgcagatatgtttkaaagacaaagatccatgtagactgggtcagctttatgcttggtcattttatttccaattcttctcccctaaaatacaagtcatgggttgccatggtgattattccaactgcattgtggtcagatggaactggtgacctgttctaatttccccttcagttacaaaatgagcccgatgctcttagccatcaaaatctcaccaacacctactacttcagtttcaactctggttcctttttcaaggcaatcactcaaagttgcaaatcacagaaaggcaaaaatgttttaactaaaaacttaataaaaagttataccccc

SEQ ID NO: 553732 - DNA, 676 bp, Homo sapiens
tatttgctcatgaattctgtgggtcaggaatttggacagagcaaagaatggatgatcttgtttctgccacataatatctggaatttctacattgtatgaattttacttggaaagattcaaatgactagggattggaatcatttggaggcttcctcactcgcatgtctggtaatggayaaatggattgaaggcttggctcagctgggactactgattggtgtctgtctacctgtatcctctccatgtggcttggactccctcaaaacgtggcagccttaggatacctcagggtagccagacttcttacttggcaattccaggtgccaagagtacgtctgtgctccagagaacaaggaggagactcttatgacctagcctctgaagtcacattgtatcacttgcaccaaactctactcgttgaagtagttttgagcctgacctaactcaagggatggaaatatagttagtgagagaagtatcaaagaatttgtggctgtgtttttaatcaccacaaaaggctgcagaaaagttacttgcacatcattctagttgcatctgctggttgcaatgagtagggtggtcttattcacaaaaacataggattaaaaaatacagaatgttgtggaaggaaagtcttttaataagaagcatctataggaaaaatagtgttttggtc

SEQ ID NO: 553733 - DNA, 634 bp, Homo sapiens
tgtaatcatctggtttaatggttgcataatagtttcatatgtacatgtaatttmatttgcttaatcatttcccagaattggaaagtgaggttgtctgcagtttttcccaatgataaataatgctgcatgaatatcctcatgtgaaatctttgtcagcattactttaggattgaatttttacaaaggaaattagttgttataccgtacacatgttttaaatactcctcatttatattgctaaattgcttttccagaagtgttgtatcagtttacacacctggtacctgcaaacctttgagcttgagatcaggctaaaatgttgctataaaatgttatgactggctcttaatttcccatacttaaggttaatagtaactggttaaaaaaaaaaggccagtatttggacagagaatgaatacttctcaagtgattcatatattactcaaaatgccacggagtttctgttaagaatgtcctttgctgtcccttggctgttgcttcctatgtctgcacaattaggaagtctcgataagtattagtggcagtcagatcacttacctaatatgagtctatcctatatgaatatgaagtagagaatgctctatagagctgcagattctctacttcatattca

SEQ ID NO: 553734 - DNA, 1014 bp, Homo sapiens
tgtctcttaaagctacactaagtgattatttctgcgagaaaaaaatgttagttatttgtttcaccctaagggtagacaacatggggtctatttatataaaagggtagggttatctactaagagatagcaaaagttactctgtttttagaatccaaagaactgagttcaaatcttaatgctgacacttgctagccacatgaccccaagctaattacttcacttaactgagcaccatttaataaaaggaagtcctggcctcaaagcatcctgggcaccccacgtgatgaggaaggagggktgatgaccaaattgtggaattaaaatatactctgctattttaccactgaaatatccacggatttgttggtatgctattttcattatttttaagtccaaaattgtaggtattaatatctgtagagaaagatcaacaatttaattattcaaattatgtgaaaagacaaactgatacaaagtctacaagtctaaacatgtccagaccttcatgaattgtaataagcaaccatattatggtcctgcaaagctcctgttgaaagaataattattactgcagttcaaaaaatttctgagaaaacagaatatgaatgtgacaatatggaaatggatacagggacttgtgcatcagagccaccaactacacatgataaaaatacagaagatgtagacttatcaaatatattttctttggtgggggtgggcaggaaacatagctccttctcaatacaaaacctgtgtatagtctttattgggatggtcatggaaggaagggttgttcaaacaaaaactcaaaattatcaaataagaaataaagttatttaaagatgaaattcagaggaaaatatttagggttagctcttaagtgtctcttcaccattcttctgactattcacaaaatcaccagaaaagctttttcagcagcaagtaaagcttgcataaaaatatatttgcaaatcattgatgtcacttgactcatttcattttttaattagcaca

SEQ ID NO: 553735 - DNA, 1740 bp, Homo sapiens
ttattttgattatttatacacaaaatccctctaagatttgctctgctaaactcttgccattgtctctctcaagagaaatgaagccctactacctacagacattcttccatatgccaacttcctgttgatcaacaatagtttaaatagttactgctcttggattccttcttgccatgtctgcctacataaaatacactgctcttgttactttacagtggatctcctttccctatgagctatgagccccatatgtgagagttaacacctattacttactgcaataacttatatgtatataatttatgtatataatataatataatataatatgtaatatacatgtgtactatgttaggcctgctagactgaacttccttcagctgtatacagcctgatccttgctcaccacccagaaggtggttgtgtttccttctcaaacaaccccctctcataatagtttatgtagctcagcattctggaattgggctcaggatactagaactaggccaattaggccttttaagtgatacagaataattaatcctattcaaagtcattcaaaaaacacctataatgccttttttttttattttttttgagacaaggtcttgctctgtcacccaggcaggagtccaatggcacratctcggctcactgtaacctccacctcctgggttcaagtgattctcctgcctcagccttctgagaagctgggattacaggcgcccgccaccatgcccagctaatttttgtattttttagtagagatggggtttcaccatgttggccaggctggccttgaactcctgacctcaggtgatccacccgcctcagcctcccaaagtgctgggattacaggagtgagccaccgcacctggcctgctatttgttttaatttagaaaatatgagaagaatctttaaaacttcaaattgctataaaatgtgttgtattaaattcttttagttattagataaaatgcaccattttttaaaatactaaaagatttggactctcctaagatttctaatatcaatataagaaagctagtaaaaagttccaccttgaagtgcagagggcaagtgatgattgacaaaggtgggaggtgtttgaggaagacgaggctgggagaggtcaagctaattgatatggtttggatttgtgtccctgcccaaatctaatgttgaattgtaatccccaatgttggaagagaggcttggtaggaggtaattggatcataggggtagacttcccccttgctgttcttgtgatagtgagtgagttctcatgggacctggttgtttaaaagtgtgtagcaggggagaaggatcatcatggtacatgggaggcaagactagtttgcagctctggacacagcagcgtgcggaggctcacattgtgaatttaagctccagatcaactgcaagaacaaaccagcaatcctgaaaggacccacagacctctgaaggaagcgggctgctcctgcaggacccaggagacaccccaaatatattctgtgagtgccctaacggtggaggtgggaaagggagacccttgtctccagaacacacaatcccactggagaagctgaaggtctgtttgtgggagacgtttctgaccttgcctggagctgagtcaatttagagagccaagtgaaatacaggggtagaggaagcagcagaaaggccctgggagcttgctgggtctccaggcagcccattcccacctggcaccacaggga

SEQ ID NO: 553736 - DNA, 1740 bp, Homo sapiens
ttattttgattatttatacacaaaatccctctaagatttgctctgctaaactcttgccattgtctctctcaagagaaatgaagccctactacctacagacattcttccatatgccaacttcctgttgatcaacaatagtttaaatagttactgctcttggattccttcttgccatgtctgcctacataaaatacactgctcttgttactttacagtggatctcctttccctatgagctatgagccccatatgtgagagttaacacctattacttactgcaataacttatatgtatataatttatgtatataatataatataatataatatgtaatatacatgtgtactatgttaggcctgctagactgaacttccttcagctgtatacagcctgatccttgctcaccacccagaaggtggttgtgtttccttctcaaacaaccccctctcataatagtttatgtagctcagcattctggaattgggctcaggatactagaactaggccaattaggccttttaagtgatacagaataattaatcctattcaaagtcattcaaaaaacacctataatgccttttttttttattttttttgagacaaggtcttgctctgtcacccaggcaggagtccaatggcacaatctcggctcactgtaacctccacctcctgggttcaagtgattctcctgcctcagccttctgagaagctgggattacaggcgcccgccaccrtgcccagctaatttttgtattttttagtagagatggggtttcaccatgttggccaggctggccttgaactcctgacctcaggtgatccacccgcctcagcctcccaaagtgctgggattacaggagtgagccaccgcacctggcctgctatttgttttaatttagaaaatatgagaagaatctttaaaacttcaaattgctataaaatgtgttgtattaaattcttttagttattagataaaatgcaccattttttaaaatactaaaagatttggactctcctaagatttctaatatcaatataagaaagctagtaaaaagttccaccttgaagtgcagagggcaagtgatgattgacaaaggtgggaggtgtttgaggaagacgaggctgggagaggtcaagctaattgatatggtttggatttgtgtccctgcccaaatctaatgttgaattgtaatccccaatgttggaagagaggcttggtaggaggtaattggatcataggggtagacttcccccttgctgttcttgtgatagtgagtgagttctcatgggacctggttgtttaaaagtgtgtagcaggggagaaggatcatcatggtacatgggaggcaagactagtttgcagctctggacacagcagcgtgcggaggctcacattgtgaatttaagctccagatcaactgcaagaacaaaccagcaatcctgaaaggacccacagacctctgaaggaagcgggctgctcctgcaggacccaggagacaccccaaatatattctgtgagtgccctaacggtggaggtgggaaagggagacccttgtctccagaacacacaatcccactggagaagctgaaggtctgtttgtgggagacgtttctgaccttgcctggagctgagtcaatttagagagccaagtgaaatacaggggtagaggaagcagcagaaaggccctgggagcttgctgggtctccaggcagcccattcccacctggcaccacaggga

SEQ ID NO: 553737 - DNA, 533 bp, Homo sapiens
cttatgattctggaggctgggaagtcctataagcatgattctggcatccacttgacttctggtgagggccttatgctgcatcacaacatgacaaggaaacaaaagggaaagccagtgtgtacagagtgtcgtgcaagagaggctaggttcatttataacaacctgctctgttgaaaactaattcattccagagagagagaaaaaactcactcattyccatgaaagggcattaatcaatctgttcatggggcagtgcctcataattcaaatacctgtcactaggccccacctcccagtactgccatattgaaaatataatttcaacatgagttttgtcaggggcaaactagatccaaatcatagcaaccatatctcaagttgtaagtctgatccctaaaatgaaaaacacaaactgaatacagcaatatttattaacatttgaagactccaagatatttgaattctgaccaattcaaattttaagggatcttagcttaaggcatgggaaattccacataccataaagtgtttag

SEQ ID NO: 553738 - DNA, 1471 bp, Homo sapiens
tcccccttcttcctactatacttaatgtcttctttctgttgactctttttgggaataaggagcaacaggcttctgtctcccctcatcctcagcctcccgttcaacttgtttattctcccagaaacctccttataacatacttccgtttccccagttttccttatgcttgaaaagtagatccaagataacagtcctagaaacacacacaatggtttctttttcttttyttttttttttttgagatggagttttgctctttttgccctggctggagtgcaatggcacaatctcagcccactacaacctctgcctcccaggttcaagcgattctcctgcctcagcctcccaagtagctgggattataggcatgtgtcaccacgcccagataatttttttttttttttttttttttttttttttttgtatttttagtagagatggggtttctccacattggtcaggctggtctcaaactccggacctcaggtgatccgcctgccttggcctcccaaagtgttgggattacaggtgtgagccaccacgcccggccagaaacacaacggtttctactggtttttttgcttatttgtgtaaagagcaactttgagagggatatatggagtctggaaaggagaacaaattgccttcctagactcaaccgagactggcccccactagaaaatgcactctcctccccaaaacccgccccctcacaggaggcagggtttttcttttgggcaaacctgctcctggggagaggagtggcaaaacctgttttgaagatgaggttacctcccttccacacctccctccttggaggcaagagctacaacagctgagacagaaaagaggtaaggaagtgttgggggctgggacaaccagctccccaacaactcctaggtgtttaaagaaggaggcaggaagacttgtgaagatgggaactatacaagaggcaggaaaaaagacagatgttgggtaagtaagatcttggctcacttgattggtaacagtgaataaacagtccggagagacttccccaccacccagctcttactgggtcaaatctcgggttcctcaaggagacaagactgtaagagagtttgcagagaagagatgagggtggttttaggtaggaaatgtcagtatggtatggaactggggaacaggattccaggataattccctggtttaaaaataaaggaagtttctgtaatatgttgtacctgataaatctgcctgtgttcttttattttctaaccctcaccctccagaatggccatcaggaaagctgaaccagaaccgagtttaggtccaggttctcgttctggcaaatctttctccttaccttcttcctccacccctccacttatgccatgttttcccttagccactccccagctcggtggaggaaaggcaggcctaactaggtagcgtcttcccgactttgctcaatgatagctgggtgggtcta

SEQ ID NO: 553739 - DNA, 553 bp, Homo sapiens
ataaagacaggaaatccaatttgtaatcacaataaagtttcttatctaaatccaaaggccagtttctttttccccttggaaacataagtgcctgaagcaggggctgcattttgatattctttgtggcacttggcacagtatcatttctgtgaaggtggcttgtaagtagcctggggtgattatggtggtgtaattttcatcacaaccacagataacccaggtaactgtgcaggtacaatgatgttcagcttaacttaagtggctttgttccaaacaagggcctctattgtaaaaacaaagcaggtgttaaaacatagagatattgaagataggggtcactttacatactaacatgcactgaaaagtaaatctgagctgccccacattattgccaggaattactgtatacttaacatgaatccattaagtacacaactggacaaatgatgaaattttatgttagtaaaattcctgacatatttcacacctcttactctattaaattacgcttttttaacaaagaaaagcttgcctacytctacacattttcaat

SEQ ID NO: 553740 - DNA, 485 bp, Homo sapiens
cattcttcacatttgtagggtttctctccagtatgaattcttttatgtgtagaaagggttgaagattggttaaaagctttgtcacattcatcacatttgtgtaacttctctccagtatgaatcatcttatgtttagtaagggttgagaaatggttagaagttttgccacattcttcacacttgtaaggtttctctccagtatgaattttcttgtgttcaatgagttttgaggatcaggtagaagctttgccacattcatcacatttgtactgtttctcttcagtatgaattatcttatgtgtagtaagtgttgaagattggttaaaagctttgccacattcttcacatttgtagggtttctctccagtatgaattctcttatgtccaataagggttgaagatcrgttaaaggctttgccacattcttcacatttgtagagtttctctccagtatgaattttcttacatgtactaagttttgagga

SEQ ID NO: 553741 - DNA, 571 bp, Homo sapiens
cagtttctataccaatgaactgtgaacccaccctgtgcctcagtttcctcatctgtcaaatggggagaataatagtatattcttacagacatgtgtggggtgcatgggaagtgcttaaagcctgggctatggggaatgcctactacatgttcattattattttaattgtcattcttactgttatacccaagttctatgacaaaaccatggttgacaagttcaaaaggcatctcatattctttctagaaagtaagtgtgctgtaaataataaaaataatgagaactcccttggttaagcagagrgccttaagatgtaaatgaaactggatttaattgacttctggaaaggtaatagtattcaatatctggtaatgtgatacctggccaggaaacccttgttgtctacctctgtacttgagataatttatccttttaaaatgtttcttattcattcagtacaaatgagtgttgagtaccttttatgtgacttggttaggggttgtagcagtgaacaagagagggcctcagccatcatggggctatgtttcctggggagatagaaattaaccac

SEQ ID NO: 553742 - DNA, 780 bp, Homo sapiens
tgtgaattacactgctgattttaatagaaaccactaatttttatgccaaaaaaatcatcaatgtgcacatgctccaaggctgtgtgagcatagccctttttcttgggatgtcaacaccactgggttttatcaaaatataatttttgccaatttattagttaacaaatgctaactcagtgctacttggatttgaactaccactggtgctgagcaactgtttacatattcactggcaatttatttatctttctctgttgtttatctttttctgtgtaataattttccctatttctactcttttaaacattaagttttcactgtttccttaataatttttaagtttaaaaagtgaccttttggctgggcgcagtggctcacgcctgtaatcccaacactttgggaggccaaggcgggtggatcacaaggtcaggagatcaagaccatcctgcccaacatggtgaaaccccgtctctgctaaaaatacaaaaattggctggggtggwgacacgtgcctgtaatcccagctactcgggaggctgaagcagaagaatcacttgaaccagggagttggaggttgtaatgagccaagatcacgccactgtgctccagcctggcgacagagcgagactccatctcaaaagaaaaagtgaccattttatctgctgcatataattctaatgatatttcacaattcgtttatcttttaacaatggtaatatataatgtcttgctatttagaaagatttttaaaagtattttacataaagaaatttttattct

SEQ ID NO: 553743 - DNA, 780 bp, Homo sapiens
tgtgaattacactgctgattttaatagaaaccactaatttttatgccaaaaaaatcatcaatgtgcacatgctccaaggctgtgtgagcatagccctttttcttgggatgtcaacaccactgggttttatcaaaatataatttttgccaatttattagttaacaaatgctaactcagtgctacttggatttgaactaccactggtgctgagcaactgtttacatattcactggcaatttatttatctttctctgttgtttatctttttctgtgtaataattttccctatttctactcttttaaacattaagttttcactgtttccttaataatttttaagtttaaaaagtgaccttttggctgggcgcagtggctcacgcctgtaatcccaacactttgggaggccaaggcgggtggatcacaaggtcaggagatcaagaccatcctgcccaacatggtgaaaccccgtctctgctaaaaatacaaaaattggctggggtggagrcacgtgcctgtaatcccagctactcgggaggctgaagcagaagaatcacttgaaccagggagttggaggttgtaatgagccaagatcacgccactgtgctccagcctggcgacagagcgagactccatctcaaaagaaaaagtgaccattttatctgctgcatataattctaatgatatttcacaattcgtttatcttttaacaatggtaatatataatgtcttgctatttagaaagatttttaaaagtattttacataaagaaatttttattct

SEQ ID NO: 553744 - DNA, 546 bp, Homo sapiens
tacatattcyattatgttacagggtctagggctttgggaggacaaggctgcaggcagccgagattgtgccgctgcactccagcctgggcgacagagtgagaccttttctcaataataataataaaagtaaaaagaaatataatatttaatcaatatatgcacacacatgggtttatcatgacacacatgacatgtgtgtacagtgaaaaaaatgagtaaatctagaaacctgtattgcctcaatagctagctaagtacttcaatatgcatgtttatttcaacaattttgtgttaagcttcagtggtaaataagcagagtacactgaccataatgaatacttcttttgatgagggttatcactacacaattaaaatattacatagttggctgggcacgttggctcacacctataatcccagcactttgggaggccgaggcaggcagatcacctgaggatgggagttcaataccagcctgactaacatggagaaaccccttctctattaaaaatacaaaattaaccaggcgtggtggcacatgcctgt

SEQ ID NO: 553745 - DNA, 546 bp, Homo sapiens
tacatattccattatgttacagggtctagggctttgggaggacaaggctgcaggcagccgagattgtgccgctgcactccakcctgggcgacagagtgagaccttttctcaataataataataaaagtaaaaagaaatataatatttaatcaatatatgcacacacatgggtttatcatgacacacatgacatgtgtgtacagtgaaaaaaatgagtaaatctagaaacctgtattgcctcaatagctagctaagtacttcaatatgcatgtttatttcaacaattttgtgttaagcttcagtggtaaataagcagagtacactgaccataatgaatacttcttttgatgagggttatcactacacaattaaaatattacatagttggctgggcacgttggctcacacctataatcccagcactttgggaggccgaggcaggcagatcacctgaggatgggagttcaataccagcctgactaacatggagaaaccccttctctattaaaaatacaaaattaaccaggcgtggtggcacatgcctgt

SEQ ID NO: 553746 - DNA, 546 bp, Homo sapiens
tacatattccattatgttacagggtctagggctttgggaggacaaggctgcaggcagccgagattgtgccgctgcactccagcctgggcgacagagtgagaccttttctcaataataataataaaagtaaaaagaaatataatatttaatcaatatatgcacacacatgggtttatcatgacacacatgacatgtgtgtacagtgaaaaaaatgagtaaatctagaaacctgtattgcctcaatagctagctaagtacttcaatatgcatgtttatttcaacaattttgtgttaagcttcagtggtaaataagcagagtacactgaccataatgaatacttcttttgatgagggttatcactacacaattaaaatattacatagttgsctgggcacgttggctcacacctataatcccagcactttgggaggccgaggcaggcagatcacctgaggatgggagttcaataccagcctgactaacatggagaaaccccttctctattaaaaatacaaaattaaccaggcgtggtggcacatgcctgt

SEQ ID NO: 553747 - DNA, 810 bp, Homo sapiens
actttttcccacttttccaggctcagcagggagctgctggatgagaaagggcctgaagtcttgcaggactcactggatagatgttattcaactccttcaggttgtcttgaactgactgactcatgccagccctacagaagtgccttttacatattggagcaacagtgtgttggcttggctgttgacatggatggtgagtacctttctatgaaggtgataaggatccactgagtcttctggttagggtcatattcctactgcaagtggcccttactgagctgagagatgtcattgccacagggaggacctataggcacatgtaggttgaatgaaactctagttccacttggcagcccagacaagggatgggtcagtgagcaaggctctctccctagtctcaggccatacctgtggmgccctaatcctactctcatgacactggacctgggcagatgtgacaaattcacacaactctgattttgtctcaattttgtagatcttgtagatttcatccttcactctaatttcagcgtctaaaatcctcgctaccatgaacaatctgagtatttgatgagacagggctgaatagtgcagtttttctcctagcaaccatttgggggtatttgctttaaatcgattggaaaaatatggcataaccatttgcacaaacttgggacaaatgatattgggataacgatctaccagaatagggaattttacccacagtttctgggacaaaaaccaaggaatctctatggtgatcagccttcaggcctcctgaagaatatctctcacagtgtcctattctca

SEQ ID NO: 553748 - DNA, 576 bp, Homo sapiens
cagaacagcaacaacaaaagtcttgggggtgaactttcaagcatgtttttaataaattatataatttcagttttaaatatgtgtatatataattttaaaaatagatgttactaagcatcatcttacatgaaaataactactctcaggcatgtgttttgcccctccatgttcttcttttctgattatgaaagtgagtttctgatgagctgatttcaggggatttagctgggtttacagcagcaagtggaaggaatttcaagcattgccttctaacacgtagatacacggggcatgtgggtggcacattcacaactggatccggacggaacagtctccagactattccaaccagatcagaagttttaccttggggtccatgaataggctttgtcttcggaatacctgaaactgtgctcatcttttggttctctctctctctctctctctctctctctctctctctctttctccctctctctctctttmctttttaaggaagacaactcagatgtttctatcagagtctcagtggcgtctaagacctgaggaagtgaaagcactccttagctagagaaa

SEQ ID NO: 553749 - DNA, 572 bp, Homo sapiens
gccactgcgcctggcctatggtagaatgatttctattcctttgaatatatacccaataatagcattgctgggttgaatgtctaccacactgttacacatgtcggggacttgaggccagagatgagtgttatccctgggcagatcatggggggcagggctcggctgggcatcctgctcttcagataacatcccaaacaagcagccagcgacccactcttccttcgtggwgaccaagggacatagttcagaattccagcagcacatgctggttcccacattcccttttttcccccttttctccagcccattgctcagtctccacatgaaaacttgacagaagccagactagagacataaacccagtatttgtttatgaaagatggattatcaaaatgatgccaggcatgatggctcatgcctgtgatcctagagctttgcgaggccaatgtgggaggatagcttgggtccaggcatttgggaccagccaggacaacatcgtaagaccgtgtctatacaaaaaattttaaaacttagctgggtgtggtagtgcaagcctgtggtccccactacat

SEQ ID NO: 553750 - DNA, 531 bp, Homo sapiens
agcatgatgcaattttttccatttttgttcccattgtatttttaatgttctacaggggttattacaataaaaatgactctagtaacaacactaatttcctaaagtactgagaaccctaatttacaggggattatgcagttttgcagagatgggtgatggtacaagaatgtcaatgacgataccaaactcaaaaggcaccagtcatattagtgccatcactaatgacctcattcaaccttagtcatctctttaaagactgtatctccaattgcagyattattctgaggcactgggggtgagggcttcaatgcattcaatgtataaatttttagggcatacaattcagcccataacagcagagaataagtaacaagtacaggagattacgaactatgttcatttgcacaatataacacacaaagatgcaaacaaattgaacaaatttctacctacgccttgtgtgctctgtgatattaagtcaagccttttgggtatttgagtcattagttcattttaattactctgttctac

SEQ ID NO: 553751 - DNA, 557 bp, Homo sapiens
gtacatatggtgttttgttttattatgcctgttgtatgccttaggggatattttacttctattgtttactatttattgcctagtttgttttcttctgtgcctctcgcataaatttcatgaggacagtgattttatttgacttgatttttggttgggggaattattttttcaagttctttttaaaacgggctttatttttttagagtagttacaggtttacagaaaaaatacacggtgattatagggaatttccatataccccgcttccccgcagtttctcctgttaacatcatgcattagtgtggtgtatttgttacaactgatgaaccgattttgattcattattaaccaaggttcatagtttaacattcattctttgtgttgtacattctrtgtatttggaaaaatgcacagtggcatgtctcccccattacagtatcatgcagaatagtttcaatgccctaaaactcccttgtgctcctccgcctcatccctcctttcccttctccccaaccctttgcaaccactgttatctttttctcttttctttttttttt

SEQ ID NO: 553752 - DNA, 556 bp, Homo sapiens
agtgagccaagattgtgccactgcactctagcctgagcgacagagcgaggcaaaacaaacaaacatacaaacaaacaaacatctcacctgaaaactattctacaaggggcactgggaaatagccatgtttataaaaaccatacataaaaactcaggtaacccattataggggcaggatattttcagtaaagtataatgtagaaagaaatgcactcacatttcttgtccttactctaagttataagagaccaacaaaaagcaatccaagtctctttgggctgcatgtaatggccattttctcctaaagacttgcttactctaatttcttgaaagaatttcaasaaattgagattaaatttacaaattggaatttctcctcaaaattgatcatgtcctccccccaaaattattcttttatatatcaaaaccaaagcctatattcagggaacctatttttaaaacctatccctcttattaaatatctacatgtgacacaatctaaagaaaaaaaagttctccaaaatccatttctattagtttctgcaatggcctaaat

SEQ ID NO: 553753 - DNA, 676 bp, Homo sapiens
tctgtgggcctccatctgcatgagcacatatacgctaactgaacagggttgtgacgaggattgaatgagataatacacccaacacttagcccactgcagtgctcagcatcacagtgttgcctttattcttccagtgatcagatcaaagcaaccaggctgtgctataacattaaaatcccattccatcggcaccctgtgtagttagtaaactcttgacatatcacagtgattggattgacactaagtaatttacatctgagaagagggtaggaaaaaaacactaaagattgactggattaaaattaaaatcttcctaagacaagtcagtgctcaaaccagtttaaactgaatgccacagtcagtcattaggtactagagttaatataagcgcaatttttccttgctaaagttagcacgaacttacttggagagcacgtacttcaggtagtcactgcaccaccctatcagaaaaagctcagcaaccacgcgtgagtcatttttgctccacttcatttattaacgctaagctyaagggtgtcacatccacaagactcaacacagcttctcttaaagaagaaagtgtcataacatattgccatgtgaaagaaagaaaaaaggtcagactgcaaaatatatgatcctattaaatcaaaacaaaaagagtgggtgagtatgc

SEQ ID NO: 553754 - DNA, 1289 bp, Homo sapiens
tagaaaactaggaccaataagtccaagaaagaggatgtagtccacccacaaggattattcttataaggaaatttggcatgtgagaaatgtagttttacaaaccaatgggaaaatactaaatttctcaaataatattactgaaggaatagatttattcatactaaaaaagtaaaaatatatttctattgtcaggatctacaaaaatatattttaaatgggttaaaagcaaatgtgaaaagcaaaattaaacattctaaaagagatcacagagaaaaattacaatagtggagtagggaaaggtttttttaaataagatacatatagaataaaacttaaggaaatgggttaatttgatgaaattaataagaatttaaagttaatttaatgaaagtataaagctaaaaacttcaatttgataaaaaacaaataaacaaatggaaaagacagtaattcaccaggaggaaatatatgcaactcagacaagtgacaaaggactacaaacaagaatacataaattcttcagagtagtaagtagaagccaaacaactcaatagaaaaataaacgggaaaaacatatgaacaggcaatttatggaaaaagaaataaaaaacattcattcttattaatcatcaggaaaatgcaaacttaaaccacgaagtgatacttatccatccatcaaattgccccagattataagaaaagtaagaatatcaactgttgcaaagaatgaaggtatatagaaattatcaggaatttttgtgggagtggaaattgtcataattactttagagtgctacttggcaatatatagyaaagttgtgcacatagcactagatgtctgctgtacagaaattctcacacaggtgcacaagaatcacaagacttttcatggtaatatcatttgcaataaggaaccactggaaatgatttcaatgtctattagtgttaaggttttgaaagcatcccccaaaaagcatgtgttgggaatttaatcccctatacaatggtgtccggtggtggggtctaatgagaggtgattgggccatgacagctctgccctcatgaatggcttactgctgttttttgggagtgagtttattataaaaaggtgagtgtggctccccttttgttctctctctcaccctcttgtcttctgctatgagatgactcaggaagaagaccctcactagatgccaggccctcaatcttggacttcccagacttctgaaccatgagccaataagtttctgttataagttaccaatctcaggtatcctgttatagcagca

SEQ ID NO: 553755 - DNA, 1266 bp, Homo sapiens
gccagccgcccagtctgggagggaggtgggggggtcagccccctgcccggccagctgcccgtccgggaggtgaggggcacctctgcccggccgcccctactgggaagtgaggagcccctctgcccggccagctgccccgtctgggagggaggtggggggggtcagcccccccgcccggccagctgccccgtccgggaggtgaggggcgcctctgcccggccgcccctactgggaagtgaggagcccctctgcccagccaccaccccgtctgggaggtgtgcccaacagctcattgagaacgggccatgatgacaatggcggttttgtggaatagaaaagggggaaaggtggggaaaagattgagaaatcggatggttgctgtgtctgtgtagaaagaagtagacatgggagacttttcattttgttctgcactaagaaaaattcttctgccttgggatcctgttgatctgtgaccttacccccaaccctgtgctctctgaaacatgtgctgtgtccactcagggttaaatggattaagggcggtgcaagatgtgctttgttaaacagatgcttgaaggcaccatgctcgttaagagtcatcaccaatccctaatctcaagtaatcagggacacaaacactgcggaaggccgcagggtcctctgcctaggaaaaccagagacctttgttcacttgtttatctgctgaccttccctccactattgtcccatgaccctgccaaatccccctctgtgagaaacaaccaagaattatcaataaaaaaataaatttaaaaaaaaaaaaaaaaaaaaaaagaattttattttatcagtaaatttagagaagaattaaaaaaaaacagtgctttgggcaaaataacagtggcacatcagtaccacccaaacaagtgcttttcatcatcatcgttaaagtcgcaatagcaccacatgctttcctgggaccaggtggcctgtttcccactgatataaagtggagacagcattgaaatagcaaaggagggtgatataaattggatacctatataaaatacaaattttaataaaaagcgtttgatattgtagaactatagatgagactattagtatgagatcataatatttttacttcttttgacagaacaacttcacaatattcttatttcaaaaaatattcctttttctgtgcatattgcctagcttttggtcaaatattaccygagctccatagaaatcaatgaaatgaatctatattttgccacaagcatttta

SEQ ID NO: 553756 - DNA, 396 bp, Homo sapiens
tgattccatgatgtaaatattcccacgatggcagatttcaagctaccactgaacctggtgtagagagctggttccagctggctccagcacactactggatataattcatacaaacaaaaactctttggggcctcartagtttctagaagtgtaaagaggtcctgttatcaaaaagcttgacaactaccaattatagtataatcactttttttgtttaaaaatatcaatggatatatacttctaaaaagatatacaccagtctctaatacagcagttacttcttgagtggggaaacttaaattttactttacaagcttttgtaccacgaatttttataaaaatcatgaaactcgaatataaaaaggaaaaaaaccctcattttaaggttcagaactt

SEQ ID NO: 553757 - DNA, 523 bp, Homo sapiens
aaactttgttacctctgtagcactatttaagatatcaacacatcattcaaaaatatatgatgttcatttcaatatttttaaaagtttattaaatttacrcattatatatgttttatgatactatttccagagcatttaagaaaacacatcttttcttttacatattaatagaaattttggccaaagaaaattcccaaactggtgttgatgcatgatgaaaaacgaaacaggccaatttgtgtttttgataccaaagagttagaattcataaaacacttgctcatagctttccagaaaatattacttgagttgattaaaacaaaccttgaacctataatgattataattaagtgagatttaaaatatgacaaatagaaaattatttagctatttaaaatattttgctggttttttttaaacctgcttgtatgtatacttgtcatatgtgattcattttggtgcttccctctttcagcacctctaaataacgaatatcaaagaaataggctcaaagaaatacaat

SEQ ID NO: 553758 - DNA, 520 bp, Homo sapiens
caagattcctccagttatccacacagaaatgaaaacacgtaatgatcagaacttaattaattattgaagatctagtgtggtggtaactgaatggttccaaaggcaatgcccctcaatcacatcatagtcagaatcattaatctgagaaatgaaaacaagaaagaggagagaaaaatcaggaattttgtggtcaaaaaggagaataaatwcaataaaatttttggaatgtagagaaatctggaccactaaggtggctgcgcagtgtatgtttcaataagaatttctcaaccttggtactattgatatgctgggctggaaaattctgtgctttgggggtggtcatgtacacagtaggatatttagcagtatccctggcctccacccactagatgtcagtagcattcctctccccagaattgtgacaacaaaacatttctccaaatattgccagatgtttcctgggaggcatcctatcccagccttgagctatttggttaaaaagaagaaataggtattttca

SEQ ID NO: 553759 - DNA, 966 bp, Homo sapiens
tgtgatgtttgtctttctgtttaacagaattttaaaaacgtacataatagccctgatatttcaactttaacttgggaggcttttttgtttttctttttttgagacggaatttcacttttgtcacccaggttggagtgtaatggtgtgacctctgctcactgcaacatccgcctcccaggttcaagggattctcctgcctcagtctcctgagtagctgggattacaggtgcccaccacctcgcctggctaattttttctaattttagtagagacagggtttctccattctggtcaggctaatctcgaactcctgacctcaggtgatccacctgccttggcttcccaaagtgctgagattacaggcatgagccaccacgcccggccagcttttgttttttaaaaaacagcaacaacaacaacaaatttatttgatgatttttcatataggcagattgaactgcccaaagattgggctgggttgcccatgagaaggtctcagtcatactattcattagtaattggttgttggcctctaacaatgaaatgtggaaggaatgaactcctaaattgaattgtaaaagttattagttaaagccaaaaaaaaaaaataaaagatcttttgacagctgatgctttagaggaatcacagtatttaccttgttttctttcttcctttttcccatgaatatagatgcctaaaggcacagatgacacctgggcccaaaaattgtacaacacacatttgaacaaatgtgcactctttgaaaagcctcgtctatcaaacaaagctttcatcatccaacattttgctgacaaagtaaggaagctttatatcagtttttctttttgaatacttaaatgtggaaaaaacccartagtcaggaggtatctttttttttcttttgctgatgtttgcattctttagggctcaagggacagcagtcttcagtgttgacatgttggttt

SEQ ID NO: 553760 - DNA, 871 bp, Homo sapiens
tgatggctgtattattcgatagaaaaagactaagccaaaatgcaaatgaatattcactcctatccttctttaaaaactaattagtactttgtgatttagatagcattttatttccaaaaacatttaaagtttttacagaaccataaaggtgagacaaaaaagatctctaaacacaaaatatctctaaaccatgaaaattgtcttttaataggaatccacacctggataagaaaggtagcagtcctgtttgttacgagtaacttgtgccacattattgaaaattgttgttgttgttgttgttgttgttagacggaatctcactcttgttacccaggctggagtgcagtggcacgatctcagctcaccgcaatctctgcctccctgattcaagctattctcctgcctcaacctcctgagtagctgagattacaggtgcctgccaccacgcctggctaatttctgtacttttttagtagagacagggtttcgccatgttggccaggctggtctcgaactcctgacctcaggtgatccacccacctcggcctcccaaagtgctgggattacaggtgtgagtcactgtgcccaaccgaaaaaaaattctttttttttttttttacttcattcactgatactgtttcttctgcaacagtattttcacatgttaaatgaaaatatgctraacagttaaatttaataagcagaaataaagctatgctggatttagcaggtgtcaagtagtcctctgactagcaattgttatcctgtcagcatgtatagtttagtgctacagtgctttctagatagacaaagaaaatgtgtcatgagggtaggccaccaaaatattaggaaaccttgctgtattgtcaaa

SEQ ID NO: 553761 - DNA, 576 bp, Homo sapiens
ggtcattcagatggtaagggtggagttggtactcaaacctcaaatctcaggcgtcccactctcaaactgccacttcctctttatccttgaaactattatatttttatcctattccttgcaaccaaagctgagtatactgcaaatagccacccaattgccatattcaatagcctcttttcaaagatagtattacttaactcctctataggtttcaaacagtactggattcttttttatatattaatacatggtttattgatcattatttttaagaggtaatattttgtttgacaaaaattattgtcatttcccactttgtgttatttatagttctaatgattgaatttttagatcagattttaaaagatcaattacaagaagcttgaggtagtttggggcatttcacattttaaaaatctctaaaggtttaaaggaagtacagttttgcaccacataatgacattttgcccaatgacagaccgcatatacgatgatggtcccataagattataatggagctgaaaaattgctattgcctaatgatgttgcagttgtcctaaygtcatagtgcaacac

SEQ ID NO: 553762 - DNA, 549 bp, Homo sapiens
tgtgattctggtatgtatattgattgatgggtattcacatcttttatgggtttaattgtatatgccctaaaagttcacatactaaagtattaactctcaatgcctcagaatatgactgtatttggatatagggtctctaaagaggcaaaagttaaaatgaaatcatgaggrtaggccctaatccaatatgactggtgtccttataagaaaaaatttggacagagatatgcacaaagataagtttatgtgaagacacaggaagaaggtggaattctacaagccaaaaaaaaaaacatgtttcagaagaaaccaacccttccaacaccttgataaaggattctagtttccatacttgtgaaagaaattagtttatgttgcttaagccacccagtctgtggtactttgttacggccaacttagcaaactaatagagcctcctcaaagaagaaaagatatgctctttggaaattttagttgtcttctatattttatcagagactgaaataagtgtaataagttggacaagggatatttttccaaaatatgaaa

SEQ ID NO: 553763 - DNA, 549 bp, Homo sapiens
tgtgattctggtatgtatattgattgatgggtattcacatcttttatgggtttaattgtatatgccctaaaagttcacatactaaagtattaactctcaatgcctcagaatatgactgtatttggatatagggtctctaaagaggcaaaagttaaaatgaaatcatgaggataggccctaatccaatatgactggtgtccttataagaaaaaatttggacagagatatgcacaaagataagtttatgtgaagacacaggaagaaggtggaattctacaagccaaaaaaaaaaacatgtttcagaagaaaccaacccttccaacaccttgataaaggattctagtttccatacttgtgaaagaaattartttatgttgcttaagccacccagtctgtggtactttgttacggccaacttagcaaactaatagagcctcctcaaagaagaaaagatatgctctttggaaattttagttgtcttctatattttatcagagactgaaataagtgtaataagttggacaagggatatttttccaaaatatgaaa

SEQ ID NO: 553764 - DNA, 531 bp, Homo sapiens
taccctagcacaggtgctaagaagcctcacatgactgcatccaccctagacacaacccgccacaactgctttaggtgaggttttctcaaggaatgccccagcgtgagaagggattcaagggcatttttccacagcccataactctactgtctgatttcactattagaacagggaaggttgtattagtccagttaggtatacaagtttgggaatgggttagcagtttggttgtctggtgccttttatttttggaggtacccagatatgaggagacatccccaggtaactatataataagggaaagattgccttttctcatagactcttyctgaatgtgtccagtctccccagggtggaggggcttggaatgggggtgggggcagctgtgatgttgagttcaaaattaatcgattctctcttgaggtcccagcagcctggaggcaaaattggaatctacgaagattgctagagaatcttctctctgggaccaaatgagaaactaaatttacaataatcctttaagaagaaaaa

SEQ ID NO: 553765 - DNA, 594 bp, Homo sapiens
cttctcatgagagccagacatccctagtagtgtgtgctcacaatagctaatggcttaacaagcactgtcaggcagcctcacatttcagctgctcgttttgctgaaggcagataatttatgctacatcccacagcacagaccaagtacataaaaccagagaggaatgttaatggaaaaaattacaaattcttaaagtgacagggcttttatagttaactcttttaatcagtttgcagtgttatcaggttatgtgaaagtttgaatgaaatatggaaaatgataaatgaaagaagtttgtaaaaggcaacaaatacagtatatttgatttaaaacatagggcagtgtttggcacatagtaggcattcagaaatgttttttgaatgaataagtgagtgggtgtatttttaatttctgatgtacttaatatacattttattttgttactactaaattttactgaactggcaaactttttaaataygtggaatgaattgtaagactgataaatctttaagcaaatgtagtttaatttttgctagaattttttgagacatttgccttattttatggctatgacttaattataaatatggg

SEQ ID NO: 553766 - DNA, 484 bp, Homo sapiens
aatgtctcctgaatgttttaggtgtgtatattataatcatcatatacttacaaatttttaatgtaatctgaagcctgtmttttaattgtgagtttaacctatttacatttgttatggttagtaacatatgtggatttatttttaccttcatgcttttttttttacctctttcgtttttctccttttacttattttgttggattgatcaatttttctacatttcttttattttctactactggttcagacattatgcattctatgattctagtgtttagccttaaattttattgttgtttattttgcattgcatcccactctggattttttttggtttagattcttcatttaataattatatttggaagcattcatacatgatacatttagcatctattctatgttctgctttatccaaaaatgtcttatgttatccttgctcttaaattatagtttgattaggtatagaattgtagattcacaa

SEQ ID NO: 553767 - DNA, 484 bp, Homo sapiens
aatgtctcctgaatgttttaggtgtgtatattataatcatcatatacttacaaatttttaatgtaatctgaagcctgtattttaawtgtgagtttaacctatttacatttgttatggttagtaacatatgtggatttatttttaccttcatgcttttttttttacctctttcgtttttctccttttacttattttgttggattgatcaatttttctacatttcttttattttctactactggttcagacattatgcattctatgattctagtgtttagccttaaattttattgttgtttattttgcattgcatcccactctggattttttttggtttagattcttcatttaataattatatttggaagcattcatacatgatacatttagcatctattctatgttctgctttatccaaaaatgtcttatgttatccttgctcttaaattatagtttgattaggtatagaattgtagattcacaa

SEQ ID NO: 553768 - DNA, 484 bp, Homo sapiens
aatgtctcctgaatgttttaggtgtgtatattataatcatcatatacttacaaatttttaatgtaatctgaagcctgtattttaattgtgagtttaacctatttacatttgttatggttagtaacatatgtggatttatttttaccttcatgcttttttttttacctctttcgtttttctcctyttacttattttgttggattgatcaatttttctacatttcttttattttctactactggttcagacattatgcattctatgattctagtgtttagccttaaattttattgttgtttattttgcattgcatcccactctggattttttttggtttagattcttcatttaataattatatttggaagcattcatacatgatacatttagcatctattctatgttctgctttatccaaaaatgtcttatgttatccttgctcttaaattatagtttgattaggtatagaattgtagattcacaa

SEQ ID NO: 553769 - DNA, 618 bp, Homo sapiens
  misc_feature 601: n = A,T,C or G
gctgaacagggcagagtttgggctgggctggtgggtggtggggaagaggggcgctacctggtattcctcattgtgctagatgcttttcttgggttatctcacttaattcttcaaccttgaaatatatatttctaaccctactttgaactggggctcagagaggttaagggagttgctgaaggtcacacagcaaagcagagtcagactcagtcaggcctagtttccttggatagcaaggggtgtggaggattttggggatgggtattctaactctgtctgtctggctggtggggccttgatggcgggcaccacctctgaccccatccaaaatggtctttgaagcccatcccagatatgaccctgtggatacagccagaagtcctcagacccccagggaccatggccttcagtctgtggcttttgtatatactgtcctgtacttcctaatgagggcattggagagatgggtggtgacaaagaatgaagtacastgtaaattcaggtgcacctgggccagaattttagattttttgccatacatatgattatttctgttattttatattcactgttgcatagacttttgccccatagatacaanatgatgtgtgtttattt

SEQ ID NO: 553770 - DNA, 618 bp, Homo sapiens
  misc_feature 601: n = A,T,C or G
gctgaacagggcagagtttgggctgggctggtgggtggtggggaagaggggcgctacctggtattcctcattgtgctagatgcttttcttgggttatctcacttaattcttcaaccttgaaatatatatttctaaccctactttgaactggggctcagagaggttaagggagttgctgaaggtcacacagcaaagcagagtcagactcagtcaggcctagtttccttggatagcaaggggtgtggaggattttggggatgggtattctaactctgtctgtctggctggtggggccttgatggcgggcaccacctctgaccccatccaaaatggtctttgaagcccatcccagatatgaccctgtggatacagccagaagtcctcagacccccagggaccatggccttcagtctgtggcttttgtatatactgtcctgtacttcctaatgagggcattggagagatgggtggtgacaaagaatgaagtacactgtaaattcaggtgcacctgggccagaattttagattttttgccatayatatgattatttctgttattttatattcactgttgcatagacttttgccccatagatacaanatgatgtgtgtttattt

SEQ ID NO: 553771 - DNA, 517 bp, Homo sapiens
ccgtggaatggtaagggtggttcttcactcagtctgccgattcaaactctaatatcttctagaaaccccctcacagacacactcagaagcaatcttttaccagctatctgggcaacccttaccccagtgaagttgacacagaaaatttaccatcataaatggccggagaggaaaagacagaaaagaacatggaaaggaccctccagagggaaagaagtggtgggagcaggggcttgtggtcttgtgcgaccagggccaaggcccgtagatataacaaggacataataaactgaaaaatgttcattggattttgattctagaagcctctgatgagctgaagaaagtttcagtagaaatctttccatttatacctgggtgagggtgtctgatgaagktgacttgcaggtggtaagtggagggaagctgaaaagtctctgtagatgcagctgtggatggaatgcagtagaagggggtcataagaaggggattcaggcgacatgggagaaagtttctttct

SEQ ID NO: 553772 - DNA, 565 bp, Homo sapiens
tgaggcaggctgtagatgggaacaagctacaaaaaaaaaaaaaagtacacagcactgttcaaaccctagggggtttttggttgttgtctacaaggcaagaggtgctttaaraaaattctcccctcctgttttcacttcctcttctctctcttaaccctgggaaggggaaaatcctacaaagattagcagctgatgtgtgaaagaaccaaaacaacattcttctagttgcattttaacagtatcttctggcagccaccacgggactgggttctgatgttcccagctcaaggccagaaagaatcactggatcagaatgaagcgtgcagttggaagagatcttaaaggccctctagtccaatgcaccaacacgctgtcctgttaaagtgtgtcaaattgtgccctggagcatagccgcctccaggtgaagggtgagcactaccatatcggcagccctgttgaggacattggctctgggttatgctaaaccacatgggcccactatccactcacctgcggcaggggccgtgttgtatttcaatggcacagagaacccagggatgccctc

SEQ ID NO: 553773 - DNA, 1112 bp, Homo sapiens
ggagggaatttaagggagctcccatctgtgatttctatccattttatgaagaatgagcaaagtaatctgacaaggtaagaagagacaggagcaagtaggtttggagaatcgaggaaaatggagaatgtaggaacaattgtttcctaatacttcataggtcagatttctccagagagcaattttatctacattttgcttcctcaatttttaaaaagtttaatttaatttatactacttctagaaacaaacattctttaaacttgagggaaaatataatgactatttagaaagtagttttagttttatactatggccagaaatccaaagggatatttttcattttcacatttataaataaatatttctttccaggattttacctaaatttctacttatctatcagtctatcaatcaatcagtcatctatcctttcatccattatagcttgtttgtatttaaataaactagaagcaactttgaaaataattaaaacataatttagtgtaaaataaaaattttctataatcaatcaatgagattcctgaagatattttttcccttaatattgaagattggtaaaaacactatatgattctgtcctttccttttaaaattgccatcaaagtcttaaagcctgtcttgattacttttttaatttgggggggctaaaatcatattgttgattgataatgtaagcttaagatttcagcattttgatctcctcaaaaaattaaaatgatatttttggtccagacatggcagctcacactcataatctcagcactttggcagaccaaggcaggaggatcacttgagcycggaagttctaaaccatgctgggacatagagtgagattttctctctatgtaaacaaacaaacaaaaaaatttttttagccaggtagggtgggctgtagtctcagctactcaagaggctgaggtagaaagaagggttgtttgaggagactgaggctgcagtgcgctatcattgcaccactgcactccagcctgggtgatagtgaaagtctgtatctaaataaataaataaaaacaaaacaggactttattttcccagggactatccctcatcactgccaagtttggggacattag

SEQ ID NO: 553774 - DNA, 895 bp, Homo sapiens
cccctgctccttgggctgaccgggtcctgtaaccacacgacattcaaattacagacatgcaaaatcgttcagggtcaagggtgctttcaaagaggagagctgatgggaagtcaaaagtccctgttcctagaccgcatggcaagaaaccagggtcatgcctcacgyccaccagtcctctgagccattccccaggagtaagggtggctcacagacctgatctaccactgctctcacgggtgcaccccatctttacccaaaggcccagaggcacacgcaagacccgacaccccataaaccacgcactacttttacatggctcaagttgcctcttgggtgggcaacttcccgacccagctcttcaacactaacgccaggctgacaacactctcactgaagtctcaagttctcactgccgtctgcaaaaggatttccgaaacctgtgtggcagagggctctgccccacacatacgccagcttcccagctcctcccaagcatggcccaggaagcccctcctgacacctgtgagcagcacaggttccctgtcccccatcatgactgccagccagaagccgagcatgaggacgtgttcccaactcctcccctccccctcttcacgcgggagcaggaggacaagtgagagttggaaaggcagaggcagagaccacaaggcagcagatggcccggctcagccatgccaggacgccggccgcaggcacggtggcctcagcaactcacaaatgggtaggctcacccgggccagccaatgctccttgaggcacatgtgcagggcttgccctggccacccacacgcccactacagaccctgagcgctgctactgctgtgtcaccaaaggtcagacaaagggcctctaagcaggaggccctgcacagcca

SEQ ID NO: 553775 - DNA, 513 bp, Homo sapiens
agtataatggtcatcagagcatctccctcgaggtgacagttcaagtgctaggggaaccagatccatatcaggcaggtgtatgagcagccctggccccacaggagcaaatagctcttgtaacaacaacataggcagagttcttagggtgcatgcaaggcatatgmccggttacaagagcactcactgcactcaggaagcccatagctatggcttcctattagatatatgtagttctccctgtctaaatgtaatcttccaatgtgaagtcattttatccttagcaatgttgcctagcaacagttgacatattatccttatcaggttaccaggggaacagagctccagaattaaccaaaaggttaaattcttatgcagagtaggaaagggttttattaaccctttgcccatgattgccttccaatcccttagaatggccggtgacagggaacatctggtcctctaaagttaccaaggaaactgaacagcagcatgtcccatttagacaagggagaa

SEQ ID NO: 553776 - DNA, 1025 bp, Homo sapiens
tgcaaaaagctcctatcttctagactgttagaatttgatggggttgggccaagtgcagtggctcacgcctgtaatcccagcactttgggaggccaaggtgggcagatgatgaagtcaggagatcgagaccatcctggctaatatggtgaaagcccgtctctactaaaaatacaaaaaattagccaggcgtggtggcacatgcctatagtcccagctactcaggaggctgasgcaggagaatcacttgaacccaggaggcagaggttgcagtgagctgagatcgtgccagtgcacaccagcctggtgacagagcaagactccttctcaaaaaaataaataaatacaaaataaataaatagaatttgatggggttttaggtcattctcttttgacttgtctatggtcaaaatattttctccaaagcaaactttggaaataatggggctcattttaaaggggcaggtgtgagacagccaaactagtgagcttattggaagcaatcaggtttagtaattacagagggttggtcttccctttcctggcaaggatttagagccataatagtgatggctttttgttaaaggtttttcttgccctttcaggaacgtcaccctgatgaaattgacaccgactctgcctacattcttttctatgagcagcagaggatagactacgcacaatttctgccaaagattgatggcaaaaagatggcagacacaagcagtatggatgaagactttgagtctgattacaaaaagtactgtgtgttacagtaaagctaccactctggctgctagacagcttggttgggaggaagatgactccttgtagctgatacttggcaaaagtatcactgagaggcaagctaaatgtagttattttatcctgttagaatacaaattctaattaaaatagttaactttaagagtagcagtaattttattttgaagtctcatgcaagttgtccgatagagaactttcaggcagatcccaccattagcctgtaaacaaaaggtttggcacca

SEQ ID NO: 553777 - DNA, 1025 bp, Homo sapiens
tgcaaaaagctcctatcttctagactgttagaatttgatggggttgggccaagtgcagtggctcacgcctgtaatcccagcactttgggaggccaaggtgggcagatgatgaagtcaggagatcgagaccatcctggctaatatggtgaaagcccgtctctactaaaaatacaaaaaattagccaggcgtggtggcacatgcctatagtcccagctactcaggaggctgaggcaggagaatcacttgaacccaggaggcagaggttgcagtgagctgagatcgtgccagtgcacaccagcctggtgacagagcaagactccttctcaaaaaaataaataaatacaaaataaataaatagaatttgatggggttttaggtcattctcttttgacttgtctatggtcaaaatattttctccaaagcaaactttggaaataatggggctcattttaaaggggcaggtgtgagacagccaaactagtgagcttattggaagcaatcaggtttagtaattacagagggttggtcttccctttcctggcaaggatttagagccataatagtgatggctttttgttaaaggtttttcttgccctttcaggaacgtcaccctgatgaaattgacaccgactctgcctacattcttttctatgagcagcagaggatagactacgcacaatttctgccaaagattgatggcaaaaagatggcagacacaagcagtatggatgaagactttgagtctgattacaaaaagtactgtgtgttacagtaaagctaccactctggctgctagacagcttggttgggaggaagatgactccttgtagctgatacttggcaaaagtrtcactgagaggcaagctaaatgtagttattttatcctgttagaatacaaattctaattaaaatagttaactttaagagtagcagtaattttattttgaagtctcatgcaagttgtccgatagagaactttcaggcagatcccaccattagcctgtaaacaaaaggtttggcacca

SEQ ID NO: 553778 - DNA, 964 bp, Homo sapiens
gagcccatttcaatatcgtgttgatcgcaaaaaattattttatgctctaattaaattcatggtatataattaagagttgatacaaaaaaactgccgagggatttaatgatgcaaaagagagaaaggatattagaactgggagaaaaaaaatgatgactcttgctggagaaaagagaatggccataaggaaggtgatcactttgttatttattactgcagatggcaattttgtttaaggaaggaaaaatattaatgaattggatatccagatacacattgaggttgcctgaagtgtttgaggcattactttaaatattattaaaaaattataaatttacacaaagagtatttttgaaagttatcctgaaaaacctagaattgacttttataacaaagcacatattaaaaaggtgactaaaacctttgaaaaacaatgtgtctattttgaaaagaaggatgtctttgtaaattaaaactcagcaagatctaataaacacaattgtacatgttttttgatcaaacaaatagtaggatttagatcagaggtctttaagcaacaaatttacttaaaagaatctaagaaaatttccaaagaaaattctggacaccatgttgagtagccatcataaggtaacccaggtatgcctattgtgaccaaactgcgaagtmaccctggaagttaattttccttccactatggatcaaatgtttgtgctcctccctgtcattcacctgttgatacccaacctccagtgtgatggaatttggaggtggagactttgggaagcaattcagttatgagggcagagaaacctcatgaatgggattagtgcccttatcaaagagagtccagaaagctgcctcaccgcttcctccatgtgaggacacagctagaaggtgcccaatatgaaccaggaagagtccttaggaaacaaaaatctgctagcaccttgatctcaaactt

SEQ ID NO: 553779 - DNA, 618 bp, Homo sapiens
tggccccttcctctatctccaaagccaggaatgtggcatctctttgtgcctttcttctgaagtcacatctttccctgacatctgcctttgtcttccattaaggacctctgtggttatgttgggctcaccaggcattaaggacctctgtggttacactgggctcaccgggataatgtccccatctcaaggtccttaacataatcacatcagtaaagttcttttgccatataaagtaacatattcacaggttctggaaatcaagatgtggacatcttggggtagaatgggaggcattctgtctaccacagagacctactagcaaaaagcagggttgatatatttttctgttggtgtgttaaatgttttgctagtgtcactttttaaggctgattcctttgtttttcagtgtgttttcaatactaaaatgattttaagaaaatataaaacaattctgtaacaaacatttatatttttacataataatttgcacatttatgtctattttttcatatttraacatcagatttccttttttttttgtttgagatggagtcttgctctgttgcccaggctggagtgcagtggtgcaatctcagctcactgcaacctctgcccctg

SEQ ID NO: 553780 - DNA, 1284 bp, Homo sapiens
tattacaactttcaggtaatgtccccaagtggccaggatggcgacaggcttggtttctccggaggctttccctgagtgtgtctcacactgtggtcttttgtgcgcaggtgcgtggcgtctactccagatcgcaggaccatccaggtaagagtgtttccttctcactctgagcaccgctctccccctgcctagtgcaggtatctcaggaacagcccacttgttcatctctgaggcatcagcgaatggcccttgttgggctcctggtccccgacctcactgcctcaccacacactgtgaccctgggcagctctgctacccctcaccggctgagcggtggatggagaagtggttctgggccccttgagctgggtcatatgaaacaytgtgattaaggaaatatgatctccttcatttgaatgccttctgcctctttctttctctctttctctctttcttcctttcttccttttttttttttctttttgagatggagtcttgctctgttgcccaggctggagtgcagtggccgcaacctctgcctcccgggttcaagcaattctcctgcctcagccacctgagtagctgggatcacaggtgtgcaccactacacccagctttttttttttttgtatttttagtagagacagggtttcactatgttggccaggctggtctcgaactcctgatttcaggtgatccgcccgccttggcctcccagagtgctgggattacagatgtgagccaccacacccatctcatgtcttcagggcagattcactggtggggagttggagctctggcccatagcagggtctcgggacctccagcctcagagtgctgaccagcttagcctggagcagccgatgagtgggactcgggatagagggccacccttgctccagccccagagccacattccattggccattgtgacacccaaccaggaagcatcaggacggggcttctctcgggaagacagggaggcacacacccttcgctgttaagagtgtgggcacacgttctggtcagccaggggcagggatgggaagacgaggctttctgggagcagcaggcagtcactgggctgttgctccctgctggaagttgcaggaggtggggaggagaccctgctagtgcctgaacccctgctgggaagcctgttgtgagcacagcctctgcccccgccccaccagagcttggctgggcacccccccgagcgctattgtatggccctgcctgtctctgatgggaaatcagccttttttaaaaaattatttttgtttt

SEQ ID NO: 553781 - DNA, 1284 bp, Homo sapiens
tattacaactttcaggtaatgtccccaagtggccaggatggcgacaggcttggtttctccggaggctttccctgagtgtgtctcacactgtggtcttttgtgcgcaggtgcgtggcgtctactccagatcgcaggaccatccaggtaagagtgtttccttctcactctgagcaccgctctccccctgcctagtgcaggtatctcaggaacagcccacttgttcatctctgaggcatcagcgaatggcccttgttgggctcctggtccccgacctcactgcctcaccacacactgtgaccctgggcagctctgctacccctcaccggctgagcggtggatggagaagtggttctgggccccttgagctgggtcatatgaaacattgtgattaaggaaatatgatctccttcatttgaatgccttctgcctctttctttctctctttctctctttcttcctttcttccttttttttttttctttttgagatggagtcttgctctgttgcccaggctggagtgcagtggccgcaacctctgcctcccgggttcaagcaattctcctgcctcagccacctgagtagctgggatcacaggtgtgcaccactacacccagctttttttttttttgtatttttagtagagacagggtttcactatgttggccaggctggtctcgaactcctgatttcaggtgatccgcccgccttggcctcccagagtgctgggattacagatgtgagccaccacacccatctcatgtcttcagggcagattcactggtggggagttggagctctggcccatagcagggtctcgggacctccagcctcagagtgctgaccagcttagcctggagcagccgatgagtgggactcgggatagagggccacccttgctccagccccagagccacattccattggccattgtgacacccaaccaggaagcatcaggacggggcttctctcgggaagacagggaggcacacacccttcgctgttaagagtgtgggcacacgttctggtcagccaggggcagggatgggaagacgaggctttctgggagcagcaggcagtcactgggctgttgctccctgctggaagttgcaggaggtggggaggagaccctgctagtgcytgaacccctgctgggaagcctgttgtgagcacagcctctgcccccgccccaccagagcttggctgggcacccccccgagcgctattgtatggccctgcctgtctctgatgggaaatcagccttttttaaaaaattatttttgtttt

SEQ ID NO: 553782 - DNA, 1284 bp, Homo sapiens
tattacaactttcaggtaatgtccccaagtggccaggatggcgacaggcttggtttctccggaggctttccctgagtgtgtctcacactgtggtcttttgtgcgcaggtgcgtggcgtctactccagatcgcaggaccatccaggtaagagtgtttccttctcactctgagcaccgctctccccctgcctagtgcaggtatctcaggaacagcccacttgttcatctctgaggcatcagcgaatggcccttgttgggctcctggtccccgacctcactgcctcaccacacactgtgaccctgggcagctctgctacccctcaccggctgagcggtggatggagaagtggttctgggccccttgagctgggtcatatgaaacattgtgattaaggaaatatgatctccttcatttgaatgccttctgcctctttctttctctctttctctctttcttcctttcttccttttttttttttctttttgagatggagtcttgctctgttgcccaggctggagtgcagtggccgcaacctctgcctcccgggttcaagcaattctcctgcctcagccacctgagtagctgggatcacaggtgtgcaccactacacccagctttttttttttttgtatttttagtagagacagggtttcactatgttggccaggctggtctcgaactcctgatttcaggtgatccgcccgccttggcctcccagagtgctgggattacagatgtgagccaccacacccatctcatgtcttcagggcagattcactggtggggagttggagctctggcccatagcagggtctcgggacctccagcctcagagtgctgaccagcttagcctggagcagccgatgagtgggactcgggatagagggccacccttgctccagccccagagccacattccattggccattgtgacacccaaccaggaagcatcaggacggggcttctctcgggaagacagggaggcacacacccttcgctgttaagagtgtgggcacacgttctggtcagccaggggcagggatgggaagacgaggctttctgggagcagcaggcagtcactgggctgttgctccctgctggaagttgcaggaggtggggaggagaccctgctagtgcctgaacccctgctgggaagcctgttgtgagcacagcctctgcccccgccccaccagagcttggctgggcayccccccgagcgctattgtatggccctgcctgtctctgatgggaaatcagccttttttaaaaaattatttttgtttt

SEQ ID NO: 553783 - DNA, 912 bp, Homo sapiens
agctaggattaccggtgcctgccaccatgcctggttaatttttgtatttttcgtagagatcgggttccaacatgttggtcaggctgatctcgaactcctgacctcaggtgatccgcccacctcggcctcccaaagtgccgggattacaggcatgagccactgcgcccagcctttgtaatcttatttaacaatttcttgaattctgagcaataaaatgtatgtcttatttgttattgaaagagaatttgaagtgtggttgatagtattaaagctcataaaacrggatcattttaacaaagagatgttcgaaattacttaagagagatatacctaagttcttcatttcaagaacctgcgacaattaggtttttagttttaagtctacatttcctggaaaccaaggaaaagaaggacattgatggttttacatttttcatagtttaatgaaagcaaagatggaaggatttttttttcctgaccctaattcctagaaagaatcttcctgaagaagtctatgttaagagaagacaagcctgcctcctgctagtttgctattctgcaaagtgctctacatatgaaggaggaaatgacggacccatcactgtcctggggcataactttatggcatgtcctccaactaggacacaatgacagtggtggcccctggaacacatacatgaatgaaagaagacccatgagaggagcgtttccctttttcttaggttgtgactgtgggatcgtgttttagagctgagaatcaggagaccgggggacagcctccaatttgccacatatgactttgagacctggggcagctcacaacctctcttggcagagtcagccaagttatctggccatttaaccaagggcctaccctgctaaaagagaccaaatttaacttgaactttcatc

SEQ ID NO: 553784 - DNA, 637 bp, Homo sapiens
tacccctttgaagagtacatttcaatgttttttcagtgtatgtacagagttgtgcaaccttcaccgtaatctacttttgaagtgttttcatcacgccaaaaagaaaccctgcaccctttattactcacaccrtattctttcccctccagcccctggcaaacactcgtctcctctctgccttcatgcatttgcttattctggacattttgcataaatcggatcctacaggatgtggttttatgtgaccggcttcttttgctcaggatcatgctttggtttcatccatgttgtaggaggtgccaatacttttttccttttttataaattgctggatagaatttttctgttatcaatgtgttgataacacattgatatcagctccccatgcaccccttaatatattttcagataaacaaggggatccattgaagctctgctcctttaacgtgagcaccacgttaagcttccccagcagagggtgctggagagatagtgcaaaagaaaggctgcaattttcggctcagggggcgagatcggaagtgcggttatgacatctggtggcacctcttccagccataggcccaggttgcagcctttcagcaactctgacacctaagcctggcaatattatttcccc

SEQ ID NO: 553785 - DNA, 637 bp, Homo sapiens
tacccctttgaagagtacatttcaatgttttttcagtgtatgtacagagttgtgcaaccttcaccgtaatctacttttgaagtgttttcatcacgccaaaaagaaaccctgcaccctttattactcacaccatattctttcccctccagcccctggcaaacactcrtctcctctctgccttcatgcatttgcttattctggacattttgcataaatcggatcctacaggatgtggttttatgtgaccggcttcttttgctcaggatcatgctttggtttcatccatgttgtaggaggtgccaatacttttttccttttttataaattgctggatagaatttttctgttatcaatgtgttgataacacattgatatcagctccccatgcaccccttaatatattttcagataaacaaggggatccattgaagctctgctcctttaacgtgagcaccacgttaagcttccccagcagagggtgctggagagatagtgcaaaagaaaggctgcaattttcggctcagggggcgagatcggaagtgcggttatgacatctggtggcacctcttccagccataggcccaggttgcagcctttcagcaactctgacacctaagcctggcaatattatttcccc

SEQ ID NO: 553786 - DNA, 573 bp, Homo sapiens
cttgttaatatctttcatgactcaacatatactttgtctagccgtatgtcccatgtaagcttgagatgaatgtatatacgacatttattgaatgaaagattctataaatgtcaaatagatctagatactcaatggtggttttctgtaaactggatgaagttattaattagaaamcttaacataacaaccctagtagctgtacatgttagagacttcaaagttttttgtgctagttattttttctcccctcttttctttgggtttcgctagatactctctcttaattagagactgtgtattaggcacttaattagagattgtgtattacagctcttgtagctaattcactgtttgtatagtgaagtcttattgatctggttgtaaggtgatggggagggaagcattctgtaatcttatgattaaatcccattcttttagtggttatgagtcattgggctatgacctttgtgagcatttcttagctttttaaaatctcgtcttatgtgagaaaggaagactaggggagtttggagttgtttaactgacattttcctaagtcagaaaggtcctata

SEQ ID NO: 553787 - DNA, 573 bp, Homo sapiens
cttgttaatatctttcatgactcaacatatactttgtctagccgtatgtcccatgtaagcttgagatgaatgtatatacgacatttattgaatgaaagattctataaatgtcaaatagatctagatactcaatggtggttttctgtaaactggatgaagttattaattagaaaccttaacataacaaccctagtagctgtacatgttagagacttcaaagttttttgtgctagttattttttctcccctcttttctttgggtttcgckagatactctctcttaattagagactgtgtattaggcacttaattagagattgtgtattacagctcttgtagctaattcactgtttgtatagtgaagtcttattgatctggttgtaaggtgatggggagggaagcattctgtaatcttatgattaaatcccattcttttagtggttatgagtcattgggctatgacctttgtgagcatttcttagctttttaaaatctcgtcttatgtgagaaaggaagactaggggagtttggagttgtttaactgacattttcctaagtcagaaaggtcctata

SEQ ID NO: 553788 - DNA, 547 bp, Homo sapiens
agcaagttcagttttcctttcattaccaatttatttccttaattttctacatgtaaaagattggaaaagggctgacagacagtagtcagcagtaacactaattgacaataagaaatatcttcattattgcaaggtggaagaatcatttaaaagtcaaaaagtcacagtaggacactattttaacatagtggactatgttgtgtttataattagcatgtgatccaaagagaaagtgagtacacaaaggatgtttagttcactaaggcaggaaaaaaagaactctaaagtatttttaaattcttttcattaaaacaatcagactgagaatatttgcttttcaaaggarttggcttcatttatctaaaaaatgctatcatatggattagctgattttccagtgacgcagaaaagatgacatatggtacagagtagcatatattcaagtgtccaaaaatattctcataatctttcccatgtaaaatccaattgttctcttaattttaattttctagaatgatgcttctaatctccattagcctcctctttt

SEQ ID NO: 553789 - DNA, 543 bp, Homo sapiens
caccaggaatgtaaacgtcccctgactgcacggaggctgttggccatggtgccacctgatgtagttgctcctatgacagggctggaaagagtctccccactgcagcccaaagggaggtgggcaaacaggtagagaggacagctggtgtcgtggaaggagcactggatcaggtggatggggtgtctgggtccttgccctgccagtgactgcgctgatctttattaatagtaaaaataaaagtagtaaatgctcagtgtttcatacatgccagatactgtgctgcrataggatgagctcccaatacccacaggggaggtgtcaccattctcattttacagatggagaaataaatggaagcttagagaaggaaagatacttgtcagggcaatgctctgggaagtggagacaccaggatttgcataagtactatttggccccagagccctgactcatgtttaattttttaattatatcatatttgatatattcaagagaatacatgcaaatatgtgtaagcaataaagcataacaaaatgaacatct

SEQ ID NO: 553790 - DNA, 1219 bp, Homo sapiens
tgaagttagtcctcaaactgattttggaatgtgctacttagacttttggtagttatgtgcttatagtggcagtttttaaatatttttaaacaaacactaaccacatattggtgtaaataatgaatatgcataatgccaaaggttcatcctaatgggaaagtgaattctgaaaaagcattattttttcttgtaaatgtatagaattttgaacccttgagctggaagtatgattataagggaggaagaaaatgttggagaagcaaagattttggggtcaggttgataggagtttgcatccttgttgctattttttggctttttaaattaacctctgttaatttttgcttctcagctctcaaagagtaaaataggggactgatagatctgtttattgtattcttgtgaaaatttagcacttggtacatagctattttcaaaaaatactggattttttcttctctgctcccttccccctagaaaatccactaaatggaacttggttcaaacctcctattttcaaacaattttttttttagttttatctccatttcacctctcaaagaagttaaataacctgccctacataatacttataacatgggaactaaaatgtttcatacaacttataactgagattatttgtatatgtgggtaaatgcatagttaggcatgtgggtggatgtgttttacttcaagatattcagttattttcagagtttccactgcaagactattaagctcaaatgaaatatcagttttagttaattcagtagaaataattttcattcatatatttatagaaaattgctataaatttcataaatacttattaaagattaggtatcatatgaaaaatatttgctctatttttgaaattattaaaaagtaaatggactatgtaggaagctggtttggcagacagggtgttgggtcagcagttcagacagatagtgtactgacattcattgtcaaaaggaaacagagtgagcaagactgcaaatagagggtttagagtggagctattgagaatgcaaggttggaaatcagattgcctgggtttgaatgatagttccaatacaaacctaccttatatgaaaccttgaacaaatcaccaaggctcttttacgcttaatttgtcaatctagagaatagagataacagttcgtatttaatasagttgaattgaggattaattgtgtgaacacataaaaagggcata

SEQ ID NO: 553791 - DNA, 687 bp, Homo sapiens
taattcctttagctgcttcctcccattgcccccctcaactctggacttgttcctgttctgggttcgaatttcaggtaacccaaagtcagtgtttctgatgatccttctctgacctcaggaggggacccacgaagagagatgatgttaactcagtgacaactaaccccctggtcgatttgtatgcaatatgcttcttatttttttccctcacaactgtactatgaggcatgttttattattctgatattatggatgaggacttgaagttcaagatatttgctgttcaaccaagatcacacagctagtcattggaaatgagatgggggctgtgccccaggttctctacctccttgtcactgcatcagagctgtgcaacattcttatcctttctaatttctgatgctttattgctccatagaaggcttcttcctgaaactgaagggacagmtatttattctctaaagcacaacatgaaacttgcccatacgtgaacaaggaactgctgtagaatgagaatctctatgtctttccatttattcatctacttattcatttactcattcattcatttttaaaaattttcaataggacaatgagaatgaaggacctattggatacttgctgaagtcagaaacctcttcccatcatgtccctattactaactatgtctactcctatttacttatt

SEQ ID NO: 553792 - DNA, 627 bp, Homo sapiens
tttaaattatattaataagtatactttgtttttcacaagaaaaatgacatattacatttaataaaaggactatatgggagtcagaataattcttttcaaatataaaaattttctcaaagtgtattggtctaagtaagacattmatttcgtaaataagtcattaggttttgtggctttagtttgcttttctgcaaaatgagagaaatctgtttagtatttttgctactcaccctgaagcaaaataaataagttctcacactgaaaacaaaataaataaatagcagctaattcagagtaggtggaaaaggtgtgtttgtaaaaacaagagtgtttattttcatgtgtggactttaattcatattctcaatcaactattttctacagcctcacctttcccttcttaatgagaacagtatagttctcctattactagacaacatttttatgtgagccacactctcactcaccatatctatgacaacatgcccaataaagaatctccactagcccaagtctgtttccatagcactagccaacagaaaactatgcggcaatcagccctagaaagtaacctcttatttgttctcacagagatctatgaagaataatatattttaacttttcctt

SEQ ID NO: 553793 - DNA, 627 bp, Homo sapiens
tttaaattatattaataagtatactttgtttttcacaagaaaaatgacatattacatttaataaaaggactatatgggagtcagaataattcttttcaaatataaaaattttctcaaagtgtattggtctaagtaagacattcatttcgtaaataagtcattaggttttgtggctttagtttgcttttctgcaaaatgagagaaatctgtttagtatttttgctactcaccctgaagcaaaataaataarttctcacactgaaaacaaaataaataaatagcagctaattcagagtaggtggaaaaggtgtgtttgtaaaaacaagagtgtttattttcatgtgtggactttaattcatattctcaatcaactattttctacagcctcacctttcccttcttaatgagaacagtatagttctcctattactagacaacatttttatgtgagccacactctcactcaccatatctatgacaacatgcccaataaagaatctccactagcccaagtctgtttccatagcactagccaacagaaaactatgcggcaatcagccctagaaagtaacctcttatttgttctcacagagatctatgaagaataatatattttaacttttcctt

SEQ ID NO: 553794 - DNA, 522 bp, Homo sapiens
agggcccctgctgtgcccagttgctacacagcccatgtcagctagctgggcttggctccctgccatgggtgcctttcagcatgctgcctgcagcaggcacccacttcacagtcatcatctgccatctccagttcaaccccgcggagtaagcagcaactcccccagccccgcccattytgaatgaggaacgatgtccagagggcactgtgttatctgcagtgacacgctgcgcctgacaccagtgacctcgtccttctctctacaccatgccccctgctcttagaaggggcatcttagtaaggacagggaactgcaaaagaggacatatgttaaaatgtggctgattcccccataactcctttataaatttggtttttagtaagatatgtgaactttatattcaaatgccattaagtatagtaataacacaattaggttcttttttcttttctttttttcttttttttttttttgagacagagtctctctctgtcaccaggctgcagtcatgcgatctcagct

SEQ ID NO: 553795 - DNA, 949 bp, Homo sapiens
atccaggctctctcctctgtcttgtttttgccaagttacaaagaarcgtctaaaaagcagcacagaggaacacagcaaagaaaagagaggcagaaacccagtgtgcagcgccaagtagagccgagccctggtcccccgggggctataattctaacccggcacagctcctgaggctgtgtgtctttgttactgtttttcttttgaaaacctggtggctttggtggttccgggccttgctttttcctaagaggggaaagcacagtctttggggggcaggtttcctccttccccaaggacgcgggcccggcttctgccccctcggccgtttctgtggcctccagaccataaagtgatgtgagaacccaggcacctgggtttcacctcttctttgtgtgtcttcatttaagaggtaacaagacagatggggggaactcagatcatcgctttttttattcctttttgttaaccgttgctttataggagatgtagctagtggaggatggaaggctggggattttctaggggcattgatgagaatctggccacaggagcgagagaggccctgaggtttaggcagaatgagctgtctcgacaccaagatgccccacagccctgaagcagcagtttcggtttgctctgtctgcagtagcgatgggaaagtttgcaggagttgtgatttcagaaagtgtgctcgtacagggaggatctgtaaagaggaaggggcaagagagactgtggtgagggtttaggggaaggaggtaggattcttttaaagagaatacattgcttacctttttttatttttttcttttcttttttttcttgttccgatagcagcagcagaagcagcactccagcgaagactcagcccgccccacctcacatctcccaccacccctctgcctccccgttccccctctccctgcccaaccacagccccctgcacagc

SEQ ID NO: 553796 - DNA, 949 bp, Homo sapiens
atccaggctctctcctctgtcttgtttttgccaagttacaaagaagcgtctaaaaagcagcacagaggaacacagcaaagaaaagagaggcagaaacccagtgtgcagcgccaagtagagccgagccctggtcccccgggggctataattctaacccggcacagctcctgaggctgtgtgtctttgttactgtttttcttttgaaaacctggtggctttggtggttccgggccttgctttttcctaagaggggaaagcacagtctttggggggcaggtttcctccttccccaaggacgcgggcccggcttctgccccctcggccgtttctgtggcctccagaccataaagtgatgtgagaacccaggcacctgggtttcacctcttctttgtgtgtcttcatttaagaggtaacaagacagatggggggaactcagatcatcgctttttttattcctttttgttaaccgttgctttataggagatgtagctagtggaggatggaaggctggggattttctaggggcattgatgagaatctggccacaggagcgagagaggccctgaggtttaggcagaatgagctgtctcgacaccaagatgccccacagccctgaagcagcagtttcggtttgctctgtctgcagtagcgatgggaaagtttgcaggagttgtgatttcagaaagtgtgckcgtacagggaggatctgtaaagaggaaggggcaagagagactgtggtgagggtttaggggaaggaggtaggattcttttaaagagaatacattgcttacctttttttatttttttcttttcttttttttcttgttccgatagcagcagcagaagcagcactccagcgaagactcagcccgccccacctcacatctcccaccacccctctgcctccccgttccccctctccctgcccaaccacagccccctgcacagc

SEQ ID NO: 553797 - DNA, 949 bp, Homo sapiens
atccaggctctctcctctgtcttgtttttgccaagttacaaagaagcgtctaaaaagcagcacagaggaacacagcaaagaaaagagaggcagaaacccagtgtgcagcgccaagtagagccgagccctggtcccccgggggctataattctaacccggcacagctcctgaggctgtgtgtctttgttactgtttttcttttgaaaacctggtggctttggtggttccgggccttgctttttcctaagaggggaaagcacagtctttggggggcaggtttcctccttccccaaggacgcgggcccggcttctgccccctcggccgtttctgtggcctccagaccataaagtgatgtgagaacccaggcacctgggtttcacctcttctttgtgtgtcttcatttaagaggtaacaagacagatggggggaactcagatcatcgctttttttattcctttttgttaaccgttgctttataggagatgtagctagtggaggatggaaggctggggattttctaggggcattgatgagaatctggccacaggagcgagagaggccctgaggtttaggcagaatgagctgtctcgacaccaagatgccccacagccctgaagcagcagtttcggtttgctctgtctgcagtagcgatgggaaagtttgcaggagttgtgatttcagaaagtgtgctcgtacagggaggatctgtaaagaggaaggggcaagagagactgtggtgagggtttaggggaaggaggtaggattcttttaaagagaatayattgcttacctttttttatttttttcttttcttttttttcttgttccgatagcagcagcagaagcagcactccagcgaagactcagcccgccccacctcacatctcccaccacccctctgcctccccgttccccctctccctgcccaaccacagccccctgcacagc

SEQ ID NO: 553798 - DNA, 640 bp, Homo sapiens
gagttgctatggatacatatttttgtccatgatgcaaggttgaaaatcacgtgatattttattggtcgtaatagattaaatctatcttgaactcaacttcctgaaaagctaggagaaaattctatttcagtcatgttttgtggacagtcttttcccaacatataccaccactaccaccacctcttctgccaacacactctaggtatttccctagcctgtgagttcctagtagcttcaaacttkgtggggaaaatgttacagtttttaatcgtcattggttaacattagtatgatccttgttcaagctcacatgagttgtaaatgacaatgccactgtctctaggttcttatgggctaggggtattattactcttcctgtcaaggccgtaaagactccaagccactttatcaaagtcctgacatttaaggggtatctagacagaaatgtggttcctagtgcccatagtttttatttccctgtcacaggggacactttctgtcaagtctgcctgctgctgctgcttctccaagcacacagcttcatcctctcaggaatgattctgcatgatttcccatgtatggacctatgaaaatcacatactggcctttcttccctggggtagatccttgttctctcatt

SEQ ID NO: 553799 - DNA, 568 bp, Homo sapiens
gcaggcagtacggcgacatgggaggggtggaaaaatagtccatggggagacaaggaagagcagcaagggacatagggggacaacattcagggtgccagccgtgaccaacagccacctgttggaagcaccctcacgctcacgcgctgtgctgggcacctcatatcctcccagccccctaataagtgaatactattgtccccactttgtggatgaggaaactgattcagaaaggtaaattacatgacctgggtaattgtgtaattaataagatgatacgatcaatatggggccaggcacagtggctcacacctgtaactccagcactttgggagaccgaggcrggtagatcatctgagatcaggagttcgagaccagcttggccaacatggtgataccccatccctactaaaaatacaaaattagcaggtgtggtggtgcactcctgtaatcccagctactccggaggctgaggcaggagaatcacttagaacctgggaggcagatgttgcagtgagccgagattcgtgccactgcactccagccttggcgacagagtgagactgtctca

SEQ ID NO: 553800 - DNA, 1264 bp, Homo sapiens
ttggcagtgctgtgccaagagccggcacgcrccgactgccaagcctgggaatgacggcagggcgccaagcctgggggtaccgttttcagtcaaaaacaaggagtgggtccgatttccttctgggctcagcagctggctctgcagggagggtggtgatgttggttaggcctactgtgcgccgtccgtttacgcattgacttgattgcctcttccccaccggccctgcgcgggcttatgcagagagaaacagactcagaaaggttctgcaacctgtccgaggtcacgtggcctgtgagaggtagtcaggatttgaactcagctctgccttgttcctgactgagcccagaggcctccctgggggcactgcccagaggtgtccagaaaggagttaagggaaagccagactcctgggaatgccgcagagccgccccagggctgcctttgaagggctgccgtagctcacacatccaagttctttgttctttaaaaacatgcatcctcctctgccaggacccctctgcccccctcccagaatcacctgatcagaaagcccgggaggctgggagaggccacagctccacaaccaagacagtcctgtctgtaactggtttctgcagcagtttcatcacagtctaggaaaaaccgcagttgctgcttccagggggccgttctaaggcatcggagaccctctctcccagtctcatagggtttggacccacccaccccccattccttgggtttcagctcctctgcccagctggcaaggctctgcttaatgttccattcagccaggcatgtcctcctccagggagccctcccagataaccacctccaactgccccagcagagggactcactccttctcagggttcccagcaagctctgttgaatgctgtgcaccagcacatttaattctcatcaaaactttgtgggttgaggcttttataatcctagctttacagatgaggaaactgaagcctggggtttggaggaatgtgccagggtgggagctgctctgccctatggctgctggcttgtgcgtcgtctctcatggggctgtgagctttgagggccaaggtcatccctgtgagccccgagcacacacggggtgctgtgcaggagcccttgttttgcaggggagaagccacgtatcctgttggctggagtctgggtagaactcaggtctcctgggtgccagcccagggagctccctgggactgagcgtgcactctcatccccactcctctggccatctcagccctgc

SEQ ID NO: 553801 - DNA, 639 bp, Homo sapiens
ctctgcgagaggtcatgtgatgtggtcaaggaggatgtctctgaggaggtagcacctaggagcctgaatttaccaagaaggaaactgagtctcaaaagttcaactttggaggaccgggcatggtgattcatgcctgtaatcccagcgagctggagaccaaggcagacagattgcttgagcccaggagttcaagaccagggtgggcaacatagctagaccctgtctctgcaaaaaatttaaaaattagccaggcgtggtggtgcatgcctgtagtcccagctactcaggaagctgaggtgagagggtcacttgagcccaggagttggaggctgcagtgagctatgatcacgccactgcactccagcctggatgacacagtgaggccctgtctctaacaaaaaaaagttcaactttgggcagcaggtgcacaccgcagatgtttgggagagaggggcaggaggataatcttcaggagagggaaggaacaatcttagtggaaaggcactaggtggtcaggcagcagctgccatggagaagtcatgggttgctgaactgttggaatcccagctctctagctttagtcygaaaggctcctcatgatgacctgaaggtcgctgtggaggagaaagtgcccaggca

SEQ ID NO: 553802 - DNA, 923 bp, Homo sapiens
cagtttctgtttagtattcagtgaaatggtgtaaagaaaaccatctgcactgcagctgcaaagggattaccttcggttcttcttttcaaagagaagccaaatgccccctgtgcacagccctggacagttgcttggatcttgtgccatatgttttatacagtactcctggagctaagtcaattaatagctcagaagacacaattagccttttagtgactgcattcattcataaagggctgcccaaaataaakaaactcttgattcccttctcctattataattgcagactgaagatttgaaatgttggatgacagcagatgtactgagattgttagcgcatggtggctgctctgctttatactgcctactaccaccaagccaaattcctaggtgtgggctagggtattggaacaaagtaaaaatgaaattatccttaacagaatgcatttaagttgaattttacagtccttaccatgtcctgagatagcttttatctttatttgaatatgtattttaagcagacactgagtattgaaatgtaattattgaaatgtaattactaaatgtaattattaaagtgaaaaactaatattttcccatgtactttccttccatggcaatctttttttaaggtaaaattttaaaactttgagaatattttagcaaactcatttgtaactttttcttaaaaaccttcaggctgtgtgtagctctagaaaccattgtaatcataacacacagatattaagccaatttctgtcatcaactagggcagaagttatactgatttcttctgacttgtatctggttcaagggacagtccaagagtcagtggtttagctgggggccagtttttgtgaggatgacaagatttgcatacagaattgaaaattttctgtttccttggtaggataccttaaata

SEQ ID NO: 553803 - DNA, 923 bp, Homo sapiens
cagtttctgtttagtattcagtgaaatggtgtaaagaaaaccatctgcactgcagctgcaaagggattaccttcggttcttcttttcaaagagaagccaaatgccccctgtgcacagccctggacagttgcttggatcttgtgccatatgttttatacagtactcctggagctaagtcaattaatagctcagaagacacaattagccttttagtgactgcattcattcataaagggctgcccaaaataaataaactcttgattcccttctcctattataattgcagactgaagatttgaaatgttggatgacagcagatgtactgagattgttagcgcatggtggctgctctgctttatactgcctactaccaccaagccaaattcctaggtgtgggctagggtattggmacaaagtaaaaatgaaattatccttaacagaatgcatttaagttgaattttacagtccttaccatgtcctgagatagcttttatctttatttgaatatgtattttaagcagacactgagtattgaaatgtaattattgaaatgtaattactaaatgtaattattaaagtgaaaaactaatattttcccatgtactttccttccatggcaatctttttttaaggtaaaattttaaaactttgagaatattttagcaaactcatttgtaactttttcttaaaaaccttcaggctgtgtgtagctctagaaaccattgtaatcataacacacagatattaagccaatttctgtcatcaactagggcagaagttatactgatttcttctgacttgtatctggttcaagggacagtccaagagtcagtggtttagctgggggccagtttttgtgaggatgacaagatttgcatacagaattgaaaattttctgtttccttggtaggataccttaaata

SEQ ID NO: 553804 - DNA, 648 bp, Homo sapiens
gaatttgtatgatggaattttagactcaagattgtctttggtacaaggcgggaacccggtgtaccttgggaccaggggactgacacagtggttgtctgctgggggcaggagggggcagcagagagccaccagggtggttggctcyggggaacccaaaagatgatggatgagtgggaaaatggactgttagggtgaacccaaatcacaaactcatagatcaaaaggaaagccaggctagaaagccaagccaggatggaatcaatgtataagaaaatatgctgtgaatctgtggtttcccttatcacttcagtaggagatttgacctttactttctttctacttaaattataaacaaaatgaagaaaattggccaagtgtggtggctcatgcctgtaatcccaacactttgggaggctaaggcagaagaatcatttgaggccgggagtttgaaacaagcctgagcaacatagtgagaccccatctctattttttttaaataataaaaaaagaaaattaaaattgctgtttaccacacagaatttttagcaatttgtatagccaaatccctgagttaactttttggtgtatttccttccaaaataataatcattttgaatacatgttttgttttataagctccttaaaatt

SEQ ID NO: 553805 - DNA, 622 bp, Homo sapiens
cactgtagtttttaaaacattatgctatgaagtttaatcttatgtaggatatgtacaattcattcttttcctggttttattgacttttkaaactcagcctcatacaaaaaatataatttatttaaattttccatgtgcgtgtactatttttcgaattacgcagagttcattgctttgagtttttcatttggattgaataaatattatgtagtgataaactattatgtgccatagcaagaggactctacagctataaaatgaagtgaagatatgtgtacatgtataaataattgaagcaaagaaattattacacttttttatgttcactctgtatcttggggaatactgagaatactctgagggaatactctgtagagtatatgtagctatattccagtgtagaaaggtaaatatttctcaatattccccaagatataaagacttgaaaatatatatatatgtcagacttgaaaatatacatatatgtgtacttaattatacacattatgcatatatcagccatgttccccctttcccattaggcccttgaaccaagggcacaatcttggtttacttacaggatttgtggctactaaggcctggttgttggccactgcagtga

SEQ ID NO: 553806 - DNA, 1086 bp, Homo sapiens
ggaaagcttctaagaaaacctggctgcatcaatgcacattctctacaaatgcaaatgtccccattaagagacagctttgcaggagtacttctgtttgcaggccatctgaacagccatctcaaaaaattatattttgggctgggcgcagtggctcatgcctgtaataccagcactttgggaggccaaagcagrtggatcactaggtcaagagatcgagaccatcctggctaacatggtgaaaccccatttctactaaaaatacaaaaattagttggtcatggtggtgtgcacctgtagtcccagctactcaggaggctgaggcaggagaattgcttgaacccaggaggcagaggttgcagtgagctgagattgtgccactgcactccagtctggtgacagagtgggactctgtcacaaaaaacaaacaaaaaaaactatattttggggtgaaatatttttatttctttcacggggttacctctctacaatgagctattttaactccatttatgcttaatctgtatcttgcaaagttagttgcacagtgctgtagaagtttctcccatgctacataggtattacccattttttctttgttaggaatgataaattactcttcaaaaggtttaattgtataatgttcctgtcctttgttcaaaagcccaacctccttgtactctttgtttccagcctgccaacaactctcccactctagttgcaccctgacatgcccagacatgtccagacatgccttgtattctagtggatggatcaccactcctaccccctcctcctcttacagactgtgcatttaccctgtttagaaaagtttaagtcttagccagtcaggatcagtttagattgtgcagtccaaccctagacacagggacaggaactgcattagggataaaaaccacttctctcctttgttcagtgtgctcttgcaatcgtaactgatgcaggcagcacccttctgcagaagcaaattgccttgctgagaaaaattttgcgtaagtgctggttcttccctgcagcaccgagcatttgtttccaacaagcctgggggctcatctgggattcccattc

SEQ ID NO: 553807 - DNA, 1086 bp, Homo sapiens
ggaaagcttctaagaaaacctggctgcatcaatgcacattctctacaaatgcaaatgtccccattaagagacagctttgcaggagtacttctgtttgcaggccatctgaacagccatctcaaaaaattatattttgggctgggcgcagtggctcatgcctgtaataccagcactttgggaggccaaagcaggtggatcactaggtcaagagatcgagaccatcctggctaacatggtgaaaccccatttctactaaaaatacaaaaattagttggtcatggtggtgtgcacctgtagtcccagctactcaggaggctgaggcaggagaattgcttgaacccaggaggcagaggttgcagtgagctgagattgtgccactgcactccagtctggtgacagagtgggactctgtcacaaaaaacaaacaaamaaaactatattttggggtgaaatatttttatttctttcacggggttacctctctacaatgagctattttaactccatttatgcttaatctgtatcttgcaaagttagttgcacagtgctgtagaagtttctcccatgctacataggtattacccattttttctttgttaggaatgataaattactcttcaaaaggtttaattgtataatgttcctgtcctttgttcaaaagcccaacctccttgtactctttgtttccagcctgccaacaactctcccactctagttgcaccctgacatgcccagacatgtccagacatgccttgtattctagtggatggatcaccactcctaccccctcctcctcttacagactgtgcatttaccctgtttagaaaagtttaagtcttagccagtcaggatcagtttagattgtgcagtccaaccctagacacagggacaggaactgcattagggataaaaaccacttctctcctttgttcagtgtgctcttgcaatcgtaactgatgcaggcagcacccttctgcagaagcaaattgccttgctgagaaaaattttgcgtaagtgctggttcttccctgcagcaccgagcatttgtttccaacaagcctgggggctcatctgggattcccattc

SEQ ID NO: 553808 - DNA, 1086 bp, Homo sapiens
ggaaagcttctaagaaaacctggctgcatcaatgcacattctctacaaatgcaaatgtccccattaagagacagctttgcaggagtacttctgtttgcaggccatctgaacagccatctcaaaaaattatattttgggctgggcgcagtggctcatgcctgtaataccagcactttgggaggccaaagcaggtggatcactaggtcaagagatcgagaccatcctggctaacatggtgaaaccccatttctactaaaaatacaaaaattagttggtcatggtggtgtgcacctgtagtcccagctactcaggaggctgaggcaggagaattgcttgaacccaggaggcagaggttgcagtgagctgagattgtgccactgcactccagtctggtgacagagtgggactctgtcacaaaaaacaaacaaaaaaaactatattttggggtgaaatatttttatttctttcayggggttacctctctacaatgagctattttaactccatttatgcttaatctgtatcttgcaaagttagttgcacagtgctgtagaagtttctcccatgctacataggtattacccattttttctttgttaggaatgataaattactcttcaaaaggtttaattgtataatgttcctgtcctttgttcaaaagcccaacctccttgtactctttgtttccagcctgccaacaactctcccactctagttgcaccctgacatgcccagacatgtccagacatgccttgtattctagtggatggatcaccactcctaccccctcctcctcttacagactgtgcatttaccctgtttagaaaagtttaagtcttagccagtcaggatcagtttagattgtgcagtccaaccctagacacagggacaggaactgcattagggataaaaaccacttctctcctttgttcagtgtgctcttgcaatcgtaactgatgcaggcagcacccttctgcagaagcaaattgccttgctgagaaaaattttgcgtaagtgctggttcttccctgcagcaccgagcatttgtttccaacaagcctgggggctcatctgggattcccattc

SEQ ID NO: 553809 - DNA, 1086 bp, Homo sapiens
ggaaagcttctaagaaaacctggctgcatcaatgcacattctctacaaatgcaaatgtccccattaagagacagctttgcaggagtacttctgtttgcaggccatctgaacagccatctcaaaaaattatattttgggctgggcgcagtggctcatgcctgtaataccagcactttgggaggccaaagcaggtggatcactaggtcaagagatcgagaccatcctggctaacatggtgaaaccccatttctactaaaaatacaaaaattagttggtcatggtggtgtgcacctgtagtcccagctactcaggaggctgaggcaggagaattgcttgaacccaggaggcagaggttgcagtgagctgagattgtgccactgcactccagtctggtgacagagtgggactctgtcacaaaaaacaaacaaaaaaaactatattttggggtgaaatatttttatttctttcacggggttacctctctacaatgagctattttaactccatttatgyttaatctgtatcttgcaaagttagttgcacagtgctgtagaagtttctcccatgctacataggtattacccattttttctttgttaggaatgataaattactcttcaaaaggtttaattgtataatgttcctgtcctttgttcaaaagcccaacctccttgtactctttgtttccagcctgccaacaactctcccactctagttgcaccctgacatgcccagacatgtccagacatgccttgtattctagtggatggatcaccactcctaccccctcctcctcttacagactgtgcatttaccctgtttagaaaagtttaagtcttagccagtcaggatcagtttagattgtgcagtccaaccctagacacagggacaggaactgcattagggataaaaaccacttctctcctttgttcagtgtgctcttgcaatcgtaactgatgcaggcagcacccttctgcagaagcaaattgccttgctgagaaaaattttgcgtaagtgctggttcttccctgcagcaccgagcatttgtttccaacaagcctgggggctcatctgggattcccattc

SEQ ID NO: 553810 - DNA, 1142 bp, Homo sapiens
catatcacatcactcaccactacacttaggccacttatatgcacaaatgtttaaatgccttattaactacttttaatcatattggccttaattctatttcctcaccattccaaggtttttttgtttgtttgtttttgttttgatctcagggccttttttttttctgaaacacactgctagattttccatggtgggcttgttattgtagtatgaatggcaaatatctcagcatacatatcacggcctcagagtttcttccctgaagtattccacatacaccttcatatatacaagcagatgggcacacacatgtgcaaacacacacatttctcagtctccatgctaggctcatcattgcatttatcaaaatctgaaatgttttaatttatttgttccctggcttgtgagttgttttatcttccactaggcaataagccccatgagagcaggaaccttatctgtgattcatcttatctatttcattcaccatcaagttcccagtacctaaaacaacatctgatgtatggaagacacttaataattactgaatgaacaaatgaaccttacattcagcctaaattttagtgcattaagacattttacctcaattttctacatgaatatcatttagttgacaacgacctgtgttccagttgtaggtctttgcaaatcctatggacctcaatattaagtggactaatttatggtgaccctttaatttctaaagttttataatgcaacagtcaattaaatatcaaatgtcatctcaattatgtatattgaagtatttgctatagttagtgtttaggaagttcaatattccacggacttactctttaaaggagaataaagtaatatcagtgtatcttatatagatayggctaaaaatgtgttgttactgagcaaagcatttaagctttactgttgtcagcactatccaaagaaaaggaattcctacttaaataaactttccaaatctaggcaacctagctctaggcttagcatcagctggttggttgagtcaacctcaataaaagatgactgtttctagaaaaattgggaaagtaagagtcagacaaacctgtatcagttcatgttttagccactgtaggtaaattacataatcttttcaactctctcca

SEQ ID NO: 553811 - DNA, 504 bp, Homo sapiens
acgtccatgttggaaatatggataaggtttcctctagattaaatcctcaagctacattttactcctagaggaaaacaattctttttacttctcattggtttcaggtcgtgtcctactagaacggctgccaatcttggcatttagctccccagaaataattaacttgcaagtacaaataaaggttaaaagatcttcaaaaggtggccagacatccaaaaaaggtagcatgcactttgacagaaggttatggacatgttaaagcaaatcacatccgatttagcagggacctgaatcccaactagaaaaaaacaaattcctgttayatgagctgtggtatttggactgggttcctctgaggctgacagagaaaggtgtggcccatttaccctttgctcagacaaaatatcttgggtttagggctatgcccaaataaataaatcaataaatcaatctgtgactttgaacataaagaaatataacctttcaaagtgcagatctttttca

SEQ ID NO: 553812 - DNA, 518 bp, Homo sapiens
aggtcatggtattcataagacgttctctctgaggagaattttattttgcaggggaattaggacaacttagtaggttttgaaaaacagagatttctgtttggttgtcctattctcattgctgatttccctgcagaaaagaggcagctaagattgctcactggctcttcagattgccttggaaacagcctttccgtttccttgagcttccatcccattagcagtggcagcttcacctttttcctagacgtgacacaaacagatccaccttcaaactgcatgagtcgttggacttgcattggcttttcttgttctttgctcccaycacataccgtcgctttccagcatcaaatggacatcaaattcaaggcaaatttagcccataggtctctgaatcaaaacctttcctctcagccacaaattctgtatttgccgataacagaggatcacaatctcttccttaaaggactaaaatgtgttaagtgttgaatcagtttccccctgcaaaacaacgtaacaga

SEQ ID NO: 553813 - DNA, 878 bp, Homo sapiens
ggtggccaagagaggaggtagaggtagaccttaaagagagtttttaaaagacacctaccctattgtaggcctcttcataatcctcaagaaagactcaattcagcttgatcttgtggggaggctctggagcccagactgcaccgcgcaatttcaccttgagtgacaaaagggagctggcatttatatctctattccactcagccgttgattgtgctgggtccctctaggagtggaaacattgcctctcaggcggggtggctcttgtttagcagaggcagttctccagaagggcttcagttgtgtgttatcaagcaacactcggttgctgtggaatagttaggtatgccagtaagggaattcttggtgggcaactccagcatctactacagtgttcaacatgtacttgaaaagcatgtgtcaaatgatgtagctgggtgcaattatagtttgtgatttccatcgttcccatctacgatgggagccttagtgatctagcaaagatgtttttctttggttggctatagatataatgtgttaaatcatcccactatgattgcttttttttctaaatcttcttttrgtgtcatcagttttgccttatatattttgatgacccattattttggacatacagatgtatacttatagtactgatccctctattattatgaactatcctaagttacgtatcttgcctaatttgttactagctttatttttattagaatttacatgttaaatctttttgttctgaacatattcttgaccttctcctttctacaattagggcccatctgctctttgttgatacagcagctctgtgatgcctttaaaaacaaatgctttttaaacttcgtactgtttttctggttctttgc

SEQ ID NO: 553814 - DNA, 878 bp, Homo sapiens
ggtggccaagagaggaggtagaggtagaccttaaagagagtttttaaaagacacctaccctattgtaggcctcttcataatcctcaagaaagactcaattcagcttgatcttgtggggaggctctggagcccagactgcaccgcgcaatttcaccttgagtgacaaaagggagctggcatttatatctctattccactcagccgttgattgtgctgggtccctctaggagtggaaacattgcctctcaggcggggtggctcttgtttagcagaggcagttctccagaagggcttcagttgtgtgttatcaagcaacactcggttgctgtggaatagttaggtatgccagtaagggaattcttggtgggcaactccagcatctactacagtgttcaacatgtacttgaaaagcatgtgtcaaatgatgtagctgggtgcaattatagtttgtgatttccatcgttcccatctacgatgggagccttagtgatctagcaaagatgtttttctttggttggctatagatataatgtgttaaatcatcccactatgattgcttttttttctaaatcttcttttggtgtcatcagttttgccttatatattttgatgacccattattttggacatacagatgtatacttatagtactgatccctctattattatgaactatcctaagttacgtatcttgcctaatttgttactagctttatttttattagaatttacrtgttaaatctttttgttctgaacatattcttgaccttctcctttctacaattagggcccatctgctctttgttgatacagcagctctgtgatgcctttaaaaacaaatgctttttaaacttcgtactgtttttctggttctttgc

SEQ ID NO: 553815 - DNA, 606 bp, Homo sapiens
atgaagaaaagactggatggctagcacccttccttagtaaaaagaaaagatcaaataatgatagaaaaaggaaatatatttcttatacctacaaaactaaaaattaacccatattgttatttttcatatttattttcaataatgatgccaaggtatttgaaagtcatgaatatctcagctaacctaagagattagcrtttttccaaacgtttttcagtagataggaagtctaaaaacaggaatgaagaaaagagtggatggctggcacccttccttagtaaaaaggaaagatcaaataatacctcacagaggaaaatgtcaccagggaaaatcatgtgcctttgtaaattagatacaggatcctcccctctcaagtccatttcctattcaaacctattggaacatgctagggtcaatgaaagttcattttattgaagtcaagatcaaaaagcaggcggctccaagatatatacagccctttagccacaaaggccagtgttgggggcagctcgtgggctagtatgagtatctccatgtctttattgaaaagcaggctactttcattttcaagcagcttccataagccttcatctcttgtgagcattc

SEQ ID NO: 553816 - DNA, 163 bp, Homo sapiens
gtggtcatgaactgtgtaaatgtggaacctgatgaagggctgcatagttcaaactgcaaatctgtaagtgagaaaaaataaacgctctttgctataagctactcargttttgcagaggtttgtttcacatcatttatttgactaataaagagataattaaaat

SEQ ID NO: 553817 - DNA, 603 bp, Homo sapiens
agaaacggctggattagaatcctagctttgctactcattagctgacaggtgctgaggagatgactaatacccttgaggtctgctctcttcagtgggttgttctgaggtttttaacattttacctgtacaataccaggaacaatacttggcatatttcagcgttcaggaataatatctactggacagttgctgtgtgttaacaagtgcttggcagtgttctaaatggccttaagtaatttcattgactcctcacaaaatcctatragctatttgttatcatctccattttatggaagagtagactcagaaagattaagtaactcatctaaggcctcacagcctgtaaatgacatagccaaggatataaaaccaggcagtctcatgttatagcttcattatcactttcacctcctcttttttctcttttctcttccttccttcctttcctttctctctcccttcccctccttctaccgcttactcccttcctcccttccctccttccctccttccatcctttcttttttttcctttcttttttaacataatatttcctttagaaagtgatatccagccgggtttaggaacaaaataatctgccag

SEQ ID NO: 553818 - DNA, 632 bp, Homo sapiens
acttcctgggcaaggcgacaccccaccttgtttctgctcatcctctgtgggctgtacccactgcctaaccagtcccagtgagatgaacagggttcctcagttggaaatgcagaaatcacccgccttctgcattggtcttgctgtgagctgcagaccagagctgttcctattcggccatcttgccaataccctccaaggacattcttaagtgaaacggaccccttttgctttttactgttggtatgtggcagtgaaaaatatatcagcgactaacatggtttggggtcattaacttgatccatgctcagtgccagagttaatgtcaatacattacaaagggaagtaatgtcttagcattattataaaaatagttttcaccttctagaccccctgaaagggtcttggggttccaaggggtctgtggtccagactttgagaacctctgcaataggtaagatagcaacctaaggtgtctgactttcagtactctttgactaacttgcccttgggaatttaygttggacactataggaaggatggggcaatacccagtctctgcaggtgggccacatctgccgaggctcttctcaaccattttacaaaatggtttgttccaagtgctgtttctgggg

SEQ ID NO: 553819 - DNA, 626 bp, Homo sapiens
ctttttcccctatcagaaaggaatttaataacaaataaaatatatccatttcagcagccaaccagacaaacacatggaactaatcagctaattttaagttagtatttgatgaccttttttttttttgtaaataagaaaagagaagtcagtggagtttggaatttatgtgttctgtgatttctgttggccaaggtcagttttacttgatttctcttcccctctttgcctaccacccaacccccaggagcacataagcaattattaggtgggatctgtctctatgtatcctaggggctgagcaacaagcagttagagaggaatcaaagctgggagaaggtaaggaaaccatttaattgttgagctgagtcctgggcagctccttctctttctgcctagtccagtcttacatggtcttcgtatttcagcctaaaccatcacttctttaaggaagctctccctgattccccacactggactggttctagttcttaaacactctttacaactctttgtgcccttccagctatctattgttctgtttatcattctgcacttgaactcctggtctcagycaatcctcccacctcagtctcctaagaagccgggactacaggttcataccacga

SEQ ID NO: 553820 - DNA, 511 bp, Homo sapiens
gtgaacatggcgaaaccccgtctctacaaaagatacaaaaattagccacacttgatggcatgtgcctgtagtcccagctactcgggaggctgagcggaaggatcacctgagcctggggaggttgaggcctcagcgagccgagattgtgccactgcactccagcctggttgacagaaggagaccttgtctcaaaaataaaaataaaaataaaaattaaaaagctgcaactgattttgttgttgttggaagaatgcagtaaatgaccaggaacctgcagaaagtgagcagagaatgagttccattttgggctaatggtttggtattccaactacagagggctttcaggtgaacaataaaggygtataagttgcaggtcatttgtgcggcagtgttcgttgtgaacacgagaatagcttggctttctgtgctttctgttccccttcttggaggggagcaggtgactgatttttatttccagcagaaggaggttcagttggattccatgaactca

SEQ ID NO: 553821 - DNA, 486 bp, Homo sapiens
tgactggaagttcatgattttctttctttytttttttttgacagagctcgctctgtcgctcaggctggagtgcagtggcgcgatctcggctcactgcaaactccgcctcccgggttcccgccattctcctgcctcagcctcccgagtagctgggactacagactcccgccaccacgcctggctaattttttgtatttttagtagtgacggggtttcaccacgttagccaggatggtctctatctcctgacctcgtgatccactcgccttagcctcccaaagttctgggattacaggcgtgcagctgtcgcccggccgaagtccacaattttcttaccctgagtgtggaatcaaaaccttgcttagagtctaaataactctagctatcagcacaataacaaattgaaactcatttttaaaaccacttgacatctgaactttaaataaccttctatattatctgtatatgattgcttttcttgtttaa

SEQ ID NO: 553822 - DNA, 486 bp, Homo sapiens
tgactggaagttcatgattttctttctttttttttttttgacagagctcgctctgtcgctcaggctggagtgcagtggcgcgatctcggctcactgcaaactccgcctcccgggttcccgccattctcctgcctcagcctcccgagtagctgggactacagactcccgccaccacgcctggctaattttttgtatttttagtagtgacggggtttcaccacgttagccaggatggtctctatctcctgacctygtgatccactcgccttagcctcccaaagttctgggattacaggcgtgcagctgtcgcccggccgaagtccacaattttcttaccctgagtgtggaatcaaaaccttgcttagagtctaaataactctagctatcagcacaataacaaattgaaactcatttttaaaaccacttgacatctgaactttaaataaccttctatattatctgtatatgattgcttttcttgtttaa

SEQ ID NO: 553823 - DNA, 2026 bp, Homo sapiens
tgctggatttataatatctaaatatgtaacatgtatggcattaatatttttctaataagataataagaacaacataaaatgaagagaaggagtagagctacacggaagtgtattttttgtttttttaagaaatgttaagaaattaaagaaatttttctttaaaaatagaaaaaaaatacacttctgtgtagctctatttcctctcttattttgcccagactggcctcaaactcctaggcacatgtgatcctccctcctcatcctcctgagtagctgggattacagttgctcaccattgtgcccagctcagaagtgtattttctatagcacactgaagttgttgatataaatctgaagtagattctaacatattaattcacacacacacacacacacacacgcagagagagagagagaacattagagcgaacatcaacaaaataaaagaatataacttagaaatcagaaatcattaaaggaataaaaaatgttacattagctaatattttagtgcaaaaaaagagaattagaggaatacacacacacacacacacacacacacacacacacacacacagtcaagagactcctagattagagacagacttttaatggctaatagaaaagcttgcattagtctcttcatgcctagattccgcatgagacaacaccatgaatgcaggtatcagcagtgtgtacattgatgtttgtagcataaaaaaggaattgcaaaattaggaatcgcagaatttatgtaggtcagctgacaaatctactacttccgtctgaagagaaagagaacaacccttaatctgaatgtaaagaaaccttcccaaggtagggaactagtctccaggtttggaaaccctagaatataaacaaatggcttcagggaattaggaagtgactattaattagaagcagatttcttttgggagtgacacaaatgttctaaaattgaaatttggttatgattatgtagctctgtgataacactaaaaccattgaattgtacactttaatatggtgcattaaattatctcaataaaattgttaaaagtaaaagctatgtcctccagtaggaatttctcaactcagggtcacagattactattggtgtggagtgaaatataacaaagaatgaggtttattttcaaactaaacatattcaatttaaaggatatgaggaaagaaaaatagtttagagcagtttgagctatgtgcggtatgcaaaatttattaggcccagagaaacatgagtatgcgacttcaaactcataaagtctccatgacttcgtgggtcattttcttggaggcaattgtttaaatgcatttgttcctgactagctgcctcacccgttgtctttatgttctaaacttacaatacaaaaagcattgtatagccaatcaatagttgatgttattttagtgtaaattattggtaaataacttaggaactgcctcttctttttctttaaaaacctacttgaaactgctactctgagtgtatattcaggacaacttgaatatgtgcttctgagttataatcytcaaacttggtccaagtaaaatctctacttatattaattttgactcagttttttcctttagtttgacatatcttattatattttgaatttaatcatctcccaattttgtgtgtgtgtttgtgtgtgtaaatatttcttttgttttagtatatgcttatatgaattaaatgtattagtaaaataaaaatggaaaatgttgtgtatctcccagatgctccttccaccccgtaaaataaatacatttgcaaatatggggcctatcaattgtccaagggcaaagggtactaatgttgacctaaaatttttataactcagcttctgttttactgagacacagtaaaagggcttttctttatatttttctcatgtagaattatgaacattttatgcactaaaggtctattctaagtactatgagttgatgcacttctgctctttctattttggaatgatcatggttaaacaggaaaacacat

SEQ ID NO: 553824 - DNA, 1624 bp, Homo sapiens
  misc_feature 545, 546, 547, 548, 549, 550, 551, 552, 553, 554, 555, 556,557, 558, 559, 560, 561, 562, 563, 564, 565, 566, 567, 568,569, 570, 571, 572, 573, 574, 575, 576, 577, 578, 579, 580,581, 582, 583, 584, 585, 586, 587, 588, 589, 590, 591: n = A,T,C or G
  misc_feature 592, 593, 594, 595, 596, 597, 598, 599, 600, 601, 602, 603,604, 605, 606, 607, 608, 609, 610, 611, 612, 613, 614, 615,616, 617, 618, 619, 620, 621, 622, 623, 624, 625, 626, 627,628, 629, 630, 631, 632, 633, 634, 635, 636, 637, 638: n = A,T,C or G
  misc_feature 639, 640, 641, 642, 643, 644: n = A,T,C or G
atgtagtgtccagcacttccgcgtgtttttaagggggaggatttttcataatatcttgttcacactaatcccacttcttcaaatttcagtagagcaccaagtcttacttgtgttttcttcaaatttcagtagagagctaagtcttacatgtttaggtcttacgtgtttagagcctcctgtcttgtgcttgcattgaggatatctcaacacaataagaaactagtctatagcttctttatttaatccccagttgtagggaaaaaaagttgtccttgccacaactttctatgaagcccatgaaacccttcttgagccagggcctccagcaatggtctcaaactcacttccagctttcatcactgcgaatcaggaggtccatgccagcccctctcagggctttgaatttcttgtcaatcttacaacctgttaaattatttatctttttttgagagaagttatgtctcagtggtttctctttgtgaattttatatattccttctaaatgcctgaggcagagtagggtatcgaagtgtgtattgtttgtnnnnnnnnnnnnnnnnnnnnnnnnnnnnnnnnnnnnnnnnnnnnnnnnnnnnnnnnnnnnnnnnnnnnnnnnnnnnnnnnnnnnnnnnnnnnnnnnnnnnagtagggtatcgaagtgtgaattgtttgttatatcttgactggacatcaaatatgccttttagaaagaacattctggcagcaggaggaggaccagattgcagggagtgtttctattagaccagtaagagggctgttgcaatagtttacacatgattaaaaagttcccctaagccaaataattgactgttgtagtagaaaaatggggattgattcaggagattattcaatggaagaacaagtaaattgctgtaaagctagatattgaagaaatataggaaaaaatccagacttttaataacattcattgaatgcttatagtgttcacatgtctaagtcaaatgttaaatacgttgtcttttttactataatattagaagcaattttataaagtacattcttggacaaggtgacaaagctgaggcttgcatacccaggattcaaacttaggtggtctgtttccagaatcatcattattaatctcaagattgtactcaagattgtagcaatctgtagtgtagttgagctatccataggaagagacagctgtgaatgtgaatgagtttaaactgccagactgaggaaaatgcataaaaattgatagcatcaaataagaaaaatatttccctttttaaaaaaacctttaagttcaggggtgcaggtgaaggtttgttacataggtaaacttgtgtcatgggggttttctgtacaaatcatttcatcktccaggcattaagcctagtacccattagttattttttctgatcctcttcctcctcccagcctccaccctctgaaagtacccagtgtgtgttgttcccctctgtatatccatgtgttctcattatttagctcccacttataagtaagaacatgaggtatttggttttctgtttctgtgttagtttgctaaggataatggcttccagctccatccatgtgcctgcaaaggacatagccttgttctttttcttgttctttt

SEQ ID NO: 553825 - DNA, 619 bp, Homo sapiens
taaagatcccgtgacaccactgcaggaaagagtgtaaaactctaccctttcctgtaacctcatgccaagaagataaccatcatttacagtttcatgtatatatgcccatattttccctatgaacatgtaagcaaatatatgtattaataatagtaatttggtaaacaatcatcaggattaataactraatttgaaatggctaagtaatgacccacaatacaaaaataattcagaaatggatggataaggaggaaaacattcacagattgcgttactcaaagtatggccccaagaccacctaagtcattcgtttttttggcattcctactcagtgtccaagaatagagtccaggaatctgtattataacaagctgtccagatgattccaatgcacactaaatttgagaatcactgattcaaagtatataatttttgtcttaattaaacagtgaataacaattacacatagacaaaaccaaaacacctttaacttatctttcaatcataagaaaattggattatcttttcctaaccatttagtctctaatatatgtttagaaacagaaaagcaattgtccccctcccctcttccaggtagaaggacctcaatatataagtc

SEQ ID NO: 553826 - DNA, 658 bp, Homo sapiens
ttcacttgttttattatgattattcagcttgaaatataaaaacttgtcactggataagatttcgtcaggtgcatcaagacttttccaagaagcacatttgttaaatattgaacaattaaaaatctgtaggaattcgtccaggcacagtggctcacgcctgtaatcccaacaatttgggaggcggaggtgggcagatcatgaggtcaggagttcgagatcactctggccaacatggtgaaaccgtttctaataaaaatacaaaaattagccgggtgaggtggcgggtgcctgtaakcccagctactcggtaggctgaggcaggagaattgcttgaacccaggaggcggaggctgcagtgagcaaagatcatgccactgcactccagcctgggcaacagagcaagactctcagaaaaaaaaaaaaaaaagaatctgcaggaattcgaggtgaatctgagatgtgcgtttgtcttggttctggaagtcttcggtcacagcttcagctccctgtctcctgctggtgccgctgccctttggtttctctccattataatcttgcacttttcttaatagagcacttagcttgaccttcttttctggcatttttcccttttctatctcaacacaattgcctaacatattcttgggtaataatgcta

SEQ ID NO: 553827 - DNA, 658 bp, Homo sapiens
ttcacttgttttattatgattattcagcttgaaatataaaaacttgtcactggataagatttcgtcaggtgcatcaagacttttccaagaagcacatttgttaaatattgaacaattaaaaatctgtaggaattcgtccaggcacagtggctcacgcctgtaatcccaacaatttgggaggcggaggtgggcagatcatgaggtcaggagttcgagatcactctggccaacatggtgaaaccgtttctaataaaaatacaaaaattagccgggtgaggtggcgggtgcctgtaagcccagctactcggtaggctgaggcaggagaattgcttgaacccaggaggcggaggctgcagtgagcaaagatcatgccactgcactccagcctgggcaacagagcaagactctcagaaaaaaaaaaaaaaaagaatctgcaggaattcgaggtgaatctgagatgtgcgtttgtcttggttctggaagtcttcggtcacagcttcagctccctgtctcctgctggtgccgctgccctttggtttctctccattataatcttgcacttttcttaatagagcacttagcttgaccttcttttctggcatttttyccttttctatctcaacacaattgcctaacatattcttgggtaataatgcta

SEQ ID NO: 553828 - DNA, 507 bp, Homo sapiens
atggtaaataatagcattcatttattttgttatattattattactttagttaccatctttggttttcaataataattaaaatcataacttacattagtaggtcattagaaattattttgggattttaatatccttttttgattataattatttctgttatacttctaggactagtgcttatatgccacacaaatatcaattatttcagtaaatatttgtaaatgtctgatcaacattcaaactgtatatataccactgaagcactgctatttagcaattgtgtcactattgagagagtgtacacccattgccataatgggaccaattgtgaaataaatttaattttaattaaaagataattgattttcctattctaaactatcaaagtttgaactgtctaatatctcagaaccacttaagtggtcaacatttaggtgacaacacwcaccttcaacttttaaatttttacattaaactagcagaaacaagatttttaaagaaatgaaa

SEQ ID NO: 553829 - DNA, 549 bp, Homo sapiens
aaacatttctctttttgctctgcaagcctactctggtttggctgatcgagactggactcagctggactctagcttgagaattgaatgtaagtctcctctgcatgcttcttcattcctcactcatgttttttctagggcaatttattcttctagaaatggtaagcacaagaggccaaggcaaattttacaaacacactgaaagccttggttcacatcaaatgcactaacattccgttgacttaagcaagtcatgtgcccagacccaacatcagtggtgtggagaaatgtgcaccacttactctgatgcagtattattgccaggttatctggtaaagygcatggatgtgtattccttctatatggagggagtgaagagtgtgaacaataatctatagagtcagtaagtaacttgagtgtacagactcagccagacatatctgtgtttctccagtgtctggcatggtaggtgtcccataactatttggtgaatgaatgaatgaatgcctccaaaatagaatttcctgtgatgaagtggtacatgttcccagt

SEQ ID NO: 553830 - DNA, 1445 bp, Homo sapiens
ataataaaaaaaaacctttaaacattggaagtctttgatttttatataaccagcatatttttatatggtctatagaaacatttctaaaactgccttttctacagattttgtcttttatatataagctgactgaaactgagctctttttgtgtgtgatggaactgtggtacctgactgtctctctcagtggaaaaaatggttgaccttattgacaggaagtcactgctctacctgctacaggcaggayaaagctgcaaacacctctctccactctacccatatctggggctgctgtacagggttgtgtgggtcgtttctgcacagggcagctggaagagtgggggatgtgggtctgaaatacagacttgatcctgctcatcgagccatgctttctggcttggagtaaatctacccagaggaaggggtgctttttctgtgtttcacaaaggcatcacctttatctagcactggctcagtgagactgggttcctcccaccttggcagaggggtgtctttttctaattagcacaaaggccaccttcattgtgtccactcagtcccagagcttccagattcaccaaggcttggtgcttgcttgtgtacactcttgctgttggcatgggagggctcttatttccaaaccaacttctctccctgcaccgtgacagggtagtagaggagctggtggtgctggattgaggataggaagccaggtggtgacacttacctgtgtgattgtgtgactctgtgtgcatatgtatctatgttcctgtgccacctgcagagcatgtaactagggattttataatatcttagctcttcctggactcatgttttatgagttcattgtttaactgttgcattgtatttttccttagcaacatgagaaaatgacttcattttggaagtattattcatttgtgtgaactcagttttttttttttattaatacatacagataaagacaaggaataattgaatttgggtataccaagcagcatcagggatatttttggtggtgatgtgcaaataaatattttgcataactgaagtgatgtgaaacaaaacacttggttaggttggaggactgcttgagtaacaggaatgtttggattacttgaacgataaggagatatctagagttagatgaagagagaaatttagatgaggggagagtctgtcagtgaagtgcttcctcagcttttagaactgatttttactgttctttgaaaaaatgtctgacctgattagggaacctaggcctcccttgtttaattagctattttcaattcacttttccctactgaatctccaaaaagcaaattactaaattccatacatcataaaaaaattataacatgagaaaaaagtgctttggccaaataaaagtgttttttgatagcataacagtggttctttaggtcacatcaaatgttatatagcag

SEQ ID NO: 553831 - DNA, 501 bp, Homo sapiens
cacatcttgagaaccttcctgcctatggagagattgccccttccagtgtaattcaagctaactcctgggagtttttagagataaaacacaacttgcctttgaacatacttttcatatagaaatcaaatagtacagcctatgcctcaaatcaccttcattatctaactctcgcacacaatgccaattctttccctatcctaaatcaccccagggccaggagcaagctagagactacccttatgttccagagccygttaaaattattccaatgatcccatcttcccttctttcccatagaaaacacaatacagcctctggggcaggctttctcttgcaccttctgcctcctggctgatcatggtgctttctcagatgcccttgcatgatgcagcctggctcccttgtcttggaaactttcagtgatattctttcaatggcattgacctgtcacctctgtaaattaaaatcccatgggttttagacagccctctttcttctgca

SEQ ID NO: 553832 - DNA, 535 bp, Homo sapiens
agcataaagacaaagagaaaattttaaaagcttctaggtcaaaagaaaagaccctaagaaatgccagaatatgtcaggcttctcaacatttaacaccacataatgtcctcagagttttcaaggaaaaacccacccagattaactaccattttaataaagaaattctcaaacctacaaagtttaagaaagtttctcactcaaagatcctatttgaaaggaacaagatcatatcctttgcagggacatggatggagctggaggccattatcctcagcaaactaatggaggaacagaaaatcatacaacacatgttcttacttataagagggagstgaatgatagaacacatggacacatggtagggaacaacacacactggggcctgtgtcggggcttggggagggagagtatcaaggagaatagctgatggatgctgggcttaatatctaggtgatgggttggtctgtgcagcaaaccaccatggcacacgtttacctatgtgacaagcctgcacctcctgcccatgtaccccgga

SEQ ID NO: 553833 - DNA, 530 bp, Homo sapiens
gtcaggtgtatgaatgcctaagtctcttcccaggtacaccacttccccggtaacatatttaatctgtgattccacaggccaatgaatctccttcgtataaggcactgagcgtggcagcttgtggatggagctctatacaagggctatcctgtgaatawaaagctacagaagatgacctttcaacccagcaaaaatcatcaagacccttaaacatgtaccttattgacttgattcactcaactaacatttcttgagtacacacaatgtactagacactttttcaagtttaggcttttgagattccactcaaattctaatagtctaaatatatatttttgctcatcctctttagatttgcacctgtttttaactacttatattcctgagatatatatcctgaaatttaacctagtaagggttttccagatagaaaaagaaaaggaatgccaggccaggaaatatgtggtatgaacaaatgtcctgaaatgtgaaagatctctatctgcttagggaaaggtaggatgtacaaa

SEQ ID NO: 553834 - DNA, 653 bp, Homo sapiens
gccacggcaaagttgtctcttgtgagggaagtgtacattctgtagagaatccccttccctttctagttctttttctgagcctgaagagattagctgagagttaagcaccttttaaagatctgaataggaaacatttgccacctattgcctctaagggtagccacttatgagacttcatctacataatagaaccttggtctccacaatctcttcttaacctagacactcctttctattgattccaggtcttcagataataacttaactctttcaacaaattgccaatcagaaaatcttcaaatccacctacgacctagaagaccctgcttctagttgtcccacttttatggattsaaacaatgtataactcatagtattgattgacgcctgcctgtaagttctgtcccactagaatgtgtaaaatcaagttgtaatccaaccaccttgggcacacgttctcagtacttcttgagactgtcttgggccttagccactcgtatttggctcaaaataaacctttttaaatactttatagagtttgactttttttttgttgacataaagtacttagtacagtacctggtatagtaattgctctccactccactccctcccaaaaaaagaaagaacaaaactcaatacatttttactga

SEQ ID NO: 553835 - DNA, 960 bp, Homo sapiens
  misc_feature 29, 58: n = A,T,C or G
tgcttgctaccctgggtccctgaactggnggcagaaacccagagatgcacacagcacnagttgacagccacgggggtttgtcacatcccactcccaggattctgtctcaggctgcctccctctgtaagttgtgacctgcttcacctctgggaggtctcctatgtctcatcgaaagactatctttggaaagaaatttagtcttttcagttccctgtttctttcttttgatttttaaccggaaattcccagaagctactttacagatgagaaaattaaaagacattgaaatgtagttctctgtatgatgaagctcattttctttgacctgtgcagatttataacttggctttgcttctgcccttgttcataatttggtggacgtggcaaaaattttcaacctggtttaagatccacttccacttttagtcaatagatgatgttgattgtttctctatcaggacaactcgggaaaaaagtacatgcttctgtaggagaagtgatactgagatttttcaatttctacttacttgttaaggattaatactttcccataatttagtgacatttctcccatttgaagctctacgaaagtcttctaagttcagatgttcctgttaaaacttggtgagaagaccgggcacagtggctcacacctgtaatcccggcactttggaaggccaaggtgggtgaatcacttgaggtcaggagttcgagaccagcctggccaatatggtgaaaccccatctctactaaaaatacaaaaattagccaagcatggtggtgcatgcctgtagtcccagctactctggaggctgaggcaagagaattgcttgagcccaggaggcagagtttgcagtgagcygagattgtgccactgttctccagcctgggcaacagagcaagactccatctcaaaaacaaaaaaacaaacacacaacaacataaaaaaacaacttggtg

SEQ ID NO: 553836 - DNA, 586 bp, Homo sapiens
gacatggatgaagctggaaaccatcattcttggcaaagtatcgcaaggacaaaaacccaaacacgtgtgttctcactcataggtgggaattgaacaacgagaacacatggacacagggtggggaacatcacacaccagggcctgccagggggtgggggtgggagggatagcattaggagatatacctaatgtaaatgacaagttaatgggtgccrcacaccaacatggcacatgtatacacatgtaacaaacctgcacgttgtgcacatgtaccctagaacttaaattaaaaaaaaaaaaaaaggccacttaggcattttgagaacatatctaatatgtagagcagggctaatctatgtaatatttttttacaccagcaggttgaccttcgtaattctgctttctcctaactaacatgaaaaagaatttggtattagtgctcctcaacttctcactgatcatggtgggagaagacagccaaggggccagggagatcaagacttgaccaaagaaattactggggacaatctccaaagtgggtaacccacacagagaaaagagtcagtagataaaatggattgagtgc

SEQ ID NO: 553837 - DNA, 528 bp, Homo sapiens
cacagttattggagagcatatgcatgtattaattgattgaatgctattgggtcaatccatgcacatgcttgccctasagaagtctcttatattaaagttcagagtaaacctttaatcatatttgaaggacttctaattgaagtggcagctaaatataaagacatgaagaccatagaaatctgtaatcttgattaaggtgtggttaggttttatctttcatacatgtaaaagagggttcacactccatgatttcttcctacattgagattctggggccttttgagaagtctttatcttaatgtatgtctctttttatattgttttctagaaaggcacgccttttccctatctgctgaatagtgagttgactttctctgaaaactaagatcttcttgcttaattctgtcttataaaacacaagtgacaagtgaacaagatctagtgatgttggcttgtctactctatattgtcaaattactaatgagatgcaacgccttattctggagttgtgttatttgcagtttggat

SEQ ID NO: 553838 - DNA, 673 bp, Homo sapiens
tttttttttttttgagatggagtctcactctgtcaccaggctggagtgcagtggcatgatctcagctcactgcaacctccrcttcctgggttcaagcgattctcctgcctcagcctcctgagtagctggaattacaggcacctgccatcacatccagccattttttgtattttttggtagagacggatttcaccatgttggcccagatggtctcaatctcctgaactcatgatctgcccatctcaccttccaaagtgttgggattacacgtgtgagccactgtgcctgacccaaagcagatcatcttaactattactgaagatttgacaggggggacctaaagagggcagtgggttgaccaagggtacatagggcacagaagcagagctggaacttgaacccaggtcacccgaaccccagccttgggccttcatgtcctaatagtaacagcttctgtccctcacaagcttggtcctccttggggatgggtacccgggaaagacgactaggagttggttctgggggagtccatcctggaggttggggacgggaagggactcaggggagccagggctcagttcctgctctgtccccttctctggccaggccaaatggcaacgcctggccttggagggcagtgtccgtctggaaatgtttgagcacatcagcctca

SEQ ID NO: 553839 - DNA, 673 bp, Homo sapiens
tttttttttttttgagatggagtctcactctgtcaccaggctggagtgcagtggcatgatctcagctcactgcaacctccacttcctgggttcaagcgattctcctgcctcagcctcctgagtagctggaattacaggcacctgccatcacatccagccattttttgtattttttggtagagacggatttcaccatgttggcccagatggtctcaatctcctgaactcatgatctgcccatctcaccttccaaagtgttgggattacacgtgtgagccactgtgcctgacccaaagcagatcatcttaactattactgaagatttgacaggggggacctaaagagggcagtgggytgaccaagggtacatagggcacagaagcagagctggaacttgaacccaggtcacccgaaccccagccttgggccttcatgtcctaatagtaacagcttctgtccctcacaagcttggtcctccttggggatgggtacccgggaaagacgactaggagttggttctgggggagtccatcctggaggttggggacgggaagggactcaggggagccagggctcagttcctgctctgtccccttctctggccaggccaaatggcaacgcctggccttggagggcagtgtccgtctggaaatgtttgagcacatcagcctca

SEQ ID NO: 553840 - DNA, 965 bp, Homo sapiens
cactcctgtgagcccaactgcttctctcgggtcatccacgtggagggccagaaacacattgttatcttcgccctgcgccgcatcctgcgtggtgaggagctcacctacgactacaagttccccatcgaggatgccagcaacaagctgccctgcaactgtggcgccaagcgctgccgtcggttccttaactgaggccgtggctgcccaccacgacccctcacacctcctgctgccgtcgctgccatcttgcccctagcctgggggctccctagcccctcccagagcatctcacccccaccctcatgttcagggtggatgtgggcatgcaggtgacaagggccctgcctccacccctccagcccatccagcaatcgccycctttctgccctgggggcccaggatgtagatattgtacaaaggtttctaaatcccttcttttctatgcacttttttatttaagaggtggggtcccaggtgggaacccccccacaataaagtctgtcaatgtttggagaggtggtcttcccatttgtaggctgtgggggcaggtaggaaccccacttctacacacccacccatcatgacccaaggaagttcatcagcctcaacaggtaggtgaggccatcattcagaattagaagtcagtcatggggtctgttacggcttcagaacaacacaacacagcaactgtctgtagcagggttgtttcccagaggggattctggtggcccagaggcacctggggtcagccctcccacatgtggccctgtgtgtatgttggaataggcccttctagggcgaagagcagtgaggctatctgttgggtctttgcccaattaggattgtacttcaagaagtacttcagtgctaattgtatactgggcttagtagtcagcaaagttctttattgggtgttaagcccagcaaaccccagatgagccaagcttggacagcacccgcaatgc

SEQ ID NO: 553841 - DNA, 525 bp, Homo sapiens
tgcttatttctactgcaacgctgctatcctaatcttctttgccacacttcctcccttttcccccttcccagcatattgatgctttaagtggctaggaataaggtgctattcatagacttgcaaatagaagagcacatcaagatatgtaaaagtattgcttctttgcagaggtataaaggacagagggatgtaagactgattcttcctatagctgggaggaatgaatataaggagctggtatgtctcacttcaccttgtgatataaaataaagtggcagctttgaatatttgagttaaatttcaggagtctccatgtagctattgtggaaatattcttattgccactaccttctttgtcgtttttttttgaggcagactctcgccctgtcacccaggctygagtgcagtggtgcgatctcggctcactgcacctctgcctcccgggttcaagcgattctcctgcctcagcctcccaagtagctggggctacaggtgcgcaccaccacacccagctaatttttgtat

SEQ ID NO: 553842 - DNA, 1432 bp, Homo sapiens
gaagggcatgtgatagatatatgacttctcctggttaggaagaaaaaaaatgtacaaacactttttaagcttcttacttgaagcctttaaggttaataatgacttgaagaaacgtaaagagaaagaggaggaggagggttgggcttttttgttgtgtacctcctgatgctgtcatgagtaagaggaataggaatttgaagatatagataataatagtggattgtttccagtgatttacctaagccaaaggggacaccagtagggatcagcattatttttcaggtcatagtgttatggctatttgtggtatatacctttgggggatttctggaaatgaagtaagatatataaaattattgataagaaatatatacttayttaaagtcttgttcttcagattatattctctactgtccccaagagactgatgatcttcataagacttaaaaacacagctaagtcctgtgttccagaatgactgcaagcaggtactttatacactacatatgagaaggacaaatggcaatttctttcaattccaaactgaagctcagtaccgaggaaatataactgctggcaccaagaacctcaagcacctggaaatgcattttctgctctcacaccaacaaccttgtttgagatgtcagagtagttctattgatatgattgttttataaatgtaaataactttatataatatagatattaaggagaaggtagaaatatttaacttctaacacaattatatttgccatatgaggagactgtaacattttaaacaatattatattatttctatctcttgatatcaataaatacataaatgtaaagtttcaaattttaaaaaataaataaaacattacagacaaaattgccatctcttttatttttttcctcagttttaatgccttcatccctctctcaaaataaacctattatgaacttttttctcaactccatgttttcatatttccaaacatagattttttaaacaatctgtggtgctgtgttttgtgtttttaaaatttacatgaatgtaatccaattgtatgtgtaattgtgaaacttgatttcttccctcaaatatttttcagatatagaaaaatttatatatgtagtatatttcatttcttttagctgatacatactattccattttatggatatactatatgtcccttttgatgcacattggattgtacatttacaaagctcaataggccacgtaagtattggtttccctcataccctgagtgttttcaagaggagtcctttcagctgtctatacagttcacagattactctttttgcaatgcctccctcccctcctcccacgtcaagtgctaaggtgcgagggaataagaccgaacaggccatccagacttagaaaccccataccccaaatagaaaccggtatctcctgtaacagtta

SEQ ID NO: 553843 - DNA, 2131 bp, Homo sapiens
cagaagaccacacccaggaatgttcagtacaatggggcagaaatggatggtttcccagctttcttgtwgtactccagagatgatgaagctgctatctttccagactcttacactgcagtaaaatgcagaagtattgtaaaaattagaagaaagttactacctttttggaagaaagataccgatagtacacctcagtagcatccaactgtggtttcaaagcaacatcctagttggtggttctgaaagtgaccaaacattaactacaatggcctgtatgttcataggactggcttggggaagagtctttgaatggcaaatgtcaataacttcaagttttcaagcctgaagaagaaagaagttggcagtttcctccacatagcaagccctccactggcccattttcatacttgaagcagttgtatttgttctgtaaggcaagatgataagcaaaatgcacatgagtttctgagttttgaaatcaaaataacttaaattaaaatctcgtttttgcaattttctagctctgtgtccctgggcaattatttatcctcacctacatttccttataaattaatgttagtaagaacacctatcttgctgagttgctatgaattaaatgagataaaatacataaaattgtctcaagttccaggcataacatgtatactcaacaaatgtccttaaaataatattgttatttatggccatatgtaaatgtcacccctactgtggaattttcactgactacttaagggggaatgagttattctctgcctaatactctgagtcctcaccagaggagtcaggaaggcagacactgcaagctgccaacctaatcacaattcttttctgcctccttattaacaatgccctcaattttgatttgggcaacaatatgtccagctttaaaaaagctcaacactacattttaccctctcttgcagcaagagattgccatatacatatagaacagttctgaccagtgagataggaccagaagttggatagggccttcccataatgtttttttctctcctgatacaagtacacatctctctatccctccttttctctttttaaaacatggaagagataactttaccgtaaaggaaaacacataactaatcccctttccttatcccatgcctggtagtcttttagatgccaagtcaaatccagcccccagatttaattttgcatgaaaatttttaataaaccattatttggttgagttttctgttgctgcagctaaacatagttctaactatagtaagattgacataaaatggctttatgatttcttgtttccatgtgtaaaggcaggaaaagatatataaacaaattactttgtttatacaaacatggggactccatttatgttgatcatatctgtttcataaagtattaatattcctatatttttttataaaggaaaaaaacttcacctttcatttagagaggactcgttattaaatttccatagcaatttcttatactcatggaagattatggaatccagatttcatcctaaagtcttttaaccacagacaatttccatgcaaataataactatagtcttacatttgtcttaactttatattccaaaggttatttttcttattttcttaaccttactctacccagtaatccattttaaaagcctcctctaaaaactttatcacattaaactccttcattctgaaaattttaaaggcaaatacaaataaaaataagaaaacaattttaattatctctgatgcaaaaagagaaagacactctcccctccctttcgttagagcacctactttagaaaacttgtaattgtgagttttctatccctttgaaatgtaggtaaatctttttaaaagctaaataaatcccttgccagttttacaatccaggactgtctttctcaagaacctgagagcatttttttcaaaatgtaatcacgaagggaggtagtgccctaatctagttttagtggagaataggtgcctaacttcagctggtactttgctcccagttgcaaaccaacctcctgtcgtaaagatatgagaaatgtttcctttgcatgaaggcaattacgaaacaggtggctacctcaattaccaggtaaattgaggatgaacta

SEQ ID NO: 553844 - DNA, 2131 bp, Homo sapiens
cagaagaccacacccaggaatgttcagtacaatggggcagaaatggatggtttcccagctttcttgtagtactccagagatgatgaagctgctatctttccagactcttacactgcagtaaaatgcagaagtattgtaaaaattagaagaaagttactacctttttggaagaaagataccgatagtacacctcagtagcatccaactgtggtttcaaagcaacatcctagttggtggttctgaaagtgaccaaacattaactacaatggcctgtatgttcataggactggcttggggaagagtctttgaatggcaaatgtcaataacttcaagttttcaagcctgaagaagaaagaagttggcagtttcctccacatagcaagccctccactggcccattttcatacttgaagcagttgtatttgttctgtaaggcaagatgataagcaaaatgcacatgagtttctgagttttgaaatcaaaataacttaaattaaaatctcgtttttgcaattttctagctctgtgtccctgggcaattatttatcctcacctacatttccttataaattaatgttagtaagaacacctatcttgctgagttgctatgaattaaatgagataaaatacataaaattgtctcaagttccaggcataacatgtatactcaacaaatgtccttaaaataatattgttatttatggccatatgtaaatgtcacccctactgtggaattttcactgactacttaagggggaatgagttattctctgcctaatactctgagtcctcaccagaggagtcaggaaggcagacactgcaagctgccaacctaatcacaattcttttctgcctccttattaacaatgccctcaattttgatttgggcaacaatatgtccagctttaaaaaagctcaacactacattttaccctctcttgcagcaagagattgccatatacatatagaacagttctgaccagtgagataggaccagaagttggatagggccttcccataatgtttttttctctcctgatrcaagtacacatctctctatccctccttttctctttttaaaacatggaagagataactttaccgtaaaggaaaacacataactaatcccctttccttatcccatgcctggtagtcttttagatgccaagtcaaatccagcccccagatttaattttgcatgaaaatttttaataaaccattatttggttgagttttctgttgctgcagctaaacatagttctaactatagtaagattgacataaaatggctttatgatttcttgtttccatgtgtaaaggcaggaaaagatatataaacaaattactttgtttatacaaacatggggactccatttatgttgatcatatctgtttcataaagtattaatattcctatatttttttataaaggaaaaaaacttcacctttcatttagagaggactcgttattaaatttccatagcaatttcttatactcatggaagattatggaatccagatttcatcctaaagtcttttaaccacagacaatttccatgcaaataataactatagtcttacatttgtcttaactttatattccaaaggttatttttcttattttcttaaccttactctacccagtaatccattttaaaagcctcctctaaaaactttatcacattaaactccttcattctgaaaattttaaaggcaaatacaaataaaaataagaaaacaattttaattatctctgatgcaaaaagagaaagacactctcccctccctttcgttagagcacctactttagaaaacttgtaattgtgagttttctatccctttgaaatgtaggtaaatctttttaaaagctaaataaatcccttgccagttttacaatccaggactgtctttctcaagaacctgagagcatttttttcaaaatgtaatcacgaagggaggtagtgccctaatctagttttagtggagaataggtgcctaacttcagctggtactttgctcccagttgcaaaccaacctcctgtcgtaaagatatgagaaatgtttcctttgcatgaaggcaattacgaaacaggtggctacctcaattaccaggtaaattgaggatgaacta

SEQ ID NO: 553845 - DNA, 2131 bp, Homo sapiens
cagaagaccacacccaggaatgttcagtacaatggggcagaaatggatggtttcccagctttcttgtagtactccagagatgatgaagctgctatctttccagactcttacactgcagtaaaatgcagaagtattgtaaaaattagaagaaagttactacctttttggaagaaagataccgatagtacacctcagtagcatccaactgtggtttcaaagcaacatcctagttggtggttctgaaagtgaccaaacattaactacaatggcctgtatgttcataggactggcttggggaagagtctttgaatggcaaatgtcaataacttcaagttttcaagcctgaagaagaaagaagttggcagtttcctccacatagcaagccctccactggcccattttcatacttgaagcagttgtatttgttctgtaaggcaagatgataagcaaaatgcacatgagtttctgagttttgaaatcaaaataacttaaattaaaatctcgtttttgcaattttctagctctgtgtccctgggcaattatttatcctcacctacatttccttataaattaatgttagtaagaacacctatcttgctgagttgctatgaattaaatgagataaaatacataaaattgtctcaagttccaggcataacatgtatactcaacaaatgtccttaaaataatattgttatttatggccatatgtaaatgtcacccctactgtggaattttcactgactacttaagggggaatgagttattctctgcctaatactctgagtcctcaccagaggagtcaggaaggcagacactgcaagctgccaacctaatcacaattcttttctgcctccttattaacaatgccctcaattttgatttgggcaacaatatgtccagctttaaaaaagctcaacactacattttaccctctcttgcagcaagagattgccatatacatatagaacagttctgaccagtgagataggaccagaagttggatagggccttcccataatgtttttttctctcctgatacaagtacacatctctctatccctccttttctctttttaaaacatggaagagataactttaccgtaaaggaaaacacatamctaatcccctttccttatcccatgcctggtagtcttttagatgccaagtcaaatccagcccccagatttaattttgcatgaaaatttttaataaaccattatttggttgagttttctgttgctgcagctaaacatagttctaactatagtaagattgacataaaatggctttatgatttcttgtttccatgtgtaaaggcaggaaaagatatataaacaaattactttgtttatacaaacatggggactccatttatgttgatcatatctgtttcataaagtattaatattcctatatttttttataaaggaaaaaaacttcacctttcatttagagaggactcgttattaaatttccatagcaatttcttatactcatggaagattatggaatccagatttcatcctaaagtcttttaaccacagacaatttccatgcaaataataactatagtcttacatttgtcttaactttatattccaaaggttatttttcttattttcttaaccttactctacccagtaatccattttaaaagcctcctctaaaaactttatcacattaaactccttcattctgaaaattttaaaggcaaatacaaataaaaataagaaaacaattttaattatctctgatgcaaaaagagaaagacactctcccctccctttcgttagagcacctactttagaaaacttgtaattgtgagttttctatccctttgaaatgtaggtaaatctttttaaaagctaaataaatcccttgccagttttacaatccaggactgtctttctcaagaacctgagagcatttttttcaaaatgtaatcacgaagggaggtagtgccctaatctagttttagtggagaataggtgcctaacttcagctggtactttgctcccagttgcaaaccaacctcctgtcgtaaagatatgagaaatgtttcctttgcatgaaggcaattacgaaacaggtggctacctcaattaccaggtaaattgaggatgaacta

SEQ ID NO: 553846 - DNA, 2131 bp, Homo sapiens
cagaagaccacacccaggaatgttcagtacaatggggcagaaatggatggtttcccagctttcttgtagtactccagagatgatgaagctgctatctttccagactcttacactgcagtaaaatgcagaagtattgtaaaaattagaagaaagttactacctttttggaagaaagataccgatagtacacctcagtagcatccaactgtggtttcaaagcaacatcctagttggtggttctgaaagtgaccaaacattaactacaatggcctgtatgttcataggactggcttggggaagagtctttgaatggcaaatgtcaataacttcaagttttcaagcctgaagaagaaagaagttggcagtttcctccacatagcaagccctccactggcccattttcatacttgaagcagttgtatttgttctgtaaggcaagatgataagcaaaatgcacatgagtttctgagttttgaaatcaaaataacttaaattaaaatctcgtttttgcaattttctagctctgtgtccctgggcaattatttatcctcacctacatttccttataaattaatgttagtaagaacacctatcttgctgagttgctatgaattaaatgagataaaatacataaaattgtctcaagttccaggcataacatgtatactcaacaaatgtccttaaaataatattgttatttatggccatatgtaaatgtcacccctactgtggaattttcactgactacttaagggggaatgagttattctctgcctaatactctgagtcctcaccagaggagtcaggaaggcagacactgcaagctgccaacctaatcacaattcttttctgcctccttattaacaatgccctcaattttgatttgggcaacaatatgtccagctttaaaaaagctcaacactacattttaccctctcttgcagcaagagattgccatatacatatagaacagttctgaccagtgagataggaccagaagttggatagggccttcccataatgtttttttctctcctgatacaagtacacatctctctatccctccttttctctttttaaaacatggaagagataactttaccgtaaaggaaaacacataactaatcccctttccttatcccatgcctggtagtcttttagatgccaagtcaaatccagcccccagatttaattttgcatgaaaatttttaataaaccattatttggttgagttttctgttgctgcagctaaacatarttctaactatagtaagattgacataaaatggctttatgatttcttgtttccatgtgtaaaggcaggaaaagatatataaacaaattactttgtttatacaaacatggggactccatttatgttgatcatatctgtttcataaagtattaatattcctatatttttttataaaggaaaaaaacttcacctttcatttagagaggactcgttattaaatttccatagcaatttcttatactcatggaagattatggaatccagatttcatcctaaagtcttttaaccacagacaatttccatgcaaataataactatagtcttacatttgtcttaactttatattccaaaggttatttttcttattttcttaaccttactctacccagtaatccattttaaaagcctcctctaaaaactttatcacattaaactccttcattctgaaaattttaaaggcaaatacaaataaaaataagaaaacaattttaattatctctgatgcaaaaagagaaagacactctcccctccctttcgttagagcacctactttagaaaacttgtaattgtgagttttctatccctttgaaatgtaggtaaatctttttaaaagctaaataaatcccttgccagttttacaatccaggactgtctttctcaagaacctgagagcatttttttcaaaatgtaatcacgaagggaggtagtgccctaatctagttttagtggagaataggtgcctaacttcagctggtactttgctcccagttgcaaaccaacctcctgtcgtaaagatatgagaaatgtttcctttgcatgaaggcaattacgaaacaggtggctacctcaattaccaggtaaattgaggatgaacta

SEQ ID NO: 553847 - DNA, 2131 bp, Homo sapiens
cagaagaccacacccaggaatgttcagtacaatggggcagaaatggatggtttcccagctttcttgtagtactccagagatgatgaagctgctatctttccagactcttacactgcagtaaaatgcagaagtattgtaaaaattagaagaaagttactacctttttggaagaaagataccgatagtacacctcagtagcatccaactgtggtttcaaagcaacatcctagttggtggttctgaaagtgaccaaacattaactacaatggcctgtatgttcataggactggcttggggaagagtctttgaatggcaaatgtcaataacttcaagttttcaagcctgaagaagaaagaagttggcagtttcctccacatagcaagccctccactggcccattttcatacttgaagcagttgtatttgttctgtaaggcaagatgataagcaaaatgcacatgagtttctgagttttgaaatcaaaataacttaaattaaaatctcgtttttgcaattttctagctctgtgtccctgggcaattatttatcctcacctacatttccttataaattaatgttagtaagaacacctatcttgctgagttgctatgaattaaatgagataaaatacataaaattgtctcaagttccaggcataacatgtatactcaacaaatgtccttaaaataatattgttatttatggccatatgtaaatgtcacccctactgtggaattttcactgactacttaagggggaatgagttattctctgcctaatactctgagtcctcaccagaggagtcaggaaggcagacactgcaagctgccaacctaatcacaattcttttctgcctccttattaacaatgccctcaattttgatttgggcaacaatatgtccagctttaaaaaagctcaacactacattttaccctctcttgcagcaagagattgccatatacatatagaacagttctgaccagtgagataggaccagaagttggatagggccttcccataatgtttttttctctcctgatacaagtacacatctctctatccctccttttctctttttaaaacatggaagagataactttaccgtaaaggaaaacacataactaatcccctttccttatcccatgcctggtagtcttttagatgccaagtcaaatccagcccccagatttaattttgcatgaaaatttttaataaaccattatttggttgagttttctgttgctgcagctaaacatagttctaactatagtaagattgacataaaatggctttatgatttcttgtttccatgtgtaaargcaggaaaagatatataaacaaattactttgtttatacaaacatggggactccatttatgttgatcatatctgtttcataaagtattaatattcctatatttttttataaaggaaaaaaacttcacctttcatttagagaggactcgttattaaatttccatagcaatttcttatactcatggaagattatggaatccagatttcatcctaaagtcttttaaccacagacaatttccatgcaaataataactatagtcttacatttgtcttaactttatattccaaaggttatttttcttattttcttaaccttactctacccagtaatccattttaaaagcctcctctaaaaactttatcacattaaactccttcattctgaaaattttaaaggcaaatacaaataaaaataagaaaacaattttaattatctctgatgcaaaaagagaaagacactctcccctccctttcgttagagcacctactttagaaaacttgtaattgtgagttttctatccctttgaaatgtaggtaaatctttttaaaagctaaataaatcccttgccagttttacaatccaggactgtctttctcaagaacctgagagcatttttttcaaaatgtaatcacgaagggaggtagtgccctaatctagttttagtggagaataggtgcctaacttcagctggtactttgctcccagttgcaaaccaacctcctgtcgtaaagatatgagaaatgtttcctttgcatgaaggcaattacgaaacaggtggctacctcaattaccaggtaaattgaggatgaacta

SEQ ID NO: 553848 - DNA, 1477 bp, Homo sapiens
accacatcatacactcgtgcctttggcaggtcactaaccgcccaccgcctcagtttcccggtgggacgaactctctctcacaggtagtttaagaaccaggctttctttggcattgtatacctgccatgtgccaggctgtgtcgtgctctggggattcagtctctgtgcaaactatgactccatacagatgaagtccaagaacaggcaaaacgcatcacaggtgatagaaattagggcactgtttgcctctggggtagaaggatggattgaaaaggggcacgaggaaaccttcaggggtggtggaaatgttccatatctttatcttgggtgatggctatatatatatcaaatgcatcattagtgtattttcatgtaattatgcctcaagaaagtactgctcccattaaatacacacacacacacacacacacacacacacacacacacacagagtttctgtcttcaaggagttaacagtccagtgagtagtgggtatgaaagagatgtgttaatggctgcaattgcaagacagaggcttttgttactatattctcctcaggcaggagtcctcaggcaggaggcaggagaaccagttgtttgtccctaagcgtcactgcccctcactagccttctctcctggggcctttaatttttctgagtccccatgtgttattattcacatagagataaaaatacctgcccacctattctcagtgttgttgaagggattgaaagcagtaatgggtgtggaatgcttagtaaactgaaatcccagtgcaaatatgaagtgggaatgcatcagaatgcccaggaagacgaaccatgacccgaacaagatgggctgggccaggtcagatggcactgccatactgagaaaaaagtgggctggctgcggcttcacacagcccgggagagctcagaactccccaggccctgccggtgcgctggtgtttctcatagtatgtggccacctctcyagtcacttcggccctaggagcttcttgttacaccatgattttgtcactacctccgcagcttcccacctcctgcttccggcttccagaaggaagcgcgtgatggaggggaaatgacagggccaggaggcagcggtcaggctgggccgagtttctgacagaagccaacacttctggccccacagtgctcacggcctccctgactcctcaccacatcacagctgaaaaggctcacgtcttatctcccctctcaacctctgggggcttctctgctttcagaaggagcccctggagcccctggccgaacacatctgaaagcacggagccagacctctgcagcgccctccagcgggcaggttctgcgggcagccatctcctcgcaggccagaacacgccacgtcactccaggacggttcgccacctttgagaagagaggactccagtgtctgttcgctctggaaatgtgggcatgttcccattccaaaggtgataggatctgaggg

SEQ ID NO: 553849 - DNA, 640 bp, Homo sapiens
gttgcattactttttttcagattgtgcatttaattaatcattgggctaactttggattatggaaaaataactttttttatagctgttcattgtctaggtcaataactttttttgtatagccattcattgtctagatcaatgacagaacaacatattttctttttccctcaaaagccygagtgatcattaaggaaggcgatgtagatgtttcagattctgatgatgaagatgatagtaagtataaaaaggtttaaagcctgggcacagtagcttacacccataatcccagcattttgggaggccaagatgggaggatcacttgaggccaagagtttgagaccagcctgggcaacatagtgagaccttgtctctgcaaaaaaacattttttttcaaatattttcttaaaaaaggcttaaagtagaactaggcagggtagtgtgtgtctttagtcacagctacctgggaggcttaagtgggtggattgcttgagcccaggagttcaagctctgcctggtggcaagactctgtcttctttaaaaaaaaaaaagtaaagcacagaatacctggcatctattctaataagtagactgcaacaaatgacaacttttgatgtaatctttttgttatatttaccattga

SEQ ID NO: 553850 - DNA, 622 bp, Homo sapiens
tgaaggaagtggggagcatttacagggtgcagtgactctaacatcaagagctatttgcagaagccgtgggcaatgacagatgccaaaacaagatggagaaatcaacttttatatagactgattcacaagaaaatatggagtgcctctcccaaaccaggaatcaaagatgttggggtgacacaggcagactcctacgatcctctagatggggaccctggacatttgccttgcctatatagagggctggaaacttttgaggctagaaccacacattcacaaagaaccaagcttagttgtttattttttaacttattactaagcataaactgtatttctgtagatcaatcatccccaagcttgggatttttttttttcttcctctgttgtccaggctggagtgcagttggatgatcatagctcactgaagcctcaaactcctgcctcagcctccctagtagctaggactacaggcacacatcaccacatcaggctaatcttttaatttttttgtatggggsggggggtctcactacattgcccaggctggccttgaactcctggcctcaagcaatcctccttcctcagccttccaaaatgctaggattagaggtgtaagcgacca

SEQ ID NO: 553851 - DNA, 2865 bp, Homo sapiens
acttgttatgcaaatggattatttttcccccaaggggacctccacaaccagctttgaaaacaattatgcttactttactgcccaggacaaaaacagtaaaacttttgaagttcccagacaccaaaagccctgcattctaacaggttttgagcaaacctgatcccaaagcactttgtaggtgtgttggcccaccatcaccatcctgtaactggaatgctcaactccaattagaagtcttcctggtttgggtcatttggggctttggggaacctttgacccttttttctcccttccctttgggcagctgccctgggacattggccccattcacaattctccagtttcccagacaatgtggcttcttgtgctctttgctcgggcccctctattaaccctacagagaggtttcaggttactgaaacagacgccttgctttctgctgtgcataatgtcctttttccagcgagaaactgcagcccatcaggatctggttttcattaaaggcactttgggtcacttttttagcagattggtcaaaaggactgaaaggactgggcagggcgatgatgatttggaggtcaatagctttctctatgggccataccccttccccactgaaagattcccccactgcagactggaggaaatcagtcaggcaaggatccctgtggtgaaaactactcgaaaacagcaacaataaccacaaacctgaaatgaagacaatttcctgagaaactatgaatgtttggatgtgcaaggtgatcaactttcccagttgcccgggaccaaaaggtttcccaggactcaaaactttccattttgaaaccagaaagtcacaggcaaacccggaggagttggtcaacccatggatcagagtcacttcatcttctgtgaaatttgcaaagatgctaggaggttcccctcctgctgggacaccccagcccagacacaaaccattaattcacaattacatggagtttcactgtctgcaaggctgctccatttaagctctgggtcatgaacacataactctaggcatactgacactagctgggagattttccaccaaaaaaaaaaaaaaaaaatgccatttcatgactattaatccaaaataggtaaatgtgtctggcttatagaataccagcctgattacaaatgcttggtgttggaatggcccagctcacagtggttgtagaagtccagtaggcccaggctttgtggctcackcctgtaaccccagcactttgggaggccaaggtgggaggatcacttgagtccagaagttcaaaaccagcctgggcaacatagggagactccatttctacaaataatttaaaaattagctgggtgcatgcttgtagccctagctactcaggaggttgaggcaggagaattgcctgagcctgggaggtcgaggccacagtgagccgcgatcacatgtcactacattccagcctgggtgacagagcaaaaccctggctggaaaaaaaaaaaattcaagcagtcaaggggatgggagcttggtggactagagatgcccagacttgagttcctgtcccagccctgccactaatagtgagattttaggcacagctattccccttcttctctcctaagtctccggagaacaaatggctttggattcaatgaggaaaagaaggaaagaaaggaagaaactggtctcactgagcatcctctatgagccgggcatcacaccaaaccctcctccctgccatttactctttccaccagccttgaagggttaccgtactcagtttcacagatgagttcagtgcacatgaacgatcacacagcaagcgaatggcagggagggggttatgatgcagggctgtggggctccctagtaaccttaatcccagcagtcatttaatgagacagaactaagtacacgcctctctaacatacattgtctcgcttaattcttgtagaatctttgaggcaagcattaccattatctctacttcacagatgagcaaatgggttctgagaggtcaagtgacctgcccaaggtcacacagctatgcatgcacagccaggtggcaaacccagagctaaatgattccaacgctcactggctttgctctccagtgtcagctcagcagccctgaacctaaaactccaggtggcaggtgccaccccagggataagaccccagctttaacctgaaccaaaccttaaccagctgtgtgctattgggcaaattccttaacctctataggcttgcatttcctcctctgcatagtaggcatggcactcatacctccctggcaaaaaactatcaactttatttgtttatttatttatttatttatttatttatttatttattcattcatgagacagagtctccctgtgtcgcccagaatggagggcagtggcctgatctcggctcactgcaacctccacctgccggattgatgcgattctcctgcctcagcctccggagtagctgagattacaggcgcccgccaccacacctggctaatatttgtatttttagtagagatggaatttcaccactttggccaggctggtctcgaactcctggcctcaagtgattctcctgcctcagcctcccaaagtgctgggattacaggtgtgagccccggcctttacctgcatttttccatttcttccacacaactgttatgaggtaggcattactttatacataaaatacataaagaactaagcccagcactggcacatataagaatgcaatgaatcgtagctattattactaatgctattgtttttactgctgctatattattataacaaataatcattgtgatagttattgcaacagttgtcatcgctgttattatattactaagtagtttt

SEQ ID NO: 553852 - DNA, 563 bp, Homo sapiens
cacagatatgagccaccgcgccccgcccttggcactgtttaatccatgtgttgtttatttatgtatcctgtttattttctgtctcccaacaaagacgtagctccttctgggtagggcattttgttcatgctctcagatgccgcctaccgccctagagcaggaaatagcggtcagcgccagctgtgaggagcacagcattgcggccaacacaggaggcactgaccacggggcaggcgctatttaaaaatcgtggcaaaggatcagacgtaacagaactctttttgttttaatcatttttaagtgtgcagttcaatgatgttagttacatgcacaatattgtgtaaccatcaccactatttccaaaatcctttytatccgtcagacagaaactccgtccccattaaacagcaactctgcattcctccgtccccccagcctctggtcacgtgtctcatctactttcagtctctacggatttgcctgttctaattatttcatagaagtggattcatacagtacgtgtccttctgtgtcaggttcatgtcactcagcgtgatgtgccc

SEQ ID NO: 553853 - DNA, 690 bp, Homo sapiens
gagagcatcaggttaaatagctaatgcatgcrgggcttaacaccaggtgacgggttggtagatgcagcaaccaccatggcacatgttgacctatgtaacaaacccacacatgctgcacatgtatcccagaacttaaagttttaaaagataataaaaacaagagttataagtggtggaacaacaacaacgacaaaaatcctccagtgtttatcataagccattttgcctccaatgtcagtaagacaacctagaagtctctgagaggagagaaatctttccagatccatcaggagacacagaagtcacatgaaagcgttcctacagacacatgaaaatgctaagggtatctttggacactgaggactctcccaccaacagccacactgacaacagcctttggtgtctcactcagaggagtccctggtgggaagccaggctgtaatctgtcacaagagcatgtgagcagaggccaccttactagataaaatgcagctggttaccgcattccctggagggacagtgacctccgacagacaaggtgaggcaggcagacaaaacagtgggcaccgcaaatgaacaggcaggcgcggagtggtgcctggaggaaagcctctgacctggagccgagggagagctgctagataaacaagccattataagagggtaatattccatcctagtgtgagcgga

SEQ ID NO: 553854 - DNA, 532 bp, Homo sapiens
actgatgtctgtgcatttgaaagagcagactctctttcagtctttacagactggtttcggtaggttaaaagcttctcctgttagtgtcctgggctgatgagattgccttcagtatcatggttgaatggggttacagccagatcacatggttgcttacgggtccagagtgggatctttggttcatgatccttttactagggcttctagcaggsttgtatcctatttagtgcctcagagggccaaactggctctagaatcatactgtatagggctggggaggggatgagggtccacttcaaggtctgtaaatggtgggtctattattaggtgtgtagttggggaagagtttatctagtttgctggggaaggctgctcatgggtctctgagtgggttcctcaacctgtggcacagaggagttagtgctaagtcacaaggtttcctcggggtctatagctgaaaccagtgtcttcatgtctgtctctggggtcatggttgagtgtgttttctggcaggtctgtgggcaggcagatt

SEQ ID NO: 553855 - DNA, 527 bp, Homo sapiens
cgagtcacatgcagaagccccacatcggggtagtggaggagctgcaattcgaccctgggtttccctgaccccagtgcctgggcacccttgcaggtggctagtgtgcaagtaagaattaatgaataggtcaaccagccagatgcagggacagaatcaggcccatcccctgccttcctgggttgcatttgggaaggaccagggactgagcacccagcatttgcaaagccagaggatgctggttctggtgcgtggtactgggggctgggcctgcgcagcctgagtgggcggcagcacgtgatcacctgcagctgcagagccgtggtgagccaggcagcatcaccggctcagctgacccttcctggtacacagggcctggccatcttgtgcccaaccctggtaaagcaccattttgtttctgcctcaccatttgcttctccygtgttttgtgagctgtctgagatgtgcatcattcttctgtatttggagggggacatggagcccagttaggatacctagtgcctaggaaa

SEQ ID NO: 553856 - DNA, 532 bp, Homo sapiens
agatagtggcctccaatcattctttctgttcttaatcattaattcaagattcaggaccaagaaaggggtgttaattggtacaaactgttgctatactgcgatgcaaggaagggcctagcccattcattgtttgtagccagtacctggacttatcttcacaacatgaataaactcatagtggtagggaaagcattccccaaaaggaaattgggttgttttagctagaataggagatgaacagcccaaaaggacatgtcccacatcagtgttcagctggatagcagtttgagaagttcttacttaaatgagtactactatttttgcttacaccttttgaattctgagaagtcaggtttaatgaagctcttgagaacttgtctggcagggagaccaaggaaagargcataatctaccctcaggggacttgtaccctcattaagaaggcagtactatgccacaagaaatcagtaactaaaagacaattagtttatctgccttggtggtcatcttacaataaacgtagttcagaaaa

SEQ ID NO: 553857 - DNA, 515 bp, Homo sapiens
gggcgtctccagggctgcggactctgggtcctggttctgtctgtgctggtggcctgggatgggaagccaggaagcgctcctccctcggggtccacactgtgagagttaycctgtggccccccaggcagaacatgacggagatgcgcaggaatggcaaagtacgaggggaaaacagacagtgggatatggtgaaaccgtgacggttggtgaatgaggtgagtatgagcaaacgatcattcgccacaatgtaaccctacagtaaagggtaacaggcaaggccaagtatggatgaaaaacagacagtgggatatggtgaaaccatgacagtcagtgaatgaggtgagtataagcaaagggccgtttgccacgatgtaacactacagtaaggataacagccaagcccgcacaatgaggaaacacctcgtcttcagggtgtgcccttgtgtctacagtgcccgtgtctacagcgcacgttcattcggcaaacccgcgagcagctgcgagggctgaggctg

SEQ ID NO: 553858 - DNA, 515 bp, Homo sapiens
gggcgtctccagggctgcggactctgggtcctggttctgtctgtgctggtggcctgggatgggaagccaggaagcgctcctccctcggggtccacactgtgagagttaccctgtggccccccaggcagaacatgacggagatgcgcaggaatggcaaagtacgaggggaaaacagacagtgggatatggtgaaaccgtgacggttsgtgaatgaggtgagtatgagcaaacgatcattcgccacaatgtaaccctacagtaaagggtaacaggcaaggccaagtatggatgaaaaacagacagtgggatatggtgaaaccatgacagtcagtgaatgaggtgagtataagcaaagggccgtttgccacgatgtaacactacagtaaggataacagccaagcccgcacaatgaggaaacacctcgtcttcagggtgtgcccttgtgtctacagtgcccgtgtctacagcgcacgttcattcggcaaacccgcgagcagctgcgagggctgaggctg

SEQ ID NO: 553859 - DNA, 626 bp, Homo sapiens
cacacacacagcaccagccttcaatatctatgggttccacacctgtggattcaaacaaactatgaatcaaatatgtagttaggcctatgatggttttatctgtactgaacatgtacagatattttgttatcaatatcccctaaacaactattgataacaagtgttatcctctaaacaaaccatatagtatcctctaaacaatgtcctctaaacaaacagtagtttaataactaattacataacatttacattgtattataagtaatgcagagcttatttaaagtgagatatgttatatgcaagtaatactccattttatataaaggayctgagcatctaggatttttttatctgtgggaggttttggaaccaattttgtatagatactgaaggacagctgtatgtgtgtctatttgtatgtataaaattgttcataatattttgtttttacttttaaattaaaaagtttattgagatgcaatttacatacaattcgctttttcatgtttatcataacaatcatgtgtatgtgcaagcaacactatagtcaactttagaacatttctatcatctctaaaagaaactccacaacctttagctattaccctcctattcctcccagcctc

SEQ ID NO: 553860 - DNA, 1266 bp, Homo sapiens
taaaatggaatcatttgagcaccacagtgtgcatttaatgggcatttgcagctgctaagtggagatgagatcagtttatgatcckatcacttggttagtgtgtcattcagctgaatagccctagctctcgtcatgtattttgcccattatacagtcttgaattactctaattcctagtcatgcttaaatttgtacccatagtggaccattggtaaaggacaagaagcataacaacactgatatgtgaacaaaaacagcattgacattggtaattctcattgttacccagaaggtcttctcaggttctgaagttcttatcaagcactttcagatgtttgctccagtgctaaaaagaacatggagtcaggactatatctagtatcactttatagaatatgcatccatttttaaataatttggcctgcctgatttttcacttgttcctaacttcacgctgtctatttcctctggtccaaaggcccccattggctctatatacttccttcctacccagaactctgtcatgggttacaccatcctccccatcctccttgctccatgtttccaaccctgcatcaaagccaccttttcccttcttttctcccagaagagacagccctgctggagaacaatgcagaatcatatagattcttatgtgcctttcttccattcgttagaacttctgtacagtgctgactccaaatctttacctctttactttaagccccagatttcccctgccaactatttatttcaacagaagactaatagtgggcatttatctgttaagtacctctctatgttagtactaagtacttcatataaatccgtcctcatcccagaacaactctatgaagtagtattctccctattttacaggtgaggaaattgagactaaggtgatttagccaacatgtgataaagtggggtgtgcacctgggtctgcctggttccaaagcccacaacactttaggtcttttttgagcttaggctccttcaagttttaggatccttaaaaccactggatcacccctttcactgttcttatattctttcctgtttcctttctttcgctcatccagcacttaactccagcaattgtcaccttttcagagctgcttcattttctcctgttctgtgggcatccttcccaccttccgacaggatcagctctcattttcttaaaatacaagtaaaacgtctttttccttgacccagctaatccttctggttactatccagatttcctgcttcctttctgggtca

SEQ ID NO: 553861 - DNA, 649 bp, Homo sapiens
ttttttttaatctagctgagaagtctaggaagcaaaggctttaatatttatgaggtcttaacaaagagtctaacgaacacatcctttacttgattctgatctgagacattgtatcagcatcatcctgggtttgatcttttcccagagccatttcttactttgccaacttattgccatctggagaggcttggaccaagaaacagttttgttttccaactttgaaacttttagtttggaaaattcttctctaaactctgcttgaaatccraatttgtttttttaggtcctctctctttttcatcactttattatcagcagttaaaagaagctaattgacgcactcagcatcctgcctggaaatcacttttgccaaatccttaagttcattatttgtattttttgttttctgtgttactgtagatgacagtgttgccaaattttctatcactatatgatactgggcacccttcctccagcctccaatgttaattaccgcattacatttttagcctccactaagtcttcctacttttctctatgcctgtgctcagtctcagctcaaagacaatgccatgtgttttaggtttagctatggctctactacatctctatactgcccccaaatttagttgcttataacaataaaaat

SEQ ID NO: 553862 - DNA, 558 bp, Homo sapiens
gtttcacatcttttccaaaccaactaatggcaacaaaaagggttaaacacagtggttcaggctaatggttattaaatctggcagcatataagtattacctgtggaacattaaaatttgttgaggcctgggatccacctccatagattcagatttaatagtttgagggtggagatctatctatctatctatctatctatctatctatctatctatctrttatctatctatctatcatctctctctctctctctctctctctctctctctctctctctatctagatcttaaggtagagaagaaagagttgacaaaagaagtagaaataagtggctggagaagtatcgagagaacatcagaagtgtatcatatcataaatgccaaaagaagagaatgttttacagaggaatttatcaacagaagaaaggggtgtgtgtgtgtgtgtgtgctattaatatatgggtgaattatggtgtatttttctgccaaagccatatttaacctactatgaggagatgttcaggtgaagaatgggataagattattctgtgaagaggaaa

SEQ ID NO: 553863 - DNA, 1665 bp, Homo sapiens
cagcattcctcctgattttcctttgggagaatcatttttcacctactcacagttcacatgattggagaaggcgccttctgggtacaggcatataactaaactgaataatccattccctgacttcatctttcctgkgcgagttggtccaaggacttttgttgaaaccactggaagagagtggctttcttgacagcaggttaataagatggatggaggtaatcaggttggcaagtggctgggcaactgtccttatcaccatacaaaggaaatcttccagagaacaaaggaatcacagaaggaagtggatgtgaaagacagccagagattcccaacaatatatgattctgtaaatccaaccatgaatgaagcttggtatccccactatttgagccaataactcctcctgttggctgaagttactttgacatgcattcttatcacttgcaactgataatccatcccacgtgagtataaatgtgaagaaatcattctaagtacatccaccttaccaaatggaccatgttttgctcaccagtgtgaccccagcacttaggacaagagatgatgtgagaagacttcaaattattgttcaataatttttttaatgattatttgttaactcatgaattatcttccatattcatatcttttaaaaatgaaagaaaatcaaagcaggtttctcctttctgtctaaatcctagcaagatcaaacactggggaaaaaaataacattctcccatatctatctgaccccagaaaaattattacttccaaatagtatttagtttttggcagttatttatgaacaggtaatctatataatttaatagataaacctatttaattatctattttttctcccacaaacaggaagaccagtgtcaaaatattgagcaactctcctaagaacaaggcatgcaatctcaaattcctggttttcagaaaaggttaattggacaagcaaaaacaaggagccaacttattggggagaactggaggcctaggaaaaagaaaaggcccaactttctatccccaacagacactttgggaactgataaaattaaacatttttcaaagaccctccatttcctattaccacaagaaagtcaaaatatttctatcttttaatttaactttatcttgcttttctttttgaaattttaatttagggcaatatttctgagggatgctatttttttttaaataccttctttccttcagctaatgtaaaacaaatagttactcctggaaattactttttactattggttccaaagctacaatttgcagcaaataaaaggactcttcccttctacagaaacattcagacaactacatattgagaggaaggtttatgtgtacttggagcctttgggtgatgttctctttggccatatgatgtggtactcccatcagcctgccatttagtgactcctatcaaagcaaacctctctaaaaacagacacttcaaagaagatgactaattgtgggtgccaactggatgctgaattgctgaatttctgaatggtttccatctcattttccaaagaaaatgtaaaatttcagagtaaaattgccacttttcttttttcacgatgtagtatttggtggcttttaaattcacagccttctattcttggaattttttaaattttaaattaactt

SEQ ID NO: 553864 - DNA, 1665 bp, Homo sapiens
cagcattcctcctgattttcctttgggagaatcatttttcacctactcacagttcacatgattggagaaggcgccttctgggtacaggcatataactaaactgaataatccattccctgacttcatctttcctgtgcgagttggtccaaggacttttgttgaaaccactggaagagagtggctttcttgacagcagrttaataagatggatggaggtaatcaggttggcaagtggctgggcaactgtccttatcaccatacaaaggaaatcttccagagaacaaaggaatcacagaaggaagtggatgtgaaagacagccagagattcccaacaatatatgattctgtaaatccaaccatgaatgaagcttggtatccccactatttgagccaataactcctcctgttggctgaagttactttgacatgcattcttatcacttgcaactgataatccatcccacgtgagtataaatgtgaagaaatcattctaagtacatccaccttaccaaatggaccatgttttgctcaccagtgtgaccccagcacttaggacaagagatgatgtgagaagacttcaaattattgttcaataatttttttaatgattatttgttaactcatgaattatcttccatattcatatcttttaaaaatgaaagaaaatcaaagcaggtttctcctttctgtctaaatcctagcaagatcaaacactggggaaaaaaataacattctcccatatctatctgaccccagaaaaattattacttccaaatagtatttagtttttggcagttatttatgaacaggtaatctatataatttaatagataaacctatttaattatctattttttctcccacaaacaggaagaccagtgtcaaaatattgagcaactctcctaagaacaaggcatgcaatctcaaattcctggttttcagaaaaggttaattggacaagcaaaaacaaggagccaacttattggggagaactggaggcctaggaaaaagaaaaggcccaactttctatccccaacagacactttgggaactgataaaattaaacatttttcaaagaccctccatttcctattaccacaagaaagtcaaaatatttctatcttttaatttaactttatcttgcttttctttttgaaattttaatttagggcaatatttctgagggatgctatttttttttaaataccttctttccttcagctaatgtaaaacaaatagttactcctggaaattactttttactattggttccaaagctacaatttgcagcaaataaaaggactcttcccttctacagaaacattcagacaactacatattgagaggaaggtttatgtgtacttggagcctttgggtgatgttctctttggccatatgatgtggtactcccatcagcctgccatttagtgactcctatcaaagcaaacctctctaaaaacagacacttcaaagaagatgactaattgtgggtgccaactggatgctgaattgctgaatttctgaatggtttccatctcattttccaaagaaaatgtaaaatttcagagtaaaattgccacttttcttttttcacgatgtagtatttggtggcttttaaattcacagccttctattcttggaattttttaaattttaaattaactt

SEQ ID NO: 553865 - DNA, 623 bp, Homo sapiens
catatgctgcttctctttactgccatggttatttatagatctactgcaaaatttaaagacaacttagtgatgggaaaagtcaggactaagagttaggaggattatgttcagcatcagctctgccatcatgtgctgtttgggatctcaggtaattcacttaatcttcatgcacctcaatttctctatctgtaaaatggcagtaatgctttgcctaattcmtagagctagtagaagagcaaatgtgagaaaagttatattgcaccttgaaggcagggtctctaattatcaagctgttaaacccttacttttaattagccctttcacatccaaggtgtcatttcatactgcaagctgggagctgatgtctccatttttatagatgagataagtaaaggtaagttactagcctagtctcaaaaattacaaagccatgatctttgcagaaaaactttggattatatgtagatttcagcttaaaatcctgctctgccacctgcataaatcggttatcctctttgagcttcagatttctacatataaaatagaaataatgataccatgatactgtcttactgaatcataacacaattaaaagaatacataaaattacctgaaataaagtc

SEQ ID NO: 553866 - DNA, 1295 bp, Homo sapiens
aaaactttaatatcagtaaacagcacgctatatcatttttttaacataacaccttcaaaactacttyattgtttgggtatatcttaatttatttaacaggttaattattgatggaagtccctattgtttttagtttttacccaaaactactagatttttagttagtatttttgtgcattcgtatcttgaattttgtaggacaaatacttagaactggaatttctggatacaaaagtgtgcatattttaaactttgattgtgtttcacgttattgccctccaaaaatgtacttatttacactcttgcacacatgcatggttagcatattcataaactaatcttgacaacatactcgaataccgatctgcttattacaaatacttgtatgtgtgaggtgggattgcaggcaactttatttttataataatagaatactgacttactatttggggatcttttgacctcctcattcatcatttactcattttatgttaaccatccactaatgcaaagcacaggactaggggctttgggaaagcatgtggtaatagaagattcggtcttgtttggccagggtaatcattacaaagctatgtgttgtatacaatcccagtgcaatataaacacaggtacaggagtgctctatatatacggccattagagaggtccttatgtgactaaagtgaaaaatctgtgaacacttttcactggaaattttctggtagaaaagtgagaatccttatactttattttatagttttttgtatgatatagaatatggcatccatcataaatgaaagtttggaggtaaaattaaaaagaaatctgaagaaattaaattgcatgagggcaaacaactatgactatagatattaaatacatacaagtaaaatgcctgcatgctttctctactttgtgtggacaggtagcatagcttttctttaaagctgtagatttcttgaatctagatgcaaatcatatggcaagtgggttggaaactccaggtacacatgtcaggggctaggcccaggctatgctggcacactgttaggccaactgctggactgctgcttggcataaatacaaatctcccctgctgacagctcgtgttccaggctcctggctgcggcccgccatttgccctgcatcgacttgggcaggcaggcaggcaggcaggaaggcacaactggggatgcttgagcaatgaggggctgctgtgaccacagctggtatcaacattctggcacacaacccaccctttccccttcctcctcatttggcactgcaaccagagt

SEQ ID NO: 553867 - DNA, 1257 bp, Homo sapiens
ccacaaatctcgtctattgttcaagctgcagggtagaatcttttccagttctagcagcttgtgggaaaacaacagctaaaaaccagaatgttgagggaatggaagggatgctgactaggttgaggcacagctggggctgggagcatggggaagtttctcaggccccaaaaccactccccaagagccaaagagtaacactggcaagggaaacatgaccaatgggatggagttactgactggctcccctcaaggattccaggtcccctgggcttgtcacttccctttacttcccccatgtctcagtaggtaacaccggccaagaaccgcacttgcagcagctgtcggatggattaggcagcacagacagcagcagggtgtgtgatcccaggggacagaagcatctctcagcaagcagccatcttctgcagactctgggatttttcaagagtgagcacactggctacaaaggagtcttcctacgtgaggcctttgtcaaaggaagggctacaaagtgaccattcagctcctggggttgagagcaaagggccatgctaagcaggaaggtgttcacaaataccaccatggattagctggctgcaggggacacctacagtgcatcatgtcaccgggagtaaggacctgtgcccacatactgagaagggaggaaaagccttccagtcagtctaagaacacaggtaacttaaccagcttcaacaagagcccaaagtcttttgccctgagcagcaaacagagggatccaagctccaccccstctgctctcccactacaggactggagagaacatgggaccaagcaaccctcaaactggatggtggcggagctgaacaacgcttcagaggtcacctgtccacatcccagcggctcagacctctgcctaggagggtgggagctcagcaacatttcacttccttagttggatgcggctcagggccctcttcacagcacccagagctgcagttcctaccggctcccaactcccccgatgccctgctgatggccaactcagagcaggtgtcttttagctagtcctttctggaagggggtacaagaatactcacacaaaccgagctggctcaacccaggcaagaatacacaggtcgggatggaggcctggccttttacgcagctgcctagtgccatgacagagcctacaggctctcggacaaatgactaaggccaagtccttaaccacagctacagtttactgagcattcgtgaaaaggtatctactatgag

SEQ ID NO: 553868 - DNA, 662 bp, Homo sapiens
tgtgtatatatatatatacacacatacacattcaagacactacatacataatagtcatatatacgatatgaatmcaacagaaacacacagatggacctactgactcctttattgctgagcaaaaaaataatacagaactgtgtttaaatgacaaagatgacagaaaatcagtatcattcacagcctctgaaagtcttattttggaaatttttgtaagatttctagaacttcttccattatttaaaaacttacataaccaaaagagtaattctaatcatctcatcaatacactccataagcctccaattatgaaacttgtgaattttataatccaaatacaattcaatagcagcacctgccaacaaaaatttaaaattggtactctcaattagggacaccttttctatcaaaaaatgactccaaaggtgcatggtaatttctcctagaaaatatgaatgactgtgtcagtgtttaaaaaaatgctttgataatctaaccccagcaaaaacattagtaagtttaatcatttttattattccccaaaaagacatatttggttaatgtttttatctgataataaaagcatgcttacttcgtgaaaaaaaatatatatatatataaatatatatatttaacgttatatatatataacacctcggaga

SEQ ID NO: 553869 - DNA, 662 bp, Homo sapiens
tgtgtatatatatatatacacacatacacattcaagacactacatacataatagtcatatatacgatatgaatccaacagaaacayacagatggacctactgactcctttattgctgagcaaaaaaataatacagaactgtgtttaaatgacaaagatgacagaaaatcagtatcattcacagcctctgaaagtcttattttggaaatttttgtaagatttctagaacttcttccattatttaaaaacttacataaccaaaagagtaattctaatcatctcatcaatacactccataagcctccaattatgaaacttgtgaattttataatccaaatacaattcaatagcagcacctgccaacaaaaatttaaaattggtactctcaattagggacaccttttctatcaaaaaatgactccaaaggtgcatggtaatttctcctagaaaatatgaatgactgtgtcagtgtttaaaaaaatgctttgataatctaaccccagcaaaaacattagtaagtttaatcatttttattattccccaaaaagacatatttggttaatgtttttatctgataataaaagcatgcttacttcgtgaaaaaaaatatatatatatataaatatatatatttaacgttatatatatataacacctcggaga

SEQ ID NO: 553870 - DNA, 662 bp, Homo sapiens
tgtgtatatatatatatacacacatacacattcaagacactacatacataatagtcatatatacgatatgaatccaacagaaacacacagatggacctactgactcctttattgctgagcaaaaaaataatacagaactgtgtttaaatgacaaagatgacagaaaatcagtatcattcacagcctctgaaagtcttattttggaaatttttgtawgatttctagaacttcttccattatttaaaaacttacataaccaaaagagtaattctaatcatctcatcaatacactccataagcctccaattatgaaacttgtgaattttataatccaaatacaattcaatagcagcacctgccaacaaaaatttaaaattggtactctcaattagggacaccttttctatcaaaaaatgactccaaaggtgcatggtaatttctcctagaaaatatgaatgactgtgtcagtgtttaaaaaaatgctttgataatctaaccccagcaaaaacattagtaagtttaatcatttttattattccccaaaaagacatatttggttaatgtttttatctgataataaaagcatgcttacttcgtgaaaaaaaatatatatatatataaatatatatatttaacgttatatatatataacacctcggaga

SEQ ID NO: 553871 - DNA, 662 bp, Homo sapiens
tgtgtatatatatatatacacacatacacattcaagacactacatacataatagtcatatatacgatatgaatccaacagaaacacacagatggacctactgactcctttattgctgagcaaaaaaataatacagaactgtgtttaaatgacaaagatgacagaaaatcagtatcattcacagcctctgaaagtcttattttggaaatttttgtaagatttctagaacttcttccattatttaaaaacttacataaccaaaagagtaattctaatcatctcatcaatacactccataagcctccaattatgaaacttgtgaattttataatccaaatacaattcaatagcagcacctgccaacaaaaatttaaaattggtactctcaattagggacaccttttctatcaaaaaatgactccaaaggtgcatggtaatttctcctagaaaatatgaatgrctgtgtcagtgtttaaaaaaatgctttgataatctaaccccagcaaaaacattagtaagtttaatcatttttattattccccaaaaagacatatttggttaatgtttttatctgataataaaagcatgcttacttcgtgaaaaaaaatatatatatatataaatatatatatttaacgttatatatatataacacctcggaga

SEQ ID NO: 553872 - DNA, 1275 bp, Homo sapiens
gtaaaactaattataattaaaatcaaaatatttactgaacctacttactcctataatttgcgttgctggttaaaacccagctataaaaattttgatcaaaaatttttattttgtaaatgatctgacacagcataaatgttaatcacatttctttattttatttgcagattaatttgagtaatttgaaaaattattaatgttacttaattactctcaacaccttacagtgtctcctgtaagcactattggtgatactgaatttaagttacatttaacaactatcagaaaatagtttttaaagtaaaaattatgatttggagtttaccaactaaatcttgttagctttcactgcctctattgagaagagcagcagttcttatcttcctcctttttcttctttaattaacaagagattatttgtatcatagccataaaatcagttcaggtattacatgaacgacacccctgactgcaatggtgtagtttattgtattagtccattttcatgctgctgataaagacatacataagactgggtaatttataaagaaatagaagtttaacggactcacagttccatgtggctggggaagcctcacaatcatgatcgaaggcaaaaggcacatcttacatggcaacaggcaagagagaatgagagcsaagtgaaaggagaaaccccttataaaaccttcagacctcatgagacttattcactaccacaagaacagtatgtgagaaacagtcccatgatccagttatctcccactgggtccctcccaccacacaagggaattatgggaactgcaattcaagatgaaatgtgggtggaagcacaacggaactatatcatgatcaaagcattattgttttctctgataagctgatctagaaagtgctgcttgtgatcagctttggtgaccatgatcagtgaaatggttaaggaaatctacagattttgtaggtttgtgccttgacagacgaccggtatctgtttctcttttcatgatgaagtatctaacaaagctctgtccaaaattttgaatttctcgttaaatgcatcatgattatagaacagaggttacaatcaattattcagtcacacaatcactctcatcagtcattaaggtgcatacctggtgttccagttattcagtgtggtataacaaactacctggaacttaatggcttgaaatagtcaccattacattatgattgtccattctctgcatcaataattaggatttggcaaagagggaatggtttgtttacagacag

SEQ ID NO: 553873 - DNA, 1275 bp, Homo sapiens
gtaaaactaattataattaaaatcaaaatatttactgaacctacttactcctataatttgcgttgctggttaaaacccagctataaaaattttgatcaaaaatttttattttgtaaatgatctgacacagcataaatgttaatcacatttctttattttatttgcagattaatttgagtaatttgaaaaattattaatgttacttaattactctcaacaccttacagtgtctcctgtaagcactattggtgatactgaatttaagttacatttaacaactatcagaaaatagtttttaaagtaaaaattatgatttggagtttaccaactaaatcttgttagctttcactgcctctattgagaagagcagcagttcttatcttcctcctttttcttctttaattaacaagagattatttgtatcatagccataaaatcagttcaggtattacatgaacgacacccctgactgcaatggtgtagtttattgtattagtccattttcatgctgctgataaagacatacataagactgggtaatttataaagaaatagaagtttaacggactcacagttccatgtggctggggaagcctcacaatcatgatcgaaggcaaaaggcacatcttacatggcaacaggcaagagagaatgagagccaagtgaaaggagaaaccccttataaaaccttcagacctcatgagacttattcactaccacaagaacagtatgtgagaaacagtcccatgatccagttatctcccactgggtccctcccaccacacaagggaattatgggaactgcaattcaagatgaaatgtgggtggaagcacaacggaactatatcatgatcaaagcattattgttttctctgataagctgatctagaaagtgctgcttgtgatcagctttggtgaccatgatcagtgaaatggttaaggaaatctacagattttgtaggtttgtgccttgacagacgaccggtatctgtttctcttttcatgatgaagtatctaacaaagctctgtccaaaattttgaatttctcgttaaawgcatcatgattatagaacagaggttacaatcaattattcagtcacacaatcactctcatcagtcattaaggtgcatacctggtgttccagttattcagtgtggtataacaaactacctggaacttaatggcttgaaatagtcaccattacattatgattgtccattctctgcatcaataattaggatttggcaaagagggaatggtttgtttacagacag

SEQ ID NO: 553874 - DNA, 1275 bp, Homo sapiens
gtaaaactaattataattaaaatcaaaatatttactgaacctacttactcctataatttgcgttgctggttaaaacccagctataaaaattttgatcaaaaatttttattttgtaaatgatctgacacagcataaatgttaatcacatttctttattttatttgcagattaatttgagtaatttgaaaaattattaatgttacttaattactctcaacaccttacagtgtctcctgtaagcactattggtgatactgaatttaagttacatttaacaactatcagaaaatagtttttaaagtaaaaattatgatttggagtttaccaactaaatcttgttagctttcactgcctctattgagaagagcagcagttcttatcttcctcctttttcttctttaattaacaagagattatttgtatcatagccataaaatcagttcaggtattacatgaacgacacccctgactgcaatggtgtagtttattgtattagtccattttcatgctgctgataaagacatacataagactgggtaatttataaagaaatagaagtttaacggactcacagttccatgtggctggggaagcctcacaatcatgatcgaaggcaaaaggcacatcttacatggcaacaggcaagagagaatgagagccaagtgaaaggagaaaccccttataaaaccttcagacctcatgagacttattcactaccacaagaacagtatgtgagaaacagtcccatgatccagttatctcccactgggtccctcccaccacacaagggaattatgggaactgcaattcaagatgaaatgtgggtggaagcacaacggaactatatcatgatcaaagcattattgttttctctgataagctgatctagaaagtgctgcttgtgatcagctttggtgaccatgatcagtgaaatggttaaggaaatctacagattttgtaggtttgtgccttgacagacgaccggtatctgtttctcttttcatgatgaagtatctaacaaagctctgtccaaaattttgaatttctcgttaaatgcatcatgattatagaacagaggttacaatcaattattcagtcacacaatcactctcatcagtcattaaggtgcrtacctggtgttccagttattcagtgtggtataacaaactacctggaacttaatggcttgaaatagtcaccattacattatgattgtccattctctgcatcaataattaggatttggcaaagagggaatggtttgtttacagacag

SEQ ID NO: 553875 - DNA, 540 bp, Homo sapiens
taagataatatatttttaaaaaatgcagcagcagcagcagcagcagcagcagcagyagtagtagtagtagtagtagtagtagtaaagccaggttttctaacatgaaggacccagggtctagccaaggaattgggaatagggcttcagccaacagagttaatctctccgtggaagctgggagtcagaaaaggcaatctgaatgcaaggacaaatgaggaaatagtagagaatatcagacacagactatagaatgtctcagaagtaaaaactagaatgacaggtcaagatggttagtctggagccaagaactaggaaaaacctaaaggtattatttaccaaaatatgataggtacttctcatacttcgataaatgatttaagataaatgtgttgacatttaagaagtactatatatgcaattcatactgcatattttaaaatgtaaaattaccagtgacttcatgaatattaccaatgagaaaaacagtaaggctggtagggtggcagatcttataaattataggcatgaattccaataagt

SEQ ID NO: 553876 - DNA, 611 bp, Homo sapiens
ggaagagtcatatgtatattcaaagtatggtttatgctaaatatgcattgcttttgcactgtcaaaaaattgaaaaattttaactcaaaccatcttaaatcatgggccatttttatgtgcatgcacagttacgtgctgcataacaatgttttggtcaatgacagacctcataggtgatggyggtcacataagactataatacatatgtttaccatttttatgtttagatacacaaatacttacctttatattaaaattgcccacagtattcagtatagtaacatactgtacaggtttgtaccctaggaggagtaggttatatcatatgtctaggtgtgcagtaggctatacacaataggtttgcataagtccactctatgatgttcacaagtggatgaaattgcctaaaaacatatttctttgaacatatccccatcattaagtggcacatgaccatatgtgtatatgtgtgtgtttggacataatctactttcagttcaatatgaattctgatcatgtttgtaaatcacttttcattagtgtaaatcactttaacttcctacatttttaataattttttgcatgtttgcttaatgttttgttttgcttaa

SEQ ID NO: 553877 - DNA, 611 bp, Homo sapiens
ggaagagtcatatgtatattcaaagtatggtttatgctaaatatgcattgcttttgcactgtcaaaaaattgaaaaattttaactcaaaccatcttaaatcatgggccatttttatgtgcatgcacagttacgtgctgcataacaatgttttggtcaatgacagacctcataggtgatggcggtcacataagactataayacatatgtttaccatttttatgtttagatacacaaatacttacctttatattaaaattgcccacagtattcagtatagtaacatactgtacaggtttgtaccctaggaggagtaggttatatcatatgtctaggtgtgcagtaggctatacacaataggtttgcataagtccactctatgatgttcacaagtggatgaaattgcctaaaaacatatttctttgaacatatccccatcattaagtggcacatgaccatatgtgtatatgtgtgtgtttggacataatctactttcagttcaatatgaattctgatcatgtttgtaaatcacttttcattagtgtaaatcactttaacttcctacatttttaataattttttgcatgtttgcttaatgttttgttttgcttaa

SEQ ID NO: 553878 - DNA, 535 bp, Homo sapiens
agagtcattcgagtttaaatctgatggtgtcagtcaccaagctgaaattcctcaataggtcctcatgctctaacctagagcagttttctatgaaggctgtgaatcagaatcaccagagaaggctaaaaagatgcttgtgggcaggtcctaccccagcagttctagttctagtgggcctgggagtctgagtctgggattattctgctgagtagaaaacaccccctaatttcctttcatttttcagtccatttctctcccatcaggatctcatgggaaggagtgatcrgtctagggctgtgtctcggggtctctgagcaaaaagatatctgaataatacttcaaaatccttttaaaaagtttaacagcttttcaaaagatggcttgggttattgtcagtcctggatatatgatgatataaccacaggggtgggcctaaattttgctgtggacattaattatacactggttttcttggtgtgtctgtgctgacttttaaggatttagggacaatacaaccccattctcaacagcaaaa

SEQ ID NO: 553879 - DNA, 551 bp, Homo sapiens
caaactccctcttggtagatcttgtatttatttggattcatgttttatcctgagttggtttattgctttattcattcattcattcattcattcaagctatggtttatttatattagggatgacacatttattttttcctggagygcgtgacctccaaagtcagactgatacagcattatattgttcatgtcagagatgccttggattgcaagggctgtgtcttcatcttttgagtgtttggcatataaataaagcactcagaaaattgttgctaaatgagtagatgaaatgattctaataaatgattaagtatctacttctagtttctgaattgaagcccaaattattattattattattattatttttgagacagagtcttgctctattgctgaggctggagaacagtggtgcgatctcgattcactgcaacctccgcctccagagttcaagcagttctcctgccccagcctctccctagtagctgggattatgggcgctcgccaccacgcccagctaatttttgtattttagtagagacggggtttcat

SEQ ID NO: 553880 - DNA, 629 bp, Homo sapiens
agctcttcttgctgatgcaagattgtagaaaaagatctgtagctactggggcctgggagatacaaattcctacaattatatttagagtcttttctcctatgaatcaaaaacctacagcacttggaggagggacaacaacccacactttaaggacactggcaaagacccattttcactgtggaaaaagcagaagaaaaattcctgtgaaaactatcctgggcccagaatctattatctatcaccaattcgaggtctgctatcatggggtaggatcagagaataccttgtaagaaccaaccacagatcaaggacatagctggctgacatgaggtgaaggagtaagaatgctgagaaagttccctcctccccaggaagcctggcacacaaggtctgtctaagctgaggctgaatgtggacaagagtgaatccttgccagccaccaccactagcccagaatccaaaaggtaagagcaggctaccagtatgggaggaggacagtagtatrgagtgagaaccctgctgtagtgcagtttgcagagattatgaaagttgaaggtagatcacaaacactaagaaaaaaaacaaaaaaacaaagaacagaaaaccaaaaatctctggcacttcagcca

SEQ ID NO: 553881 - DNA, 1694 bp, Homo sapiens
tagaggctgtcttgatctaaccaggagtatgtttgtccatttgtttacaaaatcttaaattatctcactgtttggcacatctcatgtgcatgaaattctgtaccaatatggttactcctcacctatccaagggtgagaggaaacataggtctactctggaagataatccttactaaaatccaaccaaactttgctaagtggactgtgacaagattataaatgatatttaaaaaaaaaaacatttggtcatcaatttaaggaaataatttgcctacacagatttttgtcatttcaaaaaggtaatatattccactctcatatggtccttagaattaaagcatagcaaatagaaaaggagaggaaaakaatataattgagtgctaaggcagaatatcttgccagatgtaatgaagatagattatacactaaatatgtgcatagagtttcatagagttaaccagataactgcttgtatttttcacttacacagacaaaatagattttgcagttaccagttgtattaaatgcatcaaataaatctcctaaaattgatactataaagtgccaccttaagttatctgggatgcaactgtgtatcattttaaaatggctttcacaaatgtatttatttatttgagacagggtcttgctctgtcacccaggctggagtgcagtgctgcgatcatggctcactgccgccttgaactcctaggctaaagtgatcctggccattcagcctcccaaagtgctgggactacaggatgagccacagatttatttatttaaacataacatgaggaaggtattaaaacctttcagattttgggaggtatgaagaaggtgatgcttagaacccttcacaaggattccactagaagtggattaagtgctgtgctttgtggatgtgacaattagtcaatgccaccagcttgatggatctttctttctgtaccaaatcccaaaaaattccatgctttcagtgatcactaaaagctgagctccatcttcagctaggtgggttaagaattcaatgctctcattcaatcccagagtggtccagtgactgctacaacacctggcctataggtgatgcttattaaatattggttgaatgaatggatgaatgaatgagaaaagagatctgggagcctgacttgcactgggtaaaatcccaacagactgcccaacagagcaaggtgcaatattggggaacacacctgcgaagtcagtggaacctacggattgaatgttcagtgtattctctcctcaaaaagaaagatgacttcggaaatctcaaatgctgcttctgttccacagtagtaaacaaagggagctgtgtaacaagatctgagattattatcaagttctacgatcctgatgcagccatctccactctaagggtgtttcttcccacaatttatacatgtcagctttcacccttctcattgactagaatgaaggtaagtggtgagccaatctgaccatgaagatgagagtaatgtcagagagtggatggagcaagaagacagaagcaggttggatccctgacaattttaaagagtagagccaccgtaatggcttagacctttatgtgcgggaaaaataaactcccatcttattgaagccaccattattttggatctttccattgtagaagctactaacattgtaccactttctgagaaagagtttat

SEQ ID NO: 553882 - DNA, 562 bp, Homo sapiens
agtgaagcccagtctttcagttgcggagccaatacaccccctttcctgctgaagccagctgagaggggtttctggcccttactcattgttaggttttgaaggaaaggcaagggttaaaggaaaagacacacacacacacgcacacacacacacacacacacacagagagagagagaggtggggggtggggatgcggctctacagcaaacacaggcatttatgtccagcatcagccctgcggaggtggggaccagcttgatgccagtggctactgccacttataggctggagtacgtataggcctgggcaggaggggtctggggggcatggcctgctgcytggaaaaatgttcatagcaggctgggcgcggtggctcacacctgtaatcccagcactttaggaggccgaggtgggtggatcacaaggtcaggagttcgagaccagcctggccaacatagtgaaaccctgtctctgctaaaaatacaaaaattagctgggcatggtggcaggcacctgtaatcctagctactcgagaggctgagacaggagaatcacttgaacc

SEQ ID NO: 553883 - DNA, 562 bp, Homo sapiens
agtgaagcccagtctttcagttgcggagccaatacaccccctttcctgctgaagccagctgagaggggtttctggcccttactcattgttaggttttgaaggaaaggcaagggttaaaggaaaagacacacacacacacgcacacacacacacacacacacacagagagagagagaggtggggggtggggatgcggctctacagcaaacacaggcatttatgtccagcatcagccctgcggaggtggggaccagcttgatgccagtggctactgccacttataggctggagtacgtataggcctgggcaggaggggtctggggggcatggcctgctgcctggaaaaatgttcatagcaggctgggcgcggtggctcacacctgtaatcccagcactttaggaggccgaggtgggtggatcacaaggtcaggagttcgagaccagcctggccaacatagtgaaaccctgtctctrctaaaaatacaaaaattagctgggcatggtggcaggcacctgtaatcctagctactcgagaggctgagacaggagaatcacttgaacc

SEQ ID NO: 553884 - DNA, 636 bp, Homo sapiens
ccttaagcccacccactctttggatgcmgggtgcagtttttcctgagcttgagtagtgagaagagcaggagagatgcattagctttttctcatcgtgtccttgaaatgactggggctcgaaaaagacactgtgataaactttcatttctgatacagaaaggtctagacacttagaaaaaaaaaaagttgtttaaatcagattttcatcaaatttttcagaattggttgctggatccccaaaattcacccagttttaaggttgcttgctaaaagacggtcacagagaaatacttagacatttatttaattcctatctcttaacaaagttgatatgattttgcggagaacttgactaactgcatgatttggtaatgagcgagtaaagagtcttcctttccacacccatctccctagggtaggtgacactagggatggggaccccaaatagttcataggttttgcgggtctccacaatcaaataattgcctctctgttcctgctcacctctcctttcttctcccagggaaatggccttggaattttagcatttgccctcccctgggactggctgggggggttagaaataaggagcttgagaggggataactgcttctaagagagagactggagaacaga

SEQ ID NO: 553885 - DNA, 636 bp, Homo sapiens
ccttaagcccacccactctttggatgcagggtgcagtttttcctgagcttgagtagtgagaagagcaggagagatgcattagctttttctcatcgtgtccttgaaatgactggggctcgaaaaagacactgtgataaactttcatttctgatacagaaaggtctagacacttagaaaaaaaaaaagttgtttaaatcagattttcatcaaatttttcagaattggttgctggatccccaaaattcacccagttttaaggttgcttgctaaaagacggtcacagagaaatacttagacatttatttaattcctatctcttaacaaagttgatatgattttgcggagaacttgactaactgcatgatttggtaatgagcgagtaaagagtcttcctttccacacccatctccctagggtaggtgacactagggatggggaccccaaatagttcataggttttgygggtctccacaatcaaataattgcctctctgttcctgctcacctctcctttcttctcccagggaaatggccttggaattttagcatttgccctcccctgggactggctgggggggttagaaataaggagcttgagaggggataactgcttctaagagagagactggagaacaga

SEQ ID NO: 553886 - DNA, 1174 bp, Homo sapiens
ggcagtctcttggacataggggatccgaccaaacccaggctttcagggtgccaaggcctgaaygggagccagtgacactctgacctctctccatgggatgtgccagctggcaaaggtcacctctgggagtggtccttgggtcaccctcatgtccctccagggataatgagcagcaggctgaccaggaaaggaccggggaagggatctgaggactcaggaagcatcaacccagagagatttcaggggccaccacccagcctacgtgacagtcagggggccgggcatccactcatccgccccctgaggcccaggtggctgccctcaaaccacctgggggaataagaataagaagggcagcgttcatgatgtcaccatagaattgcctaataaagctccaggcacaaagtaagagcttcatacatgctgctccctgccctcctcctgccgcctctcaacacctgaggctatcaggggacacctgatagcttggaatcgtgaatgccaagtgcaggagagcgctcagccagggaatgccatggcaggtgctggccctacaactcacaggggtgacccaagttgctcggtcccgtcacgagacccacaggcctccctctgtctggcggtgaggaaaggcagatggaaaggccctgttttacaggagtggttctcaaagtggggtcccaaccagcaacatcagtcagcgtcacctgggaactcagagatgcaaattcctgatcccgttagactttctgaatcagaaactccacggggcagcctgcattctaatgagccctccagggaactaggatgaggccagagattgagaaccactggtttcaaggaattatggctcaacagtttagaatctcagatccctattaaatgaaaaccatcaggattacacttgtaccataatttttaaaaacttatcttggccaggtgcggtggctcacgcctgtaatcccagcactttgggaggccgaggtgggcggatcacaaggtcaggagatcgagaccatcctggctaacacggtgaaaccccatctctacttttaaaaatacaaaaaattagccaggcgtggtggcaggcgcctctagtcccagctacttgggaggctgaggcaggagaatggcatgaacccaggaggcggagctttcagtgagccgagatcgc

SEQ ID NO: 553887 - DNA, 1043 bp, Homo sapiens
gaactggaagaaacatttatatgtaccaccctctaaaagtggtacacattaaccgggacacagttgcatggaaatatagccaagctatgtatccagaaagaagaaaaaacaagtgtggtaaagagctatcagtctatgcctcagcttttcaaaatccagtcttacggcgcacagatctagagagaatatgtagaccttatattatgtaaaggcattcacagaactatttttgttgttgttaacatacttgagcttccctacggcaatgttcttgtaggtttcccagactaatagccttcaaaatggaggtgaatatatacatataagaaaaaaataagtaacttaagtcttctaataagatatgttttataaaaatatgaagaagatatagtaacagctccttatagcagtgtaagacctttctttcatccatctcctcacctatggttactatcctcacaatcccatttccctctatgtacattttactttataacatatgttctcatacacaaaaaatacaataaaaaattttccattatccaacagaatttataaagcctacaaaatttctaaatatatcattttatatgtaatgaatatgcttgttatttcccattaaaaaaaaatgcagcggccgggtgtggtggcttatgcctgtaatctcaacactttgggaggcygaagtgggtggattgcttgagctcaggagtttgggacccacctggccaatgtggcaaaaatctgtctctactaaaaacccaaaaattagccaggagtggtggtgggcacctgtagtcccagctactcatgaggctgaggtgggaggattgcttgagctcagaaagcggagtttgcagtgagccatggttttatcactgcagtccagcttggcgaccacttgttcttttttgcttgtttctttgtcttttgctttactttgcatcatagagatacgggtgaaaatttctttaaccctttaagtgtttctactttgtctcatatgctatacctcatttgttacttggagtatactcttggcc

SEQ ID NO: 553888 - DNA, 1043 bp, Homo sapiens
gaactggaagaaacatttatatgtaccaccctctaaaagtggtacacattaaccgggacacagttgcatggaaatatagccaagctatgtatccagaaagaagaaaaaacaagtgtggtaaagagctatcagtctatgcctcagcttttcaaaatccagtcttacggcgcacagatctagagagaatatgtagaccttatattatgtaaaggcattcacagaactatttttgttgttgttaacatacttgagcttccctacggcaatgttcttgtaggtttcccagactaatagccttcaaaatggaggtgaatatatacatataagaaaaaaataagtaacttaagtcttctaataagatatgttttataaaaatatgaagaagatatagtaacagctccttatagcagtgtaagacctttctttcatccatctcctcacctatggttactatcctcacaatcccatttccctctatgtacattttactttataacatatgttctcatacacaaaaaatacaataaaaaattttccattatccaacagaatttataaagcctacaaaatttctaaatatatcattttatatgtaatgaatatgcttgttatttcccattaaaaaaaaatgcagcggccgggtgtggtggcttatgcctgtaatctcaacactttgggaggccgaagtgggtggattgcttgagctcaggagtttgggacccaccyggccaatgtggcaaaaatctgtctctactaaaaacccaaaaattagccaggagtggtggtgggcacctgtagtcccagctactcatgaggctgaggtgggaggattgcttgagctcagaaagcggagtttgcagtgagccatggttttatcactgcagtccagcttggcgaccacttgttcttttttgcttgtttctttgtcttttgctttactttgcatcatagagatacgggtgaaaatttctttaaccctttaagtgtttctactttgtctcatatgctatacctcatttgttacttggagtatactcttggcc

SEQ ID NO: 553889 - DNA, 1082 bp, Homo sapiens
gatatactgttccatgaaagtttcaaatctttatattaaagattaccatttgagtcagaggcaatgataggattttctgtactttatccacatgtttatatatacacatatatatatgttttcatataacctttcataaggatagaaaagaactatgaatgtttctccatcaggcatctttcaaatacaacataacaataacttccttaagtattttatttaggcaaaaactataaaatgatggaatggaaaaagaattctcaatgatcaaaccaaagcaattatatttgattctgaattttaaaagattagtccatcaatttatatttagaggttagaaaacacattctgagagacagaaaattatattacttttctaacttcctggagaatattgtgctttgtcaaattttacatttatgagaagttttatattaaagctataaaatctatcagggtaagttaatatgagtatttgaaagtttcactgttaaatttatattatcacatattaaatgaaagaactgttaactgtgtactgaattcaaaagttaatatagcttctctcctttttaagaaatgggacacaatattaaaaaattaaagagttttcaaatatttatacttaaatttatatctaaggaattatatatagaatgcatacctttcaagtagatactattgttgctgttaagattattgtcaacaaaatttaaatacacagactattaaataaagaaattaaaacaacaaaaaataacctctaggccaggtgtcctggttaacctgtaatcccagcacttyagaagcttgaggcaagaggattgcttgagaccaatagtttgagaccagcctgagcagcaaactgagactctatgtgtatcaaaaaatgttttaaaagtagccgggtactgaggcaggcacttgtaatcccagctacttgggaggctgaggtgggaggtatgcttgggcccaggattttgaggctgcagtgagctgtgattgcaccacagccctccagcctgggagagagaggagaccttgtttctaaaaactaactaaataaacaataatgtaaaaaa

SEQ ID NO: 553890 - DNA, 650 bp, Homo sapiens
aggtgggaattgaacaatgagaacacatggacacaggaaggggaacatcacactctcgggactgttgtggggtggggggaggggggagggatagcatttggagatatacctaatgttaaatgatgagttattgggtgcagcacaccaacatggcacatgtatacatatggaactaacctgcacgttgtgcacatgtaccctaaaacttaaagtacataaaaaaaagaaacaaacaaaaaaaagaatatcccattctcctcgccaaagtgatttgtttagggatatagacataatggtccaagatggacaacttggaatcttctacaggctttctgctggaatttttacttaattccattggaaataacctttgaatctaggattcctgtgagatggaatttctgccctcttttctttcacgtggaaagaccctacccacgaactggcaagagtagtagaatctccgctattttgactgaatcccaggatctggtcttgtctgactttggtagtatttttctagacatttagatgatgtgaatcagtaagttgataaattcctttttttccttaggtttgattaggttgtgtttctctcacttgtacctaaagtacttaagtatctatctaacagagataagayactgata

SEQ ID NO: 553891 - DNA, 553 bp, Homo sapiens
tacaaatctgatcaatagttgcaacctcttgttactgtttgcttttataaattgaccattagatgcttgtgctcatgagttgacacattgaaattatgcaaggttgaattttgaaaaatctctgtcaccatatttaatggttcaagrgaatgaaaggattctagttacataggcctaaaggacataatgaaatttaaaatttgtttcccttagaaaagattaagatatattttcttaaaagatattaagaaaggtattcttccatatcctaagttcccttagtaagtttccatgattagcatcaattgttgaagtgaagttaatttatgtgtgtcttaccgaatttactgtggataaaggatgactcaaataagtatacacttggccatctgtttttgcaagttctgcatccacagattcaacccaccattgatttaaaaaatccaaaaataaaaataaaaaatcaaaatcaaaatcaaaaaacaatacactacaactattcattaagcatttacattgcattaggtattataagtaacctagagatgattta

SEQ ID NO: 553892 - DNA, 704 bp, Homo sapiens
tgaaatttatgagggaaccctaatgcatgcatagtgagtaaacatatatgttacatacatcccatgatcacttgatcactttggggtggagatttaatattaaaataaggtaaaacttggctctttacatcagaaggtgaaacacaggatacaaaagcatcttgtgcacagcctctgtggacccagaaccactttgaagccgatggtcagttatcaggatggaatgctttttaaggctggtcagttgtcacrgtgaaaccacattaagtcaggagaggttggtgactacaacaggtgatctattaaggtcaagggagaaatcttccagacctcgattttcaggaactgatttctgtttaatgtaggaaagtcttgagggggttaataaggtaggggagtattgaagcatgaccgatttcttgccttgacaagctctagaatctagtttttaacatttttctggggtttcttttgccacaaggagtcagattaaattcactgggagtcctagcagatttatttttatttcataggaagaaatgagtccaaataacatagtaagatgttgaacaataagaataaaagtgaaaaatgttaacgatggagtgtctaaaatcctctcggaacaataacacttacttctaatttctcttatgtgctaacaataccctcattattgagtcagggaaaaaaatattaaagtt

SEQ ID NO: 553893 - DNA, 3302 bp, Homo sapiens
tttgtatttatgtaatgattcaatgaaataaaaatattatagcagttttggctaatactattataaagtaatgttcattatctgtaaaagttgacggtgatatatgccattcacaattcactgacttttctgatatctgcaaaggacttggggttagatctggactagaacatattactcatgtgactatattctctggtttccaggctatagaaaattgtatcacacgactatgctttgttctctgaaaaacagatggaagggacactattttttaaatatcagactgattttggtggtttattttcatgtggcttgcagtaactgaaggaagatgaacatgttttaagatgtatgtgtctcattatactgatttgaagactctgtaggcatgttttgtttgctaaaacactaggaaagatgaatatacacataacaacagtataaaagtggtaaaggcagaaaattctgaggttgcctccaaatgcttgtctcatgagtctaaatttaatatcacccttaagcattacaaggaataactttggggctaatgctgctccaaactgcaatagcataccttggcaaaatcatccccttaccaccaccccagccatgatatccttcatacattttacagttctttacacgagacatgaaaataattaagatgaatagaatctcagaaattctgtttactacagatgttcagagtagaggagtctctttaggctgaatttattggcagtggagggggacctatgagtcagacactggtaaagtgtactggggagtgtagtggcatccaagtccattggtttgtagccaccactagggtgcatttcttgagaatgctgtcattttccccaacatgggcctctggtcatgttgccctcttgatcacagacatcaggatgtggtgtgtccactcattaagaagtcagcggagcaagctctatcagttaaatattgaaaatctgtcctataactaaagctatattctgttatgttgtttatctgtctatagcaaatccatgatttccctataaattaataattctacaaaaaatcaagaaaaaggcagagaaatttgttaaaaggaaaaccttacacaaattaaattcagcagagtttaattgaacaaagaataaaattggttaatcaggtaacccccacaaaccagaagaggctcagaatgactcaggtgttgtctcatggtctaagaaaatttatgaagagaaaaaggaaaatgacaaaagtgaagtatagaaacagctggattggttacaacttggcatttgtcatatttgaacatggtttgaacagttggttgcctttggttgtcggaaacttggtgattggtacaagagtaggttacagtctgtttatacatccaattaggttacagtgcactatatatggaaaaactttaggccaaacataaaatatgtaaggaggtagctttaggctgaacttaacaggctgaatgttttgagtttattttagcattggttttcatgaggaccctgatttcagtgtcggtgtctttgttttgttttgttttgttgtgctattttttttggcttgctgaaagcatccctctgttatcctgacagtttcaatgatgaaatcaacattatatccaaaattttcatcctcaaaattccttcccagcttgcaccgcagttagcagatctgaacatgagggagcaagggcaaggagatccctggtcttgcttgttgctcctggaaatgacagcacgaaaaacagatctagctggattgtaagaacattgtttctatggagtctcacaaaatgtttcagcatttggaagctgttgcagagctgggtctttttgttttccgtgcagatgtaggtacacatggtgaaacaaaacaaactgaatttgttttcagttttaggcctttgttttataagcattttacattaaaatgtagaaaaaggaaatacataaaatttcttttcttgtgagaaagtggtaatatgaattcatacaaacttgacaaaatacaatggatttgtgagattcagtcccttttagtgacatggatgatgatgtgttatctgaactgctctttccaagtgtaccattttttttcttgttaagggtctgtytttatcagagggtctgtctttatcagaaagtccagatacatttttagtgtaatacatgtgacatgtatttgtatataaatttccccaggcgttttttggttgtagaatattatcatttggtatttccacaactcctagaaatattttaagcaggatagatgtctttacctcaatcatattaggcatttatttaacatgaaccatgccagatggtgttttgtatatgaaactgagagtgtgcatgacatacaaaatttgaaaggtgcaaagaggattcagtgaaaagtaaacctttactcagggcccccagctacccagtcagtgcatctccatcaccattttatcattttattctctatgtttatacataaatatacaaaatgcatatatcatattatatactatatccctatatgtacatgtgatgtatataatatataatttatttaatcaagcatctattgataattttagattgttttcaatcttttaccaacaatcctgtgatgatggtgtatttagaatacctcttctcataggtgtctgtggagcttctttccttatttccctcaggtttcagtttaaatgtcacctccttgctaccttacataaagcagaatcccttcctcattactccctactcctcttattctatttttcttcatagcacttgccgtcagttgacatattatgtatttatttgtttaaaggctctttccccaacacatgtaagcttcatgagtctctctactgtgtttgcttctctatcccaagtgtgtagaacaagagcgggtgtgccattagtgttcactaggcatttattaaatgaatagttcattttacacatttgtgagtagatttgtaggaaaaattactagaagtggaattgctgtgttaaaggatgtgggcatttttaattttgacacatgttgccgaacagctttccctagaagttgtagaaatttatatttttatcagcagtgtacccacaccttcaccagcatcaaacttgctatcagttgatataacctacggtatctcattttaggtataatttgtatttctctattatgagtgatgtgcatacactaccaaaactctttagctgtttatgatgactaaacatatatgaagtattttcactgaatctttttcaaagaccaaaaga

SEQ ID NO: 553894 - DNA, 1834 bp, Homo sapiens
gtccttagatcctgtgcctttgcctggttgtattggaagtcaagctgtaaatggaatttaagcaccatatatatatatatagagagagagagagagacagattcaaacccctgggctcaagtgatactcccgcctcagcctcccaagtagctgggattacaggcccgtgcaactacaaccagctgccttattactgacctgccctcttcactgtaaaaaccaggaaacatatcaccatgtcctagattttgtgaaaaacgtcttttgtgtctctcaaatggatcatgcttcatccggaacctctgagtccttgagacctccacgttccgggcggagcagggaagcctgaactttaagaaggccacgtggctaaatggcttccctgaggcatgtctctcctgggaaggcattccctaccccagatcctgcagcctttcatcctgaggccattagactctccaggtgcacctgcatcaaagcgcacaggtaccgcgctcctgatctggacttatctgaattgtacmttccccgagggtgctgtttgatgtgcttgattgtggaatgaaagccaaataaaggaatgagaggggctgtttatttcctcatttttagtgcttttcctcagggcccttctatgtctggagaaggaatttatgaaaaagcctaggataccacctaagcggaaaacaccagcatctacttacaattatattaactctggcatccatgagctgttggcctctggcagaggagtctgtgtccctaaagagctctatggatagccagtatggtggctcatgcctgtgatctcagcactttgggaggccggaatgggaggatcacttgagcccaggagctcaagaccaacctgggcaacatagtgagacctcgtctctaccaaaaaaaaaaaaaaaaaaaaaaaaattagcctggcatggtagcaggcacctgcagtcccagctactcaggaggctgaggcaggaggatcattcgaggccaggagtttgaggctgcagtgagctatgattgcaccactccagcccaggtgacagagtgaaagcccatctctgatagatagaaagatagatagctctatggtggaggaaagtgatgccactctcgcctcacactttttcagctgtgtcatcagcatcctctcttcctggaggagggtgacagggccagtgtagttctgagttgctctgatagcctgctgcttctcatttgagtgaccaaggctgggaatttagaagggactctagtcataataacataggcggcctccctgcaccccctccccctttttttttttgaggcagagtctcactctgtcgcccaggctggagtgccgtggtgcgatctcggctcattacaacctccgcctcccaggctcaagtgattctcctgcctcagcctcccgagtaactgggagtacaagcacatgccaccacatccagctgattttttgcatttttagtagagataggctttcaccatgttggccagactggtctggaactcctgacctcaggtgatctacccgcctaagcctctcagaatgctgggattacaggcataagccaccatgcccagccatcccccaccgccttttttttttttaacagatggggaaactgaggctgaggctgaaagcaattgagtgacttgtccactgttggcagcatgccagtggcagaggcaggaatagctcccaggattcattcctgactcctagcctagcaatctggtgatgaaacagggtgtggtggacaatcggcagagactttcaatgcattgaatctccattcaaaaagaaagggtcccctgcaagaca

SEQ ID NO: 553895 - DNA, 1242 bp, Homo sapiens
cggagtccatagatagggatgctggggtctcgtctcacattgattgggtgctagaattataaggagggagaaatgaattttaaaaggaccgttcttcagcagagaataaaaggtctactttgaaggcaaaatattaacatctttttataggccattccttccacccagttcttagaaatttactatatgtcctctcctgttcaccaaagccttttataccaagtagggaggagatagtcactccacaaggttacagtaatattcaggctctcaaagaacatagcatgccagggcaggaagtcgggggtcagggagggttcacaaggaattgaagacaattcctgcctgctggaaagatacggacggcagggtcactcaagacttccatatgagctgtagacactcaaccatgctgcaacacagacatgacagccggtaagttctgccaagccctgaatacgctttacactttctttttttgtgtgtgggggggacggagtttagctcttgttgcccaggctggagtgcaatggcgtgatcttggctcactgcaacctccgcctcccgggctcaagggattcttctgcctcagcctccgaagtagttgagattacaggcatgcaccaccgcacccagctgatgttgtatttttagtagagacagggtttctccatgttggtcaggctggcctcgaactccccacctcagatgatccgcccgcctcagcctcccaaagtgctgggattaccagcatgagccaccatgttcggctgaatacactttctaaccaactgccatgcrccaagaagagctcattcacagggaaatcaatatactctggggaccataaaagcaacacgaaaacattaatgctgccggcctccatttcctgggaccaactaagagcaacagaacaatttggatagattagaatcacatatttaaagagatctggctttctaagaaatgtcatctatagaaataaaatcaccttaccatatttcagttgccttaaattttattttcgctagcttagtaaggggaagaaatatgtattttctctttcctttttctctctctctctttttttttgtttttgttttaatatttctagtcacctgtctttctctgccttagtcacatatgggcaaattgctgtttgtttagatgtgggctcaatgcaggcagctttgagccattatctctagtatttgtgatgtcactttggtttgtgatgtgggt

SEQ ID NO: 553896 - DNA, 1242 bp, Homo sapiens
cggagtccatagatagggatgctggggtctcgtctcacattgattgggtgctagaattataaggagggagaaatgaattttaaaaggaccgttcttcagcagagaataaaaggtctactttgaaggcaaaatattaacatctttttataggccattccttccacccagttcttagaaatttactatatgtcctctcctgttcaccaaagccttttataccaagtagggaggagatagtcactccacaaggttacagtaatattcaggctctcaaagaacatagcatgccagggcaggaagtcgggggtcagggagggttcacaaggaattgaagacaattcctgcctgctggaaagatacggacggcagggtcactcaagacttccatatgagctgtagacactcaaccatgctgcaacacagacatgacagccggtaagttctgccaagccctgaatacgctttacactttctttttttgtgtgtgggggggacggagtttagctcttgttgcccaggctggagtgcaatggcgtgatcttggctcactgcaacctccgcctcccgggctcaagggattcttctgcctcagcctccgaagtagttgagattacaggcatgcaccaccgcacccagctgatgttgtatttttagtagagacagggtttctccatgttggtcaggctggcctcgaactccccacctcagatgatccgcccgcctcagcctcccaaagtgctgggattaccagcatgagccaccatgttcggctgaatacactttctaaccaactgccatgcaccaagaagagctcattcacagggaaatcaatatactctgrggaccataaaagcaacacgaaaacattaatgctgccggcctccatttcctgggaccaactaagagcaacagaacaatttggatagattagaatcacatatttaaagagatctggctttctaagaaatgtcatctatagaaataaaatcaccttaccatatttcagttgccttaaattttattttcgctagcttagtaaggggaagaaatatgtattttctctttcctttttctctctctctctttttttttgtttttgttttaatatttctagtcacctgtctttctctgccttagtcacatatgggcaaattgctgtttgtttagatgtgggctcaatgcaggcagctttgagccattatctctagtatttgtgatgtcactttggtttgtgatgtgggt

SEQ ID NO: 553897 - DNA, 1213 bp, Homo sapiens
aaaaatacaaaaattagctgggcgtggtagcatgagcctgtaatcccagctacccaggaggctgaggcaggagaatcactggaacctgggaggcagaggctgcagtgagccaagatcgcgccactgtactccagcctgggcracagaccaagactccgtctcaaaaaaaaagaaagcttgggggccgggcgcagtggctcacactgtaatcccagccaaggtgagtggatcacttgaggtcaggagttctgagacgagcctggcctacatggtaaaaccccatctctactaaaaatacaaaaattagccgggcatggtggtgcatgcctgtaatccaagctacttgggaggatgaggcaggacaatcacttgaacctgggaggtggagattgcagtgaccagagagccgagattgtgccactgcacactccagcctgggtggcagagtgagactatgtctcaaaaaaaaaaaaaaaaagcaagcttggggctgtggcagtggtcagagaccctctggtaggtggctggttgcacccagagacactgcagtccagagatactgcagtccagaggtgtgtgtgagggtagtttgcttcctctgcacccctctggctgcctccctggctctcttccttgccccttccgtgcaatagttccctgttgaatagcaactacctagcccaggtgttcaggacccaatttcagaatccatcccactattctcaggagcacttctgttcttgcctgaccattcttgactgttttgggctctggaagtgtgatgcccccatggttggccccacttctctgctgttttcctctcatgttttgctgccagctgcctgggaggggtggctgtatccctgtcccacatcagaaactgatcctcaggacttgaaggcccagaagtggagagagaatgagacctggagacaaagggcataattgttggggaaatggatgacagctgaagctattcatatggagccatatactctattgttgaaatagaataaggaaataaaatgatacactcacatacctgcgcgagctctccaaaaacactgtactaccttgtctaccaggagctggtttctcagccagttggataagggattgtttcagcaaggagactgatggcctcctcagggaaggagggacgggacaggatttgttcttgtaacagcattcaaggagtcagctgggtgcctca

SEQ ID NO: 553898 - DNA, 1213 bp, Homo sapiens
aaaaatacaaaaattagctgggcgtggtagcatgagcctgtaatcccagctacccaggaggctgaggcaggagaatcactggaacctgggaggcagaggctgcagtgagccaagatcgcgccactgtactccagcctgggcaacagaccaagactccgtctcaaaaaaaaagaaagcttgggggccgggcgcagtggctcacactgtaatcccagccaaggtgagtggatcacttgaggtcaggagttctgagacgagcctggcctacatggtaaaaccccatctctactaaaaatacaaaaattagcygggcatggtggtgcatgcctgtaatccaagctacttgggaggatgaggcaggacaatcacttgaacctgggaggtggagattgcagtgaccagagagccgagattgtgccactgcacactccagcctgggtggcagagtgagactatgtctcaaaaaaaaaaaaaaaaagcaagcttggggctgtggcagtggtcagagaccctctggtaggtggctggttgcacccagagacactgcagtccagagatactgcagtccagaggtgtgtgtgagggtagtttgcttcctctgcacccctctggctgcctccctggctctcttccttgccccttccgtgcaatagttccctgttgaatagcaactacctagcccaggtgttcaggacccaatttcagaatccatcccactattctcaggagcacttctgttcttgcctgaccattcttgactgttttgggctctggaagtgtgatgcccccatggttggccccacttctctgctgttttcctctcatgttttgctgccagctgcctgggaggggtggctgtatccctgtcccacatcagaaactgatcctcaggacttgaaggcccagaagtggagagagaatgagacctggagacaaagggcataattgttggggaaatggatgacagctgaagctattcatatggagccatatactctattgttgaaatagaataaggaaataaaatgatacactcacatacctgcgcgagctctccaaaaacactgtactaccttgtctaccaggagctggtttctcagccagttggataagggattgtttcagcaaggagactgatggcctcctcagggaaggagggacgggacaggatttgttcttgtaacagcattcaaggagtcagctgggtgcctca

SEQ ID NO: 553899 - DNA, 1535 bp, Homo sapiens
gattgcatttttctcaattcagtatccctgggatataaattacatgaytcagtcaataattgtttatttgttgcatgcatacgctaattaaataaaatcagatcctggctctaatcctacttctgtgtcatttgtgatccattttcctcattacaatggtaactacctcattgtgttaagaataaatataacacccgtaatcccagcactttgggaggcccaggccggcacatcacctgagatcgggagttgcagacctgaccaacatggagaaaccctgtctctactaaaaatacaaaattagccaggcatggtggggcatgcctgtaatcccagccactcaggaggctgaggcaagagaatcgcttgaacccgggaggcggaggttgctgtgagctgagatcatgccattgcactccagcctgggcaacaagagtgaaactgtctcaaaaaagaaaaaaaaaaaagaataaatataacagtgtatgtaatgttttctgcatatagtaagagctcaatctacatacatagatagggaccacctattctaagcctaattctcatcccctctcaaatagaatgactattttattcattctggctaactcgaggattggaagacaatcttaaattctccctgatcacacttgaaggatgagattctgataaccaataaaagatgattttgtcataatggggtttcattttcatattgctaggttagaaagaaatttcaacaaaaaaaaactatgctgtgtcctaaatggttaatgatcctcagtaagcaatctgtccagaatgagaacgatttcttttgcagtctgacagctgatctataatcaggttctgcttggctgctatcctgagcccctccctacggttctccatggggctcagtgaacactgtgaaagaaaaaaatcccaaaccttttattacatgcatttctgatttcccagaagtttctcaacagagggggacttgcagatgcctgccagatgttgctttatcttgtgggagaggaattccttcttcaagtgttttgaggtttatgcttggtgaaattatagagcgagtactttcttgccgttccttttttttttcttttattccttcagtaaacattagcaaccactatctcagggactgtgattacaaagataagtagcatagtttctgccaccttaagctctcaattaaaaaaaacatgtagagcaattaagcagactattgcaataaacggtatctactgctctgacacgaagtgcacaaggtgatgtaggaacccagaggatgggtacctaatgcattctgtgctggaatcagggaacgcttcctgaaagaggtgtcaggaaggataaccacatattagacagggggtaaaaggtcttttaggcagagggaacagcatgtgagatgacacagggatgaagtagcctagtgtgcagaggaaatggcaaattattcatgaaagaagtttaatgtcctgtgtttgttcgtttgtgttgctacaaaggaatacctgaggctgagtaat

SEQ ID NO: 553900 - DNA, 1535 bp, Homo sapiens
gattgcatttttctcaattcagtatccctgggatataaattacatgattcagtcaataattgtttatttgttgcatgcatacgctaattaaataaaatcagatcctggctctaatcctacttctgtgtcatttgtgatccattttcctcattacaatggtaactacctcattgtgttaagaataaatataacacccgtaatcccagcactttgggaggcccaggccggcacatcacctgagatcgggagttgcagacctgaccaacatggagaaaccctgtctctactaaaaatacaaaattagccaggcatggtggggcatgcctgtaatcccagccactcaggaggctgaggcaagagaatcgcttgaacccgggaggcggaggttgctgtgagctgagatcatgccattgcactccagcctgggcaacaagagtgaaactgtctcaaaaaagaaaaaaaaaaaagaataaatataacagtgtatgtaatgttttctgcatatagtaagagctcaatctacatacatagatagggaccacctattctaagcctaattctcatcccctctcaaatagaatgactattttattcattctggctaactcgaggattggaagacaatcttaaattctccctgatcacacttgaaggatgagattctgataaccaataaaagatgattttgtcataatggggtttcattttcatattgctaggttagaaagaaatttcaacaaaaaaaaactatgctgtgtcctaaatggttaatgatcctcagtaagcaatctgtccagaatgagaacgatttcttttgcagtctgacagctgatctataatcaggttctgcttggctgctatcctgagcccctccctacggttctccatggggctcagtgaacactgtgaaagaaaaaaatcccaaaccttttattacatgcatttctgatttcccagaagtttctcaacagagggggacttgcagatgcctgccagatgttgctttatcttgtgggagaggaattccttcttcaagtgttttgaggtttatgcttggtgaaattatagagcgagtactttcttgccgttccttttttttttcttttattccttcagtaaacattagcaaccactatctcagggactgtgattacaaagataagtagcatagtttctgccaccttaagctctcaattaaaaaaaacatgtagagcaattaagcagactattgcaataaacggtatctactgctctgacacgaagtgcacaaggtgatgtaggaacccagaggatgggtacctaatgcattctgtgctggaatcagggaacgcttcctgaaagaggtgtcaggaaggataaccacatattagacagggggtaaaaggtcttttaggcagagggaayagcatgtgagatgacacagggatgaagtagcctagtgtgcagaggaaatggcaaattattcatgaaagaagtttaatgtcctgtgtttgttcgtttgtgttgctacaaaggaatacctgaggctgagtaat

SEQ ID NO: 553901 - DNA, 2009 bp, Homo sapiens
aactgttttccagcatctctctctaacacctgtccagatgctaacaaagcagtagaaccaggtcaaatcgatggtttttttctctgcccttcacacaataaatgcctcaggtatctgtctagtgtttgatattaaaaatccctgaccccatcatatccattgatatatactaccaatattttgagctgctagcatatttgcctgttacgtcaaggcatctgaaagtttaaagcttggcaaagcaatgtttttctttttcttcttctataatcctagggtaaacattaagcagacagcatttctgctttgagcattaaaggaaaaaaaaagactgaatttgaaaagccttctagtacactttggggatttcggaaagtgtcgtttggctgggagctgagtggagaagctgccattctgtagatgggataggaggaaagccgcatggcctcattcataacttcacagctactgcaaatatcagctgatgaatatttatgttttccctggcttaggcccgaaaggcaaacaagggaaaaaaaaacgaaagttaggaaaaggtcgtctgaactctgtgggattttttaccagcactttccatgcgcgagccgtagccctgaatgaagtcattctgtacaggggcccggcacaggaaaacacagtctgttcattagctccccgcactttgtttgaaccttgtacattcatggggtcctgaaagggaaactcctttttaaaaaaatcaaacacacaggatatagagctaccttattattattttggtaaattattgcaaattgctcctcatcatatagtgacctcagtggttcattgaaagagcaagtcagtgaaggagagtttaaaaaaaattatatattttttaaagagggccattccagttcaggttaatattttacagagttacagtttctaaacatattttaaagtctatataaataatatcaatacattactacatatcgtagtagagcaaattattttttaaaaatgtactctagattttagtcttatttcaggaaaaatagcctttaagccccactgtagaagaaataatcacgtcttgatcacttgggtttattatttaaattctgttttcctccttttactttttcttggcccatcagtactgctttcaccctctgctgccatcactgccacagctaggttgacctgaggctatggaaacaacacaaaaacaattaacaagatgagggatttttctacttgccaatatttccattatcagttttgtttcaggagagraggctcaaaaatttggctgaagtgaaatttgtgactgccttatggatttcagtggtagatacatcatgcaattttctaacattcatagagaggcaggtgtcctcagtggggatccccagaaatgttcccctgtgatgagaatgggtgcctaagactcatgaaggaagtacttccagcagacatggggaggtgagagggaggaaaccagacacagaatggaagatgacaagcaaaggaaatgcccagcctcagctgggtcctgcaaggagctctgcggtatagttttacccaaaagttcgttcccatttgagggtaagggctgtccatttttggagtttggtgtggggggtgcactgggtgaccagctgtcctggtttgcctggcaccatcctgctttcacactaaattatcttgagatatcttttagtcttaagcaaactggaattgttggtcatccttgaagcctgtaaattcccaggtacttctgactccctgggcagcaaagtggctccagttgcccaagatcagtcttctgaatggagtcacaggtgcaagccatgtgaaacaaagtccactaaagcttgtggatgggcatacagacatgacaagagcctctgaatggagctcagccatcttccctgtagcaggtactatcctctacccagttttctaagaaacaacatggggtcgatggagactattgtagatgtgggattgagggcaggagt

SEQ ID NO: 553902 - DNA, 1314 bp, Homo sapiens
tggggcaacatttgaactctttggagcagagatgtcatgtaggttgtaggaacaaatgtatggctccatgaaggttgataggaatgtaaattttaagctggaaaagaaagagacagcactcagaactgtatattcacttatttgtattaggtgagctaccagaaaaaatttttagaggcatttcatatggataaaaattcatgttaaaagcatcttcaaagattgcaacaaatgtacgcccaatccactgtccatattttttgagacaggatcttgctctgtcagatagcctacagtgcagtagaatggtcatagcttcctacagccttgaactactgggctctggcaatcctcctgcttcagcatcccaagcagcagctgggactacaaacatcagccaccagggctggaaaaattgtattttttgtagagatggggtctcactttgttcccgaggctggtctcaaactcctggcctcaagcgaatctcctgtcttggtttcttaaagtggtgagattataggcatgagccactgtgcctagccttactctgtataacaaattttgattcttaaaatattcataatgtaaccaactattcatattggactaaaaacttaccaattaagtttccattatttaaaaatataggatatttgaggcaggagtcactattcattttattttctatatttccttttttttttttagaacaaattcacttatataaacaaatagtgtatgagggtagaatatacttttaattccatgcttttgaaaaatgtattccggactacagaccattttaaacattttttttgatatcatctacatacagcaaaatttactctttctgttgtacagctctgagaattttttctgtgatcacacctaaaggaattataaatgctcatacacaattttatattgttctgttttgtttcttgagacagggtttctctctgttgctcaggctgaagtgcagtggtacgattacagctcactgcagccttggccttctgggctcaagtgatcctccaatctcagtgccccaagtagctgggactactggtgcacaccaccactttctatttcttaattttttgtacagatggggtcttgctatgtttcccaggctggtctcaaactcttgggctcaaatcctcctgcctcagcctctcaaagtgctggggttacargtgtgagccaccacagttggcccagagtttttttaaaaacataaattttcctcacttttgcgtaaatacctagaagtaggattgctgtgtcatatagtaaatgtatatttagcta

SEQ ID NO: 553903 - DNA, 638 bp, Homo sapiens
tgcacattggtgttgtttgtcctagtggacttcggagtaggccagtgccttctggtcagttcctcagtggcccacattcagctcttaaaggcagagcatgctaacgggaggtccaggcttccgcctgaggccaaatacaccccaaaagctcatctgttatagcctgatatgaaatcggtttctttctgcaactgacctgactcatagaaagtgaagcctggcttttcataagtgaagtttggcaggcaagggaggcaggaaatccagaggagaatgagcctgtaaagcatggctccttccagcccttgttacttcctctgcccaagtgtgggggagggtccygtctcttggcatctgggcccagcaagagttcagaggtttggtagtctctgcttggtccatatgcaaaacacatgtatgtgtatacattattaatggcaagggggttcctgaaactgagagggagtaaggagacttctcatctgctcttggaagaagcaaggaatgaagccagttcagtagactgattcctgaggctttggggcaggaactttttctttctccatatccccatggagatggttcatttaccctgaattaagatttggcccttcggtgcagtgccaaggcagtttaaa

SEQ ID NO: 553904 - DNA, 645 bp, Homo sapiens
tggcaaaagggactttgcagatgtgattaacttaaggggcttgagatgggaagatttttcctgtttttatcagtaggcttgatataattaaaagggtccttataagagggaagcaagagtgtcagagtcagagaaagagatgaaatgacagatgtagaggttggaatgatgtggtcaggaaccagggaaagcagggggtatctagaagctggaaaagacaagggaatagggcttcccctagattctccagaaatacagccctattgatatcttgagtttagtccagtgagacttattttagacttctgacatttggaactgtaatataataccttcatgttattyttattgctgttgtaacaaataaccacaaacacagttctactaatttctttctcaaggtagcttctcaattttgccaacgctggttaccatacatacttaaagtttcattttgagtctctgaaaactcacatctctcttaatctgctctacttttttcttggctttgtatagtgcttatgttctgctacactttgtaatttattgattatgcttaccatgggcagggattcttaactgttttatttatttatatatcttaaacattgaaaacactggcatgtagtagatgcttaataagta

SEQ ID NO: 553905 - DNA, 645 bp, Homo sapiens
tggcaaaagggactttgcagatgtgattaacttaaggggcttgagatgggaagatttttcctgtttttatcagtaggcttgatataattaaaagggtccttataagagggaagcaagagtgtcagagtcagagaaagagatgaaatgacagatgtagaggttggaatgatgtggtcaggaaccagggaaagcagggggtatctagaagctggaaaagacaagggaatagggcttcccctagattctccagaaatacagccctattgatatcttgagtttagtccagtgagacttattttagacttctgacatttggaactgtaatataataccttcatgttatttttattgctgttgtaacaaataaccacaaacacagttctactaatttctttctcaaggtagcttctcaattttgccaacgctggttaccatacatacttaaagtttcattttgagtctctgaaaactcacatctctcttaatctgctctacttttttcttggctttgtatagtgcttatgttctgctacactttgtaatttattgattatgcttaccatgggcagggattcttaactgttttatttatttatatatcttaaacattgaaaacactggcatgtagtagatgctyaataagta

SEQ ID NO: 553906 - DNA, 538 bp, Homo sapiens
tgattaaaaacagcagaattgctagattcccttaaagaattgggtaatttttgcaacatcatcatttctcccccaccccagcaccccaccatcagaacaaacaagcagaccttttagcttgacttttcagcactcagccatatttgcaagtaatgattactctggttaggaatttcatatattttaaatgtggtttcaaaggtctttttaaaattaattcctcctcccagccttcctctttctttttctctcccctcttccctctctccttcccgtgtgtgcctgtgcatgtgtgtatgtttatatatttaaaatgtattatttgaagacaggccatgttagattttgtcagtggcacatttccttgatggctgttttatcagcatgtttttttttaaccttccatagatatgyatctgcccccaaatagcgtttaatgaagaggtcttcgaaataaatctctgaaaacaaaagctactttattcatcatctgcatggagagcagccatggaaactcatctgtgaaatgcataattag

SEQ ID NO: 553907 - DNA, 1563 bp, Homo sapiens
tatccttatgtaatgcatatatgtatatacattgtgtatatatacatatgtatcacaatatgtgaaaatatatataaaggccttgtgaattcttttcaactattatctctttatcccctttttgtgggatgtgtatttagaaaaaataataatagaaagtaccctttattattgttcagcttccacccccctcacagttcagaagactgatccttgtatctttcaagctggaagcstttatctaaacgagggcctgtgagtttaaatttctctggacaaacccagatgaaagatggcttgttgaaatgaaggcatctcttccactgtgctgcactgattagattgaccaatcaagcttagaataggaaatgacatggaagatcagatgcgggaaatcattgaaatatttgccctcctgttacaggatcactgaagtccacttattatgagacccagaggtttcccctctgaagatgcgggaaggcagtgactatgaaactggtcctggaagtctgttgttctggcatcctctgccctggctaaatgaggttctggcttcagaggggtcttggtttataagtgctccagggagatgtatatgcatttagctacacaaaacctgggctgcattaacggttcttaaaagcagagaatatgaaagggaggacagaggcattttcaaaaattgatgttcaattttataactctcagtttccagtaaaactttccgttatggtcagtagtttataaaggagcagttctgagtcattgttaagagtggaggctcgcaggcagattgcctagattcaaattttggttctacccctcaccagccatgttggttagaaggttactcaacttcaatttcctcttctgtgacatggggaatagtcataaaaatgccttcctcataattgttgtgaagattagaaataagataacatattaaaagcacttagattgggaggccgaggtgggcggatcacctgaggtggggaattcaagaccagtctgatgaacatggaggaaccccttctctactaaaagtacaaagtttgctgggcgtggtggtgcatgtctgtaatcccagctactcaggaggctgaggcaggagaattgcttgaacccggaaggtggagtttgtggtgagccgagatcgtgccattgctctccagcctgagcaacaagagtgaaactctgtctcaaaaaaaaaaaaaaaagagaacttagaacagtgcctggcacaaaataattgctcaatatacattggtggttgttactgttattaagttattgttattacttagcagagattggaagcattaacacataatctttccaagactttttatctccagtaactaaactccaaaaacatatgggtacttcaagggggtgaccactgagctattcaaatgtacccttctattcccaagagtacaccagtgtgcactctaatatacacaagaataccctaactacataaactacattacatgtctactcatacattgcctctttaagaaatgtatatggcacagcattttattgtcatagccatga

SEQ ID NO: 553908 - DNA, 1563 bp, Homo sapiens
tatccttatgtaatgcatatatgtatatacattgtgtatatatacatatgtatcacaatatgtgaaaatatatataaaggccttgtgaattcttttcaactattatctctttatcccctttttgtgggatgtgtatttagaaaaaataataatagaaagtaccctttattattgttcagcttccacccccctcacagttcagaagactgatccttgtatctttcaagctggaagcctttatctaaacgagggcctgtgagtttaaatttctctggacaaacccagatgaaagatggcttgttgaaatgaaggcatctcttccactgtgctgcactgattagattgaccaatcaagcttagaataggaaatgrcatggaagatcagatgcgggaaatcattgaaatatttgccctcctgttacaggatcactgaagtccacttattatgagacccagaggtttcccctctgaagatgcgggaaggcagtgactatgaaactggtcctggaagtctgttgttctggcatcctctgccctggctaaatgaggttctggcttcagaggggtcttggtttataagtgctccagggagatgtatatgcatttagctacacaaaacctgggctgcattaacggttcttaaaagcagagaatatgaaagggaggacagaggcattttcaaaaattgatgttcaattttataactctcagtttccagtaaaactttccgttatggtcagtagtttataaaggagcagttctgagtcattgttaagagtggaggctcgcaggcagattgcctagattcaaattttggttctacccctcaccagccatgttggttagaaggttactcaacttcaatttcctcttctgtgacatggggaatagtcataaaaatgccttcctcataattgttgtgaagattagaaataagataacatattaaaagcacttagattgggaggccgaggtgggcggatcacctgaggtggggaattcaagaccagtctgatgaacatggaggaaccccttctctactaaaagtacaaagtttgctgggcgtggtggtgcatgtctgtaatcccagctactcaggaggctgaggcaggagaattgcttgaacccggaaggtggagtttgtggtgagccgagatcgtgccattgctctccagcctgagcaacaagagtgaaactctgtctcaaaaaaaaaaaaaaaagagaacttagaacagtgcctggcacaaaataattgctcaatatacattggtggttgttactgttattaagttattgttattacttagcagagattggaagcattaacacataatctttccaagactttttatctccagtaactaaactccaaaaacatatgggtacttcaagggggtgaccactgagctattcaaatgtacccttctattcccaagagtacaccagtgtgcactctaatatacacaagaataccctaactacataaactacattacatgtctactcatacattgcctctttaagaaatgtatatggcacagcattttattgtcatagccatga

SEQ ID NO: 553909 - DNA, 1047 bp, Homo sapiens
tgctctgttgaaattatgcagcataataatacagtagctacccatgaagccgccaccggacctgtgatcaatctcaccagtcccttgggtcaccaagagttttcttccccatcctgtctccctgccacccctttccttgcccagagcaactatgatgttttctcttaaaaatttaggtgaaagatggggcaaggaggctcatgcctgtaatcctagcacttcgggaggccaaggtgggaggattgcttgaggccaaaagttcaagatgaggctagacagcatagtgagaccccgtctctgcaaaaaaaaaattagtcaggcatggtggtacctgcctgtagttcccgctactctggaggctgaggctgtaggatcacttgagcccagcaggtcaaggctgcagtgagctatgaatgtaccactgcactccagcccaggcaacagagggagaccttgtctccaaaatcaatcaataaataaatgagtaagtaagtatgtaagtaaataaataagtggtcatgtttagcttttttgtcttctctccatttctaccctgtaattgagagttgatgttagactaytttctggaagtatcaatcaataaatgttttcagaagtaatcaactcagcataaccactttccctgggtatttctgtcaccaaaaggggtacaaaacaatgcttccaacacaggcataaggtgaatgtctactggggggctggggtcactgcagagaaaaaacagaaacagtgttaattctttagcactatggaggtcaggaagaaatcgaaaacatgtagtatcaaagcatctggccccaaaggaccactagaccaggacatgggggtaggggtagggtgaggaagaaaggaggaaggtcagattcaagggggtccagtctgtaaaaggccttccttctgtgagatttggatgtttgacatttgctccaattttgaacaagccactggaaatcacgtcttaagttctttgggttcatttcaatttgctccttttcctctgtacactggaacagtcagaaggccagc

SEQ ID NO: 553910 - DNA, 611 bp, Homo sapiens
aggygttagccaccacaccaggcctgcagttacttcattttctgcttgttgtgattggtgaatttgctgcctctcaatttcaacaaggcttctgaagtttgggttgcagcctcatttgcaatgggagggttttgtttttctttatcctttcccttccctgtgtgctcaccctccctctccagcagagctactcctgcttccaccagccttccagaaacccatctcacaatgatgtctagggccccttcccatggacacattggggacactgcagcctcagtggcagattcagagggaggtttgtttcagcaccctgtgggccgccgaaatctgtccttccctccctgaaccaagcactttgtctaagtcagagtcccaggcagagatcccctgcagttttattttttgcttccattcccaatagtggagcgccacccctgttgctggcttcaggcaggaggctgacttggcttctgtctcttgtggagcattttaatctcattaccctaaaaaaggaagatttggtggctgtgtggaccccgtgcccaagtgcccatggctccatggcttcagctttccgctccacagagttgctcatttttgagcatggc

SEQ ID NO: 553911 - DNA, 566 bp, Homo sapiens
aaaaaaaaaaaaaaaaaagaaaaaaagaaaaagaaaaaagaaaaagtacagtaaattattataattaattagagagtttagcaaattgctggatacaaaattagcattcaaaaataaattatagaagtattatagaagtaaatatttgtgatcctgggataggaaatagtttcttagatagagcatcaaaaacacaaatgacaaaagaaaaaaatagataaatagggcttcataaaaatttaaaatttttgtacaccataagtcaccatcaagaaagtaaaaagacaacctacagaatgggagaaaatatttgcaaaccatatatctgacaagggacttttatctagaatgtataaccttaacattcaataatctttaaaaaaaaaaaagcccaatttgtttttttgtttttttttttgtttgttttttgttttttgtttttttttgagacggaggctcactctgtcacccaggctggagtgcagtggtgygatctcagctcactgcaagctccgcctcccaggttcacgccattctcctgcctcagcctcccgagtagctgggac

SEQ ID NO: 553912 - DNA, 708 bp, Homo sapiens
tcttctccccagacagacgcctggccccacacctcacttaaagtttcagaaatttcatggactctctttcctgggtctgattcttaatccctttaaagccatactgaggagcatggtcaagactgatctgacggaccttcatttttcgtgtagttttctccattcctggctgctgttgcatgtyatgcataatttttattttgttcctagaaatgttaatggactttaaaagcttaatggcatttagttaggagatccttgtggtatattctgtgatctgttgttttctttgtatttccaattcagtgtcacaacctgggaaaaataaatttctgctcacagattgattcattgtcgaggaatgccttattctgatgttacgcggtttctttcctggctcatgcatgcccccatttgtgcgtttatagaaagtgtaagtcctgtgctagtcagagcaagactctgtcagtgaagacgatggtgactagtggcgggttcaccgtgtcagacactgcgctaagcaggtcattacatgatcacctggaattcttaaatgccctctggcgacaccaccatacatgactgttgtgactcccccaggttgcccgtcaaggccgtgctgtgaccgttctcccggccccagaactcatggtttctccaccagcttgtcacctcaaagagtaaaggccagagaaagacctgttgaga

SEQ ID NO: 553913 - DNA, 708 bp, Homo sapiens
tcttctccccagacagacgcctggccccacacctcacttaaagtttcagaaatttcatggactctctttcctgggtctgattcttaatccctttaaagccatactgaggagcatggtcaagactgatctgacggaccttcatttttcgtgtagttttctccattcctggctgctgttgcatgttatgcataatttttattttgttcctagaaatgttaatggactttaaaagcttaatggcatttagttaggagatccttgtggtatattctgtgatctgttgttttctttgtatttccaattcagtgtcacaacctgggaaaaataaatytctgctcacagattgattcattgtcgaggaatgccttattctgatgttacgcggtttctttcctggctcatgcatgcccccatttgtgcgtttatagaaagtgtaagtcctgtgctagtcagagcaagactctgtcagtgaagacgatggtgactagtggcgggttcaccgtgtcagacactgcgctaagcaggtcattacatgatcacctggaattcttaaatgccctctggcgacaccaccatacatgactgttgtgactcccccaggttgcccgtcaaggccgtgctgtgaccgttctcccggccccagaactcatggtttctccaccagcttgtcacctcaaagagtaaaggccagagaaagacctgttgaga

SEQ ID NO: 553914 - DNA, 1150 bp, Homo sapiens
atggcctctggcctataaattttacgaagacatcaattacatctatcttgtttattgtcgtctcactcggtcctaacatactaccaggttcagagaaggtgctcaacagacatttgttgaaaaaatgcatctccttcatgaattattagaagaaaagtcaaattgcttctgagaccaatctcattgaccttctctgttgcattcaacagaatgattgctgcaaacttctttctgcttcatacttttctctcctggttatgttgtctctcatcattgtttcccaatctttcagtttttctcaaaccctgtccactccttatatctgggctggcaaactcagtaactgtggtggccaagaaggtgatgtragcaagcattcttgttgattttaagaaaatttgaaataaaggaatccttagccaaatgggagaatacaagtctcaagtagaggcttcaatatattttttaacttaaacaattctgagctggccataaatatgttttttgcaattcagcagcttccaggcttaaatgtcagtgctcttcagcatttcattttctcctgagggttcaacattatttgtatcttgataattcctggcctccaaactggactagacatagcaacttggagttatgcattcatttcaaatgtattatatccccaacagaactcatcttactctataattctttgttcttatctatttcctgctttagtgaattggcaccacagtgttctcattcacatagccataaacttggaattatcatagatttcattcatttatccagtcctcacaatctatctgtccctgtgtcttaaatgcttcctgccatactcactgttagaggtttaactcaagttcttcttatctctcatctgttcttttaccgtattttccatttcagtgaccccaaaacctggaagtgagggagaattacctggcgtattttgtaaaaataaatattcccagtccccacctcatacccattgaagcatgagagtagaggatgaacctagagcattcccaaatgattaactaaccaatgtggtgggtttttaaagatactcatcagccgggcatggtggcaggcacctgcagtcccagttacttgggaggctgaggcaggagaatggcgtgaaccc

SEQ ID NO: 553915 - DNA, 895 bp, Homo sapiens
actatgcaaaattgtgcaataacaagccatagggcttatggggaaaacagggttagggacacaatactccaaaacttcatcagtgatatgttaaaaaaagatagggtgccagtaaaaatggtagcatagttttacatgcattaatggttaagaaatacataagtactccaataaatgcggcgcttaacttgaaaaacatctaatattcgctactagaagtaggtgacagaagagctgcagtttgtgacttactgtgaagtgatggaaggaaggtcatctgaaattgaacagaaagtccaacttcactatgctgtacactatgtatatgggtggggtcataacactcttggtgaaatgaggtagctggtagacattggaattgtgttagtgtttatgtttgtatattcctacatggctccttcagctaagtgctgtcttctgcattcacctagtatttctcaattaaaaagtcaagcataagcaaatgtgttatgttcaaattgttccctagtatgtcaactgtgttggaaaaattttaaaacaaacattacagcagaatggactggagactgaattttttaaaaaatttttataattttttttttttctttttttaaaattttattattattatactttaagttttagggcacatgtgcacaatgtgcaggtttgttrcatatttctgggagggcaaccacatgtcaattgagaaaattcacattttgttatttttggaactttccgagattttctttctcatttcagaaaatcatgttctaatgacaatgccacttgtggcatctgagttcccagtataatacaccggcaggtgaatatgtagctgtcataatcacggtgatctgcatggaggtgcaagctcctaacttcttca

SEQ ID NO: 553916 - DNA, 1809 bp, Homo sapiens
gtcattgatactaatgaacaaagcagttttattgctgaataaggaaacccaagctgaagaaatgttaatgtctaggccctaactaaaacttcctgcttcactgagggctctgagtacgtcctatcagcatagtaaacagtcagaaagcttttatacagtgactaaagttgactcttgaatgccgcaggggttaggatgttgatcttacccctaccctggaccgagcagttgaaaatctgcatatgatttttgactcctccaaaacctaactactaataaactactgttgaacagaagccttaccgataacctaagcagtggatgaacacatattttgtatgttgtctgtattatatactgtattcctacaataataagctagaaaaaatgttattaagaaaatcataaggaagtgaaaataaatttactgtactgtactgtatttattgatcccattaagttttcatcatctgtttacaggatgaattatctgcctgaaatggtggcaactgcagctgtagacctcaaactgcagtacacattaagcaatccagctttttctaatgtcatgactttcctctgcttctggggagcacttctagcattagtaatggcacttcctgtgggtcccatggtgttattcaaggtttaaactattgcattaaacatgatgaaaaatgtgcaagaaccaggagagatcactttttattgcgtctgcactttgctggccgacaaacctctcacacggagatgattggcatcacatggcgttttaagtggatgcttgcaacacttgagctcactgcagtagcaacaggagggaactacagaattattacggtagtacagcaggtacaacagttagttttatgcagatttaatactgcatctttacctgtgtttacatgtctctcatcatgaatggtgccatgtatggtctatgtgtgtgcaaaagttttggcaaattttaactttttataatagatgtatgtatatttcatggtagtaaatgacaaaatagtgtctacatatattttatacactcctaacacacctaactttttctttttttgatgtttctagattttttgatatttctgatattttattcattaaatagaaaccaccttaacatcaacacaatgcttacaagttctggatgaaaaattaaaaaaaaattttttagaattcattaaacttcatctatccaagtcactccaaatttatgtgaaatatttagttctaaatgatttcacaatactttcctacatggaacaaatagttgtaactcatcaaaagtaacaagtctgaaatactttagtcagggagacagtaattaggattttaagctaataagggcataaatattttagatagagaatagagacaatatcacccaaaactgtaaacaaagtgctattcttcttgaataacagttttccattgcatacatatgtgcttggggcgcccagatagtatggacaaaatacccccttattcccaattttgctttctgcagtttcagttaccctcagtcaaccatggtgggaaaataggtgagaacagtacaataacatattttgagaatgagagagagaccacactcacacaacttgtattacaatatattgttataattgtyctttttaattattagttattgttgtggatctcttactgtgtctaagttataaattaaactttatcataggtatgtatgcacagaagaaatcatagtatacataggattcagtaccctctatggtttcaggcattcaattgggggtcttggaatatatcccccttgga

SEQ ID NO: 553917 - DNA, 578 bp, Homo sapiens
cattaattgctccacccaactctattagctctgggaagtgttaccaagagtcttcaaagctcagctccttttttgagaaaaaatgtcttctcaatttaaggatctaaaacaatggtcatgtggctgggcttggtggytcacaactgtagtcccagcaccttggaggccaaggcgggcggctcacttgatgtcaggagttagagaccagcctggccaacaaggtgaaacccagtctttactaaaaatacaaaaagtagccaggcatggtggcaggtgcctgtaactccagctactcgggaggctgaggcataagaatcacttgaacccaggaggcggaggttgcagtgagctgagatagtgccactgcactccagcctgggcaatagagcaagactcagtctcaaaaaaaaaaaaaaaaaaaacaaaataaaacaataaaacaatggtaatgggagtctcctgtggccccaaacagtctacagtctcagttcccacagtgaacttggctgggagagactaaagggatatttttaattagacaccattatgttcactttcaaaaaagtaatgaggggcca

SEQ ID NO: 553918 - DNA, 655 bp, Homo sapiens
ggaataaagtacgagcaaaggagatcaaatacattcacatagagtctaccaagagaaaaccgaaacaaaaaaacagaacaaatatttaaaaatacaatatttaaaaatacaattcaagaaaacttttcaaatataaaataaggcatgaatctacgtatttaaagrgcttataatggaccagaaaattgctctagagaagtcaagacaaatcctaaaatgattagaataaagaatgaatattttgaatgagcctgtaaaaatatcaagtcacttatgatgggatgaagttgggcaggagtcggacttctttaaagatatgaatctacccttagaagatttttttttttaaagaatgagccaaagattttatatgtggttaaaatatcttttacatctgaaagattctagaaaaacagatttcaatgtgcaagaacacaggagacattattcatgtcagcccattttgaggaaatgattagaggaggaactcccgccaaccaagcaacggctggggaaatgtcagtgaaactggcagtgagaattaaggcagtagatttaagtcccaaagcaaagaaggggaaaatccaaggggcaaagtctgaaagcagtgaagggagtaagccccagcatatatctgaaagggccaaaccttgat

SEQ ID NO: 553919 - DNA, 655 bp, Homo sapiens
ggaataaagtacgagcaaaggagatcaaatacattcacatagagtctaccaagagaaaaccgaaacaaaaaaacagaacaaatatttaaaaatacaatatttaaaaatacaattcaagaaaacttttcaaatataaaataaggcatgaatctacgtatttaaagagcttataatggaccagaaaattgctctagagaagtcaagacaaatcctaaaatgattagaataaagaatgaatattttgaatgagcctgtaaaaatatcaagtcacttatgatgggatgaagttgggcaggagtcggacttctttaaagatatgaatctamccttagaagatttttttttttaaagaatgagccaaagattttatatgtggttaaaatatcttttacatctgaaagattctagaaaaacagatttcaatgtgcaagaacacaggagacattattcatgtcagcccattttgaggaaatgattagaggaggaactcccgccaaccaagcaacggctggggaaatgtcagtgaaactggcagtgagaattaaggcagtagatttaagtcccaaagcaaagaaggggaaaatccaaggggcaaagtctgaaagcagtgaagggagtaagccccagcatatatctgaaagggccaaaccttgat

SEQ ID NO: 553920 - DNA, 669 bp, Homo sapiens
ttgttatctagtgggagcagaagcaaaaacaaatgcaatttcgcattgtctgcacttcatgcttatttgctgcgaatgtaattttcagaataggggattatgatacatccattttagggcttggttttcctggctttgttttgccataggcaggatggtctaatgaatgtcataccctctgactaaattttaatagtgtttaattgggaggacatctgaaacactgaacatgcttctatccttgtgagacttrggtacttttctttttactgatgtgcaaatatgttaaaatgcatacctttatatgttaggtaaagtgattcttatacttgagcacatcagaattactcagaagtcttatgaaaaacacagattaataggttccaccccagagatcagcagattcagtagatctagggagggacctgagaagctgcatttctagcaagttgacaggtgttggtgaggctgatgctgccatccacagatcacacttcaggtagtaccttgtcagaataaacacatgtatgtatattttaaaatgcacaaaaatgtctgagttctgtctcctttcctaattttatctcttctctctcctgtagctgaatcccttttttctctcattttttaattcatatggatttgcctcatcatctccatgagttcaaa

SEQ ID NO: 553921 - DNA, 669 bp, Homo sapiens
ttgttatctagtgggagcagaagcaaaaacaaatgcaatttcgcattgtctgcacttcatgcttatttgctgcgaatgtaattttcagaataggggattatgatacatccattttagggcttggttttcctggctttgttttgccataggcaggatggtctaatgaatgtcataccctctgactaaattttaatagtgtttaattgggaggacatctgaaacactgaacatgcttctatccttgtgagacttaggtacttttctttttactgatgtgcaaatatgttaaaatgcatacctttatatgttaggtaaagtgattcttatacttgagcacatcagaattactcagaagtcttatgaaaaacacagattaataggttccaccccagagatcagcagattcagtagatctagggagggacctgagaagctgcatttctagcaagttgacaggtgttggtgaggctgatgctgccatccacagatcacacttcaggtagtaccttgtcagaataaacacatgtatgtatattttaaaatgcacaaaaatgtctgagttctgtctcctttcctaattttatctcttctctctcctgtagctgaatcccttttttctctcattttttaattcatatggatttgccycatcatctccatgagttcaaa

SEQ ID NO: 553922 - DNA, 985 bp, Homo sapiens
gagagtgaatgctcatgtgtttgagatgtgagaatgaattgtgcttgcagaaagccagtaaacagatagttcaatgagataagagctgtcttaggagattgtacctttttctgaaagagctgtggtaaggctgacaggtcaagattgactgactggctgggccttcaccaggtgtgagaagtcttagtaccattgttggtcccaggacttctcttccagtaagctcattaaaatgttttatttttccaacaccrtcaccaatttgagtttcattatctggaatatcttctaagttttttgctctgatgctggcatcctgggcaaagtccagatagctcaggcctgtagtgccgccagtacatacaggagtgagaagcccaacagtttcaattccgtgatctttatggttttaaatggtaaattgtaatgccacatgaatgtagcgttttatcctgaattttagctaagtaaaacttcagagaattaagggaatgatttttttctcttttttatttgacagggtctggctctgtcacccaggctggagtacagtggcatgatcttggctcactgcagcctctgcctcccaggctcaagccatcctcccatgtcaaccttctgagtagctgaaaccacaggcatgtttcaccatggccagctaatttttgtattttttagtagaaatggggtttcgccatgttgcccaggcctgtctcgaactcctgaagcacaagtgatccacctgcctaggtgacccaaagtaatgggattacaggtatgagccactgcacccggtcaggttattataaaattattgtcttttaaaccttagtcaaaaggctcaatactgtttctatgagcaaagagaaatttcatcatggtttgatctattaccaacatttttcaacattatatttgtagattttatgaactctgtatgttaggaagaagttagcataacatttacattcatgccttttgccat

SEQ ID NO: 553923 - DNA, 1808 bp, Homo sapiens
gatcaaagtgcgaataaaaagctcagctgtttgcatttattttcaaatgtagaaaaactttctggaaagattgtactaaggggttactggcatcattgttatggtcctctgacatttttaaaagtaggtctctgagtatgtttttcctccttcataaagtgaagactgtgagtstatttttctgtattagctggttattgttacttgagatttgtcagctttccttgaagtgtgttcccttgaactggatgctaatgtttgccatgcagggaagaatgtctctgcagtaaaataaagttaaatcagtttatttactgcacaacttctcagtgcacttgatatgctaccatgctttgggaatttttaagttgggggcttatagaggcaggcattaaaaaacatgtttgattatgggaccccctactctgaactacactaacattagtgtgtcttgctgcagtaatccttctctgaatatctttgggaaaggtgtcatttatgtatttttcattgtttccattggttccatttgcctagtaggcctcaggattgcagtggaatttttccagtaccttaagatagcatttatcttggaggatatgaccctttaagggcaaacttatttgcagttcactttcaatttacaatgtttattctaagcaatgcatattacttttttttttttttttttgagacatagtcctgccctatcacccaggctggagtgcagtggtgcaatctcggctcactgaagcctcttcctccctggttccagagattctcctgcctcagcctcctgggtagctgggattacaggtgcacgcccccaggcccagctaatttttgtatttttagtagagacagggtttcaccatgatggccaggctggtctcgaactccggacctcaggtaatccacccacctcggcctcccaaagtgctgggattacaggcgtgagccaccgcacccagccgcatattacttttacatgaaagtagagtgaataggtagttttgtaaattgatgaaaagaataaggtctcagctttgaaaggatattcattgtccttggaatggtattccagaaaagtaggaagctaaccaaaaggcccagaccaaaattttctttttaatgtctcaagcagagaaagattttgtgtatagaaacactaatgaaaatgattgttctccttgatgattgtaaaagaaaaaagtgttcttcctatcctctctccttcccacctttcatttttggtaagtgggggagaagtgaaggtgaagatgctaggaatgctaatttaccttgtattttttttttagacatgtttcatgacaggtttgaggcctgctgatttgggcatacccagttgcaccttttcatttcgtgcctcattggagtatgttttcttctgttggtcactcctgttttcttgacctggaccatgtaatagagactgggacgaaaactacatgtaattacacccttttggtcaaaacactaaaacagaaaccaagcaagcttaatcctaaatcattgaaattgtctagaatctttatctaaaataaatcctaatccaacaaaaaattttcttctaactcaacctgctgcttatgtcttcccttccatgagtattttaatagaagttaatttttcagatcactggagcttattccttcaaacactggtcctgcactgttttgctgtatttcttcactgtcgtagcagagccagaggctgctggatgtcatcatgagcatccattattttccacatggtgaaaggggcttgggttgccctcagctttcacc

SEQ ID NO: 553924 - DNA, 1808 bp, Homo sapiens
gatcaaagtgcgaataaaaagctcagctgtttgcatttattttcaaatgtagaaaaactttctggaaagattgtactaaggggttactggcatcattgttatggtcctctgacatttttaaaagtaggtctctgagtatgtttttcctccttcataaagtgaagactgtgagtctatttttctgtattagctggttattgttacttgagatttgtcagctttccttgaagtgtgttcccttgaactggatgctaatgtttgccatgcagggaagaatgtctctgcagtaaaataaagttaaatcagtttatttactgcacaacttctcagtgcacttgatatgctaccatgctttgggaatttttaagttgggggcttatagaggcaggcattaaaaaacatgtttgattatgggaccccctactctgaactacactaacattagtgtgtcttgctgcagtaatccttctctgaatatctttgggaaaggtgtcatttatgtatttttcattgtttccattggttccatttgcctagtaggcctcaggattgcagtggaatttttccagtaccttaagatagcatttatcttggaggatatgaccctttaagggcaaacttatttgcagttcactttcaatttacaatgtttattctaagcaatgcatattacttttttttttttttttttgagacatagtcctgccctatcacccaggctggagtgcagtggtgcaatctcggctcactgaagcctcttcctccctggttccagagattctcctgcctcagcctcctgggtagctgggattacaggtgcacgcccccaggcccagctaatttttgtatttttagtagagacagggtttcaccatgatggccaggctggtctcgaactccggacctcaggtaatccacccacctcggcctcccaaagtgctgggattacaggcgtgagccaccgcacccagccgcatattacttttacatgaaagtagagtgaataggtagttttgtaaattgatgaaaagaataaggtctcagctttgaaaggatattcattgtccttggaatggtattccagaaaagtaggaagctaaccaaaaggcccagaccaaaattttctttttaatgtctcaagcagagaaagattttgtgtatagaaacactaatgaaaatgattgttctccttgatgattgtaaaagaaaaaagtgttcttcctatcctctctccttcccacctttcatttttggtaagtgggggagaagtgaaggtgaagatgctaggaatgctaatttaccttgtattttttttttagacatgtttcatgacaggtttgaggcctgctgatttgggcatacccagttgcaccttttcatttcgtgcctcattggagtatgttttcttctgttggtcactcctgttttcttgacctggaccatgtaatagagactgggacgaaaactacatgtaattacacccttttggtcaaaacactaaaacagaaaccaagcaagcttaatcctaaatcattgaaattgtctagaatctttatctaaaataaatcctaatccaacaaaaaattttcttctaactcaacctgctgcttatgtcttcccttccatgagtattttaatagaagttaatttttcagatcactggagcttattccttcaaacactggtcctgcactgttttgctgtatttcttcactgtcgtagcagagccagaggctgctggwtgtcatcatgagcatccattattttccacatggtgaaaggggcttgggttgccctcagctttcacc

SEQ ID NO: 553925 - DNA, 600 bp, Homo sapiens
gtctcaaaacaacaacaacgacaaccaaaaaaaaccttgaatttattagaaaccctgtggtgagaattttaagactttgctgttactgactttatttcagaagtttattgcttctgttataaagttggcacatctttattgcagacaacatttttgacaaaaactaacagttaatttaaaaaattttttgacaaaaactaacagttaattttaaaaaaaattgtcttactattcatttcattggacttcagtagtcaaactattaaactataaatgcttgattctggcctgtaggatacctcttacattggtaataatatcctactttttggtactcaaaaattcaagctgttttgggaaaggaaactgaaagctgtttggtcccttggtttctgtttctaattttggaaatacacatatagaccatgtgtttgcttcaccttttattgccagcttttcaggtcatgagacrgtacttctaggttctctatcttttcaggtaatgagacagtacttctatgttctctagctagcgatatgggtaatacccactacttatcaaattgagaaagtaaatgcacattttaaaatgttggatct

SEQ ID NO: 553926 - DNA, 594 bp, Homo sapiens
  misc_feature 440, 441, 442, 443, 444, 445, 446, 447, 448, 449, 450, 451,452, 453, 454, 455, 456, 457, 458, 459, 460, 461, 462, 463,464, 465, 466, 467, 468, 469, 470, 471, 472, 473, 474, 475,476, 477, 478, 479, 480, 481, 482, 483, 484, 485, 486: n = A,T,C or G
  misc_feature 487, 488, 489, 490, 491, 492, 493, 494, 495, 496, 497, 498,499, 500, 501, 502, 503, 504, 505, 506, 507, 508, 509, 510,511, 512, 513, 514, 515, 516, 517, 518, 519, 520, 521, 522,523, 524, 525, 526, 527, 528, 529, 530, 531, 532, 533: n = A,T,C or G
  misc_feature 534, 535, 536, 537, 538, 539: n = A,T,C or G
cagagtcaagaacagacactgagtcgcttgaggactcaggcaggtgtttgctgcattgacaacagagtaagaaaaaatccgtttgctttttaaaatccaaagatggttttgagaacctgaaaccaagttagagcaagttcgttttccttccaaaaaaactgggctctgccgggcgcagtggctcacgcctgtaatcacagcactttgggaggctgaggccggcagatcacgaggtcaggagttcgagaccagcctgaccaacatggtgaaaccccgtctttactaaaaatacaaaaaattagcccgacgtggtggtgcgcacctgtagtcccagctacttgggaggctgaggcaggagaatcacctgaacccaggaggcagaggttrcagtgagccaagactgtgccattgcactccagcctgggtgacagggcaggacnnnnnnnnnnnnnnnnnnnnnnnnnnnnnnnnnnnnnnnnnnnnnnnnnnnnnnnnnnnnnnnnnnnnnnnnnnnnnnnnnnnnnnnnnnnnnnnnnnnngtttgaatgaaagtattatgttccattctttggcttttcctaacttgcttaatta

SEQ ID NO: 553927 - DNA, 554 bp, Homo sapiens
tgaacccgggaggcagaggttgcggtgagccgagatcatgccattgcactccagcctgggcaacaggagcgaaactctgtctcagaaaaaaaaaaagaaattattcaacatatctccccttcaccccttctgtgccaggccctatgctaagtgcacagattaatctgccacagtccctaccctcaagcagctttcagtctagtgtgggaagtagacatgcacactgacaattacaacccactgtggtaccatcatcaagctgggtttcttgacctcggcactattaatattttgcaccagatcattcttgtgtgataagctttgtaggatatttagcagcatccccactctctccctactagatcccaatagcattcccccaatcaagatagtaaaaaatgtctccagactttaccaaatgtcccatgggracaaaatcacccctagttgataacttctgttataaggtaagtacagtggtattttctcactaaagtgccttgggatgagctagccaaggtgtcctggaatactgagatgacagtacatttttc

SEQ ID NO: 553928 - DNA, 499 bp, Homo sapiens
ttgtgcatgcaaaatctacacatttcaacatttcagccagtgtacgggtagatcttccaaggagaaaaatttgggagggatgggtccaattwgagtaaggcttgagcacttcttgctgaagagctcattgcctctgtgttgggtgcagtggcagcatctattgacaaaatttggcaactggtgggcagtagaaagggagaatctctgtcatattctctaatttatagaatccttccctgggccaaattacctgtctcttttattttggaaaaaatcaaaccttcgcatatgtgtttctcatcttccaaacttacccgcagccttttctaaatctgtaattttgactcttggggttggggaaaaggaagttccctgggtgcctctttcttgaggctagcctctgtctcaaggtacactttctggaaaatgttgaaacgttcatcaataaaagttgctgacagtgaagctttcactgtagtatgcctgatttttaatgcat

SEQ ID NO: 553929 - DNA, 1222 bp, Homo sapiens
catctctaattaatagtatttaaggttgttttagggttaaatgacttaatggatgtaaatcattcatgaaagtgcacatacgaacatcctgttgctcacaatctagtattactagcttttaagcctggaaaaccagtatgattccatttttgtaccctcaggccccttttatagtacataggacatggtaggcactcaataaatgttgcttacttgaataaatgaaacaaaaaagtcaggaaacacagaacacttattttagtgtttgttaagttatgccctgctttgttccagaaaatgatttatttcaattagggtttcagatgtaccctttaaggagcaatgtatgtatctgtaaactttatattttcctcagagtcacaagccgtttggaatttcattttgaaattctctttccactaacatttatagttttggcacagttgccctttaaaaagacagcgtatcaattgaacataaatatattgtgtttaaactatatgcctgcttgaataagtgcagtacttatttgtcagggcatatattatgttggagtatgatgtcatgaggcttaaggaaactaatgcttatcatttgttagtgcttaaaacaaagtagagatagccaaatgcatttctctacttccttattgccatacagctctccttgtaagttaataagtatcttattgcaaatcagccctgtatctgttcmaaattcaaatgttgatggttgagcttccagtattttctcccatatattcacactgaataacatttcctgaggattgcataagacccatttaacatttgtgaactatgagacttctttgtacatttctgtttctttagttgtattacggtaatcgggcatatgtcttctaaccttgatgatctcacctctatataatataaggatgttgggagaaatatgaaatctagaccaactctaaaaaattgaatgtcaaggtaattgtcttgtcacacaatggtgtaaccagccaacatcctcgaacagatccgtgtccataatggcatcattgacttctgaactgtatggtggtgttctctgaaaggtgctatagagaaaacacaagtgtgaagggcgattgtgatggttgtgggtcagaggctcctcaagtggagtgaatgaggccagccaggaatgaagacaatgcagtgaatgattcttttgttgcatagtaaaatgaagtactagaaaa

SEQ ID NO: 553930 - DNA, 1222 bp, Homo sapiens
catctctaattaatagtatttaaggttgttttagggttaaatgacttaatggatgtaaatcattcatgaaagtgcacatacgaacatcctgttgctcacaatctagtattactagcttttaagcctggaaaaccagtatgattccatttttgtaccctcaggccccttttatagtacataggacatggtaggcactcaataaatgttgcttacttgaataaatgaaacaaaaaagtcaggaaacacagaacacttattttagtgtttgttaagttatgccctgctttgttccagaaaatgatttatttcaattagggtttcagatgtaccctttaaggagcaatgtatgtatctgtaaactttatattttcctcagagtcacaagccgtttggaatttcattttgaaattctctttccactaacatttatagttttggcacagttgccctttaaaaagacagcgtatcaattgaacataaatatattgtgtttaaactatatgcctgcttgaataagtgcagtacttatttgtcagggcatatattatgttggagtatgatgtcatgaggcttaaggaaactaatgcttatcatttgttagtgcttaaaacaaagtagagatagccaaatgcatttctctacttccttattgccatacagctctccttgtaagttaataagtatcttattgcaaatcagccctgtatctgttccaaattcaaatgttgatggttgagcttccagtattttctcccatatattcacactgaataacatttcctgaggattgcataagacccatttaacatttgtgaactatgagacttctttgtacatttctgtttctttagttgtattacggtaatcgggcayatgtcttctaaccttgatgatctcacctctatataatataaggatgttgggagaaatatgaaatctagaccaactctaaaaaattgaatgtcaaggtaattgtcttgtcacacaatggtgtaaccagccaacatcctcgaacagatccgtgtccataatggcatcattgacttctgaactgtatggtggtgttctctgaaaggtgctatagagaaaacacaagtgtgaagggcgattgtgatggttgtgggtcagaggctcctcaagtggagtgaatgaggccagccaggaatgaagacaatgcagtgaatgattcttttgttgcatagtaaaatgaagtactagaaaa

SEQ ID NO: 553931 - DNA, 1222 bp, Homo sapiens
catctctaattaatagtatttaaggttgttttagggttaaatgacttaatggatgtaaatcattcatgaaagtgcacatacgaacatcctgttgctcacaatctagtattactagcttttaagcctggaaaaccagtatgattccatttttgtaccctcaggccccttttatagtacataggacatggtaggcactcaataaatgttgcttacttgaataaatgaaacaaaaaagtcaggaaacacagaacacttattttagtgtttgttaagttatgccctgctttgttccagaaaatgatttatttcaattagggtttcagatgtaccctttaaggagcaatgtatgtatctgtaaactttatattttcctcagagtcacaagccgtttggaatttcattttgaaattctctttccactaacatttatagttttggcacagttgccctttaaaaagacagcgtatcaattgaacataaatatattgtgtttaaactatatgcctgcttgaataagtgcagtacttatttgtcagggcatatattatgttggagtatgatgtcatgaggcttaaggaaactaatgcttatcatttgttagtgcttaaaacaaagtagagatagccaaatgcatttctctacttccttattgccatacagctctccttgtaagttaataagtatcttattgcaaatcagccctgtatctgttccaaattcaaatgttgatggttgagcttccagtattttctcccatatattcacactgaataacatttcctgaggattgcataagacccatttaacatttgtgaactatgagacttctttgtacatttctgtttctttagttgtattacggtaatcgggcatatgtcttctaaccttgatgatctcacctctatataayataaggatgttgggagaaatatgaaatctagaccaactctaaaaaattgaatgtcaaggtaattgtcttgtcacacaatggtgtaaccagccaacatcctcgaacagatccgtgtccataatggcatcattgacttctgaactgtatggtggtgttctctgaaaggtgctatagagaaaacacaagtgtgaagggcgattgtgatggttgtgggtcagaggctcctcaagtggagtgaatgaggccagccaggaatgaagacaatgcagtgaatgattcttttgttgcatagtaaaatgaagtactagaaaa

SEQ ID NO: 553932 - DNA, 1222 bp, Homo sapiens
catctctaattaatagtatttaaggttgttttagggttaaatgacttaatggatgtaaatcattcatgaaagtgcacatacgaacatcctgttgctcacaatctagtattactagcttttaagcctggaaaaccagtatgattccatttttgtaccctcaggccccttttatagtacataggacatggtaggcactcaataaatgttgcttacttgaataaatgaaacaaaaaagtcaggaaacacagaacacttattttagtgtttgttaagttatgccctgctttgttccagaaaatgatttatttcaattagggtttcagatgtaccctttaaggagcaatgtatgtatctgtaaactttatattttcctcagagtcacaagccgtttggaatttcattttgaaattctctttccactaacatttatagttttggcacagttgccctttaaaaagacagcgtatcaattgaacataaatatattgtgtttaaactatatgcctgcttgaataagtgcagtacttatttgtcagggcatatattatgttggagtatgatgtcatgaggcttaaggaaactaatgcttatcatttgttagtgcttaaaacaaagtagagatagccaaatgcatttctctacttccttattgccatacagctctccttgtaagttaataagtatcttattgcaaatcagccctgtatctgttccaaattcaaatgttgatggttgagcttccagtattttctcccatatattcacactgaataacatttcctgaggattgcataagacccatttaacatttgtgaactatgagacttctttgtacatttctgtttctttagttgtattacggtaatcgggcatatgtcttctaaccttgatgatctcacctctatataatataaggatgttgggagaaatatgaaatctagaccaactctaaaaaattgaatgtcaagktaattgtcttgtcacacaatggtgtaaccagccaacatcctcgaacagatccgtgtccataatggcatcattgacttctgaactgtatggtggtgttctctgaaaggtgctatagagaaaacacaagtgtgaagggcgattgtgatggttgtgggtcagaggctcctcaagtggagtgaatgaggccagccaggaatgaagacaatgcagtgaatgattcttttgttgcatagtaaaatgaagtactagaaaa

SEQ ID NO: 553933 - DNA, 513 bp, Homo sapiens
cctacttttttttttttttttatttcttgactagttttgttaggagaatttwcacttttggtagtagttttgccattatgtcattacttatgaacaaatgtagttattgcacttactttatagagccagctcagaaaatttgatttcaatgaaattctttgtgtttagcacttttccaataagtgggccattgattcggttataacaaactattttgatgaatgagttgttctgtttatggaaggattttacacttaaatgttgcttcttgggttgtgctatttttgtactttgaaagttacataaaatgaaaagaaccagcacataagttttatatgctgagagttgaagggtgatcccattgtttctgaatttgagtctctgccagcatgaatcctcctatgagggtccctaaaggctatattatagtttcgatgaaatgtatacattctatgaatgaaaaaaatatagaatttccttttcatgattttttttcttagtttgttcccattt

SEQ ID NO: 553934 - DNA, 513 bp, Homo sapiens
cctacttttttttttttttttatttcttgactagttttgttaggagaatttacacttttggtagtagttttgccattatgtcattacttatgaacaaatgtagttattgcacttactttatagagccagctcagaaaatttgatttcaatgaaattctttgtgtttagcacttttccaataagtgggccattgattcggttataacaaactattttgatgaatgagttgttctgtttatggaaggattttacacttaaatgttgcttcttgggttgtgctatttttgtactttgaaagttacataaaatgaaaagaaccagcacataagttttatatgctgagagttgaagggtgatcccattgtttctgaatttgagtctctgccagcatgaatcctcctatgagggyccctaaaggctatattatagtttcgatgaaatgtatacattctatgaatgaaaaaaatatagaatttccttttcatgattttttttcttagtttgttcccattt

SEQ ID NO: 553935 - DNA, 513 bp, Homo sapiens
cctacttttttttttttttttatttcttgactagttttgttaggagaatttacacttttggtagtagttttgccattatgtcattacttatgaacaaatgtagttattgcacttactttatagagccagctcagaaaatttgatttcaatgaaattctttgtgtttagcacttttccaataagtgggccattgattcggttataacaaactattttgatgaatgagttgttctgtttatggaaggattttacacttaaatgttgcttcttgggttgtgctatttttgtactttgaaagttacataaaatgaaaagaaccagcacataagttttatatgctgagagttgaagggtgatcccattgtttctgaatttgagtctctgccagcatgaatcctcctatgagggtccctaaaggctatattatagtttcgatgaaatgtatacattctrtgaatgaaaaaaatatagaatttccttttcatgattttttttcttagtttgttcccattt

SEQ ID NO: 553936 - DNA, 1469 bp, Homo sapiens
gcattggggtgataaagatgaaaaagcaattttacatttcattacactgaccccatgttcttgttctaatagtttgccaatgctgggttctctcttatctcccagtctttgaatgtcaaataccatctctccaactctagtccttcatgaattcttctccaatctcaatactgagagataacctactcctctttgaatgcccacaatgcaatatttgtggcagttatcactgtttagcagtttggatatgtacacattgatttactgctaaaatacagttgtcatgaagagtaggaactccaccttatttctctccactgcctctagaatagggtctgctacctaagatatgctcaataaatatttggtggaaaaatgaatgattcattggcattaaaggccaaagcttttggcttatgatgatatatagcaaccatgaaaaaaagaaacacctaaatccttcatagtttaaataaatgtatgccagagttcttactcagatcagcatgcttgctgaggtcacatcctcattgaagtatcactctcctccttttctcctcctggtaaacacagctggctccttatggtgccagtggtcactctctagaaaggctggacttggacgcctcagtaggcttctgcttcctgcatacttcacttggtagagagcgcatgtgagacagttcacattccattgaatggttgaggtccttcattttccatcttaccacaggggctatttgaatgtatcagactttactacagtacaaaggtatggagagggttacgttggagtaaggcaaacaatgtaaagtggacactgggcattctggatgctttatgctcaaagctccagtcccctgccatgttattacttccctttttctgttcccccagattcctgaccatcactcattcaaaacggttagatggcttttttgtttctatctccttataggtatgctcttttctttcccatgcaaagtagagaaagaaaaacagtttctgctcttaaatgtatttttgccactcaatctatagaacatgttcttccacaattacaagtaaatagaagacagactgggactctggaaaatcctaaagcattatagaacttggggcttgtcctttgacttcatggttttcaaacccagcatggtgacccagtagtgggctgtccaatcaactgagctcttgaaattggaatagaataaaatagaaatatgagcatattcccatctatagaaagggtgtggtggcgggcgcctgtagtcccaactacttggggggctgaggcaggagaatcrcttgaacccgggaggtagaggtttcagtgagccgagatcgcgccactgcactccaacctgggtgacagtgtgagactccgtctccaaaaaaaaaaaaaaaaagcataagtattgttttgtgagacttgtttcagttttgtgtttctgtgtgtgtctctgggc

SEQ ID NO: 553937 - DNA, 584 bp, Homo sapiens
tgtttctatttagaagtaacctataacctaactattgcaccattgtataatctttttgtattctggattttttaaatgtttcttttcctttgatttacagcagttttattaggatgtatctaggtgtgaattcatttttatttatcttattggggttcgtatgggcttcttgaatctttggcttgctgtttttcattagttttggagtgtgggctgtgtactacctaggcagtggggagctactgaggctcttgaacagggaactaatatgtttaaatttgtgattaataataatggtgaaaatgatagccacaattttgcatggactcagcattttgccaaacatttcatctcttttcatcctcacaactctgacctagaaattattatgcccattttattatttttttaatatattggagcttttcaagatgcctgtttacagttgagggagtcaaagcatagagtcaagtcactacccaaaggcacacagtcagtaagtggcaaagccaagattgggggaagccaggcctgtctgactccagttactgtrgcatagccactagccacgtgtggccatttag

SEQ ID NO: 553938 - DNA, 590 bp, Homo sapiens
gctggtgccacattgaagagaacaattcccaaggaagaaaagaagttgggagaacctcacaacaaggcagcactcctcttctgccatccctctccaggaaatgcaggattgttgttctgagaatgtctgtgcactagttaatagtgttttgcatgtagcaggcgctcaataaatgtttgacgaatgaacaacaacaacagaaaaagatctttggggtgtcaatttttctggccataaactctgtggttggtggcacctttgcccgagttttgctcgggcccgctgggctcattttgcccactcgatctggcaggctgcactcggctcatgataccagcctgggtcccacactggtcaagggtgagtcaggcatggaacggygagaggtgtgtgagcgagcctggggtctggccactgcgcaaagtcagacatgctggctgctacagtgaggtgggcagctctctgtgaggctgtggccagacccggcaaacctcaagcagcttccatggctggcaccagggaacacagtggcacatagaagcttggagatgctaggaactgcagggccccaaagagggagtcacagccct

SEQ ID NO: 553939 - DNA, 590 bp, Homo sapiens
gctggtgccacattgaagagaacaattcccaaggaagaaaagaagttgggagaacctcacaacaaggcagcactcctcttctgccatccctctccaggaaatgcaggattgttgttctgagaatgtctgtgcactagttaatagtgttttgcatgtagcaggcgctcaataaatgtttgacgaatgaacaacaacaacagaaaaagatctttggggtgtcaatttttctggccataaactctgtggttggtggcacctttgcccgagttttgctcgggcccgctgggctcattttgcccactcgatctggcaggctgcactcggctcatgataccagcctgggtcccacactggtcaagggtgagtcaggcatggaacggcgagrggtgtgtgagcgagcctggggtctggccactgcgcaaagtcagacatgctggctgctacagtgaggtgggcagctctctgtgaggctgtggccagacccggcaaacctcaagcagcttccatggctggcaccagggaacacagtggcacatagaagcttggagatgctaggaactgcagggccccaaagagggagtcacagccct

SEQ ID NO: 553940 - DNA, 677 bp, Homo sapiens
tattcaaaacggtcatggtgtgagaaaatctcggacagggataagagtcatgcatatctaattagagctgcccaacatttaaggcagtgattacacttcatgatatgccaatattatttctccaaaatatttcaagtaaaaacccgttttgtcccgttaattcttaaaataaaagkgttgggcaaaaaatttaaatggtcaagaaatgttgaaactaacaaaggacaattgcttttcctctaaaaacagctcctcctggatctcctaagaagaagactccaactcacagaccactgctgactcattaaaatcaacttgtaatgtcatgcacatactgtgtatctgtccaattcatgcacatacatccagaatgtaggatgctttggtatcaaagagctgtttatgattgacaaatacttcaatgctctaagattccattttcatcttctttaataaggaaagacaaatgcaaaaatacatgtcattaattgctctgcatttttccctccagagaaatgcaaaccataaacatcagtaagattctactaatagctttaaaagttggcttaaaccattattaattatacatttgtaagacggtctgtgactgcatgccttgctttcttattcaaaggttcaatcaataaggtcatccctgccacttgcactctgaatgg

SEQ ID NO: 553941 - DNA, 677 bp, Homo sapiens
tattcaaaacggtcatggtgtgagaaaatctcggacagggataagagtcatgcatatctaattagagctgcccaacatttaaggcagtgattacacttcatgatatgccaatattatttctccaaaatatttcaagtaaaaacccgttttgtcccgttaattcttaaaataaaagggttgggcaaaaaatttaaatggtcaagaaatgttgaaactmacaaaggacaattgcttttcctctaaaaacagctcctcctggatctcctaagaagaagactccaactcacagaccactgctgactcattaaaatcaacttgtaatgtcatgcacatactgtgtatctgtccaattcatgcacatacatccagaatgtaggatgctttggtatcaaagagctgtttatgattgacaaatacttcaatgctctaagattccattttcatcttctttaataaggaaagacaaatgcaaaaatacatgtcattaattgctctgcatttttccctccagagaaatgcaaaccataaacatcagtaagattctactaatagctttaaaagttggcttaaaccattattaattatacatttgtaagacggtctgtgactgcatgccttgctttcttattcaaaggttcaatcaataaggtcatccctgccacttgcactctgaatgg

SEQ ID NO: 553942 - DNA, 942 bp, Homo sapiens
gttaacttgaaaactcttgattttcagtgcaaatgacttttaaaagacactatattggagtctctttctcagacttcctcagcgcaggatgtaaatagcactaacgatcgactggaacaaagtgaccgctgtgtaaaactactgccttgccactcactgttgtatacatttcttatttacgattttcatttgttatatatatatataaatatactgtatatatatgcaacattttatatttttcatggatatgtttttatcatttcaaaaaatgtgtatttcacatttcttggactttttttagctgttattcagtgatgcattttgtatactcacgtggtatttagtaataaaaatctatctatgtattacgtcacattacttcacatgctgctctcgttccttttgggagagtctgctggaaagagatggctacattggtcggggcctcgctcctctttctcccttcgctctggctctgtgcggagaacgggttgccctggacttgaaggatgctggsacgtgcagggcaccggtggagcagaggtgccccctctggaaggcagcagattcctgatgcccagatgtttgtgtttgaatgttacagcctcaggatcattgactctgcagagaaagtcctgggaagggtgtagaatgagcttgaagaggacctcacagctgaggccatcaggcagcacccaaggctgggagccacatgacctgagtcttgtgccagctctgcgcctactctctaggccaagccacgttccctgcagccagctcctacagctcacagaagcaattgcaggtatctcttcccaactctgaaggagtgtggtcatgttggcacattgaaatcagccatggtgacagtcagaaattgacaaatgctacaaatcaaggcctttattttccttagagaacaaatcacagattcaggct

SEQ ID NO: 553943 - DNA, 898 bp, Homo sapiens
tgccatggagtgctcaagccagttaagtattgagccagtgaaactattgaaaccatgtaattgttgaaaagtaggtttttgatagccttagtaacaacattttctgagaaatagtggagaaaaatcagaacatagtagaaaaacagatgagtctgtgttgagaaagtaaagagagtagcttagactgtcctgaaaagtttttgttagtgttgagaaagaagtgagttacaggttaaaatagaggacacacacatgcatacaaaaaaattaatagctttgtgtaaaatctctcaataatgcaataatagaccaggtaaatacaacataaataatgatgttaccaataatgtaattttggaatttttggaattgacataagctttcatggagatttttatatgataaatgaaaaagtaacatacgcaaaarcctctattcaaattaatgacttggctgggtgaggtagcacatccctataaccccagcactttgggaggccgaggtgggaggattgctggatccctggaattagagaccagcctgagtaacatagggagacctcatctctacaaaaaaaaaaaaaaaaaaaaaaaaaaaaaaaaaaaaaacttagctggacatgctggcatgcacctgtagtcccagctactcaggacactgaggcaggaggatctcttgagcccaggagttcaagaacagtctgggcgacatggagagataccgcctctacagaaagtaaaaaaacttatccagatgtggtggcacattcctgcagtctcagctactcaggaggctgagatagaaggatcgcttgaacccagaaggttgaggctgcagcgagccatgattgtgccactgcactctggcctgggtgacagagcaagactgttgccaaaaa

SEQ ID NO: 553944 - DNA, 2820 bp, Homo sapiens
tagagtcattttcatagctggttgctaaggtggaaggacatgaggacaagattcagaacactacctgtaatcatgaatctacaactcactagtcacataggttggtggagttaccacagccttcagcatattagtttcttcatgtataaaatggtgttgataaaatttgctgttcttatttcatagggtttttgcaaggatcaaatgaagtaaggtaatatgtatgacataaatttgcaaaatgcagaattatatccaaatgtgcataatttttgtccatgaaaattgcattcatacattttttttctttatagtgcatttcttacaaggtggtttcatgagaaaagtggggataataagaacaacattcagaaattaaaaatattattctcatattcttattgagagattcttcttggtgacttttgtgtatgatcatacttgtaaaacttatatagaaaagcataaaaaggacattagctgttttaaattaaacagagttttatttgttcactggtccacttaaaattagttttccctgtatatgaaaagtgttttgtggtagtcacctacatcttataataatttatttcttttaaggtatctggctatacttgagtttctatacaatcaattttgaaatttgtttttcatctgttacttaattttttcctttaatctctactgaagtggtttttcaaccagtagtattgaggcaaaggaatttaaaaatataaagtaaagcaatctatcctgaatagaaaatagaatgcacttctagtctttattcttcagagtggagaactcatctttagtaagcacctctttcccctttctagaaatgctaggattctaaaccagtacctagtatgagacagttggagcacagtatcatggatactgaacactgggctctgaatggtaaaacagcttgtgtaagactattttatagaaccaaaaatagaactctttatatcctaaatgctttccagggcaaccgtactttcctaaacttcatttgtcccaaaatatcttgttttctttatataaaaacaaagagtaattgagtcttgatattcaagaggaagataaagttttaatgaaagttttcattccacttattatcataaatacttatatgtagccttacctgagacaatgatttgggcaaataaattatgaaacagtttgactggatgtgaaattttgggttaatgtagagctacatgccctagaattaagaacagtatatactaaaatgcattttaggtattaacaacaagtctactgggaagatatatttatgtataacattgttttaaatggtgtgacactatagcgcatttactgtggggccaaattaaagagcagttcttaaaacccaaattatattcctcagttaaagcaacaaacatgggcagtatctgaatgataaggaatcactgttttttatcttggttttctgcacatcattatcatattttacttaatgaaaatattatggaaaacataatattatttggttttagtggaatttgaagtttgttataatgtcactttaaaaaaaaaaaaaagaggaatcctatacgtaaaaaggaaatttctggccgaaggaagtggctaaatgtgcaggcagcatcgtgagcttttatgggtgatcgatccttcccttattgaaaatgtatatccttagctaagtgaagtactggttcaacaaaacagatcacagtgaaaggaattataaacctgtccagcacttttggtattttaaacatctttttttttttctttgggaaacagtttctctcttgttgcccaggctagagtgcagtggtgcaatcttggctcactgcaacctctgcctcccaggttcaagagattctcctgcctcagcctcccgagtagctgggattataggcccgtgccaccatgcccagctaatttttgtatttttagtagagaccgggtttaaccatgttggccaggctggtgtcaaactcctgaaacattctcaatttttttcttttaaattaaagatgttacggcaccatctctagcctctatcttttattagccttacccacattgaagttcttactccaaatgtcctccctctgaactcttattcatggttttctccctctggaaggttttttatcttctcctttgtcacatccctgattctcaccctttcttcaaggcacagctaaaatgttatccccttgttgaggcacgtactccatgcatccacagcacttttagcatctctattgcagcacttacctcattgcatcaaactatttaatgacactcctgtattttcataagaatgtgagcaacttagagtcaagggcaatgtcttttattttttaaataagcatttgattttagaacggttttagatttacagaaaaaacatagtagaaatcccatctagcctgcattcagttccccctgttattcacatctaatattaatatggtatattcgttatagttaatgaactgattttggcacattattattaaataaagtccgtagtttatttagatttctgtgctttttacctgatgtccttgtttctgttccaggatcccatctagaatagcacataacatttagttgttatgtctccttaagatactcttggttgtgactgttttacatttttttttatttttgatgacctttacaattttgaggagtattttgtcgaatgtcctatatttgggatttttctgagattttttcatgattagrtgagggttataggtccttggaagaaaaaacacagaggtaaaatcacaacatgtcatatca

SEQ ID NO: 553945 - DNA, 601 bp, Homo sapiens
tataatgacaaataacatgtgtctatgatggctaattcttgactcaagaacaaattatgtttggctgatatttataaatttttcctttactttttttgtttgagacggagtctcactcttgtctcccaggctggagtacaatcattatcttggctcactgcaacctccacctcccaggttcaagcaatcctcctgcctcagcctcccaagtagctgggattacaggtgcctgccaccacattccgctaaattttttgtatttttagtagagacggggtttcaccatgttggccaggctggtttcgaactcctgacttcaaataatccacccgccttggcctcccaaagtgctgggattccaggcaagccaccacacccagcctattaatttcttacatgtgcaagatgctctctgaatgtgaagaagtatrttacaatcaatcctttcattttcaagtgatttaaattcctcatttttaaacataatttaagttcctggcaaatgactccttttgcttacaaaaatgaactcttaccttggaaccacatgaaattttaaaataactatttttcaataaaaacctcttctgtttcgaccttt

SEQ ID NO: 553946 - DNA, 531 bp, Homo sapiens
cacatgtggtgtgtctgcttcacatggtgttgggatactgggatggctgcagggttcaacacgacctccctcacatggctgggggttgatgctggctgcaagctgggagttcagctgggcctatcargaagggacctgaactcttctctatgttgacctctccacgtggctacttgggcttcctcacagcatggtgactgagttctaagaagaagcactccaagaggcaaaggctggagctgtgtcatttccgccatattctattgatcacaatgatgacaggtcaggtcagattcacggggaggagatacaacattcaccttttgatggaagtggcaagataatatcacaacagtgcatgtggtaagggaaattttgtggtaattgtctttggaaacacaaaagaccgcaatgatccaagcccttgatcatgtggcacaaagtcttcacttccctggggtgaagacccagtgaaaccctcagtgacaacccccaggagggttttcttccgcgttgaccgagctgtctgtg

SEQ ID NO: 553947 - DNA, 561 bp, Homo sapiens
atttcccatcatgggttgctctttaatttattgagttaattttggggtaatgttagggggcggaggcttagttttcccagttgtcttaatatcttttatttgaagagtctctcccaccatccctgaaatgccaccttttatcataaacctcattccacagccacaggagaggaagcgtctgtcacctccctgtccatgtttatttctatcccataccaccggagtgttgttttttctttttcttttttttttttttgagacagagtctcactctgtccccagggtacagtggagtgggacaatctcagctcactacaacctccgcctcctggattcaagtgactctcctgcctcagcctcctgagtacctgggattacaggccccctgccaccacgcccggctaatttttttgtatttttagtagaggtggggtttcaccatgttggccaagctggtcttgaactcttgacctcaggcgatccatccgccttggcctcccagagtgctgggattacaggcrtgagccaccgtggctgatcccactggactatctttttttt

SEQ ID NO: 553948 - DNA, 832 bp, Homo sapiens
aaatcatctaaccctgagatcctaagaccctaacatatggtttcttaaaacctacaatgaatagaaaagggcagcaggggtgacacatttccagaaaggaacagccctgtatttcctcatcagacaatgggttggacrggtgggctgtgtgatgactgagccacacgccatttgtctctgtgttgaagaaacagaggcctaggtagcccaaataaattggtttctcgtaagaatgcaccaggagggccttggcatagtggctcacgcctgtaatcccaacactttggggggctaaggcgggtggatcacctgaggtcaggagttcaagaccagcctgatcaaaatggtgaaaccccgtctctactaaagatacaaaaaattagccaggtgtggtggtgggcacctgtaatctcagttactcaagaggctgaggcaggagaatcacttgaacccgggaggcagacgttgcagtgagctgagttcatgccattgcactccagtctgggcatcaggagtgaaactctatctcaaaaaaaaaaaaaaaaatgcaccaagagggatcagggcaatgagatagattcaggcaagacctcatagtgcctgggaccagacagacatcctgatccaaggtggctgcaggatgccagccccaagaatgtgtggaaagccacaggagggctctgcggtcacggggctaggccacactcaccctgtttgcttctccccggtttcgtggctccggctctccaactcacccttccccttccttgaggcttatgcttagaggtgtttccacttggacaccaccccattggcacccttgcttgttaca

SEQ ID NO: 553949 - DNA, 832 bp, Homo sapiens
aaatcatctaaccctgagatcctaagaccctaacatatggtttcttaaaacctacaatgaatagaaaagggcagcaggggtgacacatttccagaaaggaacagccctgtatttcctcatcagacaatgggttggacgggtgggctgtgtgatgactgagccacacgccatttgtctctgtgttgaagaaacagaggcctaggtagcccaaataaattggtttctcgtaagaatgcaccaggagggccttggcatagtggctcacgcctgtaatcccaacactttggggggctaaggcgggtggatcacctgaggtcaggagttcaagaccagcctgatcaaaatggtgaaaccccgtctctactaaagatacaaaaaattagccaggtgtggtggtgggcacctgtaatctcagttactcaagaggctgaggcaggagaatcacttgaacccgggaggcagacrttgcagtgagctgagttcatgccattgcactccagtctgggcatcaggagtgaaactctatctcaaaaaaaaaaaaaaaaatgcaccaagagggatcagggcaatgagatagattcaggcaagacctcatagtgcctgggaccagacagacatcctgatccaaggtggctgcaggatgccagccccaagaatgtgtggaaagccacaggagggctctgcggtcacggggctaggccacactcaccctgtttgcttctccccggtttcgtggctccggctctccaactcacccttccccttccttgaggcttatgcttagaggtgtttccacttggacaccaccccattggcacccttgcttgttaca

SEQ ID NO: 553950 - DNA, 544 bp, Homo sapiens
ggaacattcttgtacatgccttttggtgaacatacagatacatttctgttgagcgtctactagggagtcaaaatgttgggtcattaatatacatatgtgcaattctagtagatatcgtcaaatagtttcctgaagtgggtgtacccattgaccctaccttgagcagtatatgagaattacagttgccccacatccttgccaaaatgtggtattattagtcttctatattttagcattcttatggatgtgcagtggagtcatattatagttttaatttgcacttccctcatagctagtgaaattgagcacactgggtaaagttttttaaaaaatacattcccaagcctcacccaagcctcatagaatacaaatccctagggatgggtggcccaggaacctgacttttcaatgcctgttccccgggaatacttaagctgccagcctgtcgctgatctgtgractagggtgtgaggatgatcaataaggcaatagctctgtgaatctatgactctgggtgcagagtgtgggtagctggcttctgcct

SEQ ID NO: 553951 - DNA, 876 bp, Homo sapiens
gagcaagttctttagcggtgatttgtgaaattttggtgcacccgtcacccaaacagtatacactgaacccaatgtgtagtcttttattcctacccccttccacccttcctcccaagtccccaaagtccattgtatcattcttacgcctttgcatcctcatagcttagctcccacttatgagtgagaacatacaatgtttggttttccattcctgagttacttcacttagagtaatagtctccagttccgtgcagattgctgcgaatgccattaattcgttcctttttatgactgagtagtattccatcatgtatatatagagagagagagcacggatttttaaatcccaggggattctaaygtgcagccagggtttaggtaaaggaaagacccataatgcctatgtcccgcatcagtgagttttgataagtgaatcctagacatcataaagaagcaaaatgtccaagcattatgtcaacatcaagaagactaggatggtgggagaagtctaacaattagaacactttaacagggatctcttcaccatgagagtcagaaatagaaacccagaaggcctctcctctctctctcccccactccgacttctctttctctgtcttctagctctcctatcacacacacacacacacacacacacacacacacacacacacacacattcatttgttctacagtcgaaagaacagcattagaagaaagttgtccaggtgcagtgtctcacgcctataatcctagcagtttgggaggcagaggcgggagggtcacttgagctcaggagttcgagacctgactgggcaacatagtgagacctcatctctaataaaaaaaaataaaaataaaagttatgagtatgag

SEQ ID NO: 553952 - DNA, 876 bp, Homo sapiens
gagcaagttctttagcggtgatttgtgaaattttggtgcacccgtcacccaaacagtatacactgaacccaatgtgtagtcttttattcctacccccttccacccttcctcccaagtccccaaagtccattgtatcattcttacgcctttgcatcctcatagcttagctcccacttatgagtgagaacatacaatgtttggttttccattcctgagttacttcacttagagtaatagtctccagttccgtgcagattgctgcgaatgccattaattcgttcctttttatgactgagtagtattccatcatgtatatatagagagagagagcacggatttttaaatcccaggggattctaatgtgcagccagggtttaggtaaaggaaagacccataatgcctatgtcccgcatcagtgagttttgataagtgaatcctagacatcataaagaagcaaaatgtccaagcattatgtcaacatcaagaagactaggatggtgggagaagtctaacaattagaacactttaacagggatctcttcaccatgagagtcagaaatagaaacccagaaggcctctcctctctctctcccccactccgacttctctttctctgtcttctakctctcctatcacacacacacacacacacacacacacacacacacacacacacacattcatttgttctacagtcgaaagaacagcattagaagaaagttgtccaggtgcagtgtctcacgcctataatcctagcagtttgggaggcagaggcgggagggtcacttgagctcaggagttcgagacctgactgggcaacatagtgagacctcatctctaataaaaaaaaataaaaataaaagttatgagtatgag

SEQ ID NO: 553953 - DNA, 3584 bp, Homo sapiens
cggggtcctggaccccgaggcacaactagtcactgtggggtggggcctcctcagctgccctggtcggcgagtgggggcacaggtggctcccggtttggaggaggagcaattaatttcggtctcctcccggcagcgggaggtgatttctccgtcaaacacggaagcctgccgtggccgcactgagggtgtgagtgctcggcttcccgtctgggtcttggtgtcctgtgagtcgcacagatcaggggctgcaagggagggactctgaacgctgccagggcagagcagggtccagcggggtccggctgggcggggacgtggctcggaggacttgggaatggcactgatcactgcccgctgcctgtcttagaaagcccagggagccagggcagtgtgggagacccaggagccccctgggaggtggcggggtgcagctggaccctggacccccgccgagagcgccctgggacgcgggctgtggtcacgtcccctgaggccctgggctgtgtccagcaggtctcaccctgggtttagagcagccggcaacctggcctggggctccccgctttctcccaggaagggaagcatgaggagtgtcagaggcagccagctccccgggaaagaaagggcagtgccctacccgtccacaccccgggagtctttcccccactgccttgaagtgcagtgactcccccagctggggcgccccaactgctctgctctgccccactctggaaagaccaggggcgtgggagaaagtataaacccagatgtggtttctgcgcagaggctcagagcctgggtttgccctgaagcccttgccctgtggggatcctcccgaccctcatccccgggagtgacaggcagggcgggcgagggcaggtgggagggtgaaggccagtccccgagccgctcacctgcagaaacttctgcggaggagccaggagcctccccagaccctcccttttgaccttccacctcttctctgccctgcagaggtcccgaaagcacaggggcagaggaggaagcccctggttttgggggcccgggggagcggacgccagaaccacacattgacctgcagcctggggtctgggcgctgagtctgcctggtcyaggtgcagaatgaacacggggcggaggagggacggggccgttctgggcgtcgcctgcccctcagagcactgctctccctgcccacactggcctggcccttagaggaagcgccccaggaaggcaccccatgcggaggctgggcctctcgcggccgtccactcccgtctcgccctgcgtggtggtgtctgagctctgggacccatggcgtcgcccggtacaggagggagtcggggcaggaatctaaacctaaccactgccctgggaggccagggcccggggacgcggaggccccagcacaggagcagcgtgcagcgtgccggcctgggtcccccgagccccaacccactgcgcctccatctccggtgactttcctgcctcggtttcctcatctggaacctggcattgaagcagcacctgtgagtgtcgcccccagaggacaggaaacacacttccacacagagcccggagacgcacgtccacacagagcccggagacccacgtccacacacagcccggagacccacatccacacacagcccggagacccacgtccacatagagcccagagacgcacgtccacacagagcccggagacgcatgtccacacagagcccggagacccacgtccacacacagcccggagacgcacgtccacacagagcccggagacccacgtccacacacagcccggagacgcacgtctacacagagcccagagacgcacgtccacacagagcccggagcatgaatgttctcagcatctttattaccatagccaaaatgtggaggcctccaacaggaggtggctgagcaaaccgcacctggctgcagcttggaatgcaaatccatcccacagagacgccacacactctgctcttgctctttaatcagacagagacgcagcgaggcccccaccctcccttccccggccccttccccaccccggcatcagggaggtcctgggcgctgaggagccagagaagccgggctcaagacggtggcctgcagcggaggccgaagcggagatcgctgggaggaggaaggtcctggtccctcctcagccgacccaggtgggagcccagcccagcctgctcagggcaactccccgacttgctgcaggatccagagcacgtagatctggacgtgggtgtagacgccgggaaagtcccgcagggtacagccgtagccccagctgaccacccccaccaggcgccaggacccccgcagcctgcagaccagagggccgccggagtcaccctgaggaagggaaggaaaggggtcaccgctgagctctgcggtgggagcagggcaggcaggcagggcgggccgggggcactcacgtagcaggagtctcggccctcgctgccggcacacagcatgtcatccaggatgagctgccggtcgccagtgtgccctgaggcgttgcggtagggctgctcacagacggcgttctccagcacctgcacactcgcctgctgcaggcggtagggcggcggcagcgactctggggagagaggtgaccccggctggcacagcggagacgcccctgccgtcaacccagcagccccagcacctccccaggttgggaagtaaggtggctcccttgtggccaagggcccctagtcccggcctgaacctcccagcctgagcacggtgtgtgggaccccaggaggtgggagggctcgtgtctccctctaaactcccagggctcgcagtcggacggaccagagaaaagtggagggatgagtttttctgttttttttcctccaaaaaatgccttttggttttgaggtgttttcgtttgcggtgttttttcttttcttttcttttttagagatggggtcttgctatgttgcccaggctggcctcaaactccccggctcaagccattctcctgcctctgcctcccaaagtgctgggatcacaggtgtgagccaccgcacccagcaaaaaaatttaaaaacctttcctaagtagaaaaaaatgagaagtattttcccctctgaataatgagtctggagcttggtgtggccattggcactcgcaggacccccgagtctctgggcccgggcagcacagagctgtggggaaaagcagccggaggtgctgcatggcggtgagcagctccgtctcttccctttctggaactcacccaccccaccaccacccccggagccctggaatgaggcgttttgggcccacagcccgagtccttccccagcctccacccaacacgccccgaacatcctgatcgctccccagccagtcacccagcactggtccttcggggtgagctccagcgagaccggggagagcttgaccgtcctgacattagcggctcagatcatggggctcaccagctggagcagggccacatccgcacccagccccgcagtgacatagttggggtggacgatgatccggctgacgttcagcagcccccggcccccgtagagatacacgtccccagc

SEQ ID NO: 553954 - DNA, 647 bp, Homo sapiens
tgaagctggaagaagcttccgtttcacgaatagcacttgtaccagggtgagaaagagttgaacagtggatcacagatcagatttacggatgacacacttatcgrggcaagaatcggcaggtggggagcagcctcgcgctgtggagtctcaggctggctgcaacgttaagagtcgggccgaagcaagccgaggcgcccgtcagaacccatcagccatgtggggtttacgacagagccctatcccatattttatgactgtttgtaaatcatgtgctacacatgccttacctcagtaaagcttaacaataagctgctgcacgtctacaaatgcgcacatttatgcacctgtggggggctccctcacgtgaagggtgagaagggcagccggcgaaaggcaggtgaagtccagggtttccgctcctgggaatttaaacacccctgaagccccaccatgggggcctagaccttggagggggtgcacggttagtacggttgttttccgtacttttcaatatatttaaaagatcttagaggctggacgcaggggctgacacctgtcatcccagcacctcggcaggtggaggcaggaggagtgtttgaagccaggagttcgagaccagtctgggcaacaaagcaagatcccatctc

SEQ ID NO: 553955 - DNA, 647 bp, Homo sapiens
tgaagctggaagaagcttccgtttcacgaatagcacttgtaccagggtgagaaagagttgaacagtggatcacagatcagatttacggatgacacacttatcgaggcaagaatcggcaggtggggagcagcctcgckctgtggagtctcaggctggctgcaacgttaagagtcgggccgaagcaagccgaggcgcccgtcagaacccatcagccatgtggggtttacgacagagccctatcccatattttatgactgtttgtaaatcatgtgctacacatgccttacctcagtaaagcttaacaataagctgctgcacgtctacaaatgcgcacatttatgcacctgtggggggctccctcacgtgaagggtgagaagggcagccggcgaaaggcaggtgaagtccagggtttccgctcctgggaatttaaacacccctgaagccccaccatgggggcctagaccttggagggggtgcacggttagtacggttgttttccgtacttttcaatatatttaaaagatcttagaggctggacgcaggggctgacacctgtcatcccagcacctcggcaggtggaggcaggaggagtgtttgaagccaggagttcgagaccagtctgggcaacaaagcaagatcccatctc

SEQ ID NO: 553956 - DNA, 618 bp, Homo sapiens
gcaygcacgtgtgcacacacacgcatgcacgcacgtgtgcacacacacggatgcacacacatggacgcacatgcacacacagatgcacacacacattcacatgcatgcacacacacatggatgcacacacaagcacatgcactcacatacacacacatgcaggcacacacacaggcacacacaagcacatgcacgcacatgcacacacacgcacacacatgcacgcacgtactcccacaagcacaggcagcacaccctgcaagtggcctcggagcatccccacccagggccaccctcgcattccaggctgctccctgcagataagcctcagtccagcccacagtcttagcagggcagcagccctgcagcctccccgctggcacggtcacaggccgctctgaggactggagggaccagccgcccacagagccccgagcccgtggtcccggtgagtgagcggagctgtgctgcgtgcagctgggcgttttcctaacggccctgcccctgtgagaaggaggggctcgggaggacagccagggagcccagtcccacggtggtacctccatctccgggaggtgtgggctgcccacatctcagcttccctggctcccacagaat

SEQ ID NO: 553957 - DNA, 618 bp, Homo sapiens
gcacgcacgygtgcacacacacgcatgcacgcacgtgtgcacacacacggatgcacacacatggacgcacatgcacacacagatgcacacacacattcacatgcatgcacacacacatggatgcacacacaagcacatgcactcacatacacacacatgcaggcacacacacaggcacacacaagcacatgcacgcacatgcacacacacgcacacacatgcacgcacgtactcccacaagcacaggcagcacaccctgcaagtggcctcggagcatccccacccagggccaccctcgcattccaggctgctccctgcagataagcctcagtccagcccacagtcttagcagggcagcagccctgcagcctccccgctggcacggtcacaggccgctctgaggactggagggaccagccgcccacagagccccgagcccgtggtcccggtgagtgagcggagctgtgctgcgtgcagctgggcgttttcctaacggccctgcccctgtgagaaggaggggctcgggaggacagccagggagcccagtcccacggtggtacctccatctccgggaggtgtgggctgcccacatctcagcttccctggctcccacagaat

SEQ ID NO: 553958 - DNA, 618 bp, Homo sapiens
gcacgcacgtgtgcacacacacgcatgcacgcacgtgtgcacacacacggatgcacacacatggacgcacatgcacacacagatgcacacacacattcacatgcatgcacacacacatggatgcacacacaagcacatgcactcacatacacacacatgcaggcmcacacacaggcacacacaagcacatgcacgcacatgcacacacacgcacacacatgcacgcacgtactcccacaagcacaggcagcacaccctgcaagtggcctcggagcatccccacccagggccaccctcgcattccaggctgctccctgcagataagcctcagtccagcccacagtcttagcagggcagcagccctgcagcctccccgctggcacggtcacaggccgctctgaggactggagggaccagccgcccacagagccccgagcccgtggtcccggtgagtgagcggagctgtgctgcgtgcagctgggcgttttcctaacggccctgcccctgtgagaaggaggggctcgggaggacagccagggagcccagtcccacggtggtacctccatctccgggaggtgtgggctgcccacatctcagcttccctggctcccacagaat

SEQ ID NO: 553959 - DNA, 618 bp, Homo sapiens
gcacgcacgtgtgcacacacacgcatgcacgcacgtgtgcacacacacggatgcacacacatggacgcacatgcacacacagatgcacacacacattcacatgcatgcacacacacatggatgcacacacaagcacatgcactcacatacacacacatgcaggcacacacacaggcacacacaagcacatgcacgcacatgcacacacacgcacacacatgcacgcacgtactcccacaagcacaggcagcacaccctgcaagtggcctcggagcatccccacccagggccaccctcgcattccaggctgctccctgcagataagcctcagtccagcccacagtcttagcagggcagcagccctgcagcctccccrctggcacggtcacaggccgctctgaggactggagggaccagccgcccacagagccccgagcccgtggtcccggtgagtgagcggagctgtgctgcgtgcagctgggcgttttcctaacggccctgcccctgtgagaaggaggggctcgggaggacagccagggagcccagtcccacggtggtacctccatctccgggaggtgtgggctgcccacatctcagcttccctggctcccacagaat

SEQ ID NO: 553960 - DNA, 2114 bp, Homo sapiens
tgggttttatcagttacactgctaacatcactgttcttaaaacctaaactgattcttttccggtgttgtttctgtctttcgagggcactatgacgcccgggccagagtcctcgtttgccacatgacctccctgctccaagtgcccttggaggagctggatgtccttgaagagatgttcctggagagcctgaaggaaatcaaagaagaggaatctgagtaagagagccccgcgacccccatcaggatccaaggatttccacttcagtgtactttgcagataacagagtccccttctccctttaagagatggtgtagtgaggtggaaggagccctggacagagtcccagctgtagccctgactcgctgtgtggccttagcaagctacttgccctctctgggcctctgacttcatttgcaagaagaaaagatgaaatgtgccaggcatggtggcttacgcctgtaatcccagcaccctgcaggcggatcacttgaggtcaggagttcgagaccagcctgaccaacatgataaaaccccatctctactaaaaatacaaaaattagccgggcacgctggcatgtgcctgtaatcccagctactcgggaggctgagccaggagaatcacttgaaacagggaggtggaggttgcagtgagccaagattgtgccactgcactccagtgtgggtgacagagtgagactcttgtctcaaaaaagaaaagaaaagaaaagatggaatgaatgattgctaagggccttgaatctgtgactttaacatcctggggccctgacaccctgttccacctcaggctcttatgacacctggttcacgggcacaattgacctggattcaattcccgtttctgatacctgtccactgcttgacattgggcgggtggccttgcttttttaagctgcaatgttcttatctgtgaaacaggaataaggatagtgccctcccaggatcattaggaagaatgaatgtctgcgcattataaaatgcccggcccagggctggcacacagcaagtgcttggtagatgtgaatcctccccttccccgacgtgtcccggacccatcagttgtagagttgctttgctgtctatatatggtcaagaatgtgtagaaggaaataattctggtaacctggccggtgctcagctctttgcagaacgctttacacaggatctaatcccagagcaataaatcaatttcagtcacagcctaatcccaggctcctggcaccaggcacgtctcccaggtctgggttttttttagctgcygtggtgttctttgaccagccaggttacccgaggtcagcccacctgggaatttaatcctaaagccaaattgagacccagagccaccctcatgccacggttagtggagcaaagaaaaggggtatttccttgagaaagggggaaacttggtttgttgaaataacctgtagacatactagctttgactcccagagttgtgtcagtatagaaatacctggatccatgccaattaccataatcacgagggcatcctaggttctttggatatgtcgggaatttataggatcttatatgccttgaaattaaggaacctctcagttattatttggaaatcttattatcagagagaaacgtattacccggagcgatttgttctgataataccggtaaccccaggtcagggaagatataaaccagaaggtctaatacaggccagttctgccacttaccagccatgtgaatctgggcattatttaacttctctgagcttcaacttcctcacctgtaaaatggggataatagtagcgccctcctcacagagttcctgtggggcccagatgagttcatatatatgtgaagtgtttcaagtgagcctgggacagagtaactagtccataaatattatttgctgttgttaacaatactgttctaattgtgttattatagacccttttataaactattatagaccctattgtagtctatatgtagactctttccccaggaaaaggcttcacacatgtaattgtttatgcagcgttagggactctcagattctgtggtctctggaaggatctgagacccagggaagccatagcaactgttcagccaggagacc

SEQ ID NO: 553961 - DNA, 539 bp, Homo sapiens
ttggccaacatggcaaaaccccgtctctactaaaaatacaaaaattagctggccatggtggtgcacacatgtagtcccagctactcgggagtctgagacaagagaattgcttaagcccaggaggcagaggttgctgtgagccgagaccgtgccactgcctgagtgcctgagtgacagagcaagactctgtctaaaaaaaaaaaaagaagaatttaggctattatgtatatgttctatgctcctcaccttatttatttctggctctatatttttttaaaggccctcagaaaaatactaagaactctaggaagaaatatcatccattacagcaggggatttgaggagaatgagagtctgctctgattccaaattcacaaataataaaattgggttatatttcagagtttagatgggaaatgtgacagaagatattttggtgagttgtagagagaatcccagcactcttttcttagaaaggacttgtgtcctttatattagacactgtgaagaatacaaagtaayatataacatacaatctc

SEQ ID NO: 553962 - DNA, 2474 bp, Homo sapiens
tcccttttcataatatctgcactgaatctttgttgcttcgcacttcagtttgcattccagcattctttcatgccaagcctggtgattactttgagtccctgagctacaggcataattatctctcaagaagacattggggactcttgagaggaagcccgaggaagatggagagaagaatactagatgaaggattaaggtatttcttaggtggagtaagtagcagtggggaagaggagtaggtgatgttcatttgccaagtatttagagagtcggggacctgatacttaagctttaatgttgaccagaggtatggtcaacagagctatttaaaaagttaaatagctgaatatctctctattcatggcctagagaagctttgttatttagatttagatgttactttgttttaattcaattacaaatgatcatgtttgtcgatcagtttactcatgatttgtcctagttttgagggaagatcagattcccagatgtcctcaaagatcgctttcactgataacagtgagcaattatgctatccctaaaacttccataaggagtactctatggcctttgaaaccacatcattgactaagtgaaacaatagagtttctgtagcccaagagagcaaagcagagttcatttagctacaaacgaccattgaatggcactagagataaagaaaaaagtatatcacacgaaaaataaataaataaatgataagatgttaggtcagtatgatttcatgatcattgcagaaaagtaaacaaaaaccgtttgattatttacatttctggcttgcttcagtaatgtgtcatctagtcccagttctgtttataggaaacattgcttttgtaataacatgcttataatgaacaataaaatccatgaaaaaggatttcattgcagaataaacttgtagattcaataccctcagaagcattctccgcaatagcatctcagaaacaaaattatgctgggttttttaacaagccacttaacgtatttatcttccaaggcattggggaaaaaatcaggaaccaatcattttctattttactacagggtaatttattacttactatgctaagtgttacctatcttttcccagtaaaactaaaaataggactgtctctcaaacattgacatatacgattaggctaatacagtaatgtgtgtgctttttattataaactaagttactgtaatccagaatacagtttgtgtatggcaaacagataaggaccatatgactgtggggtgacagagtagggttttgtatttagaacagacattgcatctgtaaagctttcttttcagaaatgtagttagcttttttatgaactagtaaatatagtatacagagcacctagggaatttgcgtatagccacatttattcccacacgtctctgggaatcataaatggttgtcttcctccgaaatggattaggacaaattacattaggacatgattgtgaatctgattaaggtggaacacagttggtttttttttttttttttccgcccctttgggatgaccatgtttttatataacaaccagaagacgaagaagcctttggcaagatgtttcaaagacatgttttcgtatgcacataaaaaagaattttcatgttaattcaaaaattggcccatgactttaatttctgtatcttgccaagacaaagcttgaagcacaacctgctctagtatagaacacatttcagatactgatttgggtttcaatgaaagcatgtaaaaaaggaatttccatgcataatttcttccaggagaggagagctgggtggataggattttctgttgactaawaatctttaagaaagaaagaaaaattgcttcataaatggtgtcaatattttacagtgattaaacctttccacactattttatgaaataaaatgcctaccataagacaatgctataaccttgattacaaaacaaagacagatgacaaatatttgacattgactagaacttggaagatggacattgctaagggaatttggatgataagagaatatgaaatctactatgatctattttcctgaaaacttaagccattgaaactgaagtgagctattttttaagttgtggataacataggttttatacactaatgtgtgtaggagagaagggtgcgtactgattcattcttggtcttctcattgcctgaatgctaaatcagtgattctcacactttattctgttgactaaaaatctttaagaaagaaagaaaaattacttcataaatggtgtcaatattttacagcaattaaacctttccacactattttatgagataaaatgccaaccataagacaatgcatataacctcaattacaaaacaaagacaggtgacaaatgtactagacaaatatactagaatcatccaggaacttaaaaaaatccccatatctaggccaccccctcaagaacaattaatcagaatctctaagaa

SEQ ID NO: 553963 - DNA, 1249 bp, Homo sapiens
tggtcccaattccccatttggccaaaatgtttatttgatgcatctctaaagtgacattctatattgtgtagtaagaaaggatgcttgcaggtagaacaaggaagcacttaagaatttactcttggacattcaccttcctacaaacttcaaattaaacaatcaaatcatgtttctttttcaactatgtttctgaatataaatctgtacatatttgtttgttacagggagagactatagtaagtctaggataataagacaaaagttggccgggcacagtggctcacgcctgtaatcccaacactttgggaggctgaggcgggaggatcacctgaggtcaggagtttgggaccagcctggccaacatggtgaaaccccgtctctactaaaaatacaaaaattagccgggtgtagtggcacatgcctgtaatcccagctactcgggaggctggggcaggagaattgcttgagcctgggaggcagaggttgcggtgagctgagatcacgccactgcactccagcctgggcaagaagagcaaaactccacctcaaaaaaacccaaaacaacaataacaataataataataaataaataagaccaaagccatatgaaggcatcatgtatctaatatgcatgattcagcagttggtatctagtcagtatgacagacactgtgagtaatggccacaaaatataacatatggatctgcaagaaaccttctaaaagtatataattcattttgttccatttatgcccagaggagaaatctgccaatagataaattcttgggaaaaggacttgcccagatgccaaatacatccatgcagaatcataaaggagaagagctaattcacagggtgtcagacatttgtggcaaagaggcctgaaaaccaagagagaaaaataacggcccgcttcattagcattctatgttctcagaactaggtagcatcaatttgaaatgcatgtactcacttcacactgataggatataccaattctaccttctcagataccctttctaatcacagtccctgggactgtagtctagagtgaaatgtaatctccaagtgaaaaataaaaaatgatggaataagtaatttcctcactcaagtgaaatctggttttatgatgctcttgctcaagagacatctgttagcacatctggatttaawtgttcagatatgcactttgttccaagaaaatgcttctggtgtaactgcccctgacaaaaaaaaaaaaaaaaagtc

SEQ ID NO: 553964 - DNA, 653 bp, Homo sapiens
tgtcacaactggggcggggggctggggagaacagtgcccctggcatctagtaggtgggggcagggatgctactaaacatcctacaaggaacaggacagtccccacaacagaattacccagsccgagatgccgacagtggcaaggctgagacagcctgctctgcagccccatttcaggggtgtgtatgtgtctgctagagttgaggggattcacaatcagaatcaacaacactgttatcagcccaagacaccagaatctgttccgacagccagattgaccatcaccacacccttctcgccctccctctggggagagctaagcacacagccttccttgtcggtttagcaaaatgccagtggacactgagcggcctacccagcttcagtcttctattctagttctttcatccacccccaggtttcaggtgggctttgaaaggctgggtgctagaggcacaattaccacactcagaagctgtcctttttcactctggcacacagaaaaaatatgaaaatactttcacagtacacagagtaaaccgaggaagccactcaacagtatcagccctgaggttctggtctcacccaggggtagagatcagcatttcctgttccctctccagggcactcaggctgggtgaaggtaccagaatg

SEQ ID NO: 553965 - DNA, 1268 bp, Homo sapiens
actcccatgaattaattacctccacctggccccaccccttgacacatggggactattataattcaaggtgagatttgggtggggatacagcaaaatcatatcagacatgaaagcttttttttcttttttttttttaagagatggagtgtcttgctctgttacccaggctggagtgcagttgtgttattacagtttactgcagcctccaactcctgcgtgctcaagtgatactcctgtctcagcttcccaagtagctgggactacaggtgtgcactacctcacctagctaatttaaaaattttttagagatggggtctccctatgttgcccaggctggtctcaaatttttggcctaaagcgatcctcccacctcagcctcccacttatggatgtggaagctatttgatggccatgatggccctcattcatccccatttctcctactacatcctgcacagttcattattctgtaaatacttgttgaatcatgaccaaatataaacatcatgcagtgtggttcagctattttaagtgttatccttagattttttcaggatataagagataaaagttaaaccgtggtgttagttttttttttttttttttttttttgagacagtagttttttttttggagtgcagtggtgcgatctcagctcactgcaacctccacctcctgggctcaagcgattctcctgcctcagcctcccgagtagctgggattacaggcacacgcaaccacacccagctaatttttgtatttttagtagagacggggtttcaccatgttggtcaggctggtcttgaactcctgacctcgtgatccacctgccttggcctcccaaagtgctgagattacaggcatgagccaccacccctggtaggtgttagtttcttaattataagccaagtattcaatggtgaaataaatctgagcacatccttgatgctcaactacagaaactgcaggatgtagttggacttagaaagaggagaaacaccactgtgtggctcagtgaggtattgccagcagggagacaagttggtatgatttttgaattgtatatactaaggatgttagttacttttaaaatataaattataaaagattctaattttaattggttacatttattgtgaaagtaagaagtattatgtatttacrgtaagaaataaatcattattgcacaatagtcccttttcctaaaatccagggtgagaaaagttgtcataatgagaatatattaaaacatccatgaaaatgaaaca

SEQ ID NO: 553966 - DNA, 643 bp, Homo sapiens
tttttctaccatgtctcccaaaagggcgaagatcagcaagttcacactgggagattgataagacccctccttctcccccgtaccctgtcttcattttgcttgtcagtaaattttgcctagaatcaaacatcgtcttctcacgaagtcaatttacccacagtggattgggccacaagctgttgaaacaaacttcacaatgaagataagcactagaaaaactgagtgtaaaggcagtggactagccagctcagacacattataaaagtcttgttttactctgagttcattatttagaagagataagtgaagtgtaaggtgactctatgctagctagccagtgatcaatgcgaacttagtctctctgtgcctcaggttcytcagctgccaaatggggataataatttaatcatagggaagtgttgaggcttaaatgagttcattcacataaagcattttgatcagtgcctggcagatacatgcttagtaaacgtcagctgttatgatgatgatcattaccctggctgctctccagcattcaggtgaccaaagcttagcaacaacacgtggctctcagggagtcttggtgagggggctgggccaagtacccaggcatgacagctctggatgaaaataaagcatgctt

SEQ ID NO: 553967 - DNA, 1246 bp, Homo sapiens
gctacatttactaaatatctatggtttgacaagcattgttgtgtttgtttatggtaaacctgtcaaggagtaaaacagctgagcattttgtagtgaaattaggtgtggtagaaaatagtatcacaattcatacttgggtgctgctcaggagacacttgagtttaatgagctcctgatatgatctgccttgggactgttgatgcttttgttggattacgtgtgtgcatgtcttagagctacaaaataataccttgaaaaattgccaacttcattcaaagctctttgcaatgctaagagtttccctcagaatttctctacaagttcttgtttacctcattatttaaagcactttattttgttgtaggttttggggagttaggttgagcaaatatctaacattctaatggaaaaatattttttaagttccatatgaatgtcctaaaagtggctttcacagcacaaatgttctatgaccttctatgatagcagtcgttcatcacactgactgatgtttagttgattaattttctcatagtcacaacagaagttgattttaatatgacttgcatgaaaaatgataaatttttactgctttttttgtgaagctataatattgggcatctgtaatgtcttcagttttcagaatcaagccatattctgatcttttatatctactaatgacacccaaatttagaactgtgtgctctggctatgtagaaaagactgattgaaaaagaaaagaaaagactgctttcctgtgtctctgtagctcctcaactttttttttaatgtgctcctctttaaaattttttctttcaggttgtacctacaacagatcatatagatacagaaaaattgaaagccagagaacagattaagttttttgaagaagttctcctttttgaggatgaacttcatgatcatggagtttcaagcctgagtgtgaagattgtgagtattatttttatttaaaattaatatttttcttgcattyttaacatcagacaaaaatatgactcactttgaataacactgagcctggccgggcgcggtggctcacgcctgtaatcccagcactttgagaggctgaggcgggctggatcgccaggtcaggagaccgagaccatcctggctaacacagtgaaaccccgtctctactaaaaacacaaaaagttagctgggcatggtggcgggcgcctgtagtcccagctactcgggaggctgaggcaggagagtagcgtgaacc

SEQ ID NO: 553968 - DNA, 408 bp, Homo sapiens
cttggttcagagcatttttccctctgactctttctgggcaacagaccttttaggaatgtttgttaaatgctgaaaaaaacaggaattgatttctctctgcgtccacagccaacatgtgaggccacggcactccgtgtatactaacctggtttttctttccttttgctcaacagtgagtgacctgcaggaagaaggcaagaatgccatcaactcaccgatgtcccccgccctggyggatgttcaccctgaagacacccagcttggtacgggggttcctccgctccctgccctgagacagttgagcttccgtggcactaagttggtcttggggaggccaatgaggagcccgatagatctggcctcttgatcagatgctgggggcatttgggagtctaagttcttagctca

SEQ ID NO: 553969 - DNA, 408 bp, Homo sapiens
cttggttcagagcatttttccctctgactctttctgggcaacagaccttttaggaatgtttgttaaatgctgaaaaaaacaggaattgatttctctctgcgtccacagccaacatgtgaggccacggcactccgtgtatactaacctggtttttctttccttttgctcaacagtgagtgacctgcaggaagaaggcaagaatgccatcaactcaccgatgtcccccgccctggtggatgttcaccctgaagacacccagctyggtacgggggttcctccgctccctgccctgagacagttgagcttccgtggcactaagttggtcttggggaggccaatgaggagcccgatagatctggcctcttgatcagatgctgggggcatttgggagtctaagttcttagctca

SEQ ID NO: 553970 - DNA, 865 bp, Homo sapiens
cccactcattcccgaacagccaccaactttgggactgtatctctcagctccagcccagctacctcttgtctagttcccagccatccactcctctggcctgaagccagactgtatggaggtgcagagtcagagaggccttggccttggagggaggcaccctggtgcctggcccagctctactgccttgctgtgtgaccttgggcaagtcccttcccctctctgggcctcacggttcccactgttacaaagaggaggctgacctaaaggggctttgtggaattttcctcttattatgttagattgttatatttggaagatgtgacttgaccagtacagtacatgacctttaaatcctttctagaagcaatatttagtgatgtttctgaaagagttaggaggtctatatctctgagatgaastagtactttctgaaatttatgaaaacaacagttaccactctttgaatacccactgtgcctggagactcttgtcctgctgtttcttagaaactcacccatcagctgtgagcattttctaatggtttcccctcaggcctttaatctttgatctcaataccttctccctaggagattaattgatcacttctaactctttttttaatttaatttttcacttgacataaattcagactctcagaatatttgcaagaataatacaaataatgtttaaatacctttcacttgattccccaaatgttaacattttaccacattctatgttatatctaccaccccctcacacacacacacacacacacacacacacacacacacacaattttattctgaactttatgagaacaaattgtaggtatgatgctcttttatctccaaatactgcatta

SEQ ID NO: 553971 - DNA, 865 bp, Homo sapiens
cccactcattcccgaacagccaccaactttgggactgtatctctcagctccagcccagctacctcttgtctagttcccagccatccactcctctggcctgaagccagactgtatggaggtgcagagtcagagaggccttggccttggagggaggcaccctggtgcctggcccagctctactgccttgctgtgtgaccttgggcaagtcccttcccctctctgggcctcacggttcccactgttacaaagaggaggctgacctaaaggggctttgtggaattttcctcttattatgttagattgttatatttggaagatgtgacttgaccagtacagtacatgacctttaaatcctttctagaagcaatatttagtgatgtttctgaaagagttaggaggtctatatctctgagatgaactagtactttctgaaatttatgaaaacaacagttaccactctttgaatacccactgtgcctggagactcttgtcctgctgtttcttagaaactcacccatcagctgtgagcattttctaatggtttcccctcaggcctttaatctttgatctcaataccttctccctaggagattaattgatcacttctaactctttttttaatttaatttttcacttgacataaattcagactctcagaatatttgcaagaataatacaaataatgtttaaatacctttcacttgattccccaaatgttaacattttaccacattctatgttwtatctaccaccccctcacacacacacacacacacacacacacacacacacacacaattttattctgaactttatgagaacaaattgtaggtatgatgctcttttatctccaaatactgcatta

SEQ ID NO: 553972 - DNA, 585 bp, Homo sapiens
aatctctataatacaagggcaaggagtatgtacagttgggatggagtggagagagaagtgaacaaactcaggtccctatctatgaggcaacatagtctgacaattgctgcaaaccagaccaaacacaggyaaagatgtgggagacaggaatgggtagttactgcttgtattagcctgttctcacactgctaataaagacatacttgagactggataacttataaaggaaagaggtttaatggactcacagttccacatggttggggaggcctcacaatcataactgaaggcaaagaagaagcaaagtgacatcttacatggtggcagtcaagagagcttttgcaggaaactcccatttataaaactatcacgtctcgtgagacttattcactaccatgaaaatagcacagaaaagacctgcccccatgattcaattacctcccactgggtccctcccatgacacatgggaattctgggaactacaattcaagatgagatttgagtggggacacagccaaaccatatcactgctaatcaaggcataaagtggtagaaccactttggcaattcatgataaagattgc

SEQ ID NO: 553973 - DNA, 585 bp, Homo sapiens
aatctctataatacaagggcaaggagtatgtacagttgggatggagtggagagagaagtgaacaaactcaggtccctatctatgaggcaacatagtctgacaattgctgcaaaccagaccaaacacaggcaaagatgtgggagacaggaatgggtagttactgcttgtattagcctgttctcacactgctaataaagacatacttgagactggataacttataaaggaaagaggtttaatggactcacagttccacatggttggggaggcctcacaatcataactgaaggcaaagaagaagcaaagtgacatcttacatggtggcagtcaagagagcttttgcaggaaactcccatttataaaacyatcacgtctcgtgagacttattcactaccatgaaaatagcacagaaaagacctgcccccatgattcaattacctcccactgggtccctcccatgacacatgggaattctgggaactacaattcaagatgagatttgagtggggacacagccaaaccatatcactgctaatcaaggcataaagtggtagaaccactttggcaattcatgataaagattgc

SEQ ID NO: 553974 - DNA, 1295 bp, Homo sapiens
cattccttcctcccccacactgttttatattttataaagggaattcacagcctagtggatacggggttgagtaaaagtacttcctgcctctattgaagcttcaggacactggactggagtcttccacaattcagccagaacccagggtactccaaaccactttgtgatcctccatctctgtaggctacagtttataaaacacttctatctccatgatttcatgtgattcccagagtgactcatgaggtttcagacctctccatcctcagacagaccctgtcacatgcctctgaaaatgctttagttgttgccatgtggatggacactcagaaaatactttaaaaaaaaaaaatctaaactgcttgctttagtggttttgtgtaaaatgcaaccagagagagagagagagagaggtccttggcagataggtttaactcaaatcactgagcaggaaaatatctgggaatctggcctggtttgagaaaaagagccagcttttttagctgactagagagcagcttaaaaaggaaaaaaatgaaaggaaggaaactaatgaggcatctctttcctcacagataatgtgggatgctcacccagtggtttgcagtggctacagcatctgttacacttcagtgacaaccaaaatgccttggagataagacaacaattatgagacctgcttgagaagaaatgaaagaaaacccaatcgcagccaaatagcactgccatctattaacaaattattacaggctgaagcagtctttaatgagattttaacaaaagaaatccagtcttgttcctctggggcaaagagattttatcatcatgtgaatggttaagcaggtaagaggacctcccttggagcaccaataaagagaaaatgtgtgagccctgtgttctccctctccaaggagytctaactcccagtcaagatgaaaacatattggagaaaggacccaaataatactgttccagagaaagttttagtttagtaagtggcctgatgagacaagtgagtattcaaaaaagctgtattagacctttgtgttgtgattccaatcctttgtgcttttggttatcctaaaggacattgtgacattctcaagagattcttaagtcaaagggtatagtggcaacattaatctggaggaacaatgaagctagctagagtcaggacgtgcctgcccatgatcttgtagacccactggggtttcagaagagaaactgatatgagtctaatgttgttagttcaaaggaggaaagaaaaattggttgcatggagtgagtcagaggga

SEQ ID NO: 553975 - DNA, 953 bp, Homo sapiens
ggtggcacttttcggggaaatgtgcgcggaacccctatttgtttatttttctaaatacattcaaatatgtatccgctcatgagayaataaccctgataaatgcttcaataatattgaaaaaggaagagtatgagtattcaacatttccgtgtcgcccttattcccttttttgcggcattttgccttcctgtttttgctcacccagaaacgctggtgaaagtaaaagatgctgaagatcagttgggtgcacgagtgggttacatcgaactggatctcaacagcggtaagatccttgagagttttcgccccgaagaacgttttccaatgatgagcacttttaaagttctgctatgtggcgcggtattatcccgtattgacgccgggcaagagcaactcgggcgccgcatacactattctcagaatgacttggttgagtactcaccagtcacagaaaagcatcttacggatggcatgacagtaagagaattatgcagtgctgccataaccatgagtgataacactgcggccaacttacttctgacaacgatcggaggaccgaaggagctaaccgcttttttgcacaacatgggggatcatgtaactcgccttgatcgttgggaaccggagctgaatgaagccataccaaacgacgagcgtgacaccacgatgcctgtagcaatggcaacaacgttgcgcaaactattaactggcgaactacttactctagcttcccggcaacaattaatagactggatggaggcggataaagttgcaggaccacttctgcgctcggccttccggctggctggtttattgctgataaatctggagccggtgagcgtgggtctcgcggtatcattgcagcactggggccagatggtaagccctcccgtatcgtagttatctacacgacggggagtcaggcaactatggatgaacgaaatagacagatc

SEQ ID NO: 553976 - DNA, 953 bp, Homo sapiens
ggtggcacttttcggggaaatgtgcgcggaacccctatttgtttatttttctaaatacattcaaatatgtatccgctcatgagacaataaccctgataaatgcttcaataatattgaaaaaggaagagtatgagtattcaacatttccgtgtygcccttattcccttttttgcggcattttgccttcctgtttttgctcacccagaaacgctggtgaaagtaaaagatgctgaagatcagttgggtgcacgagtgggttacatcgaactggatctcaacagcggtaagatccttgagagttttcgccccgaagaacgttttccaatgatgagcacttttaaagttctgctatgtggcgcggtattatcccgtattgacgccgggcaagagcaactcgggcgccgcatacactattctcagaatgacttggttgagtactcaccagtcacagaaaagcatcttacggatggcatgacagtaagagaattatgcagtgctgccataaccatgagtgataacactgcggccaacttacttctgacaacgatcggaggaccgaaggagctaaccgcttttttgcacaacatgggggatcatgtaactcgccttgatcgttgggaaccggagctgaatgaagccataccaaacgacgagcgtgacaccacgatgcctgtagcaatggcaacaacgttgcgcaaactattaactggcgaactacttactctagcttcccggcaacaattaatagactggatggaggcggataaagttgcaggaccacttctgcgctcggccttccggctggctggtttattgctgataaatctggagccggtgagcgtgggtctcgcggtatcattgcagcactggggccagatggtaagccctcccgtatcgtagttatctacacgacggggagtcaggcaactatggatgaacgaaatagacagatc

SEQ ID NO: 553977 - DNA, 953 bp, Homo sapiens
ggtggcacttttcggggaaatgtgcgcggaacccctatttgtttatttttctaaatacattcaaatatgtatccgctcatgagacaataaccctgataaatgcttcaataatattgaaaaaggaagagtatgagtattcaacatttccgtgtcgccyttattcccttttttgcggcattttgccttcctgtttttgctcacccagaaacgctggtgaaagtaaaagatgctgaagatcagttgggtgcacgagtgggttacatcgaactggatctcaacagcggtaagatccttgagagttttcgccccgaagaacgttttccaatgatgagcacttttaaagttctgctatgtggcgcggtattatcccgtattgacgccgggcaagagcaactcgggcgccgcatacactattctcagaatgacttggttgagtactcaccagtcacagaaaagcatcttacggatggcatgacagtaagagaattatgcagtgctgccataaccatgagtgataacactgcggccaacttacttctgacaacgatcggaggaccgaaggagctaaccgcttttttgcacaacatgggggatcatgtaactcgccttgatcgttgggaaccggagctgaatgaagccataccaaacgacgagcgtgacaccacgatgcctgtagcaatggcaacaacgttgcgcaaactattaactggcgaactacttactctagcttcccggcaacaattaatagactggatggaggcggataaagttgcaggaccacttctgcgctcggccttccggctggctggtttattgctgataaatctggagccggtgagcgtgggtctcgcggtatcattgcagcactggggccagatggtaagccctcccgtatcgtagttatctacacgacggggagtcaggcaactatggatgaacgaaatagacagatc

SEQ ID NO: 553978 - DNA, 953 bp, Homo sapiens
ggtggcacttttcggggaaatgtgcgcggaacccctatttgtttatttttctaaatacattcaaatatgtatccgctcatgagacaataaccctgataaatgcttcaataatattgaaaaaggaagagtatgagtattcaacatttccgtgtcgcccttattcccttttttgcggcattttgccttcctgtttttgctcacccagaaacgctggtgaaagtaaaagatgctgaagatcagttgggtgcacgagtgggttacatcgaactggatctcaacagcggtaagatccttgagagttttcgccccgaagaacgttttccaatgatgagcacttttaaagttctgctatgtggcgcggtattatcccgtattgacgccgggcaagagcaactcgggcgccgcatacactattctcagaatgacttggttgagtactcaccagtcacagaaaagcatcttacggatggcatgacagtaagagaattatgcagtgctgccataacyatgagtgataacactgcggccaacttacttctgacaacgatcggaggaccgaaggagctaaccgcttttttgcacaacatgggggatcatgtaactcgccttgatcgttgggaaccggagctgaatgaagccataccaaacgacgagcgtgacaccacgatgcctgtagcaatggcaacaacgttgcgcaaactattaactggcgaactacttactctagcttcccggcaacaattaatagactggatggaggcggataaagttgcaggaccacttctgcgctcggccttccggctggctggtttattgctgataaatctggagccggtgagcgtgggtctcgcggtatcattgcagcactggggccagatggtaagccctcccgtatcgtagttatctacacgacggggagtcaggcaactatggatgaacgaaatagacagatc

SEQ ID NO: 553979 - DNA, 953 bp, Homo sapiens
ggtggcacttttcggggaaatgtgcgcggaacccctatttgtttatttttctaaatacattcaaatatgtatccgctcatgagacaataaccctgataaatgcttcaataatattgaaaaaggaagagtatgagtattcaacatttccgtgtcgcccttattcccttttttgcggcattttgccttcctgtttttgctcacccagaaacgctggtgaaagtaaaagatgctgaagatcagttgggtgcacgagtgggttacatcgaactggatctcaacagcggtaagatccttgagagttttcgccccgaagaacgttttccaatgatgagcacttttaaagttctgctatgtggcgcggtattatcccgtattgacgccgggcaagagcaactcgggcgccgcatacactattctcagaatgacttggttgagtactcaccagtcacagaaaagcatcttacggatggcatgacagtaagagaattatgcagtgctgccataaccatgagtgataacactgcggccaacttacttctgacaacgatcggaggaccgaaggagctaaccgcttttttgcacaacatgggggatcatgtaactcgccttgatcgttgggaaccggagctgaatgaagccataccaaacgacgagcgtgacaccacgatgcctgtagcaatggcaacaacgttgcgcaaactattaactggcgaactacttactctagcttcccggcaacaattaatagactggatggaggcggataaagttgcaggaccacttctgcgctcggccttccggctggctggtttattgctgataaatctggagccggtgagcgtgggtctcgcggtatcattgcagcactggggccagatggtaagccctcccgtatcgtagttatctacacgacggggagtcaggcaactatggatraacgaaatagacagatc

SEQ ID NO: 553980 - DNA, 1301 bp, Homo sapiens
tttaggaacatttcagaaaattcatatatgaattcttacatggaatagttttcttaggtgtgacagtggttttgtgcctgaatagaagaatgtcccttttcttcagagatgtatgctggaataatgagagctgaagtgtcattctttttgctgttttccagtaggcaaaactgttgtgggtgtwtaaagcatatgtgagatagtgcaaatgcagcagaataacagccagtgaatcttaatgtaaagtagataactgtattttgatgttgtttcaacatcttggtagatgagaaatttaaaaataaaaggcttagtgtggaattgaacaaaaaagcatgaatccagagaaataacaatattaaaggggacattttccctgacagttatcccagtctttttgtttgtgacgactttggaatgggctaagctctagaagagaaacaaagcctagtggccaacagtaatatgaactcagagtgagacagtcttccaaaacctggaacctcaaaagatgatacactcagtgaaagaatgcaccagaatatgctacctcagagtggaaagtaagaaaactggattgagagaaggaaaaaaacacctgataatttgtatccacaagctgacaaatcaatttagagccaaactcatactaccaatgtggttagaaaaattaagctaagaactttaggaggccaacatgagaggattgcttgagcctaggagttgggtactagcctgggcaacatagaccatgtctgtacaaaaaaattttaaaaattaagccaggcatgccatttttaacaaaaatattaggtgcatacctgtagccccagctacttgagatgctgaggtgggaggattgcttgagcctggcaagtcaatgctgcagtgagcaatgatcacaccattgcactccagcctgggcaacagagcaagaccctgtctcaaaaaaaaaaaaaaatgctaagaagttaaagtggtcaggtttgaagtattctgggcacttaacaaaaacaaatgttagtacactcttgaaacattttaaacaatctcaaaaaacttccataggtagtattctgataattttggactcatactcaaattcacaaagttttgaaaagtcattgtgaatacattaagagaaataacagaatctgacctgcaaagactgcagattttggaattactggattagagtattcaaagacacacaaaattttttttaacaactctaaaattcggatgacagtgcagcattaaattgacacaaaatgatgtgtttttcagtacttgatggctta

SEQ ID NO: 553981 - DNA, 1033 bp, Homo sapiens
tgtctagtaggaatcaatgtatgtattattttgtcttttcaatgtcaaacctcatagtgacttgagtgagagtctctttttatgacaatgaaaatgtgaaactatatttaatacaaaatattatttgrgcaaaacatataagtttccactgagactttatcaaatacaatttaagataatttcaagcgattacacattctccaggggtatcgataggtgaacttttctgagcaactatttctacgatgtaatttaaatataaaatgtcctagttatgtacataatgatggttgtgtgtgtgtgtaaaatctctttttattttgcctaaatgtatccacttcaaaattattgtcaccagtttatgagctctagtttagccatttccattttcaactgcatctgacagtcttccaccagaatgaaattactcccctggaattctcctaaattgacaaataggctctaccctttcagagtgctaaatctaggtgctaaaaacaacaaaaaattatccccccaaaaatatcccttatttctactagcaggtattttctctttcaataccattaaattgtcattacaaaacttgtcatttatttccagaatcactcaatatacccagaattacaaccactcaactataaatgccatttaatttaatagcaataacaataaaaggttatgtataatgtgtgattttttaagctaaaattgaaacagaacatttcaaagtggctgaatgctaacataaattgccatttattatctattacataaacaaaagcaagacaaaaaatttatactttttgcttccccttagggtaagagattgctgaaaggtcacctgggatttcactcaccaccttcagcctggaagtatcactgtcactccctgcctgactgtaaaggtgctgggacatgtagacttttcagaggctccaaaggagtggaggataggaaatttttacttaacatagggagaagtcaatgacaagaggcattatcctaggtgagagcagaatatattcaactt

SEQ ID NO: 553982 - DNA, 582 bp, Homo sapiens
gtgacctcattagttctcatgaactaataggtgcgggaaagaatccatgccattctaattttttgggggggacggagtctcrctgtattgccaaggctggagtgcagtgatgcaatctcggatcactgcaacctctgcctcctgtgttcaagctattcttatgcctcagcctcctaagtagctgggactacaggcacatgccaccattccttgctaatttttgtatttttagtggagaaggggttttgccatgttggccagactggtctccaactcctgacctcaagtgatccatctcccttggcctcccaaagtgccaggattacaggctgagccaccacactcgccccactctaaattataagggagaatcacatcacattccatgattttggtatcatcttttatttattgcatttggcactatatgtagtcgatatccgttgatagataaaatgaagaaaaaggaggtgaagatgaaaaagaatgaaggtataacaatcgggaatagcttggaatgccaatccaagtgccatattcctgagtagactcacttgttagattgcttactaaggttagtgg

SEQ ID NO: 553983 - DNA, 624 bp, Homo sapiens
cagaggttgaaaggtctagatgtagttgagaaaagcgttcagaggaggcttgagtagagtttggtcaaggatagagtctttttcactagcaagaatgagaagctgttatcacccccaaaggagcaaagagaagaaggaacattatagggtctgggacttagaggaaagcagtcactgctaaaattttgacccagcaatgatggagctggctggggtggggaagactagggactgaaaaataagtacctcaatttgccataaaagatatggtgatgtgattaaagcagcacacattccttttggtgaacataggattttactatacctaggctataagaaaaagcttgttaygaataatggaggtgaccgtatgtgtatggcacatatgtgcatctgcatgtttgtgttgtttctgtagcagcagcatgacttgagcaccagctctgagccacgctgcctgtgttcatattctggctctgccacttactagcaatgtgaccttgggcaagttacttaatatttctatgcattaattctacatctatgcaatggggataatggtattgtctgctgtagaatagtatgagacatacaagttctgagaataagtttgggacttaatga

SEQ ID NO: 553984 - DNA, 1116 bp, Homo sapiens
aaaagtgaagtgtacatactattatatattgtaagaattttggtgctcttttggagtgctatgatatgttacctgatggaggtgagaagagggatagatatttgcaccatttatttttattctttcataaacattcccgtctattattctgtctttatatttaacatcagaagtgcacatttccattgaagttgaaaaataayggttcacaatccctgaatatgcaaaatttagtcaaaatgtctgtgccattgcatacaagaaatagtaagttatcggttaatagtttgccgatagtaagttattggcaaaactgttgcatgtgtctattatatgataaaacagaagtcagtttatagtttacattgggattccgaagtggcattggcataaatctgtatttaactggccttttaaaattgtcataactttccgtgtaataaaaggtgtctagcaccaccatgagtgtactgaagctggaaaaaagtggtgagaaggcgaaaggtttcaatttatagagaccatccttgggtataaacagaggcctgtaatggaaagcctactaggtaatcagaggaagcctgagacaaagactgtggctgaactctgcagtaaaggacagtctattggaaacaattcatttcaatatccacagggctacctgtgtagacaaaagaccaaggaacaagagggatttgagatgtctcagaagatttctgttttgacaaatgattcaaggaccaaaaagcacctgcatgccttgaatctataaaagacctatgggaactttactcagtcacatccccagaaaatgagagcaatgtgaccagaacatatctgtgatatctgccttactccacgtggagaatgtgatcagactggtcaatggagacacaagacacttacaggacttcttttaggaagcagaacacgtaaagcaaaaagtcactccatagggtttaaggtaaatttaagatgttcttcctcacaccttctcctaagatgtttacaatcaaatcattcttcaagtgttttaacaattaataactgtttgtagatatggaccattgtgtttagaccaaagagatgagattacccatgcatatatttgggcca

SEQ ID NO: 553985 - DNA, 1116 bp, Homo sapiens
aaaagtgaagtgtacatactattatatattgtaagaattttggtgctcttttggagtgctatgatatgttacctgatggaggtgagaagagggatagatatttgcaccatttatttttattctttcataaacattcccgtctattattctgtctttatatttaacatcagaagtgcacatttccattgaagttgaaaaataacggttcacaatccctgaatatgcaaaatttagtcaaaatgtctgtgccattgcatacaagaaatagtaagttatcggttaatagtttgccgatagtaagttattggcaaaactgttgcatgtgtctattatatgataaaacagaagtcagtttatagtttacattgggaytccgaagtggcattggcataaatctgtatttaactggccttttaaaattgtcataactttccgtgtaataaaaggtgtctagcaccaccatgagtgtactgaagctggaaaaaagtggtgagaaggcgaaaggtttcaatttatagagaccatccttgggtataaacagaggcctgtaatggaaagcctactaggtaatcagaggaagcctgagacaaagactgtggctgaactctgcagtaaaggacagtctattggaaacaattcatttcaatatccacagggctacctgtgtagacaaaagaccaaggaacaagagggatttgagatgtctcagaagatttctgttttgacaaatgattcaaggaccaaaaagcacctgcatgccttgaatctataaaagacctatgggaactttactcagtcacatccccagaaaatgagagcaatgtgaccagaacatatctgtgatatctgccttactccacgtggagaatgtgatcagactggtcaatggagacacaagacacttacaggacttcttttaggaagcagaacacgtaaagcaaaaagtcactccatagggtttaaggtaaatttaagatgttcttcctcacaccttctcctaagatgtttacaatcaaatcattcttcaagtgttttaacaattaataactgtttgtagatatggaccattgtgtttagaccaaagagatgagattacccatgcatatatttgggcca

SEQ ID NO: 553986 - DNA, 540 bp, Homo sapiens
catttcttatgcaacccccctcaaaataaaaataccttttctatttaagtgtctttaaattaagaaaactgtattaaatacattaaagataattttgaaaaaagcccagaactcccccctaccgcggccaaccaatttcaccaagctaaacttgtttaagtcacttaattatctaagtgaacaaagtggttcagaacatacactgcaaagtaaaattcctcacttcaaaatttggcaccaccgcttcctaactctgtgactctaggcaaattatytaagctctgcaacctcagtttcctcatctgtaaaacagaaaaaacaatagaagctaagtgtagagtcactgtgcagatgaaatgagctgattcactgggagcacagggcaccatttctgactcaatcaatgttagcagtgatgaatatttctgtctaccccttccccaggcagatatgttttattgagtctccacctctgcaggctctttttcatgattctttatcattatgccaaccattaaaatattcagggccaagcgaaac

SEQ ID NO: 553987 - DNA, 1145 bp, Homo sapiens
cagtctcactctgttgcccacgctgtagtccagtggcatgatcgcagctcactgcaacctctgcctcccgggctcaagcaattctcctgcctcagcctccccastacgtgggattacagacgtgtgccaccacgcccggctaatttttgtatttttaatagagatggggtttcaccatgttggtcaggctggtctcaaactcctgacctcaggtaatccacctgcctcagcctcccaaagtgctgggattacaggtgtgagccactgcgcccagccccttctcttcatcttgtgtccagcaagcatatttacattttgaaactaaacatgcacatgatatgacttcttgctagtgatttgtttccaggatctcctcctagtatatccaaggcaatgtactatttcatgggaggggaatggctttataaagcttttgtatctactctctcacagtaatttctggggagtctggggatttggatgacaactttcttcatttccaaatctgaatcagcattctggtttcttggctatctcatggagatctggaagaataataagtgctgcctttcattaggatacaactgcatctaaaggcctctaatcactttttaggatatatttaaaaaaatctaaacaagggcccccaaataaactacaagctttgtatttttttagaaaaactattatatggaataattaaactgacagagtcaaggggatcttttcaatactaatgaatgaagattgtattattattattattattattattattattattttgagacagagtctcgctctgtcacccaggctggagtgcagtggtgcgatcttggctcactacaagccccacctcccaggttcatgtcattctcctgcctcagcctcccgagtagctgggactacaggcgcctgccaccacgccctgctaattttctttttgtatttttagtagacacagggtttcactgtgttagccaggatggtctcgatctcctgacctcgtgatctgcccaccacgacctcccaaagtgctgggattacaggcgtgagccaccgcacccagccagattggattattaaaaagaaaaacactgatagcaaacagggattccaaatttattctttggcttaaaaaattt

SEQ ID NO: 553988 - DNA, 1145 bp, Homo sapiens
cagtctcactctgttgcccacgctgtagtccagtggcatgatcgcagctcactgcaacctctgcctcccgggctcaagcaattctcctgcctcagcctccccactacgtgggattacagacgtgtgccaccacgcccggctaatttttgtatttttaatagagatggggtttcaccatgttggtcaggctggtctcaaactcctgacctcaggtaatccacctgcctcagcctcccaaagtgctgggattacaggtgtgagccactgcgcccagccccttctcttcatcttgtgtccagcaagcatatttacattttgaaactaaacatgcacatgatatgacttcttgctagtgatttgtttccaggatctcctcctagtatatccaaggcaatgtactatttcatgggaggggaatggctttataaagctttygtatctactctctcacagtaatttctggggagtctggggatttggatgacaactttcttcatttccaaatctgaatcagcattctggtttcttggctatctcatggagatctggaagaataataagtgctgcctttcattaggatacaactgcatctaaaggcctctaatcactttttaggatatatttaaaaaaatctaaacaagggcccccaaataaactacaagctttgtatttttttagaaaaactattatatggaataattaaactgacagagtcaaggggatcttttcaatactaatgaatgaagattgtattattattattattattattattattattattttgagacagagtctcgctctgtcacccaggctggagtgcagtggtgcgatcttggctcactacaagccccacctcccaggttcatgtcattctcctgcctcagcctcccgagtagctgggactacaggcgcctgccaccacgccctgctaattttctttttgtatttttagtagacacagggtttcactgtgttagccaggatggtctcgatctcctgacctcgtgatctgcccaccacgacctcccaaagtgctgggattacaggcgtgagccaccgcacccagccagattggattattaaaaagaaaaacactgatagcaaacagggattccaaatttattctttggcttaaaaaattt

SEQ ID NO: 553989 - DNA, 1145 bp, Homo sapiens
cagtctcactctgttgcccacgctgtagtccagtggcatgatcgcagctcactgcaacctctgcctcccgggctcaagcaattctcctgcctcagcctccccactacgtgggattacagacgtgtgccaccacgcccggctaatttttgtatttttaatagagatggggtttcaccatgttggtcaggctggtctcaaactcctgacctcaggtaatccacctgcctcagcctcccaaagtgctgggattacaggtgtgagccactgcgcccagccccttctcttcatcttgtgtccagcaagcatatttacattttgaaactaaacatgcacatgatatgacttcttgctagtgatttgtttccaggatctcctcctagtatatccaaggcaatgtactatttcatgggaggggaatggctttataaagcttttgtatctactctctcacagtaatttctggggagtctggggatttggatgacaactttcttcatttccaaatctgaatcagcattctggtttcttggctatctcatggagatctggaagaataataagtgctgcctttcattaggatacaactgcatctaaaggcctctaatcactttttaggatatatttaaaaaaatctaaacaagggcccccaaataaactacaagctttgtatttttttagaaaaactattatatggaataattaaactgacagagtcaaggggatcttttcaatactaatgaatgaagattgtattattattattattatyattattattattattttgagacagagtctcgctctgtcacccaggctggagtgcagtggtgcgatcttggctcactacaagccccacctcccaggttcatgtcattctcctgcctcagcctcccgagtagctgggactacaggcgcctgccaccacgccctgctaattttctttttgtatttttagtagacacagggtttcactgtgttagccaggatggtctcgatctcctgacctcgtgatctgcccaccacgacctcccaaagtgctgggattacaggcgtgagccaccgcacccagccagattggattattaaaaagaaaaacactgatagcaaacagggattccaaatttattctttggcttaaaaaattt

SEQ ID NO: 553990 - DNA, 1145 bp, Homo sapiens
cagtctcactctgttgcccacgctgtagtccagtggcatgatcgcagctcactgcaacctctgcctcccgggctcaagcaattctcctgcctcagcctccccactacgtgggattacagacgtgtgccaccacgcccggctaatttttgtatttttaatagagatggggtttcaccatgttggtcaggctggtctcaaactcctgacctcaggtaatccacctgcctcagcctcccaaagtgctgggattacaggtgtgagccactgcgcccagccccttctcttcatcttgtgtccagcaagcatatttacattttgaaactaaacatgcacatgatatgacttcttgctagtgatttgtttccaggatctcctcctagtatatccaaggcaatgtactatttcatgggaggggaatggctttataaagcttttgtatctactctctcacagtaatttctggggagtctggggatttggatgacaactttcttcatttccaaatctgaatcagcattctggtttcttggctatctcatggagatctggaagaataataagtgctgcctttcattaggatacaactgcatctaaaggcctctaatcactttttaggatatatttaaaaaaatctaaacaagggcccccaaataaactacaagctttgtatttttttagaaaaactattatatggaataattaaactgacagagtcaaggggatcttttcaatactaatgaatgaagattgtattattattattattattatyattattattattttgagacagagtctcgctctgtcacccaggctggagtgcagtggtgcgatcttggctcactacaagccccacctcccaggttcatgtcattctcctgcctcagcctcccgagtagctgggactacaggcgcctgccaccacgccctgctaattttctttttgtatttttagtagacacagggtttcactgtgttagccaggatggtctcgatctcctgacctcgtgatctgcccaccacgacctcccaaagtgctgggattacaggcgtgagccaccgcacccagccagattggattattaaaaagaaaaacactgatagcaaacagggattccaaatttattctttggcttaaaaaattt

SEQ ID NO: 553991 - DNA, 595 bp, Homo sapiens
ggccttgaactcccgggctcaagtgatccagttgcctcagcttcccaaagtgctgggattacagatgggagccactgcgcctgagctggctgttgttgccctcaatatcattagtttcactgcaaaggaagaaactgaggcaagactctgggggactgggcaagtgcgggacgcagccaggaccaggcctgacaacacctctggcctgaagccagtgaacaggccaggatctgcgccaggccgggcatcccagaccatttggctgggagctgagggaagagggtccgtgcatgtcactacatagttaatcagtcaccttggacaagacccagggggcagactgaggcctgtgctggaggttgggcaacaagctgggaaaaggcattttgctctgaccaacaagggcaagaggcacatgcccaggcttaggatagcacaggggctgccagggatacagagggaactactctgaccagggggcaggaaggacacaaagggctcaggygcagacgggggctggggccactggccaaacaagctctggacagcatgggcaaagctcggcactgcagcaacagcactgctatggaaaggg

SEQ ID NO: 553992 - DNA, 1493 bp, Homo sapiens
gcagtctttgggcctctgctgtgcgcaggcctcctgtgccatgctggggctstaaagccaggagccgtggttctcagctgggggcgagcctgcctggcaggagatgtttggcgatgcctggagacatttttggttgccacaacggggagagggacagggcagctgctattggcatccagtgggtaggtggctgtgaggatcaagtaatttactacatgtaatgtgcttataacaatgcctagcatgtaagttctcaatatattttagctgctttttctgcattataatcatcttcataataattattgatgtaagactcctatctgcctctaagaacctcagagtctagagggtagacagacgagtgaatccatagatagacttcaatgtgggactctgtgggacctgggagtgtagaagagctgcctgatccagcctggggaaacagggagggcctccaggagggggtggctcaggtcaagtcatgatggataaatagtggcttgttaggagatgtaaggtcgggaggtatggaagggagttctgggtaaggggaacagcatgtgcgtgacatggaggtacagaggcccttgagcagcaacctctgaatcccccatccctgcttctatcttcttcctccctttggtactgatgcttcgtatgcaggccaggtacctcccatggtaggtgaaatggattttaggtggtccaccagtgaggacgttgtatgtgctaagaactatttttcagcgctattttctctttgaactagtcagaaggagtggagtttcaggccaggcatggtggctaatgcctgtaatcccagcactttggcaggccgaggtgggcagatcacttgaggtcaggagttcgagactagcctgaccaacatggtgaaaccctgtctctactgaaaacacaaaaaaattagccgggcatggtagtggtcacctgtaatcccagctactcaggaggctgaggcaggagaatcgcttgaacccgggaggcggaggttgcagtgagtcgagatcgcaccactgtactccagcctggcaacagagcaagactctgtctcaaaaaacaaaaaacaaacaaacaaaaaaggagtagcgcttcagtgaggtactgctgtaccattgacacctttctttctaacactggctcctccctttccctgttcctaggtcttgactttctggggtcttggaaatgttccatattttgattatgttggtggtagcaagaatgtatgacatttggcaaaactcgtcaaactctatactcaaaacactgacatctgtgtatatgagttataccgcagaagcattggcgggggcggggctgtataaagcctcagactcagagcctttgcccagccactgtgtcttgcttgaatttagtaagttttatttttattgtatttttaccctaccttctatttatggaggtgacattgattttccatctgcagtagtggtgtaaagtttcctttt

SEQ ID NO: 553993 - DNA, 590 bp, Homo sapiens
aaccttgagctagatgtcaggtgctagtctagattggaggatatgatactaacaagatgggcataatccctgtcctgggacttcagtcaaccttgacttttttttcagtctttcacttttctaatagattccagcctctggctccacccctgctgctgtgcaacccactgtgttgttcttgtctttttattatatataaaatatacataacataaagtatacataacataaaatgtaccatcttaactatttttaatgtaccattcagtggcgttaaggacattcacgttgttgtaaaactgtcttcatcatccatctccagaactctttttcatcttgaaaaaatraaactcagtaatgattaaactctcactccccacttcctcctccctccagcctctggcaaccagcattctactttctgtctctatgcatttgagtactccagggacctcatataagtggaggcatacagcatttgtcctgttatgactggcatatttcactttgcatattgtcctcaaggttcatccatgtcatagcgtgtgtcagaacttcctttctaaggctgaataatattccattgtata

SEQ ID NO: 553994 - DNA, 1104 bp, Homo sapiens
cgcataccccatgagagacaactttactatctatagtgcagtgcttatatgtcattcctgagtgtcattttaatagatttcgctcagactgtgacctctcaaggtgatccttcttattgtagaatctgtatttgtcgttcttgtttctgtaaatatgccctttacaacctgagcagagtggctgatgtatccagatagatttgcattaagtctggaccctgcatytgttttatcaacagatgttactaagacctccttgcctgtgtgctcttgataacattaatcttcctaaattctgggatagatattgactaaagtttcactagccatgagtttttattaggccctcgggaattctaaatttgactttttgaagagatgctattgggagacaccatataaaaggcaacattaaagaaatcctcacaattacgacactgagacagagtgtcattatttaactgggctgataagtctacataaagtaccaactaatagaagaaatgaactttaaacaaaaatccacagtatatctttttcgtttttcttttcttttttttctttcttttttttgagacggagtttcactcttgttgcccaggctggagtgcaatggcatgatctcggctcaccacagcctccacgtcccaggttcaagcgattctcctgcctcagcctccctagtagctgggattccaggcatgccccaatatgcctgacaaattttgtatttttagtagagacagagtttctccttgttggtcaggctggtctcaaactcttgatctcaggtgatccaccctcctcagcctcccaaagtgctgggattacaggcgtaagccaccaagcccagccaaaatccacagtatatcttattcccatgtgttgctaatactgtagtaaaccttatggcctatatttaaatcacaaagtctgttcagaacatggcaggcttctgttccttgcttccatttcatctacttggcatattaattctaggaaaacagctgaaggatactctttaatatgtcctaaaatagactttttaagtgcaacatcttgtcaagttatagatattttgttgcattcatttagagtcagtca

SEQ ID NO: 553995 - DNA, 1104 bp, Homo sapiens
cgcataccccatgagagacaactttactatctatagtgcagtgcttatatgtcattcctgagtgtcattttaatagatttcgctcagactgtgacctctcaaggtgatccttcttattgtagaatctgtatttgtcgttcttgtttctgtaaatatgccctttacaacctgagcagagtggctgatgtatccagatagatttgcattaagtctggaccctgcatttgttttatcaacagatgttactaagacctccttgcctgtgtgctcttgataacatyaatcttcctaaattctgggatagatattgactaaagtttcactagccatgagtttttattaggccctcgggaattctaaatttgactttttgaagagatgctattgggagacaccatataaaaggcaacattaaagaaatcctcacaattacgacactgagacagagtgtcattatttaactgggctgataagtctacataaagtaccaactaatagaagaaatgaactttaaacaaaaatccacagtatatctttttcgtttttcttttcttttttttctttcttttttttgagacggagtttcactcttgttgcccaggctggagtgcaatggcatgatctcggctcaccacagcctccacgtcccaggttcaagcgattctcctgcctcagcctccctagtagctgggattccaggcatgccccaatatgcctgacaaattttgtatttttagtagagacagagtttctccttgttggtcaggctggtctcaaactcttgatctcaggtgatccaccctcctcagcctcccaaagtgctgggattacaggcgtaagccaccaagcccagccaaaatccacagtatatcttattcccatgtgttgctaatactgtagtaaaccttatggcctatatttaaatcacaaagtctgttcagaacatggcaggcttctgttccttgcttccatttcatctacttggcatattaattctaggaaaacagctgaaggatactctttaatatgtcctaaaatagactttttaagtgcaacatcttgtcaagttatagatattttgttgcattcatttagagtcagtca

SEQ ID NO: 553996 - DNA, 495 bp, Homo sapiens
aaatggcgtgaatcacactgcataatggtcatctgtgcatgcattgtccctagccctaagctactttaggcagctgttgtagcctctttatctttcatagctagggtccagcatagtgcttaccatggagtagggatccaatatatatttattgaatagagattacataaatgaatggatgatcatttaagttataaccacctcctcatcccatagatgcattttccttttaactagtgtctcttaatgattaaatgttttctagagctaaatggataaatattgctgtaatttggacgtttgtacccccaaattttatgttgagattggatccccaccattggaggtggggcctaatggggrgtgtttgagtcctagaggtggatccctcatgaatggcttggtgctgtcctcctgttaatgagtgagttcttgctctattagttcccgagagagctagttgttataaagagcctggtacctcccatgtctctc

SEQ ID NO: 553997 - DNA, 567 bp, Homo sapiens
cctagcaacatcatttattaaaagttaataatttattaatattctttttctagtcaccaaacatatggtattatttaggcttttataaagatagctggttaggaataaactaatgaaacaatctggtctgtgatttaagtasaacagtttattttagcataaatattagtgaaaaaataacatattggcttcgtgaaagaagagggcatctccaagtcaggttggttttttttgttttttttttttgtttttttttttgactgaagaagaataggcacccctatgtctgcagtgaagcttatgtttgattttctctaactattttctgtgggatttattcaccactatttccactaacttactgataccataaaagatggggaactaagtaatatctctttaaaatcagagacaagagcttctgaggatcaaaactaatatttttatgttgacaaaaaaagtagattttaaaatacaaaaatcttcacttataaagattaaatataattagtttctcaaggaggtaatctagagaatcaataggctgccttaatatcatattccatc

SEQ ID NO: 553998 - DNA, 1276 bp, Homo sapiens
tcctgccttctaaggagccataatacgtagagaatcaatgaatagttgctttttcttctaaaacatttttttagcctgggaggtattatcaatatgaggttcctgctgccagccaagtatatggcagaatctagaaatgttaaaaattaattagctacctctgcggttgtcagaagccctgagaaatcagcttggaactaataagcccttgacctttcagtattggtgacgtacttgagattccagctgtccccagcttctgcaaaagggaggacattactagcttactaataataatttaatagtgtgtgaagaaatcaggggatgattctctttggtggaattaagtctatttctcagtcaagaagaaagcaatttataagtaaagatactcggcagtgctcagtggtatagtggagtcctggactctgggactgagttgtaaggtcagcgtaaaaagcaacactgaagttcagtcagaagttcccatgaaaattccttagggtttccctggaggtctgtgtgccattccttggtaagtttcatgtagccagtgtttcctctgacagaagttgggaccagtttctgtttctacagctgagcttcaggtaggagggcccgtgtgcagatctgcattctcaagcaccagaggcacccctcaggaccaggagatccagcctcatctcccactgcatgcctgatgtagagcatattctcattccttcagttaaaccaattaacgattgccaacaactttaagtgccagggacttaagtgttcagcagtgaacaagacagagttaatgccctcttggcacctaaggcaggaaacaaacaaatagatayatggtataatgccaaaaagtggtaagcactaagaaaaaaaaagtatgagcaggacatggtaatgggaaggtacgatctcacaagaaagatctctttgagagggacacacatgtctgagctgggaattgaaggagtgagccatggggagacaacattccaggcataaggaacagtgagtgccaaggccctgaggtgggacaagagatgacaagttaaaggagcaacagtgaggccaatgaggctggtgtcttgtcgtctcacgaggagggtggaaaaaggaggtgggggtgactaaatgatgtgcctattaagtgacatggtgggaggaatccgccgccccagtcaaatgctttttctctctttattgagagcttactaaatttgcataaacatctatatggcataactccattgaaccaacttttttttaa

SEQ ID NO: 553999 - DNA, 1206 bp, Homo sapiens
taggctgccctgctcaccaccatattcccaacacctagaatggtgcctggcacacgcagcagacattgagcaaatacattttttgaatgaatggggaaaaaacgttattgctagaacataattttgtagaaacgcagtaacttgaagttctgctctaacaaagagaaaataatttgctgttagcatgttgctgtggattttgtggccaatacttggtgcatcctgtgagactttcccaggaacatgggaatcagattgcctgggagaagcaaaccccagacctgcaaatartgggtcagaacggaagtgtgctgttacctttaaaaagagcaagtgggctgggtgccatggcacacacctgtattcccagttacttgggaggttgaggcaagaggatcacttgaggccaggagtttgaggctgcagtgtgtctgtgaatagcctctgtgctccagcctaggcaacaaaacaagaccccctctctaaataaataaacaccccatctctaaatcagtcagtcaatcttaaaggagcaaatgacttccagttctcaggactaggctctaaagaaagaacaggtccttcagaagagggagttgaacaagggagacacgtacccaggggcggagtccaggcatcaaggcccagtgaaaggcctgagctctagtgcctctgtggctattatttttacatattactaaagtgcatggatgttggacacaaccatggggctctcccacagactgtcctgtagtaatcaccatcacatggccaaccctaactggacactcactgtactgctgacttggcattcaacataatgttttccaatttaattaactgggaatcccccccacagccttcctaggataatttgcctcccatgttatttgtgtagatgaagagaattcaccaatagacctggacatctgtggtggctcacgcctccaatcccagcactttgggaggccaaggcaggcgggccacttgaggccaggagttaaagtttgtttttaggattctgacttttaactcccagcatcagacatcagtgtgtgtacatttttacagatactgtgtagaattacctatgtgtttgtgtggatttcttagctcactttttgcatctttttttttgagaatgagtctcgccatcttgcccaggctgtagtgcagtggtgagatcttggctcactgcaacctctg

SEQ ID NO: 554000 - DNA, 1417 bp, Homo sapiens
attcaaaacctcttttttgtcttggcttatttagagtgcttgtacctggtgcctgagaaccaagttggatgtgggctctgtttagagatatagcctctttgagctttgtgtgcagatatttaccaatcttgtgcctcagtgrccccaccatgtcttttcctatggcattgtttaatcctaagacttctgtcgtttaaggtttttacccttgccttgacatcccttttagctagggcattacccttggaaggctctaaaacagaggttgccattgacatttctgaagtctatgcccctaagcacatctgccgtgcagttcttatttttcctctgcttttagatgttacaggccttgagtaacattttttttcactgtaatatttttctccagtaatgggatatgtctctaatgcttcattttccttgctagtttctctttgccttttaagaaaagctcagctgagattctgacagtttaactttcttctttagtttgttcctttcattctctaccacaacatggaaggctactggtattagctggactaagcactctctttcctttctcctttttgatctctgccctagacagggatgatactcaagtatttaacaattagtatggcacagtcactaaccaatagaaagaaatgctgactgtaaataagacatatggccatgttggtatatactggtgcggaatatcagcccagccctagacattggctttttaaaaatttatgagatatgtatatacatatattttatagtgggcggctttacagtaagacatgataagtcagtgaattctggtcaataaggtaatctattgttcaagcatatccactttggcttccaaacctggattggtaaacctaatagtagtattgcagcagaccaacatctaaaccagaacaggatttcatcttttattgttttccccaggtccctgttagtattttttctgtattcctcatattctcttagaggtcaagtttcacgaattttggcatacttcaatagctgcatctgcaccattgtgtgctggagctggctctcattggctcatagagctggctgtgcgcatctcttccaactttgtgttcagtgactttacattgaatgcttgaaatcagtcatggagggagtattcatatctcagagattgacaaatgctacgaataaggttattattttccagagagtgggttgttaaacaataaccaacacaattccacctacaataactagtctccttgaaatttaccccaataatgctgcaagtattttaagatgatctttcctaaagtagtctaatttcttctcctgaaaccttttgtatagctattccaactttcaagaagtggttctccagttgctgtttcataaattaccttcagcgttaaaaggcgcgttt

SEQ ID NO: 554001 - DNA, 1417 bp, Homo sapiens
attcaaaacctcttttttgtcttggcttatttagagtgcttgtacctggtgcctgagaaccaagttggatgtgggctctgtttagagatatagcctctttgagctttgtgtgcagatatttaccaatcttgtgcctcagtgaccccaccatgtcttttcctatggcattgtttaatcctaagacttctgtcgtttaaggtttttacccttgccttgacatcccttttagctagggcattacccttggaaggctctaaaacagaggttgccattgacatttctgaagtctatgcccctaagcacatctgccgtgcagttcttatttttcctctgcttttagatgttacaggccttgagtaacattttttttcactgtaatatttttctccagtaatgggatatgtctctaatgcttcattttccttgctagtttctctttgccttttaagaaaagctcagctgagattctgacagtttaactttcttctttagtttgttcctttcattctctaccacaacatggaaggctacyggtattagctggactaagcactctctttcctttctcctttttgatctctgccctagacagggatgatactcaagtatttaacaattagtatggcacagtcactaaccaatagaaagaaatgctgactgtaaataagacatatggccatgttggtatatactggtgcggaatatcagcccagccctagacattggctttttaaaaatttatgagatatgtatatacatatattttatagtgggcggctttacagtaagacatgataagtcagtgaattctggtcaataaggtaatctattgttcaagcatatccactttggcttccaaacctggattggtaaacctaatagtagtattgcagcagaccaacatctaaaccagaacaggatttcatcttttattgttttccccaggtccctgttagtattttttctgtattcctcatattctcttagaggtcaagtttcacgaattttggcatacttcaatagctgcatctgcaccattgtgtgctggagctggctctcattggctcatagagctggctgtgcgcatctcttccaactttgtgttcagtgactttacattgaatgcttgaaatcagtcatggagggagtattcatatctcagagattgacaaatgctacgaataaggttattattttccagagagtgggttgttaaacaataaccaacacaattccacctacaataactagtctccttgaaatttaccccaataatgctgcaagtattttaagatgatctttcctaaagtagtctaatttcttctcctgaaaccttttgtatagctattccaactttcaagaagtggttctccagttgctgtttcataaattaccttcagcgttaaaaggcgcgttt

SEQ ID NO: 554002 - DNA, 516 bp, Homo sapiens
gcctcaggcgccaaggaaggcttcaaggaagagggaacatgcaggatgaaaacccctatgtggctttagatatgaaggagagaaaygcaggccacacggctggaaaagcagcctgagaccaagctgtgcagtcctgaaggcttgctgggtgcacctgctgtgaagacaggagtttggattttattctgtgaatgatgggagccagcaagtatttttctaaaatggagtcaatgtaagatcagaatctacgttttattacaatgactctaattacaatgtagaaggcacattaacgggaggttgagtcactttggaagctactgccatggtccaagtgggagagaatgatgggatggacaaaaggaaatggatttgtgagtgactgtggaagggaactgagaggactgagtggatttgaaggagacaaaggagtgaggctggaagggtcagagggtggcagccttggagcctggccaaacagagtttgaatctcgactctcttgagtgacagctgag

SEQ ID NO: 554003 - DNA, 1680 bp, Homo sapiens
ccccttgttggctttttcctttactattttattaaatccatcatttctactcccaatgctgctaagagcttcatattctcatttgccaccagcctgtaggagagacttctaactggatcctcagcctcaagactcaaaaccccttcctcccctcccactatccatagctagaatagccaggcatatacacacaaacatacacgcacacaccacagcccctccattgccttctgctgcttaaaggataatgtctaactctttaatctggcattcctaatcctccctgcctctccacatttgattatcacaactttccaaactaatatgatagtcctggatgtcctaaaggatatattaaggatattattccattaaatactctccaagatcaacaaatgtatttggtagagaaatatgtaactcattaatactatatgaaggctctgacaagtcctgcaataaagaaacagtaaagaaacagcctagcatttcccagggcaatctggcccaggaacccttgtgtagcagcatgtgtagtagccgctttctttgattctctgaatgtcctttcttgcctgcactccagccatctgctctgccttccatttgttcatctgccttggctttcctttgagagcctgctccagcctcacctcctccttcctcctccccattctaccatcactcctcttggctgcttcctcctcacacctgaagcactcactgcctgtacctctttgttgagagatagtagagcacaatagttaagagcccagattttggattcagaaagacctgtgtcaaaatcccaattctgccctcactaactctgaaatggagttgttcagttgcttggtgtagacagagatagaatccataaagaggactatggaggggactagtgggattagaaggtcaaatgtagcacaaggcctagcacatcacaggtattcaataaataacaattagtcattcttcctcttgttttttatcattgctttgtcatttatcattttctgggttctcctgcccctaccctttgcataaatcaagcttaacaaatacgtgctgataagccaccagcagcaacagctccatcttccatgggacagcaggaagacaccccaacctgccagccctgagcacaccatccgccccagcacaccatctgccccagcctaccagccctgagcaagaggctctcccaggcaatcaagtcctagaacttcacagaacccctcaatgttaccacccagccctgtccccaccgcctgtttgcttactgcacccctgggaagggatgcggaggcagggcatcccactttggttttgaaaaccaaagtgggccaggcgcggtgactcccacctctaatcccagcactttgggaagtagaggcagatggatcacctgaggtcaggagttcgagaccagcctggccaacatggtgaaaacctgtctctactaaaaatacaaaattaggcgtggtggtgcgtgtctgtaatcccagctactcgggtggctgaggcaagagaatcgcttgaatccaggaggcagaggttgcagtgagcagatatcatgtcactgcactccagcctgggcaacagagtgagaccccatctcaaaaaaaaaaaaaraaaaagaaagaaagaaaaccaaagtgaacagatctcacccaaacc

SEQ ID NO: 554004 - DNA, 594 bp, Homo sapiens
ggccgaattcgcggccagcttccaggtgtgccggggcctctcsttgcttttaacagtccagccagagagggttcagttagtgagagtatcttcccatgatcaaacacagatgcccgagtttctcttcactatttcttccgcttcagtttcatatcttttttgttctttgtctctctgttcttcaacttcttgctctgtttgggttcttgtttggcctctaacttccttttcttgtcactagagaaaaatcaaaaatagaaagaatgaaatatgtacagatctgaacatctgagactgctttaagcttgctttgctttgtcaaaaagggtttccaccgtctgaaacttgatgtaggccacccaattggacattaatgttctctgcaaacctattagggggcaggcattgtgctggggctggggacacaccatacagaccagttcctgccctgagccagctcttagtctgtggaagaacaaatctcgatcttaacacctgaaatccgggttctcctcagggtgcagtacactctgctcccctctcccaagacagacctaaggcaccacaaggattccccaccaccactctcaccac

SEQ ID NO: 554005 - DNA, 536 bp, Homo sapiens
ctaaaatgtccaggagcacctccagcccttataatacggtgttggcacacacttaggtgcacattaagtatcgtagagaactagaatgagcacatgcacctccagtaactaaatggctttctggaacagcgtcgtgtccgtggatagctcccgcgtatggtaatacagaagtggatcttcactgggcttcgctcaggcggcggccacgcaggttctggggatggaagagaacttgacttatccgaktccaagctatgcgggaccaggttctaccgcaggcagtggaaggaggcacgagctttggcctttctttcagcgcatctggggcgcctcttcatcttgtaaacgcggggctcagctgggacagtatttcttcaagacctggggttagaacaaggacagggttattcgctgtgcttagtcaggatacaaggagggaactcggcacacgataagtatcaggttggtttctcatcccgcgccgatgcccgcccacctctctttcgcctgggcggcgcggacccgaacctgcggag

SEQ ID NO: 554006 - DNA, 552 bp, Homo sapiens
ggaaatgcagaaatcacccatcttctgtttcactcacgctgggagctgtagaccagagctgttcctatttggccatcttggctcggtccccgcccttttacttaatcaacacatcactccaacaattctcccatctctcctttattacatttagcaatatataaaaataataaaacttcaaaagcaaatcagrtatgtcttgggaatgcaaaactggttcaataaaaaatgtaacccaccatatgaaacagattgaagaaaaaagcccatattattgtatcaattgatgcagagaatcaactggaaaagttcaacactcattcgtgactttaaataaaacactcaacaaataggaatagaaaaggatttactcaacttgataaaaagtatctatgatctgggcactctggctcatgcctgtaatcccagcattttgggggccaaggtgggcagatgtcataaggtcaacagctcaagaccagcctggccaacatggtgaaaccctgattctactaaaaatacaaaaattacctgggcatggcggcatgtgcc

SEQ ID NO: 554007 - DNA, 552 bp, Homo sapiens
ggaaatgcagaaatcacccatcttctgtttcactcacgctgggagctgtagaccagagctgttcctatttggccatcttggctcggtccccgcccttttacttaatcaacacatcactccaacaattctcccatctctcctttattacatttagcaatatataaaaataataaaacttcaaaagcaaatcagatatgtcttgggaatgcaaaactggttcaataaaaaatgtaacccaccatatgaaacagattgaagaaaaaagcccatattattgtatcaattgatgcagagaatcaactggaaaagttcaacactcattcgtgactttaaataaaacactcaacaaataggaatagaaarggatttactcaacttgataaaaagtatctatgatctgggcactctggctcatgcctgtaatcccagcattttgggggccaaggtgggcagatgtcataaggtcaacagctcaagaccagcctggccaacatggtgaaaccctgattctactaaaaatacaaaaattacctgggcatggcggcatgtgcc

SEQ ID NO: 554008 - DNA, 658 bp, Homo sapiens
cctaaagttattgctcactattgcttcttagacatttcatctcccccatcttggaaacattttctgatttaattgtaatttgctggaggaattttccatttcttcagaaagggtgcatggttaatatgctttctggcccttgcatgtgtgaagcagtatcaacattaccctcataagtaaatgaatacatggactcaagctgctacatgtttctctcaacattttataaatgagatactataacttccagttttatatagcaraaaagaaatgcttccctgtgattatctgcctttttttgtacatacttagttatttctgttttggaagtttccgtgatattttatcgtgatatttcaccagatatgtctaggagtgtatattttgttcattaatcctatttggtacccaatgaacactttttatctgaaaacttgattacttttaaagctcagataagttttctttctcaaatttcttgaattattgctttccctctctttatttaccttctctccttctggaaattctattcttggcataaatctcttggcttgttctgtattttctttttttactcataatttctatttctttatgtttatttttcttttttagatagtttctacatttgaactttcaaatcacttattcagtt

SEQ ID NO: 554009 - DNA, 620 bp, Homo sapiens
ttccttaaaaatactaatgacattctaaacatgattcataattggtaagtgggtgagtcaaggaaaagtacataccttggaactaacagctaagaaatatgatcacattagcaccagaaattgatttttttctcaagctgtttgccaattgtgtattgattagtcattgtccttgaaaatcaagctactattgatctgtatcaagtacctaaactcctcaagaaatatttgtgggttttgatgaattacaaaatagaataagaacataatagtctggtctatgcaattttcattatttacatttctgaaataactctgtgcatctttctttccttgttaactgatatcacctagataatgaaacctttctttccaaattacttctaggctttgtgaagtggttttggataatttcatgataaacgatctcaggakatgcttgatctacctaaggtcttgaatgtcataggtttttttgtttgtttctttgcttgtttgtttgtttgttttttgagacagagtcttgctctgtcacccaggctggagtgcagtggtgtgatctcggctcactgcaagctccgcctcctgggttcacgccgaatgtcctagttttttagttg

SEQ ID NO: 554010 - DNA, 609 bp, Homo sapiens
atgtacactccacctatctgcttggagaccctcggtggcagttgggagcttgcagacaatgtaacttataaacccaaagctgcaacttttccaagaaagggaaattgattatcttccagaaaagtacattacttttgcaggtagctctgatggtttaaaagttcttcctgtattgagtcgaagtataacacctgtgctttgtgtccaccgggtactagtttggccttatgcagaataccgggcatgtttatgagcagttttatccttcctgatgggaatgggaatgatggtcccatttactacttggagctgaaatcttactaagttatattatcagagtagkgcagtctagcccattctccaccatagagattgaggagagggaaacaaaagcagtaaattatagacagtatctacacgaataggggaggaaggggtaggaggtaccatttatacactatggttgcttaagtgttcttcatagaacttagcatctaatactataacatataatattctatctatatgttatctggctctaattgaatacaaaaatatatatttctggccgggggcggtgcctcacacctgtaatcccagcactttggg

SEQ ID NO: 554011 - DNA, 609 bp, Homo sapiens
atgtacactccacctatctgcttggagaccctcggtggcagttgggagcttgcagacaatgtaacttataaacccaaagctgcaacttttccaagaaagggaaattgattatcttccagaaaagtacattacttttgcaggtagctctgatggtttaaaagttcttcctgtattgagtcgaagtataacacctgtgctttgtgtccaccgggtactagtttggccttatgcagaataccgggcatgtttatgagcagttttatccttcctgatgggaatgggaatgatggtcccatttactacttggagctgaaatcttactaagttatattatcagagtagtgcagtctagcccattctccaccatagagattgaggagagggaaacaaaagcagtaaattatagacagtatctacacgaataggggaggaaggggtaggaggtaccatttatacactatggttgcttaagtgttcttcatagaacttagcatctaatactataacatataatattctatctatatgttatctggctctaattgaatacaaaaatawatatttctggccgggggcggtgcctcacacctgtaatcccagcactttggg

SEQ ID NO: 554012 - DNA, 544 bp, Homo sapiens
tcactgtatttcaaaacatgaagaatttcattgtaatgttacctaataagtgagccagcacttctactctgtgagaaagtaggaaaactcttgggacaatcagagatgatgtgatgtaatgtccattagttcttcctgtgaataatcctgagggaaagcccccaggtccctcccagaatggggtggatatttcccaatacagctaaggaattatcccttgtaaataccacagacccgcccctggagccaggccaagctggactgcataaagattggtatggccttagctcttagccaaacaccttcctgacaccatgagggccagcagcttcttgatcgtggtggtgttcctcatcgctgggacgctggttctagaggcagctgtcacgggaggtgagtgaacaggtgacctgctgggctgggttggactaaggggagaccctctgggacaccctgggccaggacagggagcactwctgaagcagtaggcagcactggagcccagatttcagctttctgttctttgccatcatattcagaaaaa

SEQ ID NO: 554013 - DNA, 634 bp, Homo sapiens
tccaaaaaaaaaaaaaaagatctggaaagctctggtggtgtatctcattttaaagcaaagcataatctaagactgataagaaaaaaacaataatgacatctttgctggtgtgacagatgcctctagttattagatactyttaagagttttcttaggggtctaacttgagagcagaagacagttaatttctttctcacatccttcattcctcagcatacagggaattccttgaagatttcttttgataactggctgtgtcattctaaaagaaaaaaatacataaaaaattcagtgcagttttctcacatctgagctctgatattaaaccttaaagttgttgtaggatttatatgaaccagaattctctaattgtgtattttgaattattactttaatgctataacaacacatgctcacattcctatgtactgtcaaaggtttaatgaatttagtggtttttcttctaaaaccaggtttgacttaatatgactcccacatttattgtattaacaatagtttacttcttagacatgagtggaagtgcaaagtaaagtgctttactaaagtcaaaaatcagctgggcatggtggctcacacttgtagtcccaacactttgggaggccaaggcggacag

SEQ ID NO: 554014 - DNA, 1551 bp, Homo sapiens
cgaacaattcataaattgtaaattacatgccgatttgagtagtgtaatgaaatctcaaactctctccctccctcccacctgggacataaatcatcactttgtccatcatatccatgctgtgtatgttacctacctattagtcacttagtagccctagagctgtctcagttatcagatctactgttgtggtatggcagtgcatgtgttcaagttactgttattttacttcataaaggttgtacaacataacagtagttatgctgacaaattgttataattgttttattttagtattaattattgttaatctcttgctgtgcctaatttataaattaaactttgtcataggtatgtatgtatagaaaaaaatagtatatatagagttcagtactatccaccaattcagttatccactgggagtctcgaaacatatttcccatgtataatgggagactactatagttacgctgctgtttctaggcaaagttgtcatgaacttggaggctattagctcaattgatgcagatttaaggtcctttaataaaacaggagatgaaagctaaaactaacatttgagtggcacagccattttcttgcaacctgcagtggcatgaccatagccattggttgccactgttcgctgctctccccgctgtttcagttccagtgcaaatctgtgagggcagcactcctttgaaagacttaatgaatcacatataattataacagccgatagattttaaggggtagccatttttatctttcagatagacttaatctagcatttttatattacagtatcagctgtttgtcatattgataaaaaataagagaagaatgatttaaagtttattatttcaggtgtaatgtgaattgctcacattttcattgtgctgagaaactagagcagaaggacacatggtagcagcaggaagcttctacaactatcttgatgacttgttactttgacagtttctatgagaaccccagctgtgaccaaggtaagtgggatggtgtcactttgacactgcagctgctctgttggcaagtagagttctgtgtgatccttgggaagacaaaatatataacatttcaaagaggggccactttactgttatatcaatacctgcaagtcttgaatgagttgagtggtggaaacaaagtcttaattcattgtttgaaaaaactagaatctctgtcttaccagaagttgagagaagactaaaactgaaagacagatgtgtggccaattaggtatgtcaggctatttccttcatttttatgtcatacgtgagttcatagttttctaaacccattcaaaattaatggacaaagaagacaatgtacactcgactattgaaaactgttgttagagcagagctgagcagttactttaggctagttgggaaagcataacmatctacaattatttgaagctataaatattgaggcaggagagaaggcatttaatagagtagaaaagaattcaataatgagaagtgaagtaatgcttacagcctggccattttattaggaatcactacatgacat

SEQ ID NO: 554015 - DNA, 1528 bp, Homo sapiens
aaatcaccctgggttcttgttagaacggagtatttatgggtgctactgagaccttctgaatcaggatctctgaggctatggccaggatgtgacattttaaataagctccccagatattctaagtgttggtctatagcttggtaacttgtgacatgctctccttcttacaagatcatgatggtggtgatgatgttgatgatgatggggggaatggggaggatgatgatggtggtggtgatggaagatacaataaaattccttcatatgtcaaaaaaatacacacaatagtcaataagcatagcatataaaaaggtggtcaaaatcagtaattatgaaaacacaaatcaaaaccacaatgatatatcaccttacaccttttagcatggttgttatttaaaaaaaatagataaccaatgttaacaagcatgtggagaagaaataatctttgtacacagtcggtgaggatgtaaattgtgcaaccattatggagaatagtatggaggttcctgaaaaaattaaaactggagctactatatgattcagcaatcctacttctaagtatatattcaaaggacttaaaatcagtgcattgaagagatatctgcactcccctgttcactgtagcattattcacaatagcccacatatggaagcaagcttagtgtctatcaacagatgaaagaataacgaatatgtggtgcatataaacaatgaagtacaatacagctttagaaaaggaagaaaatcctgtcatttgtgacatcatggatgaacctgggagacattaggctaactgaagtaagccagacacagaaagacagaaactgcacggtcttacttacatgtggaatctgaaaaagtcaaactcatagaagcagagagtagaggggtggttaaccaggggatgaggggtaaggaaatggggaaatgttgattaaagggtacaaactttacagggtttgtacatccattacagggtacatccattacaggatgaaaaagttctagagacctaatgtaaaacttggtgactattgttaataataatgtattgaatatttgacatttgctaaaagggtagatcttgagtgtttgcaacacaaagaaggtaattatttgaagtaattgatatgttcattacttgattaaggtaatcatttcacaatgtatacatatatcaaaacatcawgttgtatgtctgggtgtggtgactcatgcctgtaatcccagcactttggaaggctgaggtaggtggatcacgaggtcaggaattctgaacatggtgaaagtccgtcctactaaaaatacaaaaaagctgggtgtggtggcacacctgtagtcccagctatttgggaggctgaagtgggaggatcacgtgaacctgggaggcagaggttgcagtgagccgagattgtgccactgcactccagcctgggtgacaaagcgagactccgtctcaaaaaacaaaacaaaacaaaaaaacctcataatgatctttacataataaactaataggctacaattttta

SEQ ID NO: 554016 - DNA, 2464 bp, Homo sapiens
tgggcttgggtgctgggccagcaggcaagagcttcaccctgttggcgggcacaatgccctgctggccgtgtagggagcagaggcaccagccgtccagtccaccagcgccctctctctgcaggacccgtaggacatcccctcggcggaaggacagctcctggggggactcagcggtgttgtcatacagtgcccgggccagctgggtctggttggggaggtgggagtggggagaagggtcttcagacccctttcaggtcacgtcacccctgcttagaacccttcggagctccgcatttccctcaagctaaaaaacctgaactctggatgcagctttctgcctgggccctagcttctctccagcttcaccgcttgcattctccctcttcctttcagttccttcaactagaccagctctcctcagagaggccgattctttactcttctccccgccccattctctgtttgtctccacctattgtttccatcctcgtactttatactatttgtctatttgcttcttttgtatcgatttcttcccttatactgtaaaccctatgaacataggaacggctatatttctagtccttgcaataaggcctgacctggaattggtcattacacatgttgaatgaatgtcttccaaaacatrtgaagccctgctacagtctctcatagaccttctctctgttcccaagtcattatccctcactagcaaaaggttagattaagcagccacagagacctctcattctgagagactgggagaggcctagtccagacagtgtgcctaggcataataagaaagaaaacagaaacaaagcaattgttttgctctcagtctgagcaaataagtttctaccagaagaggctgaggttaccatggagaaaagtgtgtattcttgtgtgtgtgtcaccactgcctgggatccttccagcaggcatcatcatttagcaatgggcccttccattgcaggacagagtgtgtctttgtgtgtgtgtgtgaagggggttggcaggccaaccaaaaggaaacatgtatcattctgtttccagtcctgtctggtgggggcttataagctttttccatcaagggccacaggctcaggtaataactcacaggtaccaagtgcaaacaacgtttccagacactgtgcaaatctttgcattaatcaactcatctcatttaattctcacaacaaccttacgagggagggactgtcattaccccattttggaaagaaaactggaagagggaggttagtactttgtctgatgccatatcgctggcacagcttgtggagcataatctgaaccctaagctgcttgatcccagagcctgcgctctcaatcacttgtgctactgcttctccacaattacaaatgtaggaatctacttaaaagaaagagtagtaacagtggctgagagggtccctaactcaaaagcaagtcaagcgcataggaaagccttcttataccctatttccctttgctataacccttcgcagtgctcttgctccatgatgtcatttggtagaatcaagctaaaaccactcaaaacatacaattacattcagcttcagttttgattgctaaatgatgatgcttgctggtaggatcccaggcagtggtgacttacatgtagtgttggagagcagctagttaggcattactagccaggtagccaaacggactgactaattcagcaaaaaaatctcaaagttaaagatctcaggcaggctgccaccagaccctggggagaaggatgccctgctagagtcagcaggagtgcatattcctcttagctgatgtttccctctggtggtgaggttatccggcctctcatggctgggtgattttaacaacaaattgacccctcttcttgcctgattcccaactcatcaaaccattttctgattatattttggtttctaaaggatattgtcccacacaaagaaacgtgctaaccagatgacacaaattcccggttagtgctgcacttttctttttagttgtaaattataaatcagtcttttggatctagccaggggattaaaagcacagttctagaggcagacctgggcttgagtcttggctgtgtctctttcttttaaaattttatttaaaatatttctttagagatcagctcttgatctgtggtccagactggagtgcagtggcacaatcataactcactgtaacctcgaatgcctgggttcagcctcctaaatacctgggattaccgttgcgacccactgcttggaggtctgtccctttctttttctttctttcttttttttttttttgagacggagttttgctctgtcgcccaggctggagtgcagtggtgcgatctcggctcactgcaagctccgcctcccgggttcacgccattctcctgcctcagcctcccgagtagctgggactacaggcgcccaccaccacgcccggctaattttttgtattt

SEQ ID NO: 554017 - DNA, 1451 bp, Homo sapiens
ttcctgtccctccggacatgacagcagcaatccattccctgtctgaccagatcactaggaaacgccattcataatcttcccctctattgattctggtcagtgggtattggcagcttaaaaagattatgttttaattggggaccagatagatggcgttttaaggttttgagtttcacttcatgccgtgctatggattatttgagaggttgttcaacacaaggaggacaaagattaatgtgttgtccttttctttgagtgaccctgggtgcaaatgtagcttgggctaaagtgactgaaaatctttttctatcacagggctgaaaaggttgactgtgaattcattagtgttatctttgtttagggcataaagtctacacattaactggcttaagtagaacacacattttctccaggctcagcaagcctcaagtggctggggaaaagtgggggcctccaagctgggtcagggtgaacagtttaggagccaacaacccaggactcttagaagctgctgtttccctgattttgtagagaagagaatcataatactagtagttagctggggacaagatgggtgggaagattagatggtgtctctgcaaagggcttgtaaactgggaactctggaataaaaacataacagcgagtagttgtgaagtattcatgaggggccgagcgcttttgtacatgatctcttatgtaattgcagcaagtggaagcccttgcattgtgatgtctcttctagagatgcggacactggagccagaggccaagccatttacccaaggccaagctgctttgccaaggccatggagatagtggtggctggataaccaccaagcctggtctctgcctccagctggggtcttgccctcgtctactttatactttataagtgcaaccactatggcctgggtggtcaatcacacaccaactgatatgatcaccatggtctgaattctcccaggggaccagccttctggtcttagcacccttccctgcaccctcacacagggtctgatggctccacttcctgtttatcagggaacctcagtgagctcaaggactgtccttattcagcttactctgtgccagaggcccgtggtcaccaaacctctctaatgaagaagctgaggaagaagctgacctcaattacatgtcgtgaacagccaccatcttgttttgttctctcatctctccctgctgtgccctcagtgtaaagtgagtgtgcactcactcataaggcagtggtgtggtcatggccatcgtcatcatcgtaytggcttgccagggctgctatcaccaagtcctgctcattgggtggcctaaacaacagacatttgttgcctcacagttccggaggtgagaaatctgaaataaaggggtggcaaggcagggttgtttgttttttctgagagcactgagggagaatctgttccaggcctcactcc

SEQ ID NO: 554018 - DNA, 898 bp, Homo sapiens
gcataggggatttcttttccaagttgtcatcttccttctccaaaactaggtagaaggcagctccttgggaattgtgttggatgaggttgtgtgttcctgagaacattgctgggcaggtcgactgccatcctttttcagctgcttacagaaggaacatggctgggtcttcccctggtctttgtctctgctgtggactrtgatagtcgagtcttgcatttggcggaatccacaatggctgtcacccaggcaggcctgtctgggaccagtgatgagctagtgctgagggacactgcatgttttctcttttgtacacagaaggtggtcatacctcctctcactatgcccaggcctgggacaatgcaggaggaccctagtggcctgaaatctatgttggcttgtcacttaattgacaatagaagaaatttatgaactggcaaaaaaaaaaaatgctactgcttaaaataaccacaaaccattcgacatacctcacattgaaagctgagcattaccgctcacacaatgacagcatccgtaagagggtgccagatgtgtgtgtggggagcttgcgtgcgtggatctggttctcattctttgtgtagcatcggacccaataacttttttttttttcattttcactggacacttattttattccttcggttttctggccagctgttgttcatggctctttctgtcctatagaatgcagatatagtcattgaaaccctaagttacctagtcgaaaccccaagtgaaaccccaagttacctaggaagggaaggtacaaggacaaggaagggtagggagggagccgcgtctagagcaaggcccatgggggccagcaccctgggtgaccacagccatcctcggtagactttaaacaacaacctactgaatg

SEQ ID NO: 554019 - DNA, 898 bp, Homo sapiens
gcataggggatttcttttccaagttgtcatcttccttctccaaaactaggtagaaggcagctccttgggaattgtgttggatgaggttgtgtgttcctgagaacattgctgggcaggtcgactgccatcctttttcagctgcttacagaaggaacatggctgggtcttcccctggtctttgtctctgctgtggactatgatagtcgagtcttgcatttggcggaatccacaatggctgtcacccaggcaggcctgtctgggaccagtgatgagctagtgctgagggacactgcatgttttctcttttgtasacagaaggtggtcatacctcctctcactatgcccaggcctgggacaatgcaggaggaccctagtggcctgaaatctatgttggcttgtcacttaattgacaatagaagaaatttatgaactggcaaaaaaaaaaaatgctactgcttaaaataaccacaaaccattcgacatacctcacattgaaagctgagcattaccgctcacacaatgacagcatccgtaagagggtgccagatgtgtgtgtggggagcttgcgtgcgtggatctggttctcattctttgtgtagcatcggacccaataacttttttttttttcattttcactggacacttattttattccttcggttttctggccagctgttgttcatggctctttctgtcctatagaatgcagatatagtcattgaaaccctaagttacctagtcgaaaccccaagtgaaaccccaagttacctaggaagggaaggtacaaggacaaggaagggtagggagggagccgcgtctagagcaaggcccatgggggccagcaccctgggtgaccacagccatcctcggtagactttaaacaacaacctactgaatg

SEQ ID NO: 554020 - DNA, 1449 bp, Homo sapiens
tcgcaccctgggaattccaacattcagggacttgcagaactttccagctgaacttggtgggcatttggctgcagccctgccgtctgtggaggcgactagtctcagagaggggaaggggtagggattgaggggcccatgactcccgccctcctgtatttgggagcaggaggaagcaggtggaggagcagtgtcattgcagaccgcagtgtccgctttattggaacagctgattcaagagctaggcttagatcagaggccaaatgcaaatccctgagactttctgtgcagagttaaattcacacacagccgcgagcccccttcccatcctgaaaagagggtctgagctgcaccccgtcagttccccatcccaaagtcaccatcagctaagtgactcctcctcccagggacaagattgagtcaagggctagtgaaagaagaggccagactgtttacctctcacttttttatcctgcagaggggagaacaaactcttccctctcttccctctctacatgtctcagatcacacatgtaggctgttggtggtggagttggaattagagaaacgcattatcgagcacaacatgttgagaggtctggcaagaaagagacagcctcctgcacagctggcatctggggagagtgtaacccagggactggtcccagagttggcaaggcaaggggtacagacacatcgcggactagtgaggggatggcattaccaccccagtgttgcaggggcacgtggagaaactgtggcgggagccctgtgggagctgagcttggctgaagccacagagcaaaggaactggggtagtgacgtcatgtggcaacctctccaggcacagggcctcagaggaagaatcccaaggggtggagaaggcatcccgaggggtggaggagggatcccagtggatggaaggggatcccaaagggtaaggttgagcccaaaacaaagagcaagaacgcgggagcccaccatgccgtgcaccttatgtacagtggttcacttcatcccccaggatgcttcaaggtaggagacatttcccccttttatagatgagaaaactgaggctcagagaggttaggagccttggccaaaggataccagcaaagagtcatggcgtcaatcacgggacctccatctttaacatctttccactccctctcgtctcaccttcacagcagacggcgagagggatcaccaggctccctggggctctggctgggtcaccgccaggcagggaaatgcttgcttttcctgactgaaaggattcaaagtcttagaaagtcatcctgcctttgttccaagagccattctatttgccgtttctgtggcaaagtgcgagtctctgctaatcaagccccaaaggctattgactctgggagctttcagcatcattaccccagtgcacccctcattgcatttctccasacatgtagaaacatc

SEQ ID NO: 554021 - DNA, 598 bp, Homo sapiens
tttctgtggatatccaacagccacataattgggccccaaagccatgaagaaggaagaggaaatgtcttaaaggttgtcgatggacagtgtttgctgaacatcaaaatcactttccaggtattacctctgatttgctctaccaactccacaccccacctgcagccacataaccttccatgatcacggccatgcacaacacaccatgtcccccaggcaaggggaccttagaaacataaccaggcttgagacagcactctgcaccggtgtcttggaaatgctcttaagagtgtatggctgagttagggaaccaggatttcaaagtagaaagggagaatctacccaagcccatagaaatcctgaatccactcctttctcagcaacaagcactggcctgggagtcagccacttatgcaccaaccccactctgcccctaattaaatgcatgactttgaaaattcccctcattcttctgagccccaattcagtgattggtgcaatcacaggcttggctacagtgacccattcattgcaggcatggtgagwctctcaatccctctcatttccactagaatctaactgttgggatctatgacccagt

SEQ ID NO: 554022 - DNA, 583 bp, Homo sapiens
gctcctacttcctctctacagccactcccaaacgctggccctagattgcccaygctgaggccccagcaggccccttaccttgactccagggatccccatggggccaggctcccccttggctccagttaaaccctggggaagaatgaaaatgtaggatcaatgagggccaacctgctccctgacccacagagcagggcaggttcaagggtccctcctgggtgggccgaggctcctttttgccacacctcatgaaggcctaggaacctccacacctttctttccttttccccagttcccatagtaaccctaggaggcaggcagaacaattcccttcttttgaaagatgagaaaccaaagcccaaagatttggctttatgccagacccaggcttcatgcctccgggttcaggagtctagaagacctagccatgggtcaagattggtcatttgcttgatgtcctaccttgacaactttttcattttcttttcttttctttcctttctcttttctttttctttcttttttttttcaattgagacacagtctcactctgttgctcaggctggagtgcagtggcacagtc

SEQ ID NO: 554023 - DNA, 1536 bp, Homo sapiens
tatctgttttctctttaaggtaacagaggatgctttttggaaaatgctattttccagcacaatcactgctggattggcagggtgaagttcgaggccacggtggagtttagaagtagaacaagcactggcttttgagttggggggacctggatatgcattctggcttggctcagtctggccatgcagagctgtcctcatggacaccacatcgggccccacgcttgacctaatgctcggctgttgtcaccttgcaattcttgataatttttgaacaaaagtctccatgtttttattctgcgctgggccccacaaatcacgtagctgctcctgtggccgtgggaacgtggaaaagtcatttaacctccctgggaccttaactgttgatttgaaaaggaagatagtcctctcaatctcacagtgctgctgtaacaattacaattacaatctcatatacagaagtaattactataaattgcattgactgcacacgtgctaagtgcttgacactgatgactctctcccagtcgccctgtgaagaagggggtgattaccatgcctgttttatagatgaggaagctgaggctaggagtggcaaagttgcttgcaggatttcagtggtggagtcgtgaattcaacactattgagaacccattggatgcccagctagagcctgctgcttgcccacagggctggtgaagcgggtgcatggccaacggtggttgcacaaagtaggtgattggtaggtgcacatcctccttcccaggacacaggcattggcaagcatgtgtccctagagctgtctcccccctttcctttctgagcctggagcatggaaaaacctcaaatttctaacagctgttgagagaacaaactgtctctaaggaggaaggctttgttgctccccatccccttccccagtatccaccccccggcccccaccaggtcctcccacccgcagcctcgccagcaggcgctcgccaagccctgaacaatttcaattgctttggcaagagcctccgtgagatcatgggctggtcctgtgcatgcctgtggggcggggtgggggctggtggtctgcagagctgccccgggggtgttttccgtggacactcctgaaggcacacctgaggcaggcggctgtggcagtggcagtgggtggggagggggggcattttccctttgctgtgtcctgagatttggggggtgttgcaggttgcccctgcctgcctcaccagctggaatggagcgggaagacccctatgcccragccccacatggactagtaagttgctgtgtgatagtagacaagcaaccctcgttggacctcagtttcctctttataagaggtgagcatttctgtctgacttctcctgctgttggtgggaagagtatggaggaaaacctagacacgacaggatcaataaatcagtagcttccactcattgccttctgcccgctggccatgagtctgagttgtttctctggaaagcaaaaggccagagccccacctgctgcatgtcttggcttcaatattac

SEQ ID NO: 554024 - DNA, 1536 bp, Homo sapiens
tatctgttttctctttaaggtaacagaggatgctttttggaaaatgctattttccagcacaatcactgctggattggcagggtgaagttcgaggccacggtggagtttagaagtagaacaagcactggcttttgagttggggggacctggatatgcattctggcttggctcagtctggccatgcagagctgtcctcatggacaccacatcgggccccacgcttgacctaatgctcggctgttgtcaccttgcaattcttgataatttttgaacaaaagtctccatgtttttattctgcgctgggccccacaaatcacgtagctgctcctgtggccgtgggaacgtggaaaagtcatttaacctccctgggaccttaactgttgatttgaaaaggaagatagtcctctcaatctcacagtgctgctgtaacaattacaattacaatctcatatacagaagtaattactataaattgcattgactgcacacgtgctaagtgcttgacactgatgactctctcccagtcgccctgtgaagaagggggtgattaccatgcctgttttatagatgaggaagctgaggctaggagtggcaaagttgcttgcaggatttcagtggtggagtcgtgaattcaacactattgagaacccattggatgcccagctagagcctgctgcttgcccacagggctggtgaagcgggtgcatggccaacggtggttgcacaaagtaggtgattggtaggtgcacatcctccttcccaggacacaggcattggcaagcatgtgtccctagagctgtctcccccctttcctttctgagcctggagcatggaaaaacctcaaatttctaacagctgttgagagaacaaactgtctctaaggaggaaggctttgttgctccccatccccttccccagtatccaccccccggcccccaccaggtcctcccacccgcagcctcgccagcaggcgctcgccaagccctgaacaatttcaattgctttggcaagagcctccgtgagatcatgggctggtcctgtgcatgcctgtggggcggggtgggggctggtggtctgcagagctgccccgggggtgttttccgtggacactcctgaaggcacacctgaggcaggcggctgtggcagtggcagtgggtggggagggggggcattttccctttgctgtgtcctgagatttggggggtgttgcaggttgcccctgcctgcctcaccagctggaatggagcgggaagacccctatgcccgagccccacatggactagtaagttgctgtgtgatagtagacaagcaaccctcrttggacctcagtttcctctttataagaggtgagcatttctgtctgacttctcctgctgttggtgggaagagtatggaggaaaacctagacacgacaggatcaataaatcagtagcttccactcattgccttctgcccgctggccatgagtctgagttgtttctctggaaagcaaaaggccagagccccacctgctgcatgtcttggcttcaatattac

SEQ ID NO: 554025 - DNA, 1536 bp, Homo sapiens
tatctgttttctctttaaggtaacagaggatgctttttggaaaatgctattttccagcacaatcactgctggattggcagggtgaagttcgaggccacggtggagtttagaagtagaacaagcactggcttttgagttggggggacctggatatgcattctggcttggctcagtctggccatgcagagctgtcctcatggacaccacatcgggccccacgcttgacctaatgctcggctgttgtcaccttgcaattcttgataatttttgaacaaaagtctccatgtttttattctgcgctgggccccacaaatcacgtagctgctcctgtggccgtgggaacgtggaaaagtcatttaacctccctgggaccttaactgttgatttgaaaaggaagatagtcctctcaatctcacagtgctgctgtaacaattacaattacaatctcatatacagaagtaattactataaattgcattgactgcacacgtgctaagtgcttgacactgatgactctctcccagtcgccctgtgaagaagggggtgattaccatgcctgttttatagatgaggaagctgaggctaggagtggcaaagttgcttgcaggatttcagtggtggagtcgtgaattcaacactattgagaacccattggatgcccagctagagcctgctgcttgcccacagggctggtgaagcgggtgcatggccaacggtggttgcacaaagtaggtgattggtaggtgcacatcctccttcccaggacacaggcattggcaagcatgtgtccctagagctgtctcccccctttcctttctgagcctggagcatggaaaaacctcaaatttctaacagctgttgagagaacaaactgtctctaaggaggaaggctttgttgctccccatccccttccccagtatccaccccccggcccccaccaggtcctcccacccgcagcctcgccagcaggcgctcgccaagccctgaacaatttcaattgctttggcaagagcctccgtgagatcatgggctggtcctgtgcatgcctgtggggcggggtgggggctggtggtctgcagagctgccccgggggtgttttccgtggacactcctgaaggcacacctgaggcaggcggctgtggcagtggcagtgggtggggagggggggcattttccctttgctgtgtcctgagatttggggggtgttgcaggttgcccctgcctgcctcaccagctggaatggagcgggaagacccctatgcccgagccccacatggactagtaagttgctgtgtgatagtagacaagcaaccctcgttggacctcagtttcctctttataagaggtgagcatttctgtctgacttctcctgctgttggtgggaagagtatggaggaaaacctagacacracaggatcaataaatcagtagcttccactcattgccttctgcccgctggccatgagtctgagttgtttctctggaaagcaaaaggccagagccccacctgctgcatgtcttggcttcaatattac

SEQ ID NO: 554026 - DNA, 570 bp, Homo sapiens
tattttaaatttacctttactacctatttatttggttcaaggctccatttcgtccactttgggactaggtaatcaggctttaaactacttacctctgcctgtcagaagtcactaacctcatgacaggaataatttaggttagaggagtagcaaaactattactcaactgtttctttagaaaaggagaaactcataaaacatgggaccctaatatttgaatattatatgtaagacggggttaaaatgtgttcaaaaagtgtcttctaaaaatgtacaaacaacagaggtgtgacagtatgctgaaaaaaatatgaggggggtggaagagcgggatagagagtggtcctccttccctactccctttacaatgttgatttcatccttggrttttcataatgaacttctgtaaaggggagatttgcatccagttttaagaccattttcagcacaagtgcttttttattaagtatttctgtggttccccttccccagacaaaaaggaaaggggaagctattgttcaggacttctaatgggtttatctagctttgtgggttaaaagaacccacaat

SEQ ID NO: 554027 - DNA, 724 bp, Homo sapiens
tatgagaagtcctttttacagaggacattgactgattaaataataggctgatttattcattcaaccaacaaatatttactgagcaccttctaggtatttagggatacaacagaacaaaacagacaaaatcccttcccttatggagcttacgttttagtgaaggaggagggggagtcagacatcaaataggaaatatgaagtggggtatattttatgcagagtagcctagagggtcttgataaggtgactttttttttctttttctttttctttaattatactttaagttctgggatatatgtgcagaatgtgcaggtttgttacataggtacacatgtgccatggtggtttgctgcccccatcaacccataatctacattaggtatttctcttaatgctatcacttcccttgcctctcaccccccgacaggccctggtgtgtgatgttccccccactgtgcccgtatgttctcattgttcaactcccacttatgagtgagaacatgyggtgtttggttttctgttcctgtgttagtttgctgagaataatggtttccagcttcatccatgtccctgcaaaggacatgaactcattcttttttatggctgcatagtattccatggtgcttacgtgccatattttctttatccagtctatcattgatgggcatttgggttggttccaagtctttgttattgtgaatagtgctgcaataaacatatg

SEQ ID NO: 554028 - DNA, 990 bp, Homo sapiens
gagtttatattcatgcagcccaatccaagcaggtagcagaaaaggctgccttgggattttataaaatagacctgttaaatacttctcaagtagatcaagtgcaggtggaatactaaattttagccatatttcaaaagactgagatgctaatgcctgtgaacatgtgctatacactaactactcatggcctgaagcacagaccaaaaggtgaatgatatcccaaatgccacctcagttttggtcacaggtctggatacaactcattggttgatccaagcatctgatgttccaccttgacatgtgatgctatctctggaaaaagaaaatgtcrcaggtgttgagaaaaggtacaagtaccaactatcaaagaggagtaagatcccttcccaagacccctttatagtcagtctaatacctttcggtttattcgcctagaatgctggacttctataccacataacaagattccacacactgaaacggaaccaacatcattagcttcttaccagtgttctgccatcgagatgcagtctgtcaagagaagcagcacagagtctcatgtcaagagaagtctgcagcggcagaaagacaactaaaaagagagacttcagtggaatttgagtcacctgacattagtcttaaaaaagatatttaaaatacagagaatcccactgatggaggagagaaaaataaccctctttttttctttaaagacaggcattgatatgagcgaaaggaaaagaactggggaagtctttgtatattgagagctcagtttatttttactctctgccaatagaggcaaggtaattctataagcaccatttaactttctcactacaaacaaaatagagtaagtcgtattaacgacttacttgcgttctaaacttccagctccagaacacttttttccccctgaaaattaaattgattcttacagaatggtacccaaatgtgtgatttcaaaggcagatcccaaaactgatggga

SEQ ID NO: 554029 - DNA, 547 bp, Homo sapiens
ttgtgcacctgtggcactctgtatggatgggtggccatggtctttcctacacttgtcctttcatacaccatggcagatgctgctgattgtcccccaatatttccccttcttctatattaagagaaactctactttatagtcacccagaacaataactacacttcccagcctcccttgcagttcagcataaccatgtgactaagttctggccagtcagatatgagttgaagagctgtgtgtgccacttccagagtgcacctttaaaaaataaggccatacctgcccctcgtcctgttgccttttcctgctggctggaatgagaacatggtggcagtgagccatcttgggtcatacagaaaaggataacactctcgggatggaataagaagcctgacagccctggatggctaacacctagactatgacatcagagagaaatcaacctctatcttgtgtatgycattattacttggggtctattacatcagccaaacttatatctttaccaaatcagacatgcctaagatgcctttcctatgccaatgtc

SEQ ID NO: 554030 - DNA, 617 bp, Homo sapiens
ttctttctgtgccttcaaaatttcagtaaggaaataaactggttaccaaaaacacctgtttgttaaaattggagtcaaactttttaaagaagagatgtactttgttttctttcctaaatatttaaaaattaataggatttatccatagtataacatggttttaaaaagtaatttaactttagttttattgaatacctatttgtgtagtatattacatttatttttgttaatattaaattttttaaaatttaggtataaattgtgcattttatatgatatttataccattattttactttgggttctctcatttaaarttataaccaaagttacactgttattcatgttttgtgctatgcatttaatattttcatggattccttttttttctattttcagctagtatatattgcattatatttaaaaccaccacaacaggtaggaaatggggagttgttacttgatggctatagagttacagttttgtgagatggaaaatttctgcagctctgttgcacagaaatgtgaatatagttaatacttatgatatctacacttaacatgattaagatagtcaattttatgtgtatatttttgctgtaattaaaaaataccat

SEQ ID NO: 554031 - DNA, 1189 bp, Homo sapiens
tttggagaaaatatattccatttaaacttccttctctataaccagttcatacactggaccttttgggcacagccatgtgaaagcttttcaaaacttttcactacttttttttgagacggagtctcactctgtcacccaggctagagtgcagtggtgcgatctcggctcactgcaacctccacctcccaggtccaagtgattctcctgcctcagcctcccgagtagctgggattacaggcacctgacaccacacctgactaattkttgtaattttagtagagacaggatttcaccatgttggccaggatggtcttgaactcctcatctcaagtgttccgcctgccttggcctcccaaagtggtgggttacaggcatgagtcattgcacccagccactatagatttttatttgtagtagatttagttcagtagggcatttgagaggcataggaactggaacaaatccttcattgtttgggactgccttgcacattgtaggacatccagtacagtcccttccacgaagtggcagcagcagcctcgggctgtccaaacaccctgttagggacagtgccactcccggaaccacagaagaaccacaatcataggagaagcatacaacaaacatggtgttcatcggacggtcagcttcagtggcacttttgagcaagcacactatttggttgtagaatgagtccctggcagggcacccgaaaggctgatgtgtgactcatccctagtacctctgagaatgctgaaatctcctccttctccaagctgagtggcagctttctggtccagactacttaaattgtgacttgaggaattttcttcactttttcctttgagtcattctgtttttgatcaagatgcgatagaatgaaggattctttcagggtctgctgtcacatccttcctttgggaacagatagaaaatctggcctggcttgaagagtttgtcctcaaacatctggtaagccataggcatcagcatctcttacttctccagagacatttagatgtgtcccccatctccatggaggcccatggcaaggggacccctagttgtactagagcttccttctgggcacagccacactgcacaggcactgcagtgtacagcacagctcctccagcttccggaagactccattatctagaaaagtgctgagaaatggagaagggggttc

SEQ ID NO: 554032 - DNA, 661 bp, Homo sapiens
ttcaataaatacagagctagaaggaaattaaaaataattttggctattaccctcatctcaaaaaccttccactgccactctgcctatacaataaaaatatgctatctactgagacaggcaccagactaggaagaaaggttgggaaatgttacaatttcagtattgagcatattaagttttaaatttttcatcatagtgtgaaagttgtcagagtcaaatgaagtcacctgtgttaggaaccctgacaaatggagccaggaaaggccataaagggagaattctcacacacaaatgcctgataaccaaagctatcacagaatactttgcaaaaaccacaatcttgcacaaaggccatcacaaccttacacaaaaaatacttcagtgaagttatctgcccagcaactgcctgtctagcctcggactggtgccacccttgttattgataactgtagccaagaataawgatctcaaaacaattacgttatcctcctgatttttcctttaacaatctttgttttgctttacctcctcgaatacgcacatagtttactatggcatgtgtattttcattgcaatgtccatccctgaataaaaataattttcttttcatttattaatgtatttgttttttgaaactgggtctccctctgtcacccaggct

SEQ ID NO: 554033 - DNA, 875 bp, Homo sapiens
ggggttgatgtaatcaggctgtggagaccagaacacacaccaaaaatgtaagacaggagtcacacatgcaggaaacagatctcagctctgcaaagttactctgctcagaacggatgctcactcagtaactggacagcatcaccatagctgcatcctcaaagctgagcttcaccagctctactgattacagaggmcttggaaacaacctcagctgacagaaatgagggtgcctctacagtcagagtgtgtcttcatccatccacccatccattcaaacctcagacacttactcaggcctgctccacatacagaggcagtgagcacagtgtctcttgcctcccaggaacctctaggccgagaacagaaatggtgaaaactgtggtccactaggaaaaagctcacatgatcattcacttctgggtgcattctttcctgaacaactttcttcaaaggcaaagggacagacagggaagccaaaagagtatcattttagacactattaagtttattgtatttaaaaatcataattgttgtaattatgagtatttgttatgaaagatctaactttaaatgaacacttatcatttaagaataaaatggcttatgtatctcactaggttgataggctgataatctttgcaaattaagaccataccaatatgaaatatttcttttcactgtcaaatttaccttgatgtccaacattctgttctcaaacggggaagctatcctaagatgctgcagagggttcctgcatttagcgaggatgctgcatgagatactctctacctcctggctgacactggccccatggaaagtgataccgatatctagcgagtgtccacatgagtccgtaaatgaggtaagtgaaactg

SEQ ID NO: 554034 - DNA, 875 bp, Homo sapiens
ggggttgatgtaatcaggctgtggagaccagaacacacaccaaaaatgtaagacaggagtcacacatgcaggaaacagatctcagctctgcaaagttactctgctcagaacggatgctcactcagtaactggacagcatcaccatagctgcatcctcaaagctgagcttcaccagctctactgattacagaggccttggaaacaacctcagctgacagaaatgagggtgcctctacagtcagagtgtgtcttcatccatccacccatccattcaaacctcagacacttactcaggcctgctccacatacagaggcagtgagcacagtgtctcttgcctcccaggaacctctaggccgagaacagaaayggtgaaaactgtggtccactaggaaaaagctcacatgatcattcacttctgggtgcattctttcctgaacaactttcttcaaaggcaaagggacagacagggaagccaaaagagtatcattttagacactattaagtttattgtatttaaaaatcataattgttgtaattatgagtatttgttatgaaagatctaactttaaatgaacacttatcatttaagaataaaatggcttatgtatctcactaggttgataggctgataatctttgcaaattaagaccataccaatatgaaatatttcttttcactgtcaaatttaccttgatgtccaacattctgttctcaaacggggaagctatcctaagatgctgcagagggttcctgcatttagcgaggatgctgcatgagatactctctacctcctggctgacactggccccatggaaagtgataccgatatctagcgagtgtccacatgagtccgtaaatgaggtaagtgaaactg

SEQ ID NO: 554035 - DNA, 2859 bp, Homo sapiens
ggttttcacaaaaagagcagaaagcatagagagctcccatatatcctttttccctgttctgtttttcttattattaacatcttgcattactcctccatctcttttaaatgagaacgatccccttatcaccacccagctccaattttactgttttgtttttttttttttttttttttttgcgggggcagggggtgtagagttccaggggtgacttgaatgggcaactctatgcaaaaatcactgaccttagtccctggtagccagtaagaatgtgtaggtgaagtcaaggcaaattctgctgagtcacataaggcatgcaggcaggtgtccactcagggcagctcgatggattggtttgtaaaattgtcaaagactcggccccgaccttaagcatcagagagaacagcaagcaagccttgagagcgaccttgtctcataaaaactgccatattgtaaggaatgtaggatattcactgtgtctgtttcctgactctattccccatgtcaggagtggccaggcatggggacagcatggggacagattgctgctaatgtcacctcctcctcacttccctgctcccttggctatccttcccccaaaccccagcaccctccttgctttgaacttccctctcagctaggggtgggggagcttcctaagcctcagttttcttgcctgtgcaatttaggtatcagcccttgctggtcaagggttttgcagattgaataagctaagaatcaataggaggaatcttctgcttttgcttggagtgtctttcttgagccatcgccgccattgaaatcctacccttcttccaaagcctgactcaacccacctcgtcaagaaaggctgtgcatggccaggcgtggttgctcacgcccataatcctagcactttgggaggctgaggtgggtggattacttggggtcaggagttggagaccagcctggccaacatggtgaaaccccatctctactaaaaatacaaaaattagctggatgtggtggtggcgagcacctgtaatcccagctgcttgggaggctgaggcaggagaattgcttgaacctgggaggtagaggttgcagtgagccgagattgtgccattgcactccagcctgggtgacaagaatgaaactccatctcaaaaaaaagaaaggaacgctgtgcacccaggcaccagtattgactgctgtctcccttgccaatctcttgctgcatttatagtctgtgcttcacagtttctctggaatttcttgcattgctgacccttctccatggtttttttccagactcaacacctacactgctctccccaggaggggagggcagcccatcttctgctgctatgtgctgaaaacattataggtagacagaccagcatgggagtctcagctctgctccttctcagcaagcccatttgcctgtcttagcctcagcttcctcatttataaaatgggacgataaagggcagtagagcagagcagttgggagccatgggcctggggtaggactccttggtttaaatccatgttctcccacttattacatgacaaattactgattctttctgagcctcagttctgacttgggaagattgcaatatctgctttagaggactgttgtgagcgtaaacttgagtaaagtctgcaaagcctaaaggcataatacatgataactctaatgatgtgctatttacctgcacaccacagtggcttagtaagtgcctcccattccctgcataatgcatagtcctgggtgccatgtcaacttttgttacagactctcygttgttattttggactcagttaccaaatattcaggtcatcttcaaagagcatctggtttcccatctcaggcctcaccagtattaaagaacatcaatatgtttttaatttcctctttaatttcagggagtggatgaagaacggggggtgacagcacgctttgggggatgattcacggtgtcattaaatctgcattgagtttcctgtagctacaattggcccaggctatgaccacactcagtcctgggaattatgttttgtttgttttgctgtgtgattaagtctaataacagtaaatccagcatctccttgacttggactttcttggttcattacatcgcagtggatcttgaaaaatatgtatgtgtagatgtaagttcaactggttgagtttcccgtcagccttctgcccagtaggtgtgtgatgtagtggaagaagaagaatgggattcagatctggcccaccagggttcaaatgcaggccctgccacttagcagtatggccttgagcaaatgttttctcaccactgagcctcagtttcctcatttgcaagatgggatgatgcctctgattttgatgcggtgatgcttcttagcttgatgagatgctgcatacgatacatgcagatataggtgcctccttctttgttcttcaccgattttcatggagcatctgcttctgtggctgacactagagataaaatgatggggccccattcataagataatctgaaaggggaaggggtatggtccaagcaggagacactgtctcagacactagctcgttctgaggctgaaccaaccacttcagtctccacttcccttctctgtgctgttcacagtaggctcatacataggaattgtttactcttgaacatctgtcctcaatctggggacttctctagcactgatgaaagaggtcattaaaagcaatcagacaagggttaagattttaaaatttatgttatactgttatgtcaaaggattaactttgagataaataagtcatgtatggaagtttaactgtagtgtcttttgcctcattggtagtactgggggtaatggaggtagaag

SEQ ID NO: 554036 - DNA, 1410 bp, Homo sapiens
actccttggtttcctcagcttggatcaatttcaatttgaagagcaaaatcaaagctggatataacccagcctcaattctcccataagtatctgagctcctgttatcttgggatctattatatgacgatagctccctgttagagctccagtcaccaaagacaggagtaactctttcttccagctccatcctcaatggcctgtcccacgccaagtgcaaacatgaagagtgttgttccttggacagcagataaagtggccagagggatcattctgcctgaagagctacaaagctgaaaagggatcactgtccatactcaaatcagaattatcacagaaatgagactagctgaacagagctggaacccacaatggtagwgtatgtgggctcagcagtgacatgggagccagtgttctcatcctctgcatgctgagctgtgtcagagcttctcacagagttcaagaaaagagggaaggaaagaagatagaaggggagaggaagaaaataaggctaaaagaagaaaagaaatcagtactaaaagaatattgttatttaatcatagcactaaaatctgaggaagaataaaatcaagaagactttcaaaagaggaattcataggggctgggcgcggtggctcatgcctgtaatcccagcactttgggaggctgagatgggtggatcacgaggtcaggagttcgagaccagcctggccaacatggcgaaaccccatctctactaaaaatacaaaaattagcctggcacagtggtgggcacctgtaatcctagctactcaggaggctgaggcaggagaattgcttgaacccgggaggcagaggttgcagtgagccaagatcgcaccactgcactccagcctgggtgactgagcaagactccacctcagaaaaaaaaataaaagaagaattcatcatagacatattgattttctcctctcctaaagtgagtaccatgaaatccaatttcatgtcctatctcagccttacccctgaaataaattaagtggcagaatcttttccttcattcgccaattagactccttcaccaagcctccaatggtagatgtgacaatttgtgaagacaagaatctgtatgatttgatcatatgcatgtagataaaacacacataaaacatttgaatacagctagtagaagagctttttttaaaaaaatattttatttggcttattggtagttagtatacttattaaattattacttcccttgcggataattcattacattttaaatgctgcacaaatgtatttcttccctggcagaatagcatgtagctttgctcacattcaaccatttattcccagatgtttatatccacagggtctaagaactccataaaacctaggataatagcacattgaaaatatctggccacaacc

SEQ ID NO: 554037 - DNA, 1410 bp, Homo sapiens
actccttggtttcctcagcttggatcaatttcaatttgaagagcaaaatcaaagctggatataacccagcctcaattctcccataagtatctgagctcctgttatcttgggatctattatatgacgatagctccctgttagagctccagtcaccaaagacaggagtaactctttcttccagctccatcctcaatggcctgtcccacgccaagtgcaaacatgaagagtgttgttccttggacagcagataaagtggccagagggatcattctgcctgaagagctacaaagctgaaaagggatcactgtccatactcaaatcagaattatcacagaaatgagactagctgaacagagctggaacccacaatggtagagtaygtgggctcagcagtgacatgggagccagtgttctcatcctctgcatgctgagctgtgtcagagcttctcacagagttcaagaaaagagggaaggaaagaagatagaaggggagaggaagaaaataaggctaaaagaagaaaagaaatcagtactaaaagaatattgttatttaatcatagcactaaaatctgaggaagaataaaatcaagaagactttcaaaagaggaattcataggggctgggcgcggtggctcatgcctgtaatcccagcactttgggaggctgagatgggtggatcacgaggtcaggagttcgagaccagcctggccaacatggcgaaaccccatctctactaaaaatacaaaaattagcctggcacagtggtgggcacctgtaatcctagctactcaggaggctgaggcaggagaattgcttgaacccgggaggcagaggttgcagtgagccaagatcgcaccactgcactccagcctgggtgactgagcaagactccacctcagaaaaaaaaataaaagaagaattcatcatagacatattgattttctcctctcctaaagtgagtaccatgaaatccaatttcatgtcctatctcagccttacccctgaaataaattaagtggcagaatcttttccttcattcgccaattagactccttcaccaagcctccaatggtagatgtgacaatttgtgaagacaagaatctgtatgatttgatcatatgcatgtagataaaacacacataaaacatttgaatacagctagtagaagagctttttttaaaaaaatattttatttggcttattggtagttagtatacttattaaattattacttcccttgcggataattcattacattttaaatgctgcacaaatgtatttcttccctggcagaatagcatgtagctttgctcacattcaaccatttattcccagatgtttatatccacagggtctaagaactccataaaacctaggataatagcacattgaaaatatctggccacaacc

SEQ ID NO: 554038 - DNA, 600 bp, Homo sapiens
tgtgtagcattaccttcacagttacatatcttgaacctatttccaggtgtaacccaaatgttaccagcttgtggacataattgaaatcacatttatatttatgcccaaattgtaatggtgctaagtcttcatttgctcatgcaggaacttagctcccagttagtgcctcccagttatttcttttatataaaaatatatatttttattatacttkaagttctagggtacatgtgcacaacgtgcaggtttgttacatatgtatacatgtgccatgttggtgtgctgcacccattaactcgtcatttacattaggtatatctcctaatgctatccctcccccagcctcccaccccacaacaggccccagtgtgtgatgttccccttcctgtgtccaagtgttctcattgttcaattcccacctatgagtgagaacatgcggtgtttggttttttgtccttgcgatagtttgctcaaaatgatggtttccagtttcatccatgtccctacaaggacatgaactcatccttttttatggctgcatagtattccatggtgtatatgtgccacattttcttaatccagtctatcattgttggacat

SEQ ID NO: 554039 - DNA, 600 bp, Homo sapiens
tgtgtagcattaccttcacagttacatatcttgaacctatttccaggtgtaacccaaatgttaccagcttgtggacataattgaaatcacatttatatttatgcccaaattgtaatggtgctaagtcttcatttgctcatgcaggaacttagctcccagttagtgcctcccagttatttcttttatataaaaatatatatttttattatactttaagttctagggtacatgtgcacaacgtgcaggtttgttacatatgtatacatgtgccatgttggtgtgctgcacccattaactcgtcatttacattaggtatatctcctaatgctatccctcccccagcctcccacmccacaacaggccccagtgtgtgatgttccccttcctgtgtccaagtgttctcattgttcaattcccacctatgagtgagaacatgcggtgtttggttttttgtccttgcgatagtttgctcaaaatgatggtttccagtttcatccatgtccctacaaggacatgaactcatccttttttatggctgcatagtattccatggtgtatatgtgccacattttcttaatccagtctatcattgttggacat

SEQ ID NO: 554040 - DNA, 1093 bp, Homo sapiens
ggtagtggaagtaataatttttgttaagaaccagaatagagaattttaacagaggagactaagggggaaaatgaagttggcattccaaaaaattatgttatatgagaatcatatataaagaaatatggtatattggtttactctgttcatgaaatgggaatgatttagggagaaaagttttccctcctctcctctttcctcttccctccatctctctttctttaataattgtttctccaaagaaaaatttctgagttgctttgaagaaaggtccaagctattttgtggtttgattactagaattttattcaccatgttgttttttgaataatttccccattagaatggaatgcttttacctgattaaaaaaatctacaaattgatctacatatttgagagactgaccaagtctaattataataaaaattatgctataatttctgcattaaaatttttagtgctttatatataattcattttaatgtcttaagagtttgttgtgctgaagctgttactgtgccctacttttgcttggtgcgaacgcatgcaatgcttaccttcactgctctttttggggtttcagccaagataggtggcagaattcccttgtaaaaaccaaataacctgttggagaaataaaagatttcctatgagtaaggaaattaggcaacaagtatttctgactttgttaagataatcctaaagtattcccgattattcarcatagcacaccaatcatgaagtcttcctttcattctaaaataaagaaataaattttatgtctattagcattatgatattcagaaggtaaatacgtgatactgagacaggaatcccttagataagttgctaagcatgaccattagttgtaccttaacgatgaatctgactgtccttactctaagggctcttgagtttattttctcagttgtgtggcaggtagcttcaagctatctacagtcctgcatttcctcccttgtggcaaccaaatgaggttaggattatacctgaacccattagactgtacctttctgaggctaaggaggtgatgaaattttcaattttagctttactaatacaagggaactaaca

SEQ ID NO: 554041 - DNA, 1093 bp, Homo sapiens
ggtagtggaagtaataatttttgttaagaaccagaatagagaattttaacagaggagactaagggggaaaatgaagttggcattccaaaaaattatgttatatgagaatcatatataaagaaatatggtatattggtttactctgttcatgaaatgggaatgatttagggagaaaagttttccctcctctcctctttcctcttccctccatctctctttctttaataattgtttctccaaagaaaaatttctgagttgctttgaagaaaggtccaagctattttgtggtttgattactagaattttattcaccatgttgttttttgaataatttccccattagaatggaatgcttttacctgattaaaaaaatctacaaattgatctacatatttgagagactgaccaagtctaattataataaaaattatgctataatttctgcattaaaatttttagtgctttatatataattcattttaatgtcttaagagtttgttgtgctgaagctgttactgtgccctacttttgcttggtgcgaacgcatgcaatgcttaccttcactgctctttttggggtttcagccaagataggtggcagaattcccttgtaaaaaccaaataacctgttggagaaataaaagatttcctatgagtaaggaaattaggcaacaagtatttctgactttgttaagataatcctaaagtattcccgattattcaacatagcacaccaatcatgaagtcttcctttcattctaaaataaagaaataaattttatgtctattagcattatgatattcagaaggtaaatacgtgatactgagacaggaatcccttagataagttgctaagcatgaccattagttgtaccttaacgatgaatctgactgtccttactctaagggctcttgagtttattttctcagttgtgtggcaggtagcttcaagctatctacagtcctgcatttcctcccktgtggcaaccaaatgaggttaggattatacctgaacccattagactgtacctttctgaggctaaggaggtgatgaaattttcaattttagctttactaatacaagggaactaaca

SEQ ID NO: 554042 - DNA, 809 bp, Homo sapiens
ccatgaggacacagaatgggacagyaaggcaaaccccattggcttctcaaagtgctcagtggttcaggtgttgagcttggaggaggggtggcaagaagtgctaggcatgtgagccccaagccatttacagcttaaacacacattgcaacagccatgtttgaggtggcaacagggccctttgcttacttgttttccccataatacacgtccttttggcatcccacacttcccggagggaacactgccccaggacacccggccacgagcagggcatctggggacccatgtcctctccaccaagaccagcagaatagggtctctttcagctgtgaaaagatggcacaagctacctgtgaaacggtgggctcacccacctaacaggccggtgacctgggcacattccccaggggattcccatcccaggggcaggctactgaagccctttccagctttgaagttctgtgagtcaacaacagagcagtcattgagatcttactgtgagctggggacagagaagtagccccctcttcaatggatcgtctactgcctgccaaacatagcttcctgtgtgtgacctcgcctaatgtcaccacagtccagtgagaaacgtcctcatctcatctgagaggaaaccagcaggggccgagcctgccggccctggagcacagggtgactgacggagaaccccacaacctcaccctttcctgtagtgtttgtagatcagagattttattttcttttatttttgagacagggtctcactctgttgcccaggctggagtgcagtgatgtgattttggctcattgca

SEQ ID NO: 554043 - DNA, 809 bp, Homo sapiens
ccatgaggacacagaatgggacagtaaggcaaaccccattggcttctcaaagtgctcagtggttcaggtgttgagcttggaggaggggtggcaagaagtgctaggcatgtgagccccaagccatttacagcttaaacacacattgcaacagccatgtttgaggtggcaacagggccctttgcttacttgttttccccataatacacgtccttttggcatcccacacttcccggagggaacactgccccaggacacccggccacgagcagggcatctggggacccatgtcctctccaccaagaccagcagaatagggtctctttcagctgtgaaaagatggcacaagctacctgtgaaacggtgggctcacccacctaacaggccggtgacctgggcacattccccaggggattcccatcccaggggcaggctactgaagccctttccagctttgaagttctgtgagtcaacaacagagcagtcattgagatcttactgtgagctggggacagagaagtagccccctcttcaatggatcgtctactgcctgccaaacatagcttcctgtgtgtgacctcgcctaatgtcaccacagtccagtgagaaacgtcctcatctcatctgagaggaaaccagcaggggccgagcctgccggccctggagcacagggtgactgacggagaaccccacaacctcaccctttcctgtagtgtttgtagatcasagattttattttcttttatttttgagacagggtctcactctgttgcccaggctggagtgcagtgatgtgattttggctcattgca

SEQ ID NO: 554044 - DNA, 607 bp, Homo sapiens
tagattctgcacacagatggacagtttataaatgactaacaccactgtggaggtgatagaagaaaagcatactccacacagagacaagcatgtgtctagggcgatattaggaggtgagaagattgttacctggcacttggggttcctccactgactgacctacgcacacggccctgggccagatctggcaagaacttctgcaccacttggagatgagctacttcagaaactcagaatgaagcctcccagctcactctgcctggaaggcagcagctgtgtctctctggtctttaaacgactttaaagtgtgtttgttttctgaagcacttgggtaaagactaggggctgtcaaggggacagagagtgtgaaacsaagagggggcaggagaagaagaaaagcccctgttttttccgaggaaacttgtggaggtgagaaaagatgaagagacgaggcaaacaccgctctcggcaggggcaggagaagcctcacactgcaagcttgtctccctgggcaagcagggacctctaattcacacctttatcggccctcctggaggtgtggctggctgttcatggtcgttttctgctttgtacacaacacagagat

SEQ ID NO: 554045 - DNA, 559 bp, Homo sapiens
ggcagtgatctggaggttggttggtattttattttctaattcctcagcagatctgtgtgggagatggaaaaacaaaagctagagaatcttttttggtcacagtgaccaaaagtgtcaggaagaaattactgccagctgatcagcaatcagtgtagtctgtgtatttaaacccatagtctgccatagaggagcttggagtttccaggtaatgcatcgtgatcaagggaacaagcagtgtcaggaattggttgaaattcagttggtctaggcaggcaaggcatgcaatcatgaaggaccagattgtttggggaaatatttggataaagacattacatttattaacaagagacaacaacacagcttagaaattccaacattttgttgattcagataataggactcttgagggcataatttattgtcttagtcttttattgtttgtcatgcgggttctgtgatagaatgactttcatactatrtctatcatgaattttcatgctaataagaaacaggttaaacaactcccccatgtataggtatggatattattggagccaca

SEQ ID NO: 554046 - DNA, 532 bp, Homo sapiens
ctggaccccgaatcttgtgcagattgaacagtggatccggggtgctctgagcaggcagcagggagcagctctggtgacgcttcatgtggtagcctcactctccattctctgcccctctcgtgcccacaaacaccaccaagagattctgaaacaaaggacaagtgagaccagtgatttgaggttcccatctgcataaacacggaccagctgagcctctggctgtgggttctggctcttggcatcaactcaccacggtgagaaatatcagcaaacccagatcccagatcaccaactccatggtcttaggacttccttggactgtccttggatctaaggctgagacctaagagggtaagaaagcatacaagtatttagtctccagggccatctcctcctccccaagctgacaccactgagaggggtcccattcaagcagggcgaagctcctcattcacgcacaccaaataaaaaatccyaacagaaaggacatgaaaggacaaacatcttagaagtttcgtttttctttcaagca

SEQ ID NO: 554047 - DNA, 648 bp, Homo sapiens
tttgcaggaaaaactgatcaaacgtgtgaggcattgttaaaaatgtatgaagttatctacaaaactgaatttaatgatgtaaagtgaaagaacaaatgtgtctttcagtaagtggatttggtgttaaaactctgctccagaactataacatttataacctatcatgacatttttcagaaaattttatagcaggtgagaagtcagttattaccaacaaaagcagcatggcaggatttattacgcctccgattcaattcgtttcaagaaatattgattgagtgctaccttatggcaagccctgaggaaagcgaggtgggaaacacagcggtgaaaacgacatgactggcaccttctgcagttaccacggcatggggtacaaaggacacaagagttcagaataaggaaagatcacttctatctgggggacagggcataattgaaatgttttcatgatgcaattaacattccaattacatctgagatggcttatggaatgttgagccagagaaatgaaggaaaaagccatttaaatgcagggtctggcctacaggaaagaggtacggagagtatttgagaattagcatggagtccagcctgacttgarcacaagatctgagtaaagccgaaatgagaagtaaaacagggagg

SEQ ID NO: 554048 - DNA, 1026 bp, Homo sapiens
ggacaaaaataggacaacaaaaggtttatttgatgtatattgcttgattaatttgcagcagtcatggaaacaaatttctatttactaggaataataataatgttgcaaacacctattttctggtagttaaaagtacaggaggaaaaaaaatgtccataataaaagcaaaaactaaaaccagaaaacaagcaaaggaaagcaagcaaatgataaaataaacatgaacaaacatacattaatttagggacttcctttgcccaagaaaagtcttaaaaatgtgatttatagatttgcaaaaactcttaaagtagaagagcttacgtgaatcattcaaattataattctgtatttcagaactcaagttaaatgtttatcttaaacattatttaaaatattacttaagatttgggctttttccctttataacatggcagagttgtttcataaccttattgtttaaaaatattcgtaattatttatttttaaactgtttaatagaattgaaacttctcttttctttttaattcctccacaaactccaaattaatagccccttctgaaatattattgcctcaactgaacatattatttcagagaattgcactgggactgtacgagtttaggcaagtcactccctcatgtaaccttgatcttatttctcgctataagatcatattaaatttctagcagctgcatgattttgttggggttcaatgaagaacmcaagttcttttcactttaactgtttggtcaaatttctctcatcgggtactcatgaggtcgatattttagcccaaatgcaaacctttatatctgtctataaggcctcactttaccgggatcattgacatcctaattttatcatctgttagatttgacgtattttccactttcatgtcatgtaaaaatattttaaaatgtactacattctcattcaataaagtcctaaatttcatcatttagtattaattgaaaccttacaaatcacttttgtacatttcagtactctataaaaatgtttccact

SEQ ID NO: 554049 - DNA, 1137 bp, Homo sapiens
cattcctcagctgacatgtttgatttatggctcttaatatctttgaagtaatgcacttggtaattgtagtcactctatcgattttcagaaagctactttatacactgtgaagccaccttcaaagccagtgaatcatgcagtcttgatttccagctgcccagccagtaatgtgaatatkcaaatagggctcttgccgctatatggacaacatttactctgggacaatatctttaactacccaaactaatttatccattagggaactgtgtgttgctaatcgattcactgaaccttgctttaactatctctagtgctttgtgtgtgtccaagatgttcaaataaaaaatgatcatatggagcaaggaaagaattccttcctttctggaaaatacacacaaataataattattattttatgaaagagaattcacaactgctaagaaaatgatagaagcaaacactaagatttaatctctgtctgacagaagctatagtctctgttgaggcaagttttcctgatggatttctaaggttttaagctgctgattttggtcttcttttatccatgtgtatgtttccctctgaggcctataaacagcttttagaagtggtcaatttactcatgcctaacgggccgggtgtatttgctgctctctgccctgtaatttgtttgctcgtcatcattaatattcaaaacacagctttaaggactgggcagaacaggtcattaatcaatactgctaagaggagatgactggattcccctgtttatgttgcagaagctctgtccggattaggcatttcccagtctcttcagcattgccctaagtgtgctgatttatttgttggtgcaatgccatggattgggagtcagaggatgagggttgcttcccattctgccactgaccaggtgggtgataatattcaagccaaaacttccttaaactttggcctcatctctgtaaaacgaataataattcttctacctacctctccaaactattatgagaatcaagtaatacaagtaagaaaagcattcgataagtcataagtcactgatcaaacatatggtcatgtatttatcacataagatgactgtgaggaaatacttcatactgttcatggtaggtaaagaaa

SEQ ID NO: 554050 - DNA, 1137 bp, Homo sapiens
cattcctcagctgacatgtttgatttatggctcttaatatctttgaagtaatgcacttggtaattgtagtcactctatcgattttcagaaagctactttatacactgtgaagccaccttcaaagccagtgaatcatgcagtcttgatttccagctgcccagccagtaatgtgaatatgcaaatagggctcttgccgctatatggacaacatttactctgggacaatatctttaactacccaaactaatttatccattagggaactgtgtgttgctaatcgattcactgaaccttgctttaactatctctagtgctttgtgtgtgtccaagatgttcaaataaaaaatgatcatatggagcaaggaaagaattccttcctttctggaaaatacacacaaataataattattattttatraaagagaattcacaactgctaagaaaatgatagaagcaaacactaagatttaatctctgtctgacagaagctatagtctctgttgaggcaagttttcctgatggatttctaaggttttaagctgctgattttggtcttcttttatccatgtgtatgtttccctctgaggcctataaacagcttttagaagtggtcaatttactcatgcctaacgggccgggtgtatttgctgctctctgccctgtaatttgtttgctcgtcatcattaatattcaaaacacagctttaaggactgggcagaacaggtcattaatcaatactgctaagaggagatgactggattcccctgtttatgttgcagaagctctgtccggattaggcatttcccagtctcttcagcattgccctaagtgtgctgatttatttgttggtgcaatgccatggattgggagtcagaggatgagggttgcttcccattctgccactgaccaggtgggtgataatattcaagccaaaacttccttaaactttggcctcatctctgtaaaacgaataataattcttctacctacctctccaaactattatgagaatcaagtaatacaagtaagaaaagcattcgataagtcataagtcactgatcaaacatatggtcatgtatttatcacataagatgactgtgaggaaatacttcatactgttcatggtaggtaaagaaa

SEQ ID NO: 554051 - DNA, 1137 bp, Homo sapiens
cattcctcagctgacatgtttgatttatggctcttaatatctttgaagtaatgcacttggtaattgtagtcactctatcgattttcagaaagctactttatacactgtgaagccaccttcaaagccagtgaatcatgcagtcttgatttccagctgcccagccagtaatgtgaatatgcaaatagggctcttgccgctatatggacaacatttactctgggacaatatctttaactacccaaactaatttatccattagggaactgtgtgttgctaatcgattcactgaaccttgctttaactatctctagtgctttgtgtgtgtccaagatgttcaaataaaaaatgatcatatggagcaaggaaagaattccttcctttctggaaaatacacacaaataataattattattttatgaaagagaattcacaactgctaagaaaatgatagaagcaaacactaagatttaatctctgtctgacagaagctatagtctctgttgaggcaagttttcctgatggatttctaaggttttaagctgctgattttggtcttcttttatccatgtgtatgtttccctctgaggcctataaacagcttttagaagtggtcaatttactcatgcctaacgggccgggtgtatttgctgctctctgccctgtaatttgtttgctcgtcatcattaatattcaaaacacagctttaaggactgggcagaacaggtcattaatcaatactgctaagaggagatgactggattcccctgtttatgttgcagaagctctgtccrgattaggcatttcccagtctcttcagcattgccctaagtgtgctgatttatttgttggtgcaatgccatggattgggagtcagaggatgagggttgcttcccattctgccactgaccaggtgggtgataatattcaagccaaaacttccttaaactttggcctcatctctgtaaaacgaataataattcttctacctacctctccaaactattatgagaatcaagtaatacaagtaagaaaagcattcgataagtcataagtcactgatcaaacatatggtcatgtatttatcacataagatgactgtgaggaaatacttcatactgttcatggtaggtaaagaaa

SEQ ID NO: 554052 - DNA, 506 bp, Homo sapiens
gtttcctgctgggggtcagggggagacgggggcagggggagttggccacggcccaaggatgcagcttcattcatgctgtacccagaggccccaagctgacctgtgaaggctccgctggctcccagaaggtcaagcaggcgcagtagtggcgctcggagttgatgtcggtgaggacagcaacaaagaaggtcggtggattcctctcgggacacagctgccacccgctgggctggcaaaactgcagggaaggctcagcagtcagctcctccccctacacctgtggcaggaaccagcccacccgccccagcatctgcaccaccaggcctggaggctccaacacacacaggcagctccttgcttggagaccctggggacacgtggcctcctgggcctcagtctctccrggtgaagggagtaacagcctctgacctccccacctggggcaaggaccaggagatgggagaacagtccccaccatcatgagtgagtgacaacatgacacagtg

SEQ ID NO: 554053 - DNA, 991 bp, Homo sapiens
tgctaagctagctttcttagggagaatartaacttctcattgtcttataataaatgaagtttgcaggtccatcaacagaagagtaacatcatgactcttaaacagaagcatataattaacacatttttatcaaaacagtgattggaaataaaaaaaaaaaaaagaatcaaacaagataaaagtcaaaataccccataaccaatatttaaaagatttgatatcaatgctggggtcatggctttctacttctcctaacaaggaacagcaactgcctgactcctgaatggcccactgcttggtcagcccacatgaaggtggtgtgaaggggtggcttggaggtgaaaaaattattgatgtgctttatgattctgaaaattaagggctaaagcaaatcttttctaaatgctgcatccatagaaatggccaaagtctacttgtggggaaggaagtggcaaggccatatacttaaatgatgaaatggacttatgggggccaagcaggacactatgagaaattaataaggactaaagatcaatgcttaaagagagctgaagaattgtcaatgatcaagaagtgcgtttgtttattggatgcaggaggactatcactgttattattaagaatttacttttgttacatatgtggcaggcattaggcactttcaaccacaggatatcatgtggttttcaattccttttgttaaaaaaagaatttttttagaaaaatacaataatatgttagcattgcttacttataaaccatgtacagtgaaattgatttctatttcattcgataagtgcaggcacttggataatcaagtaatttctatctgtataaccttgaaattattagcagtaactaaggataaagagttagaatattataattaaaggttgaaagaggcatagctaacttgtaaagtattaaccctgacagatgctttctagagagtatccactttacaacactcattcagatatttaattaaaat

SEQ ID NO: 554054 - DNA, 991 bp, Homo sapiens
tgctaagctagctttcttagggagaataataacttctcattgtcttataataaatgaagtttgcaggtccatcaacagaagagtaacatcatgactcttaaacagaagcatataattaacacatttttatcaaaacagtgattggaaataaaaaaaaaaaaaagaatcaaacaagataaaagtcaaaataccccataaccaatatttaaaagatttgatatcaatgctggggtcatggctttctacttctcctaacaaggaacagcaactgcctgactcctgaatggcccactgcttggtcagcccacatgaaggtggtgtgaaggggtggcttggaggtgaaaaaattattgatgtgctttatgattctgaaaattaagggctaaagcaaatcttttctaaatgctgcatccatagaaatggccaaagtctacttgtggggaaggaagtggcaaggccatatacttaaatgatgaaatggacttatgggggccaagcaggacactatgagaaattaataaggactaaagatcartgcttaaagagagctgaagaattgtcaatgatcaagaagtgcgtttgtttattggatgcaggaggactatcactgttattattaagaatttacttttgttacatatgtggcaggcattaggcactttcaaccacaggatatcatgtggttttcaattccttttgttaaaaaaagaatttttttagaaaaatacaataatatgttagcattgcttacttataaaccatgtacagtgaaattgatttctatttcattcgataagtgcaggcacttggataatcaagtaatttctatctgtataaccttgaaattattagcagtaactaaggataaagagttagaatattataattaaaggttgaaagaggcatagctaacttgtaaagtattaaccctgacagatgctttctagagagtatccactttacaacactcattcagatatttaattaaaat

SEQ ID NO: 554055 - DNA, 991 bp, Homo sapiens
tgctaagctagctttcttagggagaataataacttctcattgtcttataataaatgaagtttgcaggtccatcaacagaagagtaacatcatgactcttaaacagaagcatataattaacacatttttatcaaaacagtgattggaaataaaaaaaaaaaaaagaatcaaacaagataaaagtcaaaataccccataaccaatatttaaaagatttgatatcaatgctggggtcatggctttctacttctcctaacaaggaacagcaactgcctgactcctgaatggcccactgcttggtcagcccacatgaaggtggtgtgaaggggtggcttggaggtgaaaaaattattgatgtgctttatgattctgaaaattaagggctaaagcaaatcttttctaaatgctgcatccatagaaatggccaaagtctacttgtggggaaggaagtggcaaggccatatacttaaatgatgaaatggacttatgggggccaagcaggacactatgagaaattaataaggactaaagatcaatgcttaaagagagctgaagaattgtcaatgatcaagaagtgcgtttgtttattggatgcaggaggactatcactgttattattaagaatttacttttgttacatatgtggcaggcattaggcactttcaaccacaggatatcatgtggttttcaattccttttgttaaaaaaagaatttttttagaaaaatacaataatatgttagcattgcttacttataaaccatrtacagtgaaattgatttctatttcattcgataagtgcaggcacttggataatcaagtaatttctatctgtataaccttgaaattattagcagtaactaaggataaagagttagaatattataattaaaggttgaaagaggcatagctaacttgtaaagtattaaccctgacagatgctttctagagagtatccactttacaacactcattcagatatttaattaaaat

SEQ ID NO: 554056 - DNA, 670 bp, Homo sapiens
atgtgccatgttaataatagggtacactgtttgtggggggcccaagaggtgtatatgggaactttctgttctattaatatctactcaatttttctgtaaatttaaaactgttctggaaactaaagtctataaataaaatayacacacacacacacacacacacacacaccccttccaaaacaggaagaaataatgcattcacataaaagaaattttaaaatgaatgatgtataaataattactaaattaaaattcttaatgtaaaataattatatcttaaaattattccttactttagaaaactgacaccaatttatactttatgttattaatgtatgtgatgcaattatataaagaagataaaaaaactttctcaaattttcactgtagccaacagaaatcattaaaaagcttgattaaatgagataatgtatataaactacatacaagggaaatcaagcatattagaagcattaaacacacaaatgatactattcttattattaacaagctggtaagacaaaaggtgaagcaaatttatggaaccaagaactcttctaagaagcttattaaattagaggattcttcatgttgggccaatacccagcaattcacagtttaaacacttccagctggtaagtgtttttttgaggcaagcaagggaaatgaa

SEQ ID NO: 554057 - DNA, 670 bp, Homo sapiens
atgtgccatgttaataatagggtacactgtttgtggggggcccaagaggtgtatatgggaactttctgttctattaatatctactcaatttttctgtaaatttaaaactgttctggaaactaaagtctataaataaaatacacacacacacacacacacacacacacmccccttccaaaacaggaagaaataatgcattcacataaaagaaattttaaaatgaatgatgtataaataattactaaattaaaattcttaatgtaaaataattatatcttaaaattattccttactttagaaaactgacaccaatttatactttatgttattaatgtatgtgatgcaattatataaagaagataaaaaaactttctcaaattttcactgtagccaacagaaatcattaaaaagcttgattaaatgagataatgtatataaactacatacaagggaaatcaagcatattagaagcattaaacacacaaatgatactattcttattattaacaagctggtaagacaaaaggtgaagcaaatttatggaaccaagaactcttctaagaagcttattaaattagaggattcttcatgttgggccaatacccagcaattcacagtttaaacacttccagctggtaagtgtttttttgaggcaagcaagggaaatgaa

SEQ ID NO: 554058 - DNA, 627 bp, Homo sapiens
gcatattttggcgtggcttgtccttagctctttcacctgtcgtatctcatgtgactttaaaccgtgttaaaccatggtgctgtggaatagcctcgtgaaagcggaatagagctgtactgaaaggttgctgttttcctattattgatggggatagccacggattcttctcttgggagtcaagcaacccacacagaccgtgtgcccccaactgcctttgggcatatgccatcagggagaatccctggtggtgcaagaattccagtgctggaatgggaaggtttgcttaattcctggatttagtattcagaagctgacttgctcatagatactgcacacacttcccaatatcagagttttgttctttaataaaagtaatattttgatctcctrctttactatatagttttattttctcaattaattcaaaacttagactgaaagaaaaggggagctataatttttgcccctttggagctccaacaaaatatacaaatttaaaaataaatgatgggacagaaatacactggaaacctgtaaatctattaaaattatgtttttgaagaccaacaataaaacaggttcataatgtattctggagtgtaaaaaaagagaatagaattatagtgt

SEQ ID NO: 554059 - DNA, 563 bp, Homo sapiens
gggagggtcagagaacagatgctgggagtttccagtccccctaaccagagggggtcacaaggaagatgtgcagaatgaacatcctgggaaactgggaaatgactagggaggaacatggtgcctccccsccagcaaaaaaaattatacccttccccatgagatggagtgtcagcaagcttccaggccccagcccagggtgcaggaagaggagctacacccattcacctctggtcagcatgctcccaacgtctgagacctcatttctcattccttcttcagtccccattctcattgtggttcgaggtctttctctctgagccaggaactccgcaaccttccaccctccctacctcttcctctcctaccccagcctggggctcagtcctggctcaagcactcagtccagcagaagcactgtgtagcctcccattaaagctcacgcctgtgaaaagaacagccattgaggccttgagatggggccacactgacccgctgactctcaggactggacacagcagaggccacacatactcagaacaaagcctggaaaggcaaggctggag

SEQ ID NO: 554060 - DNA, 563 bp, Homo sapiens
gggagggtcagagaacagatgctgggagtttccagtccccctaaccagagggggtcacaaggaagatgtgcagaatgaacatcctgggaaactgggaaatgactagggaggaacatggtgcctccccgccagcaaaaaaaattatacccttccccatgagatggagtgtcagcaagcttccaggccccagcccagggtgcaggaagaggagctacacccattcacctctggtcagcatgctcccaacgtctgagacctcatttctcattccttcttcagtccccattctcattgtggttcgaggtctttctctctgagccaggaactccgcaaccttccaccctccctacctcttcctctcctaccccagcctggggctcagtcctggctcaagcactcagtccagcagaagcactgtgtagcctcccattaaagctcacgcctgtgaaaagaacasccattgaggccttgagatggggccacactgacccgctgactctcaggactggacacagcagaggccacacatactcagaacaaagcctggaaaggcaaggctggag

SEQ ID NO: 554061 - DNA, 985 bp, Homo sapiens
cataatgagacaaaaagaactcacgttgtatgactccatttatatgaagttcaagaacaggtgaaattaatctatggcgatagaaggcagagagtggctatctctgggtgagtgtatacagggggggctttagagagccttatgagatattagaagtgatctacatccttatttgggtgataattatgggggttgcatatatacataaaaatcatgaaacggtacacttaagattcccagcttgtacactttattgtatgaatgttacattttagcttaattacagacacacacacacacatacacacaaacatgcacatgatgagggacccagataggtaaagagtaggttattttaaaaacaactagtttagtggttctcaaatctatctgtgaataagaagtcacctggagagcttgttaagaatacagattttgtctgggcgtggtagcttgcgcctgtaattccagcactttgggagatggaggcaggcagatcacttgaggtcagaarttccagaacagcctgacccacatggcaaaaaccccatctctactaaaaattagctgggtgtcgtggaaggtgcctataatcccacctactcaggaggctgaggcaggagaatcacttgctcctgggaggtggaggttgcagtgagccaagatcatgtcactgcactccagcctgggtgacagagccagattccatctcaaaaaaaaaaaaaaaaaaaagaagaagaagaagaagaaaaaatacacaattttaggctgcttccttgacagatttggcctctgagagtaggacccagggatgagtactttaatttttttttaatatgcactccgaagtgattactatatgatcagtctgtaattgtccacatgtggcattgaggaagcagagttagtttacatagggcctatgatatgtgttcagagatcctttccattgatcatgtcatttgaatcttaatcttatagggca

SEQ ID NO: 554062 - DNA, 985 bp, Homo sapiens
cataatgagacaaaaagaactcacgttgtatgactccatttatatgaagttcaagaacaggtgaaattaatctatggcgatagaaggcagagagtggctatctctgggtgagtgtatacagggggggctttagagagccttatgagatattagaagtgatctacatccttatttgggtgataattatgggggttgcatatatacataaaaatcatgaaacggtacacttaagattcccagcttgtacactttattgtatgaatgttacattttagcttaattacagacacacacacacacatacacacaaacatgcacatgatgagggacccagataggtaaagagtaggttattttaaaaacaactagtttagtggttctcaaatctatctgtgaataagaagtcacctggagagcttgttaagaatacagattttgtctgggcgtggtagcttgcgcctgtaattccagcactttgggagatggaggcaggcagatcacttgaggtcagaagttccagaacagcctgacccacatggcaaaaaccccatctctactaaaaattagctgggtgtsgtggaaggtgcctataatcccacctactcaggaggctgaggcaggagaatcacttgctcctgggaggtggaggttgcagtgagccaagatcatgtcactgcactccagcctgggtgacagagccagattccatctcaaaaaaaaaaaaaaaaaaaagaagaagaagaagaagaaaaaatacacaattttaggctgcttccttgacagatttggcctctgagagtaggacccagggatgagtactttaatttttttttaatatgcactccgaagtgattactatatgatcagtctgtaattgtccacatgtggcattgaggaagcagagttagtttacatagggcctatgatatgtgttcagagatcctttccattgatcatgtcatttgaatcttaatcttatagggca

SEQ ID NO: 554063 - DNA, 1200 bp, Homo sapiens
ggcagacccttatttattgtggaggtgttgtaaactctgctaaggagttcggatttcatgccaaactggaagcttggcatgaaagctgctggatgggaagctactggagagtttgaaacagaaraatagcatattcttaccagttctcccagcgtccagctttcgtcagcataccgcagacctttgcccaaagccccttctccagggtgacttaatcagaaaccctcattggttaaagccttgacttttgaaaggagccttggatcctggtttctgtgagtcaccgttcagtacctatttccctttgccgccttcctttttttccttttcttggctagcatctcttgagtgatttaccatgtgctagacattttagacacgatctcctttgatctttattatggccctgtggataaaatgcttagaaaggaggagtccaagagagttaaattggctccctcggggttacatagtgaagacatggaagagccacgatttgaatatggatctgtttgactttgatgctaagtccaaatttttaatcattttgctagacctctcctcacatcctctccagatttcattctttttttttttttttttgtctgcactttttgcagtttcaagccactcctttgcccccttctttgttctagaaaactctcctttaggcccacttcctcatggcagccttacttgatgaagttgctgaagaagctgaggtattgatgttgctgccattttcattcatctcaccccagctggtctggaaaagcttgtacatttgtatgggttaattctgggtccatagaaaagctagcctggtatctagatttagcaaggaccggagtttggttctgctgctgctacagatttcctaggtaattttgggcaagtctcttgatttatctgatcagtcttcttgatcacgaagagagctcagggaacaggctaacacaatgaacccttccagcaagtctatgaagtgatatcctcatgtggtaggtgggcacgcatgatcagagggatggagtgacttgtccggatcgcagggttgatgccctttccaccgcaccactgctgtttctgagcaaccgtactctggtgactcaagatggattacaggttttgggtacttagctccttaagggcaaggatgtattttactagtctttgtactttccgtctctgggcctggca

SEQ ID NO: 554064 - DNA, 1011 bp, Homo sapiens
caggtgagaaaagacaggcgatactattttgtctgtgtaattctttgtggatttgttttatattgttcaaatctagatatttggtccataccagttcatgattatcatgttcttggaggattgtttttttgctagtgtggaatctgtctgtgttcacattaatgcttttccactttcaattctattttgctgaatactaatatttctttgatttatttgttaataatttacttgatattttattttaaacatattattttgtttacwtatgactgtagtagatagcatatagcaggaattattatggttctgatttgaatacttgccttttaataggcatgcttaatttatttccttttcctgacatcactggtctgttttcatgtgtgtttgtatacaccatcttcagcatcacatctgttttcctctcccgtttcattttggattgtgaagcttattccatgtacttctctattagatgaaactttcattttctagtctttctctaattttccttacatttttaccatttaaacaaaactctgaaattactgggacagctggatatctacctgtaaaataatgaagtgtgatctctatcttaaaccgtatgtaaaacttaactcaaaatgcatcgtagacctaaatgtaagagctgaaaatgttctaaaagtagaaagttgtaatggttgcataattctgtgaatacacttaaaaacactgaattgtaaagttgaaaagggtgtgttttatgatattttatctcaaagctgttattaaaaatctaaaattagtatgtctatctttctaaggcagcttgctgtaatatcttgattttcttaatttagattttcctattgcaatgctatctctttcatgaatctggatgtccatttgtgctttttgatggagggctgtcctgactgggaggtggctgttttattttgtttcaaatcatacatcttcttccacatttggcaatttcatggttgcttctgctacacgttttcg

SEQ ID NO: 554065 - DNA, 1353 bp, Homo sapiens
catataaataaataataagaatgaatataaaattaatgtttcatttaaagtgatgtaaatgagaaactataatagttataaatagtatatggttcataaatacacatgatttacaaattcctttttttttttttttttttgaggcagagtctcactgttgctcaggctggagtgtggtggcatgatctcagctcattgcagtctctgtcttccgggcttaagcgatcctcccaccccagcctytgagtaactgagactacaggtgcgcaccaccacacccggctaatttttgtatttttgtagtcaggcttttgccatgttgctcaggctggtctcttaacttctgagctcaagccatctgcttgccttggcctcccaaagtgctgggacttcaggtgtgagccattgcccctggccacaaattctattcttaagcaattaaattggtggaaatttcttgcatttaaaaaaaatgaatttactacagaaattatattttgcctcccaaaacactttcaccatttttaaaaataatgaaataaggtttgttgcccaggttggtcttaactccgggtatcaagtgattctcctgcctcagcctcctaagtagctgggattacatgttggaagagctgcccagtgtgtctgcaataataaaaaagaaactgaaacattttaccagtttgcatttgcccaggagctatggtgatcttctttgagtccttccaattttagtatatgtgctgccaaagtgagcacctctcagtgtttttatgggtgtatctattgcagaatgcataaataacttttttacctgtagttttagaatatttggatgttaataatctgatctattttgcacctgaatttaaatacaagattttaaaaaatttcacaaaagagttttcctccaagtgtaaataattcattttattttattttattttattttattttattttattttattttattttattttattttattttattttatgagatggagtcttgctctatcacccaggctggagtgcagtggtgtgatctcggctcactgcaacctccgcttcctgggctcatgtgattctcctgcctcagcctcccgagtagctgggactacaggcgcctgccactatggctggctaattttttgtatttttagtagagatggggtttcaccatgttggccaggttggtctcaaactcctgaccttaagtgatccaccagcctctgactcccaaagtgctgggattaccggtatgagccactgtgcctggccaataattcattttaataccttcaagggatagtgagtttgggaataagcaaagggagtagcaaattattgct

SEQ ID NO: 554066 - DNA, 1353 bp, Homo sapiens
catataaataaataataagaatgaatataaaattaatgtttcatttaaagtgatgtaaatgagaaactataatagttataaatagtatatggttcataaatacacatgatttacaaattcctttttttttttttttttttgaggcagagtctcactgttgctcaggctggagtgtggtggcatgatctcagctcattgcagtctctgtcttccgggcttaagcgatcctcccaccccagcctctgagtaactgagactacaggtgcgcaccaccacacccggctaatttttgtatttttgtagtcaggcttttgccatgttgctcaggctggtctyttaacttctgagctcaagccatctgcttgccttggcctcccaaagtgctgggacttcaggtgtgagccattgcccctggccacaaattctattcttaagcaattaaattggtggaaatttcttgcatttaaaaaaaatgaatttactacagaaattatattttgcctcccaaaacactttcaccatttttaaaaataatgaaataaggtttgttgcccaggttggtcttaactccgggtatcaagtgattctcctgcctcagcctcctaagtagctgggattacatgttggaagagctgcccagtgtgtctgcaataataaaaaagaaactgaaacattttaccagtttgcatttgcccaggagctatggtgatcttctttgagtccttccaattttagtatatgtgctgccaaagtgagcacctctcagtgtttttatgggtgtatctattgcagaatgcataaataacttttttacctgtagttttagaatatttggatgttaataatctgatctattttgcacctgaatttaaatacaagattttaaaaaatttcacaaaagagttttcctccaagtgtaaataattcattttattttattttattttattttattttattttattttattttattttattttattttattttattttatgagatggagtcttgctctatcacccaggctggagtgcagtggtgtgatctcggctcactgcaacctccgcttcctgggctcatgtgattctcctgcctcagcctcccgagtagctgggactacaggcgcctgccactatggctggctaattttttgtatttttagtagagatggggtttcaccatgttggccaggttggtctcaaactcctgaccttaagtgatccaccagcctctgactcccaaagtgctgggattaccggtatgagccactgtgcctggccaataattcattttaataccttcaagggatagtgagtttgggaataagcaaagggagtagcaaattattgct

SEQ ID NO: 554067 - DNA, 1102 bp, Homo sapiens
gattcattcaccctattcctcttcttgaaaaaatcacgtggctgatcatcatctcgggtttgatggactgtctaaaaacagggatgcagtaataaacactgtgaacatgtacacaagaaacaagcaagcaaacaaacaaaaatcccagaataaatctaagtcagatttttcttctaagtttacattacctttcctgtagtgctcaaaatattcttgctcaatctgctggaagatgatgacagctggggaggtgacttctttattcctcttatatttggaaaggtctcctcaccaccggaactagaagcaacagaatactgtcagtaactattgattgcaaatggtcctaccaccagtatcgggttggtttttcacttgttttttaatacttgtataatattgaaatattaaggctgtgatcatatagtggtttgcactctaggttatgaaatactggggaagggagacattgtcttatgcttacagctttgtcttttctgcttattacagtagatattagagacaggatcacaggatcacactactataaatactgtgaatggattccatctctctctctctctccctgttcacacacaggtataatcttccttggaaataatatgttgaagaaatctggaaggctaaataaggtcaggtcttattacagcgttcaatcattgcattgcccaatcattcattcatgcaacaaataattacaggagtacccagaaaaatggcaatgattatgcacgtccctgttcrgaaggagcttaaactctaggaggaacgttcccattcaatttttcggccttctctatcacatcaatccattataagactttccatatattcatacatattacatattatatatcatctctttatgaagcattgttgacctataccacatattgctgttattcccctctcattttgagtggcctattaaaagtgcactgaatggaaattggatacttctctttcccgtatcacctgtctctgtaaaataaaagagatgattatagaagatttttattttcttcctgaaactttcctgtatttttcccacattaatcatgtaagcctttttagttagctt

SEQ ID NO: 554068 - DNA, 1102 bp, Homo sapiens
gattcattcaccctattcctcttcttgaaaaaatcacgtggctgatcatcatctcgggtttgatggactgtctaaaaacagggatgcagtaataaacactgtgaacatgtacacaagaaacaagcaagcaaacaaacaaaaatcccagaataaatctaagtcagatttttcttctaagtttacattacctttcctgtagtgctcaaaatattcttgctcaatctgctggaagatgatgacagctggggaggtgacttctttattcctcttatatttggaaaggtctcctcaccaccggaactagaagcaacagaatactgtcagtaactattgattgcaaatggtcctaccaccagtatcgggttggtttttcacttgttttttaatacttgtataatattgaaatattaaggctgtgatcatatagtggtttgcactctaggttatgaaatactggggaagggagacattgtcttatgcttacagctttgtcttttctgcttattacagtagatattagagacaggatcacaggatcacactactataaatactgtgaatggattccatctctctctctctctccctgttcacacacaggtataatcttccttggaaataatatgttgaagaaatctggaaggctaaataaggtcaggtcttattacagcgttcaatcattgcattgcccaatcattcattcatgcaacaaataattacaggagtacccagaaaaatggcaatgattatgcacgtccctgttcagaaggagcttaaactctaggaggaacgttcccattcaatttttcggccttctctatcacatcaatccattataagactttccatatattcatacatattacatattatatatcatctctttatgaagcattgttgacctataccacatattgctgttattcccctctcattttgagtggcctattaaaagtgcactgaatggaaattggatacttctctttcccgtatcacctgtctctgtaaaataaaagagatgattatagaagatttttattttcttcctgaaactttcctgtatttttcccacawtaatcatgtaagcctttttagttagctt

SEQ ID NO: 554069 - DNA, 538 bp, Homo sapiens
agtgttctttgtgttggaaagttattgtgtcgattccttgaaattttttttaatctgatctgtgaaatccagaagtctgggaatgtcaggagacgtctggtggcattctgtaggtgggagtgtcacggtgtcgtaggaagttcaggaatctgaagtctgtgtcccagccatcctctgttccagacatgctgggtgacagtaggcaaggaatttctatttctgggtttcacttttctagtctctaaaattcagagagcagctttaaagaatcctgagccgacgagggcatgaaggacatggaaagcctgagaggaaagycaaggagtcaggcaggtggacttcccggaggaggggacctggggagctgctctgggcaggctctttgtgaagggagagcagccctgctcagtttctccgtggaaagtctcagggttaccatctccgcctcaaatttttcaaaaagaaacagaaatcatggtttttatgttaaatctctccgttcataaatattagcaaccgctttaattaaaaactaaac

SEQ ID NO: 554070 - DNA, 883 bp, Homo sapiens
cttttctttttttcaaaagcagatattctgtctcactcattttgtgcatgtcttcactgcctgacattctgcttggcaaataggttttcaataagtgtatgattttattttcttttattactttttatgtagtgatgaggtcttgctatgttgcccaggctggtcttgaactcctggcctcaggcaatccttccaccttggcctcccaaaggagctgagattacaggcatgagccatcatgcccaaccacctatgatttatactgtatttcatgaatcatgatcaatgatttattagtgttatcactaatttactctatgactttggacaaataactacttcttattgtggtaaaataaagtctaggctgggcatggtggttcacgcctgtaatcccagaactttgggaggctgaggygggcggatcacctgaggttgggagttcgaaaccagcctgaccaacatggagaaaccccgtctctactaaaaatacaaaattagccgggcatagtggcgcatgcctgtaatcccagctacttgggaggctgaggcaggagaatcacttgaacctgggaggcggagattgtggtgagccgagatcgcaccattgtactccagcctgggcaacaagagcaaaactctgtctcaataaataaataaataaataaagtctaaattgcgacaaaagtttatagagccaaacacgaaaggaaaaacaaaaaccttatcgcaattttgatgactacagcaggcccttaaataatgttgtttcattcaacattatttcattataatgttgatcggggggaaaaaaaacagatttccagccagggccattgtctttgtgaagtttgcaagatattcccatgcctttgtgggtttc

SEQ ID NO: 554071 - DNA, 1470 bp, Homo sapiens
taaccccatgccaaataaatgagatgcccttttcttaagttaaagtgaaactattgtcaagaaaagccaacacaatgatcaaccacaatgtaatttaagttcaattactgtgtattcacaaaatattcttggaacaagaaacgtaataggtgcaaaagacagctaaagtgggtttgtcattttttgtcattttgtctcttttctttgtataatggtggctaagagcacgaggtaacagtggctgcttgcatttttcacacgtaacaaaaacacttaatgactcccaaaggaaatacattttttaacaagagctaatccatgatttgtatcctagacccctgcctaaacccttgttcatatgcagcccaagggtgtcaaatgtaaaagtctgaaggaaaagaatcctttcagcaaataagtatctttagaataaaaggaaaatgattaactttttttcttttctgaatatgaaaacaatcccaaaataatgaattgtgaacaggcaaatttagaatagatatgccaaaggcctccagaaaagataggggtcttatcaataacatctttgaaaaaatctaaaaggaatcaattaaattttgatcagagttaacacagccactaagagatggctgctgtgaaataatttttttaattactcacttaaaacaggctatatacttctctaaatgtatttacatcacataaggattaaaaaacaaaaccaaaagtaaaagctctgcaagtggttcctaactagtttacaaaagttaccgaaaatgcacacttacagagaacacattaaaaccaatttcataagaatactgcagaacatacttactatgtctttttaaaattccatggcagacatcatctgcctctgaagtggctacttccttggttttggtaaattttattaatcaagagttctattccttatttgaccaaagcaaatgcattttactttgaacgtgttcaaacttaagtgagttgcttttgaaggaagtgctaaaggaattggaaactagataaagaaaacatacctttggttctaaaaagtaccctttgaagtagcgatactgaactgatactcctctactgagtacaatggttgctttccatagcatgctgtgaagaaagaaaattaaaagcagcagcatcaatatcaaactacagtgcataaagacttcttaattcacaaaacycctcaaataaaacgtatgaccaatatcacttatttattcctacacaaaattttacaggcctactctgtagcaggcaatgggaacacaggggtatatactgcagaaagagccttatcttcaaagagcttcctttgctgtgtgggtagacagaaaaataaccaaagaagatagacagaacgaagttctggaggaggcttttaaaaggaaggaaggttttaatgaggaagcgctgtctgagctcaggtctaaatgatgagaaggaaccagc

SEQ ID NO: 554072 - DNA, 1342 bp, Homo sapiens
ttcaaaaactgtattctcatggcgactgcatggaaacttgagcacattttatggaaaattattgagcacagtcttttcatgatccctgtatgctgtgtgtcctgagggcactaactcagagtgtcctgttactccctcatcagtgtgtcacctggacaattcactgagctcgttctctctctctctctctctctgtgtgtgtgtgtgtgtgtgtgtgtgtgtgtgtgtgtgtgtctatctgtctttctctttcattcttttccatttggccctgttctgtcccaacatgaaggcaataatttgttacctcattaatggatctatccttttagttttttaaccacttccctatgctacccatgaaacctagttggggctctgttgtgtctgatttcccctggcttattctttactttttcctccttttccaggctcagcagggagctgctggaggtagtagagcctgaagtcttgcaggactcactggatagatgttattcaactccttccagttgtcttgaacagcctgactcctgccagccctatggaagttccttttatgcattggaggaaaaacatgttggcttttctcttgacgtgggaggtgagtacctttctatgaaggtgataaggatccactgagtcttccatataaagatcatattcctgctccaagtggccattactgagctgagagatgtcattgccacagggaggacctataggcacatgtaggttgaatgaaactctagttctacctggaagcccagacaagggatgggtcagtgagcmagactctcttcctagtctcaggccatacctgtggcgccctgatcctattctcatgacattggacctgggcagatgtgacaaattcagagaactatgattttgactcaagggtttgtagatttcctttttcactctaatttcagtgtctaaagtcctcacaaccatgaacaatctgagtatttgatgagacagggctaaatattgcagtttttctcctagaaatcatttgagggtatttgctttaagttgattggaaaaatatggcgtaactgtttgcacaaacttgggacaaatgatattgggataacgatctactagaatagggacattttacccacagtttctgggagaaaaaccgaggaatttctatcatgaccagccttcaggcctcctgaaatatatctctcacagtgtcctattcttatgctgaggagcctgaggtccctgtgtgaggattagacagtggattgttatgtgtgtaggggaatcagcttaatgtgtctgtccatgtctgaatttattgcagaaattgaaaagaaggggaagggga

SEQ ID NO: 554073 - DNA, 591 bp, Homo sapiens
tctcgtgatgttctgtgtagccctggcctcccctggccctgccccggaccmcccattcccacctgtcatcctctggcctctctgtccctgcttcctcccaggctctgtggtccacctctgttcctctcctacacctagtggcacgtctcctcacagcccatgcccagtcagtcatcagggacagtttacctgccaggtttccacccatctgggcacttggcaagactagaaatctgactacatcaagcctaggagcaatgagagcttggtagccataaataccatcagcccttagattttgttctctaaacaccgtacctgtggtgtgtgtagtattcctgggaaaactgtcaaactcaaagtatcaagcacccatacataacttctagtttacaggcaggtcaagagggaggagtaggttaaacgccctcacgatgagcacccacacacccagagcacaggaggttctacgaggcagtgctgggcttttcacaaattaaggaaaaaagaggttgggtggagcggggggtctgttctaaattaagagaaacttcagagacataaaaacgaaatgcaatgtatgggccctat

SEQ ID NO: 554074 - DNA, 591 bp, Homo sapiens
tctcgtgatgttctgtgtagccctggcctcccctggccctgccccggaccccccattcccacctgtcatcctctggcctctctgtccctgcttcctcccaggctctgtggtccacctctgttcctctcctacacctagtggcacgtctcctcacagcccatgcccagtcagtcatcagggacagtttacctgccaggtttccacccatctgggcacttggcaagactagaaatctgactacatcaagcctaggagcaatgagagcttggtagccataaataccatcagcccttagattttgttctctaaacaccgtacctgtggtgtgtgtagtattcctgggaaaactgtcaaactcaaagtatcaagcacccatacataacttctagttyacaggcaggtcaagagggaggagtaggttaaacgccctcacgatgagcacccacacacccagagcacaggaggttctacgaggcagtgctgggcttttcacaaattaaggaaaaaagaggttgggtggagcggggggtctgttctaaattaagagaaacttcagagacataaaaacgaaatgcaatgtatgggccctat

SEQ ID NO: 554075 - DNA, 608 bp, Homo sapiens
tcaagaccatcctggccaacatggtgaaaccccgtctctactaaaaatacaaaaattagctgggtgtggtggtgcrcacctgtagtcccagctactagggaggctgagggaggagaatcgcttgaacccaggaggcggaggttgcagtgagccgagatcgtgccactgcactccagcctggtgacagagcgagactcttgtctgaaaaaaaaaaaaaaaagaaaaaagaaaatgacaccgtattaggccattgcaggtgaagaggagagcaagaacaattttactggaatggcaaaagccaaataacagtgggttaatgacaaaattggaggagaggagtcatcaagtgctcattttgatttcaagaacatttacttgaaggcaagataaaagagagagatttgtaacttgaagacgcagaggagtctaggaattatacttttgaaagcagtagtagaaacttgatatttaggagagtttaagagcccagtctggtgaccactgagctaggttaaaaaaagaagaaaggcttttaccttcttttttgggtgttagtataagagtattttaaaatgagctgtgacttcaaaatatctaaacctgcctgg

SEQ ID NO: 554076 - DNA, 262 bp, Homo sapiens
ccccccacccccaccaactcctcctacaccctggaatcctattttatgtgattccctgactctgggaagttttccaggccatctacagttataagaaagataatgttataagaaaaaytgtagtcatgatctgaatctctctttactttttctcatgacattttttttgcctctcctttactttatctcaattgttcaaaagaaatgagaacagccaagtattcagtatgtatagcacatgccagtttaaggtctataaata

SEQ ID NO: 554077 - DNA, 1502 bp, Homo sapiens
tgcaggggatagctgcctgacctggagaattgaatccaagcatgtgagggtggaggctccatctctccaagtcccttaaggcctagtgttatcgggacctgttcttcctggcacgtgtggggctggcaatgcaatggccatgctgactgcctgcccctgagagtgacaggacactgtgaaaccattgcctgatgacacccacatctttatgtycagaagtactatgagagcatcatctgagtagctcctatgtgggtcaagctgaaacatctcactgtggccagtaataacagggtgtacaatacaccctgtacaagagtgtatgcatttagggagacaatttttatcaaaatagtcaaacagaaatggaaagtttgcaatatctcactctataccaagcttgtccaacccacggccctaagatggctttgaatgcagcccaacatgaattagtaaactttcttaaaacattatgcgatttctttgcaatttttgtttttgttctctgttttgttgtttgtttgtttttgaaatggagtcttgctctgtcacccaggctggagtgcagtggtgcgatcttgactcaccgcaacctgcacctcccaggttcaggtgattcttctgcctcagccacccaggtagctctacaagtgtgtgccaccacacccagccaatttttgcatttttcgtagagacggggtttcaccatcttggtcaggcttgtctcaaactcctgatctcaggtgattcacctgcctcagcctcccaaagtgctgggattgcaggcgtgagccactgcgtccagccctttgcaattgttttttagctcatcagctatcattagtattagtgtatcttatgtctggcccaatacaattcttctttttctaatgcagcccagagaagccaaaagattgaacacccttgctctatacagttcatgttgttcctcaaagtattctggaatttagaattattctacaatttagaattatttcagaatttagaattattttaggatatgtttttcagatatttttactccctagaaaacccaaggtctttaatattaagaatgattggcctcttggcattttgccttcttgatatgctggtttcacccttgcaaccagaatatataaatgtgagccacaggctactgtataaatgaggaaggagcagttggttccacttaaatgagctgatttatgttattctgtatggtaatatacacttatcttgcattcagggacttttttccaggcatttgttttttccgcgaatttttctttgagactcctgaaaacacaatgcaaggctgttgctaaactgtgggaacatgatagattatcccgtacaaacatatgctatttccttcctcccattttctcccccttctaaagaatgacgattttttttattgttgtttttcaacatggtctaaaggggtgccctgaagtcacattatggtggcctcacagctgaaagcttacagtaaccac

SEQ ID NO: 554078 - DNA, 552 bp, Homo sapiens
aagtacctsgcacatgaaaatagctaacattgattgagcgtttactgttaatgctattcaggtatcacagcagtttgggagtaggtgggtcctttagcactccgaaatcaaactgtgaagatgctcacttaatccctatctgtaggttgcttctgaccccagtggaatctttccatattgattgatgcatttaatagacgtttgagcaccatttgccagccattgttctgggtactagagataaaggatcaagtcagacaaaaaccaaccctcatggaatttatattctaatgggaggagacagacaataaaataaatgttacatatgataagtggtagtatatgctatggagataacttggctgaaggagaaagagtatccaagttaattgttgttttatatggtacagtcagagaggcctctctactaagggaatgttaatcagagacctgcaggaagggagtgagccatgtgaatatctggaaaaagtgtgttcaaggaaaaggcagaagctaattcagaggctccaaggtgtgaatgtgcttgaggtt

SEQ ID NO: 554079 - DNA, 543 bp, Homo sapiens
cagcagatctcaaaaacacgtatgaagctaaacaatatagatgttttctgtaggccagtgtttcttaagtgatttacaaagcccctgctaaaggaaaacaactatccctgacccctagtgttaaatcatgaaatataggtacctatagatacatacacatgtatacagggacatatgtgcacatatacgcacacacatatgtacatatatacacmtatggtacatttacatatacccacatattttacatttgcatatttaggcatttcccagtcatattacgtacccttcatcgttggctgaggctcttggctctttgattctacctaatcttcatactgggatctaggctgatggagaaatccctttctgggatattaccaggcttatgacaggaaggaaaaagggagagggcagaacactcagtggctatgaaagcttccacttgaaaataacacatatcactcccactcacttttatttggcaaatcaagtggcacagccaaaaagctaaagtcagcagggtgggaagtataatttttc

SEQ ID NO: 554080 - DNA, 543 bp, Homo sapiens
cagcagatctcaaaaacacgtatgaagctaaacaatatagatgttttctgtaggccagtgtttcttaagtgatttacaaagcccctgctaaaggaaaacaactatccctgacccctagtgttaaatcatgaaatataggtacctatagatacatacacatgtatacagggacatatgtgcacatatacgcacacacatatgtacatatatacacatatggtacatttacatatacccacatattttacatttgcatatttaggcatttcccagtcatattacgtacccttcatcgttggctgaggctcttggctctttgattctacctaatcttcatwctgggatctaggctgatggagaaatccctttctgggatattaccaggcttatgacaggaaggaaaaagggagagggcagaacactcagtggctatgaaagcttccacttgaaaataacacatatcactcccactcacttttatttggcaaatcaagtggcacagccaaaaagctaaagtcagcagggtgggaagtataatttttc

SEQ ID NO: 554081 - DNA, 564 bp, Homo sapiens
ccagtgactggccccaaatatcccctaagactgaccctcgttctgcagcccctcaactcgaaccgagctgcccacctttcccgggggtcggaggggcaggacgtagcgcaagcccatgtcggggttacagcttccaacccactgagttaagcaataaaacggtctgctgtcctgaccccgcccccacagggcccgcgggggagcccgcgtacgccccccagttttctcgtccccagccgcactccagctggtccttctcyaggcagatccggaggcggccgccgatctctccggcgctctcccctccgcctaaggggcagcagggtcccgggaggcccgccgctcaggttgaacccagggcggcccaggaagcggcgctgccaccgcacgccatatggagaggtggccaggggcggaagaaaagggaaaatcgatccggagcaagcagccccgagccggggtctcagccccagcctgaagaccaccgcccccgagcacagcccacgcggggatggttgcaacagccgcagggtggcctggaccacggacccccaaggagacctg

SEQ ID NO: 554082 - DNA, 665 bp, Homo sapiens
tgctgtcacagctgtgatattttcctgatgggctgtgtatgtgtgcaagtacacacacaccacgcacaagggtaatgaagttgccctaacagggaaggtgttttctcttcactttcagttggggctctgtctggctattctaagaggccaacactgctcaggctggaccatggactgtcacaacaagggtcctagtcctgctcttttcccaccccacctgccagggacccaaagcgggtggtcaggtgggcacacataccttccgcagcttcccgtagtcaatcagctcgggccggtgtcggtggatcaaagcacagaagccgaggccatccttccagctgcccggggagagagaagaaggagcaggctggtaaatgaggctgaacaaacgggcaaccagggcaaagcaggggcctcctagacwccagagagatgaacacatagagctttctggggtaggagttagaagacaggatgggaagggacatttcttcctgccacaaatcccaggcactagggtcaagactttgtgggggggttgacaagttcagataaacctgccatatccagccctacccccgaccaaggcctatggccctagtctgctgttccagagccctgggctgggacttcctggacaatttccttgggggcgctcccagtag

SEQ ID NO: 554083 - DNA, 665 bp, Homo sapiens
tgctgtcacagctgtgatattttcctgatgggctgtgtatgtgtgcaagtacacacacaccacgcacaagggtaatgaagttgccctaacagggaaggtgttttctcttcactttcagttggggctctgtctggctattctaagaggccaacactgctcaggctggaccatggactgtcacaacaagggtcctagtcctgctcttttcccaccccacctgccagggacccaaagcgggtggtcaggtgggcacacataccttccgcagcttcccgtagtcaatcagctcgggccggtgtcggtggatcaaagcacagaagccgaggccatccttccagctgcccggggagagagaagaaggagcaggctggtaaatgaggctgaacaaacgggcaaccagggcaaagcaggggcctcctagacaccagagagatgaacacatagagctttctggggtaggagttagaagacaggatgggaagggacatttcttcctgccacaaatcccaggcactagggtcaagactttgtgggggggttgacaagttcagataaaccygccatatccagccctacccccgaccaaggcctatggccctagtctgctgttccagagccctgggctgggacttcctggacaatttccttgggggcgctcccagtag

SEQ ID NO: 554084 - DNA, 531 bp, Homo sapiens
ttagaaggagtgaaattgtaaccttaagctggataggaaaaggtacttacagactggtgcacaggcatggcctcttccagaagatgaaccatgagcacaagtccctggactccctccctataaaggggtgtgcccagcctttgcagtcttgctcagctcctgttcatgtggctgcacagccaccattgccagctttctgcaatagccccttctctacctctgtcacctggacttcctcaagctggcacttccaatcaagtgttttctacattttttataaccccaaatcaacctccagtctagctgggctgtgcaarctatcccccaaagtaacaatgactctggttgtaaataggcatacatttgaatggccaacccaccccctgaattttcccacaattttgtgaatgggaggtttttcaagaacttctgtgtcaccttacaggggaaatccccatactttacaattctatggctcagggtaatttttatttttacttgttaatgtgaagatattatatctattgtaaa

SEQ ID NO: 554085 - DNA, 595 bp, Homo sapiens
gctcattcaagtccagttaccttggtgacttcagggttaggtcttttcttaagccttgcatctgacctaaggactttgrcaagcctagctcaatcacatgatcaagtagatttataaggaccccccctactggcagcttctttgagctccctgaagcagattcctcccacagaccttggtagttaaagccagagactgaatacagcccatgtgtgtcactgggcccatggggagcgtgtgctgtgaggtgtctcttggattatcgatgcttgcctgaattctccgcctgctgtaccaattttttgcctttaaataaaagccttatgtgactacactctgtggggtatggtgagtcatttcaaatatacacgcttaggaaaacatatataattgtctacacagcaggtgtcagtaaaatattcatactgtcagtgcacatgtacatactgaattggtgtatttcaatttctacaagttaagttactgggatttttttactatatagtggaagaatatttctttgaaggaatagtctttttcaggatttgttaaattaacaggctaatcaaaagaatgaattgtcagtttaaaatga

SEQ ID NO: 554086 - DNA, 1253 bp, Homo sapiens
gcaccatagagcagaaagcagagtgccagcaccatggaccagcacccatgcacccgccccctgcccacctggaacactccaggctccctgagcctactccaagcctctgctcagccagtctgtccctttctctgcgtcttcgcctgtgctgagggtccctctgcctgaagtactctgactgcggccctgaccacccccaggctcctctccatctgtctgcacatgccagggccttgtcctccttcagccccggtcacctccagaagcctcagctagcacagccctcccctgcacacggctatcacagccccgtgtgcctgcctcacaacatctccccaaaccccagaggccttttcctggttgtcctggcttccttgaatgtcrgttctgctggagctgccagaggcggctggagccctgacttgtctccctgtctcgccactgtgcccgggccctggaagagtccctggtgattccaggcaggcagtctttatctccccaggaacaaggatgaagggatgagcgtggatgtggtagcgtgcacctgctttctgctttattccgggacaatgggaagtggatggcaacctcctcataatggatgcctgtgagcccattgggggccggatggaatctcttccttagatgtgtgccttgggaatgtttgccccaactctgcatgtgtgagacagagagaaggaggggtgggtttaaaatgaaaaattatatatcctacctattaggtcacgagaatatgacaaagaaaagtaaagcagactcaggcatagtgacaggagtactgttttgaatttactgggaaggtgatattttatcaagggttcagttgaggacaggagtgtgacatgaaggtatcttggagatgaagagtccaggtcaggggagtgactcatgcaaaggccctggggtgggagtgtagcagagagatgggagcagagagaggagggctgagtggctgcaagtggctaaaggggcgacagcaaggggatggatgggagaggggctgtggccatggcaagaatggggactctattctgggtgaggggcagccatgaggggccaagccagtgaggcagggtgggacacactttgcaggggttcccctggctgccggctgcatggagagcagtccatgaggcaccatgttgctggcctggccatgggttgctctaacagaggcatgcctgagtgactgcccagatattttacctcttttgattcgatgtgttaattta

SEQ ID NO: 554087 - DNA, 1144 bp, Homo sapiens
accacaaaacgggtaatttataaataagtttatgtagctcacagttctagaggctgggaagtccaagagcatggtgctggcatcttgcaaggaccttcctgctacagtatgacatggcatgaggctcacaatgtgagaaagcaagaggatgagtgtcagctcaagtctcttcctcttcttataaagccaccaggtccatgatggggacaccaccttgatgaccttatctaattctarttgcttcccaaaggccccacctctaatcaatgtatgatttagggattaattttctaacacatgaaatttgggggagacattcaagccataacagggagactcatgggagccctgggctggggtgtggcctggcttggtcagggctgagcttctggaaatggcagacaaggtcgcagacagtgttgacatgcaaagggctttgctgccccaccattcacagttctgctaccatgagcgtggggctgtttttgattatcaggtactctttatttatttattttttctgagacagagtctcgctctgttgcccaggctggagtgcagtggcacaatctcggctcactgcaagctccgcctccctcctgggttcacgccattctcctgcctcagcctcctgagtagctgggactacaggtgcctgccaccacgtccagctaatattttgtattttttagtagagacggggtttcaccgtgttagccagatggtctcgatctcctgacctggtgatctgcctgccttggcctcccaaagtgctgggattacaggtgtgagccactgcctcaggtactctttccttcagaaacaggctctcttttgttgcacacatttttctcatcacagagtaaagtaaatcaggaagctctcggaagaaaagagatgcccactgtagacaagctgagcagcatttagtcttcagagccaagagaataaactgttagtcaatgatttaattcaactgccttgaatcctaaacagtgttgatgaggttacattactattttggattcaggcagaaggggccatacatggaaattaagaggggaaaaccaatattgagtcaaaatgctaggctcacttaggaaacaattaaataatatctagagggaattgaatattaaagtca

SEQ ID NO: 554088 - DNA, 516 bp, Homo sapiens
gccatcccctgatcgcacggagtggctgatgttgaggtgaggatagacaaggagggctgcttggaggggcctggggctgggctgacgtggttggggagcagctgggaagcagctgatgtggttggggagcagctgggagcctggagtgctgaggtctgaggacgaatcctgagtaaacggttacggccttcattgttactggggtgtcagggtctggacaacaggctggctctgctctgctgactgcccatctcagattcctcctgggacaggggyctggggagcagggctggccaggggctgctccctcagtgagccatgccagggaggccaggccttggacaggtcagctttgacccagccggcctggtgcggagggcctcctgcacctgggcacttggcctctattctcctaagactagggacctgccctgatctcggcctcttttttccccatgtctagtcctgcatctcttctccaggtggacgggggcagtgggagttcttggtgctctt

SEQ ID NO: 554089 - DNA, 587 bp, Homo sapiens
cattctaggtggtttttagatatattattcctgttagagttttgaactttgatcatcttgttagaaaaaagaggccaggcactgtgcctcatacctgtaatcccagcattttggaggctgagtcgtcaggaagtcacttgagcccaggagtttggtaccagcctgggcaacatatggagacctcgtctctacaaaaaaaaaaaaaaaaaaamaaaacctgttagccaggcgtggtggctcatgcctgtgttcccagctactcaggaggctgagatggaaggattgcttgagcctgggaagttgcgactgcagtgagctgtgattgtgccactgcactccagcctgggcaacagagtaagaccctgtctcaaaaaaaatgaatttttgcattcatttaaaaatgaatggtagcaacattttagataataacttatgtagtctgtgtgaatctcatcaaatatatgtgatttttaatgcttggaatcctagaattttagtgagggaggagctctcaagttatctaatttactgtcattttacagataaaaactaaacttctgatagatgaaaggatttataccatacat

SEQ ID NO: 554090 - DNA, 582 bp, Homo sapiens
tttatataatttgtatttgaaacttcaaaaagattacccatttttcatctggggctactagggtcacagtcacaagcacacacttaagtggctgaattcagaaatattataggctgttctctccacagcaagygtaacaacttaaaaataatgtaaggcacattttaattataatgatgaaataaaaagcgctggttttgcttcaaaggctaataataaattgcttttttaacatttattttcactcccaggtacaggaactgtatcacagatggagagtataaccagagaagtgtcaaatggtatatattgagcattagattcaaactgtgcacagcagggccatagagtgacactcacaggtatgtgatgcctggttatctccctccctgttgtctgtatgaagcagaaaatcagaatatttagtaagtaatggcatttgcagtattggtctctttcagcattaacaggagtccaaaatagccttgtgaaattctctttcatactatttgcaggggagaaatgatgcatttatgaagttatttatttatttatttaaaaatatatattgattgcaggggt

SEQ ID NO: 554091 - DNA, 1102 bp, Homo sapiens
ggctattattataaaccagttttttttttttttttttttgagacagagtctcactctgttgcccaggctggaatgcaatggtgcgatctcagctccctgcagcctccgcctcctgggttcaagtgattatcttgcttcagcttccccagtagctgggattacaggcacccgccaccacacctggctcatttttttaattttttagtagagacggggtttcaccatgttggccaagctggtctcaaactcctgacctcaagtgatctgcctgcctcggcctcccaaactgctgggattacaggtgtgaggcaccgcacccagccattatattcttttaatcacccctaaactgattatttggctcgtgagaaggcagacatacggaaaactgggagcttgctctagtgagatcaacagagtcctccgtgatgggctggaagaagttagctaaagaagcagaaagcagagacactgtcaagaccgtggtgagggttccggcaacagtgtgatgtctgccaagggtggggttggcgtgcttttgcttccaccatcccaagctacactcctgggcttggaacacggactctaagttcctagagagggcgcagccctgagtcccctgctctgtgacatgagtggygcctacagacccctttcaccgtctccctcaaaacacacagaagagtcaactccaaactctcttctccaaggaggagcctagttgcaagtatttaaaaccatctcaaagccaggtgcgccgagactgtcccacggtttagtctggtgacttttccactgccaacgagacacggagttttgaagcaggtgggggctggggcaaggaagctgaaggggtccaggaccctgggaggcagagaggagcgggcagggctgtgacccagccttctctgcatctggatggcaacgtgatctgaggcagccaggaggaattacccaaagattgctgggagctgggaggagcaatggaaggaaaagcaggttctagaacagaaagagctggtgaggatgcaccagcaggcaaaatattaagtgatcatgaaaatggtccttacgaagaccatagcgacacggcaaatttttg

SEQ ID NO: 554092 - DNA, 1102 bp, Homo sapiens
ggctattattataaaccagttttttttttttttttttttgagacagagtctcactctgttgcccaggctggaatgcaatggtgcgatctcagctccctgcagcctccgcctcctgggttcaagtgattatcttgcttcagcttccccagtagctgggattacaggcacccgccaccacacctggctcatttttttaattttttagtagagacggggtttcaccatgttggccaagctggtctcaaactcctgacctcaagtgatctgcctgcctcggcctcccaaactgctgggattacaggtgtgaggcaccgcacccagccattatattcttttaatcacccctaaactgattatttggctcgtgagaaggcagacatacggaaaactgggagcttgctctagtgagatcaacagagtcctccgtgatgggctggaagaagttagctaaagaagcagaaagcagagacactgtcaagaccgtggtgagggttccggcaacagtgtgatgtctgccaagggtggggttggcgtgcttttgcttccaccatcccaagctacactcctgggcttggaacacggactctaagttcctagagagggcgcagccctgagtcccctgctctgtgacatgagtggcgcctacagacccctttcaccgtctccctcaaaacacacagaagagtcaactccaaactctcttctccaaggaggagcctagttgcaagtatttaaaaccatctcaaagccaggtgcgccgagactgtcccacggtttagtctggtgacttttccactgccaacgagacacggagttttgaagcaggtgggggctggggcaaggaagctgaaggggtccaggaccctgggaggcagagaggagcgggcagggctgtgacccagccttctctgcatctggatggcaacgtgatctgaggcagccaggaggaattacccaaagattgctgggagctgggaggagcaatggaaggaaaagcaggttctagracagaaagagctggtgaggatgcaccagcaggcaaaatattaagtgatcatgaaaatggtccttacgaagaccatagcgacacggcaaatttttg

SEQ ID NO: 554093 - DNA, 1102 bp, Homo sapiens
ggctattattataaaccagttttttttttttttttttttgagacagagtctcactctgttgcccaggctggaatgcaatggtgcgatctcagctccctgcagcctccgcctcctgggttcaagtgattatcttgcttcagcttccccagtagctgggattacaggcacccgccaccacacctggctcatttttttaattttttagtagagacggggtttcaccatgttggccaagctggtctcaaactcctgacctcaagtgatctgcctgcctcggcctcccaaactgctgggattacaggtgtgaggcaccgcacccagccattatattcttttaatcacccctaaactgattatttggctcgtgagaaggcagacatacggaaaactgggagcttgctctagtgagatcaacagagtcctccgtgatgggctggaagaagttagctaaagaagcagaaagcagagacactgtcaagaccgtggtgagggttccggcaacagtgtgatgtctgccaagggtggggttggcgtgcttttgcttccaccatcccaagctacactcctgggcttggaacacggactctaagttcctagagagggcgcagccctgagtcccctgctctgtgacatgagtggcgcctacagacccctttcaccgtctccctcaaaacacacagaagagtcaactccaaactctcttctccaaggaggagcctagttgcaagtatttaaaaccatctcaaagccaggtgcgccgagactgtcccacggtttagtctggtgacttttccactgccaacgagacacggagttttgaagcaggtgggggctggggcaaggaagctgaaggggtccaggaccctgggaggcagagaggagcgggcagggctgtgacccagccttctctgcatctggatggcaacgtgatctgaggcagccaggaggaattacccaaagattgctgggagctgggaggagcaatggaaggaaaagcaggttctagaacagaaagagctggtgaggaygcaccagcaggcaaaatattaagtgatcatgaaaatggtccttacgaagaccatagcgacacggcaaatttttg

SEQ ID NO: 554094 - DNA, 1102 bp, Homo sapiens
ggctattattataaaccagttttttttttttttttttttgagacagagtctcactctgttgcccaggctggaatgcaatggtgcgatctcagctccctgcagcctccgcctcctgggttcaagtgattatcttgcttcagcttccccagtagctgggattacaggcacccgccaccacacctggctcatttttttaattttttagtagagacggggtttcaccatgttggccaagctggtctcaaactcctgacctcaagtgatctgcctgcctcggcctcccaaactgctgggattacaggtgtgaggcaccgcacccagccattatattcttttaatcacccctaaactgattatttggctcgtgagaaggcagacatacggaaaactgggagcttgctctagtgagatcaacagagtcctccgtgatgggctggaagaagttagctaaagaagcagaaagcagagacactgtcaagaccgtggtgagggttccggcaacagtgtgatgtctgccaagggtggggttggcgtgcttttgcttccaccatcccaagctacactcctgggcttggaacacggactctaagttcctagagagggcgcagccctgagtcccctgctctgtgacatgagtggcgcctacagacccctttcaccgtctccctcaaaacacacagaagagtcaactccaaactctcttctccaaggaggagcctagttgcaagtatttaaaaccatctcaaagccaggtgcgccgagactgtcccacggtttagtctggtgacttttccactgccaacgagacacggagttttgaagcaggtgggggctggggcaaggaagctgaaggggtccaggaccctgggaggcagagaggagcgggcagggctgtgacccagccttctctgcatctggatggcaacgtgatctgaggcagccaggaggaattacccaaagattgctgggagctgggaggagcaatggaaggaaaagcaggttctagaacagaaagagctggtgaggatgcaccagcaggcaaaatattaagtgatcatgaaaatggtccttacraagaccatagcgacacggcaaatttttg

SEQ ID NO: 554095 - DNA, 1078 bp, Homo sapiens
cgtgtggtggcgcatgcctatagtcccagctactcaggaggctgaggcaggagaatctcttgaacccgggaggcggaggttacagkgagccgagatcgcgccactgcactccacctgcgacagcgggactccatctcaaaaaatagaaaataaatttaaaaaataaacatatgtatatgaggttacttatgtgctgctaacacattattttctcgaactctctgaactatgggatgaaaagacaattgaaaaacagacctaggctatgtttccaaatgatttttcatcccctgttcacgataaccttttcaagagagagctggcgaggctgaaggtagctataattatatagctaccagccctgaaaagacaaggttgttcagtggtactgataagacacgggttcagaatgttttaggcagcatgcaaatgtattctgatttttttcaactccctttagaagggggaaaaaaatcttgtttgaagtatattcttgaggtggagctggtaacagattaattagaaaaatgaagtgatgggaaagggaagccctaactggtcagctccctctctctgtccagctgggataaagcaagcttttaaggaccagccccctaatttgagaatatggtcaaatgggtcctcttcagccatttggaatcagtcactggaatgaccaactggtgcctggatcacatccatcccccttttagctgcctccaccttctgattctccactttagaaacattcctccatctcttagtctgtggggactgggagatgctgaactcgcttctgactccaaagggaaacacctgacctaggtctggccaatcagctcatctcctcccttcccggtccccagtgattggttcaggggtgggcatgtgacctaagtcaatccacttagaacttttccgggaactattggaaaagaggtcctgtctttccactggaagctgtagggggtaggactggagcttctggagcgtcctaagaagagcctgcctgggaatgaagccagcagagtggaaggcagagctgagggagggaaaagctactttctccataagccct

SEQ ID NO: 554096 - DNA, 1312 bp, Homo sapiens
cacaggtgacagttttctcagaggttttctctgaccctgttaatgctaagcaaaagattcactataggatgatatctgaaaaaacttttatcaataaagaagtaaggggaagagctaggaaggacctatatacatcttggttaaattaaagcattcctctggattaaatcactttagggcaaagactttttttcagttttgtagatacctgtctgaattggcagttggatcatgtaaattcaataaatactgtaaatatttattgtttcaaaagtataatgggaattgctgatcctatttaagggtttctgaagactgcttttgagaaatgcatgtccttaaaaatatgctcttggattacattcttctcatttgtttaatatcaatctgtattgtttgcttagaacttctaattccatgttttatattatatactgtaattactatttatttgttgtcaatttagatgtgcagtaatgaaacattgagtagaatttcatttatttaagagcattgctattttgcactatatacttttgagagaacataaatgggaaaagataattttcttttactttattcatttaacacataactgcttcaatcatgggacataaatttatctgctcgagttttcatcggtcacttgtaaagtcttttatatacgattagaaattatattttcttgagagtttcctttgatatttatattagttctttatcgttttgctaattatttatataaaggtatttccttttaattaaatgaatttaactggaaggcttaacaattataatctggagatcttttctgatttaccgactgttggggtgaattaggttggaatggcttatgtaaagctctggactctcttcttttaatcctccctcttttaatttatactgtatattcctgcaagataaatcttcgtaaaatgcttcagtcaagtaatttccccactcaaaaacctctagaggtccctcattgcttactaaattaaactcaaacttgctctctgacattcatagccctccaaaccccaatataatccagctctaatctcaactattactattcctctgtttacactgttcacaacagtaagacagaattatttggcttccacagactctattttatttttttccactctgtgtatttttctgggcttgttcttcctggaacacttgttcctgtatcattccatactgttcaaatctaattgatccttcagarcctatctcagaaaaccatgtctgtgagaagcctctcctgatttatttattcaacaagtatgtaccttcccaggca

SEQ ID NO: 554097 - DNA, 888 bp, Homo sapiens
ggaagggtaaaagtgttgctgaaaaaaaggggtcccaattcagaccccaatagaggaattcaaggaaagtgacagagtgcagwaagaaagagatattttattgaaagctactcagttacagagtagggattcctcataaagcaagaggagaaatgtgccagctttgttttaaacattttttatataggggtcttaccaatgcaaaagctaagctaagttatgtctgtgtttaagtgagctgacagtatgacaaaatttagtactttgctgatttaaagaaagtcttctttgccttgtagtgtatgaatacatcaaagcatgactataactatagcatatgttgtcatacagtatcagaacatctagacattctgcttttttaggagttcatcctcacaaccatttccaaactactttgttagctatcagcatcttatgacccgtgggtcatgactggcaaggaatgtaccttgctagctttaagatggagttgatttttaaatggtgtcaccctggctccccgatgctcctgttttcctaacataatcccttctctacttatgagagaacccttaatcttagggagagatgaagggccaaggtcattctgtaccttctttctgctgacagtgtacgttgatctctgtgataggattctctcataagggtttgcaattaacctcggggagccaggggaagtcctttcgcatgtgatgtcctgatgattctatagacataggccctgcctagtattggaggattaaaaaatctctggttgcctgctctaaggggcctaaaggtgggataactttattttctgtgtccgatgatgggatggataggaagccttgtgccagcattatctttatatataattgttgtattcta

SEQ ID NO: 554098 - DNA, 888 bp, Homo sapiens
ggaagggtaaaagtgttgctgaaaaaaaggggtcccaattcagaccccaatagaggaattcaaggaaagtgacagagtgcagaaagaaagagatattttattgaaagctactcagttacagagtagggattcctcataaagcaagaggagaaatgtgccagctttgttttaaacattttttatataggggtcttaccaatgcaaaagctaagctaagttatgtctgtgtttaagtgagctgacagtatgacaaaatttagtactttgctgatttaaagaaagtcttctttgccttgtagtgtatgaatacatcaaagcatgactataactatagcatatgttgtcatacagtatcagaacatctagacattctgcttttttaggagttcatcctcacaaccatttccaaactactttgttagctatcagcatcttatgrcccgtgggtcatgactggcaaggaatgtaccttgctagctttaagatggagttgatttttaaatggtgtcaccctggctccccgatgctcctgttttcctaacataatcccttctctacttatgagagaacccttaatcttagggagagatgaagggccaaggtcattctgtaccttctttctgctgacagtgtacgttgatctctgtgataggattctctcataagggtttgcaattaacctcggggagccaggggaagtcctttcgcatgtgatgtcctgatgattctatagacataggccctgcctagtattggaggattaaaaaatctctggttgcctgctctaaggggcctaaaggtgggataactttattttctgtgtccgatgatgggatggataggaagccttgtgccagcattatctttatatataattgttgtattcta

SEQ ID NO: 554099 - DNA, 1070 bp, Homo sapiens
taaattaaagaatgagccaaaagaaaaatgtacttgttttaaacaagtgccttactagttgatttcttgcaactgagtttctcctataccagacgtatttatttaagtgcagcagacagtgacagctatctcacacccccctccctgttcagcaaagaggtattccaaagcaatactgtgaactaaaacaactttagcaagataatttggaggaggctgtggcattatagcctttacagtagtcagctatatgtttgcaacatatgtctcatcacctcatttatatttgtgttagtacacgaaaggagtattctaccacaagatgccaatttagggggatatatgcctgctggcaaattctttgttattctacaatgcaaattaaagggtgttgaccaaggcttagtttccagacagttatggagtaagagttgtactgttgaaatcckcaatgcacattttatttctcatttatcaaagcctggatttgctcattcttatggttgattattaaatcttctacagataaaaatatatcctggaggggcacaacagatagttccctgtggggtgctttgtgtgtaagtggccaccggaagataagcatgagtattactcatccaaggctagtttattgtattaccacatggctgaaggctacccacaattaggggatttgggttatgaatgtatctataaactgttgcataatctttccctttggtttttaaattcagtttctggcaagagttcactgtaaaatcctcactagaggttctgtctactgttagatttaaacaagaaatctgaacatatgagtcttaaagtataatccacatatgcagttccaacaggcagtcacactaggaatatcagtaaaatttgttacagggtgaactagaggatctctaaaatcatgtaagaatttaagtttagcatgacatctccaacattcagttatgattcttgctgaagctattgattgggagatcctgatcatagcattattctgccactcatacacaaaaagaatgcacagggaaaagaaagaaaggaacaattattttatg

SEQ ID NO: 554100 - DNA, 1070 bp, Homo sapiens
taaattaaagaatgagccaaaagaaaaatgtacttgttttaaacaagtgccttactagttgatttcttgcaactgagtttctcctataccagacgtatttatttaagtgcagcagacagtgacagctatctcacacccccctccctgttcagcaaagaggtattccaaagcaatactgtgaactaaaacaactttagcaagataatttggaggaggctgtggcattatagcctttacagtagtcagctatatgtttgcaacatatgtctcatcacctcatttatatttgtgttagtacacgaaaggagtattctaccacaagatgccaatttagggggatatatgcctgctggcaaattctttgttattctacaatgcaaattaaagggtgttgaccaaggcttagtttccagacagttatggagtaagagttgtactgttgaaatcctcaatgcacattttatttctcatttatcaaagcctggatttgctcattcttatggttgattattaaatcttctacagataaaaatatatcctggaggggcacaacagatagttccctgtggggtgctttgtgtgtaagtggccaccggaagataagcatgagtattactcatccaaggctaktttattgtattaccacatggctgaaggctacccacaattaggggatttgggttatgaatgtatctataaactgttgcataatctttccctttggtttttaaattcagtttctggcaagagttcactgtaaaatcctcactagaggttctgtctactgttagatttaaacaagaaatctgaacatatgagtcttaaagtataatccacatatgcagttccaacaggcagtcacactaggaatatcagtaaaatttgttacagggtgaactagaggatctctaaaatcatgtaagaatttaagtttagcatgacatctccaacattcagttatgattcttgctgaagctattgattgggagatcctgatcatagcattattctgccactcatacacaaaaagaatgcacagggaaaagaaagaaaggaacaattattttatg

SEQ ID NO: 554101 - DNA, 1070 bp, Homo sapiens
taaattaaagaatgagccaaaagaaaaatgtacttgttttaaacaagtgccttactagttgatttcttgcaactgagtttctcctataccagacgtatttatttaagtgcagcagacagtgacagctatctcacacccccctccctgttcagcaaagaggtattccaaagcaatactgtgaactaaaacaactttagcaagataatttggaggaggctgtggcattatagcctttacagtagtcagctatatgtttgcaacatatgtctcatcacctcatttatatttgtgttagtacacgaaaggagtattctaccacaagatgccaatttagggggatatatgcctgctggcaaattctttgttattctacaatgcaaattaaagggtgttgaccaaggcttagtttccagacagttatggagtaagagttgtactgttgaaatcctcaatgcacattttatttctcatttatcaaagcctggatttgctcattcttatggttgattattaaatcttctacagataaaaatatatcctggaggggcacaacagatagttccctgtggggtgctttgtgtgtaagtggccaccggaagataagcatgagtattactcatccaaggctagtttattgtattaccacatggctgaaggctacccacaattaggggatttgggttatgaatgtatctataaactgttgcataatctttccctttggtttttaaattcagtttctggcaagasttcactgtaaaatcctcactagaggttctgtctactgttagatttaaacaagaaatctgaacatatgagtcttaaagtataatccacatatgcagttccaacaggcagtcacactaggaatatcagtaaaatttgttacagggtgaactagaggatctctaaaatcatgtaagaatttaagtttagcatgacatctccaacattcagttatgattcttgctgaagctattgattgggagatcctgatcatagcattattctgccactcatacacaaaaagaatgcacagggaaaagaaagaaaggaacaattattttatg

SEQ ID NO: 554102 - DNA, 1070 bp, Homo sapiens
taaattaaagaatgagccaaaagaaaaatgtacttgttttaaacaagtgccttactagttgatttcttgcaactgagtttctcctataccagacgtatttatttaagtgcagcagacagtgacagctatctcacacccccctccctgttcagcaaagaggtattccaaagcaatactgtgaactaaaacaactttagcaagataatttggaggaggctgtggcattatagcctttacagtagtcagctatatgtttgcaacatatgtctcatcacctcatttatatttgtgttagtacacgaaaggagtattctaccacaagatgccaatttagggggatatatgcctgctggcaaattctttgttattctacaatgcaaattaaagggtgttgaccaaggcttagtttccagacagttatggagtaagagttgtactgttgaaatcctcaatgcacattttatttctcatttatcaaagcctggatttgctcattcttatggttgattattaaatcttctacagataaaaatatatcctggaggggcacaacagatagttccctgtggggtgctttgtgtgtaagtggccaccggaagataagcatgagtattactcatccaaggctagtttattgtattaccacatggctgaaggctacccacaattaggggatttgggttatgaatgtatctataaactgttgcataatctttccctttggtttttaaattcagtttctggcaagagttcactgtaaaatcctcactagaggttctgtctactgttagatttaaacaagaaatctgaacatatgagtcttaaagtataatccacatatgcagttccaacaggcagtcacactaggaatatcagtaaaatttgttacagggtgaactagaggatctctaaaatcatgtaagaatttaagtttagcatgacatctccaacattcagttatgattcttgctgaagctattgattgggagatcctgatcatagcattattctgccactcatacacaaaaagaatgcacagggaaaagaragaaaggaacaattattttatg

SEQ ID NO: 554103 - DNA, 548 bp, Homo sapiens
tggggttttagccacttaagttttttattttctctaatgtctctagtatctgctttagtttcctgtcaatgctagactctgtggttcagcagttcatccattctcttcccagtactcaacctcgttgcttatagtttcattacattcatctagcaaaaccttaattctgtatgtttgccataccattagtgcttagagcattttttcagaaaagaatcctggaaaaatggatcttatctcacctgggccctcaggactgctgggctgcctggtgtcagcacttcccgccattttctatagcaccagtattattcttaatactttaaaaaaccaccaggcacggtggctcacgcctggaatcccagcactttgggaggccaaggtgggcggatcacaaggtcaggagatcaagaccatccyggctaacacagtgaaaccctgtctgtactaaaaatagaaaaaaattagctgggcgtggtggcgggcacctgtagtcccagctgctggggaggctgaggcaggagaatggcgtgaacccgggaggcgga

SEQ ID NO: 554104 - DNA, 1422 bp, Homo sapiens
agaatttaaggtaagaaggtcactcttcttggagaaaacgaaaactaaattcagcagttatctcaggctcttcaattgagagaaaagtgaaacttggactatggtgaggagctgcaacttgccgcaagttcagatctgttaaggcagtacttctctgtgctttggatctcactygtgatctttattttagtcacatggaatggtgccttaaaaggctacacccaaatcgaattcccctcaaagtggcctggagtacctcctgaggttaaaaagtcacccgaaagagaactgagcacagaggaaataatcactattcctcttttagccttgctgaaagtatggaggctatcttcccttgtcaatcttctcaccttagagacacacacctttgttttttgccgggattcctcattctcactgggcccatggggtttaaagtgactgtgttgttcacaacctgagcagtaggtgtttgaataaccacacactgggcagtttcttatgtatttcttcccactgcattcaacccaatgtcatttggcaagtatatatgatgcattgttggataacgttggaagcttaaactcaaatgggtaaaaaggcaactaccttgtcttctgtcagattcccagtgctttttagctccttcctactcaaaatgtggctcatgggcatgacattggcatcagctgggagcttattagaagcacagaaatgcagagtctcaggatccaccgctacttgtatacactacgtgtattttaacaaggtctccccaccccataattcaggcagaaagtttgagaagtcttgaaaactgttgttaggaggcagatctctcatcctctctagggtgcacaggctacaagaaggagccttggcaacaacctccaaagacacaattcctttcagagcttgtttcctgtttgataactcaccaaatctctaaaactggaatgtgaagcgagggttcagccaaggaactgggtgagagttaatggatcaatctgctctcccccgtcagtgcttttaccgctgacttctggaatgtgtttgatgaaaagaaagcaacttcttcagacagaagatactgatgcagcctgctgaggttaggacctacaggaacaatacaccaatgttatcagagcttcgtttgcctccaacttcagtccaaaactgacaacgggagggaaagcattttttaaagccgttgctgtcagctgccattattataaatagcaattgctctgcttctccctgggggaatgtaggcatcattgtttggtttttgtttagattaagaggttttttccaatagctttttacaactagatctgaaaaatgaaactagtagcacagtgatgctgcttccatttatcattccagaagcttggatatgttgaaagtcaaaaccagagaagg

SEQ ID NO: 554105 - DNA, 571 bp, Homo sapiens
cattcaattttcacaacactttgaaatagatactttgttcctacttaagggatgggagaaatgaggtaccaagtccctctgttagtaggtggtggagcttggattacaggacacttggattactctctttctactatgcactcttataagatgggcttgttctagtggaaatttacatatctcatatagacacagcaaaaaatattatgtgtgaagtgcagtgctacttgatggcgagaagtagaaaatagttgacttctatccattatttccaaagccratgtgtagctgaattcaaaatccattactggcatggtatattcactgtcagatgggaagatattggccattagtaaggataaataatttacctgagattcccttgagcactcaaggtcagggaaaatttataactaatgtgttgagagttgctcggactactgaattgcaaataatcctctatttacaggccattttacccgcctcttctgagactaatagtaattattttaaaaagaaatctaaataattcccttttggtgattttacttagtctatctttcttcttttt

SEQ ID NO: 554106 - DNA, 992 bp, Homo sapiens
tccagtgtgagaccctcagtaactacagcaatatgttggatttagtaggtttcgatttttcaatgattaaaactgaaatcacagctaatattctttttcgggggattaagcagggagagtgtatcagcaccagcccaatgcgagggcactggcgaggtgtaccttggatgtatggctccagcgctggggagggctgaatagagagtaaagctgagccagggccctgacaaagaaccacacataccgtgcaccacctcacctcctcccgtaaatcatgcacctacggaggggaggagctacatttaaaaaggatcttgaatcttttattataattgagccttttctattgtgaatatagattttatccatccagctaccaaaatagtgtatgtcagaatcaaaacatattaggactgaaagtttatttagaaagcacttacattttatgaaagaggcattttatgagagacgaggacataggggcttggagaagttattgccctcctgaaggcacaggcaaggaggggttccwccagcctactgctccctggtcgctgttgcagacactctcatggttctgtgtgcccatagagcagtattccgaagttttctaagaaagtgagggggaaattttacaggcgtgaggaccctacatttttaaaaaactgactgagactaagagtaaagggaatacctgaagtgttgaaaaaaaatttgtgaagacatctgccagactactgctttcttttaggcccagtagttgaacaagtttaagaggccagtgcagcagagtggaggtggctgcgctgagatggtctcctctgtccacatttaccagggcaaaggatataagagtcttctgggaccagatgacagccatgttgaggagaggggaaaaaagagccaaatgagatggactggagcagtttcaagtcctgtcctagaggaccttccacacagggtctctgtttgggtggatagctagagaacca

SEQ ID NO: 554107 - DNA, 992 bp, Homo sapiens
tccagtgtgagaccctcagtaactacagcaatatgttggatttagtaggtttcgatttttcaatgattaaaactgaaatcacagctaatattctttttcgggggattaagcagggagagtgtatcagcaccagcccaatgcgagggcactggcgaggtgtaccttggatgtatggctccagcgctggggagggctgaatagagagtaaagctgagccagggccctgacaaagaaccacacataccgtgcaccacctcacctcctcccgtaaatcatgcacctacggaggggaggagctacatttaaaaaggatcttgaatcttttattataattgagccttttctattgtgaatatagattttatccatccagctaccaaaatagtgtatgtcagaatcaaaacatattaggactgaaagtttatttagaaagcacttacattttatgaaagaggcattttatgagagacgaggacataggggcttggagaagttattgccctcctgaaggcacaggcaaggaggggttcctccagccyactgctccctggtcgctgttgcagacactctcatggttctgtgtgcccatagagcagtattccgaagttttctaagaaagtgagggggaaattttacaggcgtgaggaccctacatttttaaaaaactgactgagactaagagtaaagggaatacctgaagtgttgaaaaaaaatttgtgaagacatctgccagactactgctttcttttaggcccagtagttgaacaagtttaagaggccagtgcagcagagtggaggtggctgcgctgagatggtctcctctgtccacatttaccagggcaaaggatataagagtcttctgggaccagatgacagccatgttgaggagaggggaaaaaagagccaaatgagatggactggagcagtttcaagtcctgtcctagaggaccttccacacagggtctctgtttgggtggatagctagagaacca

SEQ ID NO: 554108 - DNA, 992 bp, Homo sapiens
tccagtgtgagaccctcagtaactacagcaatatgttggatttagtaggtttcgatttttcaatgattaaaactgaaatcacagctaatattctttttcgggggattaagcagggagagtgtatcagcaccagcccaatgcgagggcactggcgaggtgtaccttggatgtatggctccagcgctggggagggctgaatagagagtaaagctgagccagggccctgacaaagaaccacacataccgtgcaccacctcacctcctcccgtaaatcatgcacctacggaggggaggagctacatttaaaaaggatcttgaatcttttattataattgagccttttctattgtgaatatagattttatccatccagctaccaaaatagtgtatgtcagaatcaaaacatattaggactgaaagtttatttagaaagcacttacattttatgaaagaggcattttatgagagacgaggacataggggcttggagaagttattgccctcctgaaggcacaggcaaggaggggttcctccagcctactgctccctggtcgctgttgcagmcactctcatggttctgtgtgcccatagagcagtattccgaagttttctaagaaagtgagggggaaattttacaggcgtgaggaccctacatttttaaaaaactgactgagactaagagtaaagggaatacctgaagtgttgaaaaaaaatttgtgaagacatctgccagactactgctttcttttaggcccagtagttgaacaagtttaagaggccagtgcagcagagtggaggtggctgcgctgagatggtctcctctgtccacatttaccagggcaaaggatataagagtcttctgggaccagatgacagccatgttgaggagaggggaaaaaagagccaaatgagatggactggagcagtttcaagtcctgtcctagaggaccttccacacagggtctctgtttgggtggatagctagagaacca

SEQ ID NO: 554109 - DNA, 1216 bp, Homo sapiens
caccacatacacacacacacacacacaaatcataatgatatgaggtgatgttaattagcttggttctgataatcatttcacaatatatatgtatatcaaaacatcacattgtacaccttaaatatatacaatttttatttgtcaagtataccttaagaaagctggggggaagaaataaaatggaaaaaaaaatcttgttccaccaataaaactaaaaatgtgctaataaaagaagaaaggaaaatgccagaagatactgtttcttactgacctctaacacttaatcttttgcaatttttggttcataaaattccttgttaatatcataacatgaaaaataaaatatcaaacctgcaaattttaaagtgctttttttccccgtccatgaagagcagtataaatttgtattgcttcatcaaaatcagattttaataatataaaatgtgagttacacaaaagatggcactctgggaaaaaggtcattgtgagtaataaaaagtcttaacagaaaatgtttagcactactgcttagttgcagactgcctggtggaattgagaactcaatggcctgtgctgcagagaggcaccttgcactgacacgcccataagagttttacttccgtacaagtgtgagatccgtaaattgacacagactaaaagagtgagtgagaatatatagatgaattaggttaaaagtttcccatataaccttttatactctcgaggtctaaacggtgccatccagccactaattagccctgctgacattgtgtggattcaaatatagattcgagggctrtagccagatcttctgcaggtaggaactggctctggtagaggctgaaaatgagcatacggtagtctttttaaaaatatgttgtattcagtgcctttgtttatcttaggaaaggtttttaaaaagtgacgtttatccaccctctttctcagacatgcagtctggtaaaataccaataagtggtaaatgtgcttcacgtgtaagtgtgatttttggtattcccatgatttgtttcatgtatctctttgtgatatgtgttgtttacattagtgattatccatctggtctcttaataacctttttctttgtaggaaaatctattgtgctactttctactgattcagcaaagatatctacctctttacttttaaggtattcacatcaaactcttatcttgtgtcttagctgtccagactaccc

SEQ ID NO: 554110 - DNA, 541 bp, Homo sapiens
attgagctgaacacttcctagtagtaaaaatacaggaagcactacaagtgtttttagcagggataacctggcaggctactgctactgctgctgctgctaaggaaatgagaaaagcttcctctgtctagaataaatcctaactctagttacttttgcttatatcttccaagtttartgttttggcaggggcgtatctcactcagtgctcttaggcccagacacttaccttactagtcaaagggcaggaagaaggaaagtctatttttctggcttccagtagccttcaatcacaggcaggagttctttcccccatatccccacagagacaataaacaatggggagtttcttcaaaataagaagaggttgaatgctgtaaaaacaaggaaaccaacaaactactatgccatagcacctgccttatgtccaagactccaaacagcaagagagtaagaatgagacatgattactatcggggtagaggatatagctcattgttccttgaagaggatatatctcattgttcctagaagatatatctca

SEQ ID NO: 554111 - DNA, 532 bp, Homo sapiens
agtccagacacctcaggctgggaaagtaagatggaagtgccattcccgaagcagaggaagctcctgcttcctggaagcctcagttttttgcaagtaatggaacggagataactagggggtcctctaaggcacccagaaggtgggaaggaggaggaagcctgagctgtatttgctgccttatctgtggtaagccaggtccccctagagcttcacagtgatccgtycctactgcagacttcccagctaagcacccaccttctttagattctgtctagtcaaccctgtgacccacgagtcatacccatcccaaagtctctgctgaccatttcatgggaaccacacagcccccttgcagcacgtgaagaacatatggcggttccctttccccttctcttgccctctcattcagtattgacatcacccaggaagcagaacgaacagaagtctgccccatcaggacggggctggactcaagaggcgagaccatggcaaagcccacccgccaagccacaagcccctgacagacagagca

SEQ ID NO: 554112 - DNA, 661 bp, Homo sapiens
tccttactcccctttcttactgtcacccaccacatcattcttgaaggtgtctttggcagattgcaaattcccatgatgctgtttgcagggccctttgcaatgtgactttgacgctcttcccattaagaggtggagtctatctctctacccctaaacctgggcttgaccacgtgacttgctttggcccatagaatgaatgtgatggaaagaggagtttaaaaagtgctttcaggccgkgactggtggctcacacctgtaatcccagcacactgggaggccgaggtgggaggattgcttgaacccaggagtttaagaccagactgggcaacatagggagaccctgtctctacaaaaattgaaaaaaaaattagccaggtgtggtggcatgcacctgtagtcccagctgtttgggaggctaaagttggaggatcgcttgagcccagaaggttaaggctgcagtgagccgtgatcacatcactacgcttcagtctgagtgacagagtgagaccctgtctcaaaaaattaaaaaaaaagtgctttcatgctggggcttgcattcctgtttctgagaatcctctgccaccctatgaacaagcccaagctaacctctctgtaaaaagagagatcacgaagaaaaaggccccagctgtcccagtcatct

SEQ ID NO: 554113 - DNA, 661 bp, Homo sapiens
tccttactcccctttcttactgtcacccaccacatcattcttgaaggtgtctttggcagattgcaaattcccatgatgctgtttgcagggccctttgcaatgtgactttgacgctcttcccattaagaggtggagtctatctctctacccctaaacctgggcttgaccacgtgacttgctttggcccatagaatgaatgtgatggaaagaggagtttaaaaagtgctttcaggccgtgactggtggctcacacctgtaatcccagcacactgggaggccgaggtgggaggattgcttgaacccaggagtttaagaccagactgggcaacatagggagaccctgtctctacaaaaattgaaaaaaaaattagccaggtgtggtggcatgcacctgtagtcccagctgtttgggaggctaaagttggaggatcgcttgagcccagaaggttaaggctgcagtgagccgtgatcacrtcactacgcttcagtctgagtgacagagtgagaccctgtctcaaaaaattaaaaaaaaagtgctttcatgctggggcttgcattcctgtttctgagaatcctctgccaccctatgaacaagcccaagctaacctctctgtaaaaagagagatcacgaagaaaaaggccccagctgtcccagtcatct

SEQ ID NO: 554114 - DNA, 661 bp, Homo sapiens
tccttactcccctttcttactgtcacccaccacatcattcttgaaggtgtctttggcagattgcaaattcccatgatgctgtttgcagggccctttgcaatgtgactttgacgctcttcccattaagaggtggagtctatctctctacccctaaacctgggcttgaccacgtgacttgctttggcccatagaatgaatgtgatggaaagaggagtttaaaaagtgctttcaggccgtgactggtggctcacacctgtaatcccagcacactgggaggccgaggtgggaggattgcttgaacccaggagtttaagaccagactgggcaacatagggagaccctgtctctacaaaaattgaaaaaaaaattagccaggtgtggtggcatgcacctgtagtcccagctgtttgggaggctaaagttggaggatcgcttgagcccagaaggttaaggctgcagtgagccgtgatcacatcactacgcttcagtctgagtgacagagtgagaccctgtctcaaaaaattaaaaaaaaagtgctttcatgctggggcttgcattcctgtttctgagaatcctctgccaycctatgaacaagcccaagctaacctctctgtaaaaagagagatcacgaagaaaaaggccccagctgtcccagtcatct

SEQ ID NO: 554115 - DNA, 667 bp, Homo sapiens
tatatatttatatatttattttcaacagtgcttgagaagtaatataaatatatagtaactataaatatttgattactgttatcaaataatcagagaacaggggtagctgtttgctcattatttgatagtaacagtaatagaatatttactcagcgctcttgttatgagctgggtactgtgctaattgctttacatgaattgactcttttaagctccttaacagccctatgaggtgggcaccatcatcatctctacttcccaggtggggagactgaggcacagagatggtgggtaacttgcccattatcacacagccagtagatagtgtgactgggatttgaaccctggtccagccaccaagctcaagccacctgttagagggcaaatgagggargttctgcctccgagggctggtccctgaactggcatgctcccagaggtgaaggccatgctgtctgtgtctgttttcttttttcttcttctttttttttcttttcttttcttttctttttttgagactgagtgtcactctgtcacccaggctggagtgcagtggtgtgatttcagctcactgcaacctctgcctctggggttcaagcaattctcctgcctcagcctcccaagcaactgggattaccaatgcccaccaccacacccgggtaatttt

SEQ ID NO: 554116 - DNA, 941 bp, Homo sapiens
tgtcaagtgtcagcaagttatccacatcaacacagtctatgttggcaatgtggcctgggcccacattctggtcttgtggtccctgcaggaccccaagaaggccctaagcatccgaggacagttctactatatctcagatgacatgtcttaccaaagctatgactaccttagttacaccctgaacaaagaatttggcctctgccttgattccagatggagccttcctctagccctgatatgctggattggcttcctgctggaaatagtgagattcctgctcaggccaatttatacctgtcaactccccttcaatcgctacaggagatatcatcaagcttcatcctcctggcttcatacagaaggtgacaagggcacaagcccagatcctgctgcctccctttcacacaatggccaacttattgtcttcctcgtgtcatcaaaacctgtgcagtcactggcccaaccagaagctttctgtgctaaccatataccaaaggacagacaatgtgatttgccgttaccaaatatcagtggctaattctgaacaatttgggatctcttttaacttgagggtctcttttgactactagagctccatttcccctcttaaatgagaaagtatttctttttttttttaatctcctatttcttcacacagttcaatgaaaagagcaataaatgctttaatgcttaactggagggaggtgtggtttctattaatacatactttcctcctttcccttcatttcaaggtatcaccrtctccaatttagaagagtaccatgaaaccagggtttgaggggtgggcagagtagtgggagggtcaggaagggcggatgaagactgaataagctctagtatgtttcgggcaactacaacatgacctacatatgacatatattaccttatttaatactcatcagaaacctctgatgtgagat

SEQ ID NO: 554117 - DNA, 666 bp, Homo sapiens
agttctacttttacttctttaaggaaacttcacactgttttccatagttgtactagttgacattcccaccagcagtgtaatagtgttcccttttcaccacatccccaccaacatctatttttttttattatggccattcttgcagatgtaaggtgataycacattgtggttttgacttgcatttccctgatcattagtgatgatgggcattttttcatgtttgttggccatttgtgtatcttcttttgagaattgtctattcatgtccttagcccattttttgaagggattttttttttcttgttaatttgtttgagccagctgatttttatattttttgtagagatgaagtttcatctggttgcccaggtgggcctcaaacatctgggctcaagcaatctgcctgcctctgcctcccaaagtgctgggattatagatgtgagccattgcacccggccaatttacttattttgtttattgtctatccctccctcacctcatcccctccagcagggatttttgactggtttgatcaccactgtgttcccagtgcctagaatcatgcatcacagagtaggtgctcaaaaacatttgttcccacatcgactgctgtgcctgagcaggcaaggtaggaacaaaaggaaagatagagttggctgaagacta

SEQ ID NO: 554118 - DNA, 577 bp, Homo sapiens
tgaaaaccaagtaagtatttttggaactcaaacatattttctgaaaatgtaagaaagaaataactagaaaatctacataccaaactaatgctgtattctgaaaaacaaagttgataaacacacaaagcatagaacaaaaactggaaaatatgarttattgaactgatgaattattgaacatcatctcagggactttgatatctctctagcagttttagaaaaagagtatgaggaaaagttaagatgtagaaattatttaatattaaacattttgttttaataaaaaaaggcagtgcgagtcttcagactgaaagaacgaactcactggtgatatgtcagaactcaaatgataataaataagttgaaaaagtttcagaggggaaaaatgggctactggagggtgctaaatactcatgtaacaacaggaactaaggaaaggcagaggtccctgattttgatgccttgaggaattgcttctgtgagcaaagatggatttataagcaaagtattgcgacaaatgaggtaagtattcacatcctactagggttctggagaagaaagaactgctgatccttaa

SEQ ID NO: 554119 - DNA, 631 bp, Homo sapiens
tggaacaccaaaaggtgttcagacttttttttttgagacagtctcgctctgtcaccaggctggagtgtggtrgtgcaatctcagctcactgcaacctctgcctccctggttcaagcaattctcctgcctcagcctcctgagtagctgggactacaggtgcccaccaccatgcctggctaatttttttttgtatttttggtagagacggggtttcaccatgttggccaggatggtctcgatctcttgacctcgtgatccacctgccttggcctcccaaagtactgggattacaggcgtgagcaccttccttcaaatggaattttatatctgtgtttacattttctgcttaaagtttgaattttgtttaattcaattgaatttccacttaaaatgtaaacttttgaaacccacacctctgacatattccacattgctgttggatatttttagtttaaagatttggcctgtaagctgtatcggtatcattattctaacttcaggctcaaggtctcagtcactagttaaagtcttttctaccggcaaatctgtattaccatctactgtggaagataacctctaaagtgcccatgtaagcacaaatccataaaactaaaagtcaaagaaaaaagag

SEQ ID NO: 554120 - DNA, 631 bp, Homo sapiens
tggaacaccaaaaggtgttcagacttttttttttgagacagtctcgctctgtcaccaggctggagtgtggtagtgcaatctcagctcactgcaacctctgcctccctggttcaagcaattctcctgcctcagcctcctgagtagctgggactacaggtgcccaccaccatgcctggctaatttttttttgtatttttggtagagacggggtttcaccatgttggccaggatggtctcgatctcttgacctcgtgatccacctgccttggcctcccaaagtactgggattacaggcgtgagcmccttccttcaaatggaattttatatctgtgtttacattttctgcttaaagtttgaattttgtttaattcaattgaatttccacttaaaatgtaaacttttgaaacccacacctctgacatattccacattgctgttggatatttttagtttaaagatttggcctgtaagctgtatcggtatcattattctaacttcaggctcaaggtctcagtcactagttaaagtcttttctaccggcaaatctgtattaccatctactgtggaagataacctctaaagtgcccatgtaagcacaaatccataaaactaaaagtcaaagaaaaaagag

SEQ ID NO: 554121 - DNA, 1476 bp, Homo sapiens
acaagagggtagggacttgggatgtatgtgaaaactctcctactggttgatgaaagagaaaacaagtttaaaacacacacaaaaagcaatacccacaaccaccttctcaatctattttgcatcgcatattgcttcctttctcctcttgtcgtcatagtttttttgtttgtttgtttttgagacagagtctcactctgttgcccaggctggagtgcagtggtgcaattttgactcactgcagcctccacctgctgggttcaaacaattctcctgcctcagccacccgagtagctgggattacaggtatgcgccaccatgcccagctaatttttgtgtttttagtagagacagggtttcaycatattgaccaggctggtctagaactcctgacatcaagtgatctgcctgccttggcctcctaaagtgctgggattataggcacgagccacggcacctggcccaattgtagtcttaactgatcttactcacattttatctttttttatttatttattttactttaagttctgggatacatgtgcagaacatgcaggtttgttacacaggtatacatgtgccatggtggtttactgcacctatcaacctatcatctaggttttaagctccacatgcattaggtatttgtcctaatgctctccctccccttgccccctaacccccaacaggccctagtgtgtgatgttcccctccctgtgtcatttgttttcattaacattttatcttaaaaattattgagaagaatcacttttgaaaaatgtgctggggtaggagagaactttgagaactatccctgtctctctacccagcgacctcctgcctgagagtctgttggtcaatttagctgtaaccagggtcaaatgggcaggaagagtcatgtgggggagagattacaagagcccagaggtgataagagtgacattacaccacttattgagcaccttccatgtgccaggcacaagtgtagacacttaacatacataatctgatttaatcctggcaaagtaagaattattcttctcatgttcacaaataacgttaccaaggcttagagatgtttataattccctgatatcccatggttggtcaatgctccaacagtctaagcttcccagacatgggagctggggaagcttaaatgcctcttgcctccagttgggattggagaggagagataggccttagctggggagatgccagggctcagtcatgaagagacaaggaaggcatgggatggatacagggagacatggaatttcagagaggcttcagcccaggtcaaagactaagctgtcttaacttattggcacccagacctcacttcaggtcattagagaagctctaaataatacagaaatcctcctttagttaaaaaaaaaaaaaatgtagagattcaggaagcatccaagaatgttggtcaaatgtgtatcattttctctgggagcataagagcatttg

SEQ ID NO: 554122 - DNA, 1476 bp, Homo sapiens
acaagagggtagggacttgggatgtatgtgaaaactctcctactggttgatgaaagagaaaacaagtttaaaacacacacaaaaagcaatacccacaaccaccttctcaatctattttgcatcgcatattgcttcctttctcctcttgtcgtcatagtttttttgtttgtttgtttttgagacagagtctcactctgttgcccaggctggagtgcagtggtgcaattttgactcactgcagcctccacctgctgggttcaaacaattctcctgcctcagccacccgagtagctgggattacaggtatgcgccaccatgcccagctaatttttgtgtttttagtagagacagggtttcatcatattgaccaggctggtctagaactcctgacatcaagtgatctgcctgcctyggcctcctaaagtgctgggattataggcacgagccacggcacctggcccaattgtagtcttaactgatcttactcacattttatctttttttatttatttattttactttaagttctgggatacatgtgcagaacatgcaggtttgttacacaggtatacatgtgccatggtggtttactgcacctatcaacctatcatctaggttttaagctccacatgcattaggtatttgtcctaatgctctccctccccttgccccctaacccccaacaggccctagtgtgtgatgttcccctccctgtgtcatttgttttcattaacattttatcttaaaaattattgagaagaatcacttttgaaaaatgtgctggggtaggagagaactttgagaactatccctgtctctctacccagcgacctcctgcctgagagtctgttggtcaatttagctgtaaccagggtcaaatgggcaggaagagtcatgtgggggagagattacaagagcccagaggtgataagagtgacattacaccacttattgagcaccttccatgtgccaggcacaagtgtagacacttaacatacataatctgatttaatcctggcaaagtaagaattattcttctcatgttcacaaataacgttaccaaggcttagagatgtttataattccctgatatcccatggttggtcaatgctccaacagtctaagcttcccagacatgggagctggggaagcttaaatgcctcttgcctccagttgggattggagaggagagataggccttagctggggagatgccagggctcagtcatgaagagacaaggaaggcatgggatggatacagggagacatggaatttcagagaggcttcagcccaggtcaaagactaagctgtcttaacttattggcacccagacctcacttcaggtcattagagaagctctaaataatacagaaatcctcctttagttaaaaaaaaaaaaaatgtagagattcaggaagcatccaagaatgttggtcaaatgtgtatcattttctctgggagcataagagcatttg

SEQ ID NO: 554123 - DNA, 1476 bp, Homo sapiens
acaagagggtagggacttgggatgtatgtgaaaactctcctactggttgatgaaagagaaaacaagtttaaaacacacacaaaaagcaatacccacaaccaccttctcaatctattttgcatcgcatattgcttcctttctcctcttgtcgtcatagtttttttgtttgtttgtttttgagacagagtctcactctgttgcccaggctggagtgcagtggtgcaattttgactcactgcagcctccacctgctgggttcaaacaattctcctgcctcagccacccgagtagctgggattacaggtatgcgccaccatgcccagctaatttttgtgtttttagtagagacagggtttcatcatattgaccaggctggtctagaactcctgacatcaagtgatctgcctgccttggcctcctaaagtgctgggattataggcacgagccacggcaccyggcccaattgtagtcttaactgatcttactcacattttatctttttttatttatttattttactttaagttctgggatacatgtgcagaacatgcaggtttgttacacaggtatacatgtgccatggtggtttactgcacctatcaacctatcatctaggttttaagctccacatgcattaggtatttgtcctaatgctctccctccccttgccccctaacccccaacaggccctagtgtgtgatgttcccctccctgtgtcatttgttttcattaacattttatcttaaaaattattgagaagaatcacttttgaaaaatgtgctggggtaggagagaactttgagaactatccctgtctctctacccagcgacctcctgcctgagagtctgttggtcaatttagctgtaaccagggtcaaatgggcaggaagagtcatgtgggggagagattacaagagcccagaggtgataagagtgacattacaccacttattgagcaccttccatgtgccaggcacaagtgtagacacttaacatacataatctgatttaatcctggcaaagtaagaattattcttctcatgttcacaaataacgttaccaaggcttagagatgtttataattccctgatatcccatggttggtcaatgctccaacagtctaagcttcccagacatgggagctggggaagcttaaatgcctcttgcctccagttgggattggagaggagagataggccttagctggggagatgccagggctcagtcatgaagagacaaggaaggcatgggatggatacagggagacatggaatttcagagaggcttcagcccaggtcaaagactaagctgtcttaacttattggcacccagacctcacttcaggtcattagagaagctctaaataatacagaaatcctcctttagttaaaaaaaaaaaaaatgtagagattcaggaagcatccaagaatgttggtcaaatgtgtatcattttctctgggagcataagagcatttg

SEQ ID NO: 554124 - DNA, 1476 bp, Homo sapiens
acaagagggtagggacttgggatgtatgtgaaaactctcctactggttgatgaaagagaaaacaagtttaaaacacacacaaaaagcaatacccacaaccaccttctcaatctattttgcatcgcatattgcttcctttctcctcttgtcgtcatagtttttttgtttgtttgtttttgagacagagtctcactctgttgcccaggctggagtgcagtggtgcaattttgactcactgcagcctccacctgctgggttcaaacaattctcctgcctcagccacccgagtagctgggattacaggtatgcgccaccatgcccagctaatttttgtgtttttagtagagacagggtttcatcatattgaccaggctggtctagaactcctgacatcaagtgatctgcctgccttggcctcctaaagtgctgggattataggcacgagccacggcacctggcccaattgtagtcttaactgatcttactcacattttatctttttttatttatttattttactttaagttctgggatacatgtgcagaacatgcaggtttgttacacaggtatacatgtgccatggtggtttactgcacctatcaacctatcatctaggttttaagctccacatgcattaggtatttgtcctaatgctctccctccccttgccccctaacccccaacaggcccyagtgtgtgatgttcccctccctgtgtcatttgttttcattaacattttatcttaaaaattattgagaagaatcacttttgaaaaatgtgctggggtaggagagaactttgagaactatccctgtctctctacccagcgacctcctgcctgagagtctgttggtcaatttagctgtaaccagggtcaaatgggcaggaagagtcatgtgggggagagattacaagagcccagaggtgataagagtgacattacaccacttattgagcaccttccatgtgccaggcacaagtgtagacacttaacatacataatctgatttaatcctggcaaagtaagaattattcttctcatgttcacaaataacgttaccaaggcttagagatgtttataattccctgatatcccatggttggtcaatgctccaacagtctaagcttcccagacatgggagctggggaagcttaaatgcctcttgcctccagttgggattggagaggagagataggccttagctggggagatgccagggctcagtcatgaagagacaaggaaggcatgggatggatacagggagacatggaatttcagagaggcttcagcccaggtcaaagactaagctgtcttaacttattggcacccagacctcacttcaggtcattagagaagctctaaataatacagaaatcctcctttagttaaaaaaaaaaaaaatgtagagattcaggaagcatccaagaatgttggtcaaatgtgtatcattttctctgggagcataagagcatttg

SEQ ID NO: 554125 - DNA, 1476 bp, Homo sapiens
acaagagggtagggacttgggatgtatgtgaaaactctcctactggttgatgaaagagaaaacaagtttaaaacacacacaaaaagcaatacccacaaccaccttctcaatctattttgcatcgcatattgcttcctttctcctcttgtcgtcatagtttttttgtttgtttgtttttgagacagagtctcactctgttgcccaggctggagtgcagtggtgcaattttgactcactgcagcctccacctgctgggttcaaacaattctcctgcctcagccacccgagtagctgggattacaggtatgcgccaccatgcccagctaatttttgtgtttttagtagagacagggtttcatcatattgaccaggctggtctagaactcctgacatcaagtgatctgcctgccttggcctcctaaagtgctgggattataggcacgagccacggcacctggcccaattgtagtcttaactgatcttactcacattttatctttttttatttatttattttactttaagttctgggatacatgtgcagaacatgcaggtttgttacacaggtatacatgtgccatggtggtttactgcacctatcaacctatcatctaggttttaagctccacatgcattaggtatttgtcctaatgctctccctccccttgccccctaacccccaacaggccctagtgtgtgatgttcccctccctgtgtcatttgttttcattaacattttatcttaaaaattattgagaagaatcacttttgaaaaatgtgctggggtaggagagaactttgagaactatccctgtctctctacccagcgacctcctgcctgagagtctgttggtcaatttagctgtaaccagggtcaaatgggcaggaagagtcatgtgggggagagattacaagagcccagaggtgataagagtgacattacaccacttattgagcaccttccatgtgccaggcacaagtgtagacacttaacatacataatctgatttaatcctggcaaagtaagaattattcttctcatgttcacaaataacgttaccaaggcttagagatgtttataattccctgatatcccatggttggtcaatgctccaacagtctaagcttcccagacatgggagctggggaagcttaaatgcctcttgcctccagttgggattggagaggagagataggccttagctggggagatgccagggcycagtcatgaagagacaaggaaggcatgggatggatacagggagacatggaatttcagagaggcttcagcccaggtcaaagactaagctgtcttaacttattggcacccagacctcacttcaggtcattagagaagctctaaataatacagaaatcctcctttagttaaaaaaaaaaaaaatgtagagattcaggaagcatccaagaatgttggtcaaatgtgtatcattttctctgggagcataagagcatttg

SEQ ID NO: 554126 - DNA, 633 bp, Homo sapiens
ttctcccatgcaccaggcaaagggttagattcagagattcaaaaataaaaatactccttaatcttatagtagattaggggaacagacacgtgagttaacagttacaacatagttagttcatgctatggtagagatacgcaggaagaatagtgagaaggcctagggagggagagcatcaaacatcccctgtgaactgagaagggaaggataaacagaagtttgcctgagaacaagttggttgagacagtgctctcaaacttgcaagcacgttggaattacytagaaactttcaaaaactattgatgcctgtgtctcaggcatataatttaattggtctgtggtatggcttgggctttggaatgttttaaatatccccaggttattttaagtgtaggcatatggcagaggacacagagtgaacaagcacacagagccatgcttttaaagcatgatggccatagccttattttgagaggtgtaaactttggtaggtggtatttgtacattttggtgtaaagaacacagtaatatagaaaatgagataagaactgctgtaattcacattcctttacaggtattttctagacaccaggatagtatgttgacaattaagattagcatattagaagaaaa

SEQ ID NO: 554127 - DNA, 872 bp, Homo sapiens
attcaagatcttcttggtagtaagattatagcaccactaatttttcactctacagaattagttytgttctacactttaacatttctttaagctacttatggggtatgaaagtttaacacacgttttccaaatgcaactttttttttttttcttttttgagacggagttttgctcttgttgcccaggctggagtgcaatggcaggatctctgcgcaccacaagctccacctcctgggttcaagcgattctcctgcctcagcctcccgagtaactgggattacaggcacctgccaccatgcccagctaacttctgtatttttagtagagaagaggtttctctgtgttggtcaggctagtctcgaactcccgaccttaggtgatacgcccgcctcggccttccaaagtgctgggattacaggcgtgagccactgcgcccagccttaaatgccacttttatttgaggacagtaattttgttttcctgtcttcagatgatatcgtagatgccacctttggaaggaacttctacagggtaccagaatcttccccttatgatgaaataatattgtagttggacttgagatttgtcaggcttttcaattattaaggttaatttcctggcgctgggttatagtttttgttttttgtttgtttgttttagtcattttaagtattgttgtatttcggaggtaagattagtcaagaggcagaaacctgcatctttctgaaattcatttcttgcttcttgcacttagataatgtaaagtaataacttattttcacatgatttgtagtaggcaaatggctaattttgatatttcattcctaaatccccttacatatttaattaaatgatccagtcaaagctggaaa

SEQ ID NO: 554128 - DNA, 872 bp, Homo sapiens
attcaagatcttcttggtagtaagattatagcaccactaatttttcactctacagaattagttttgttctacactttaacatttctttaagctacttatggggtatgaaagtttaacacacgttttccaaatgcaactttttttttttttcttttttgagacggagttttgctcttgttgcccaggctggagtgcaatggcaggatctctgcgcaccacaagctccacctcctgggttcaagcgattctcctgcctcagcctcccgagtaactgggattacaggcacctgccaccatgcccagctaacttctgtatttttagtagagaagaggtttctctgtgttggtcaggctagtctcgaactcccgaccttaggtgatacgcccgcctcggccttccaaagtgctgggattacaggcgtgagccactgcgcccagccttaaatgccacttttatttgaggacagtaattttgttttcctgtcttcagatgatatcgtagatgccacctttggaaggaacttctacagggtaccagaatcttccccttatgatgaaataatattgtagttggacttgagatttgtcaggcttttcaattattaaggttaatttcctggcgctgggttatagtttttgttttttgtttgtttgttttagtcattttaagtattgttgtatttcggaggtaagattagtcaagaggcagaaacctgcatctttctgaaattcatttcttgcttcttgcacttagataatgtaaagtaataacttattttcacatgatttgyagtaggcaaatggctaattttgatatttcattcctaaatccccttacatatttaattaaatgatccagtcaaagctggaaa

SEQ ID NO: 554129 - DNA, 968 bp, Homo sapiens
gctttttttctgcctacccctagtacttgctgaatcttccctacttatgaatattgtaatctaataagccttatctctatttactttggagttgaagatccaattagttgcatttggaaaggattaattcaactgctctgcccttggaggcagtgagtgccaagcttctgctcatctgtggttttgttccaattgctctgccacattctgctggagctgttagcgtttcatcactctttgaaaaaggccaatgtagcacggcttacagtaagaaaatgtggactatgatactacaggcgaatttagagagaggatatgtcagaatctgaggtctggacctgagtattctaaaactggaggctttggtgagaacttacgtccacagcttataaatttaacctctgacagctaactgggttgttttaccattgctgcagccttgctattaactcctttccagttatgtgttcgctgttctggacactgtacactttttaagtgccccagttcacagttaagagtcaaaagatgatggcaagcttatatactttcaaagtaataaatatgtgtcatcagttcaccccagaaaaggaggcagaaaataaactgggaaatctgggcaggtgaggaatagggagtagattggaggaaaagagatctataggggtgatatgtcagcccaggtattcctaatcactgactggaaccaatttggaagattgacaactaatccatagtagcacatattgctttggatagtaagtggaattactactttaggsgtaccttgcctataagatctcctccctttcattctctctctcctaacacacacacacatgcacacacacacacacacacacacacaaagatagaaagaatgtcattttcctgtatctgttactagagaaaaatgctaatctagcaaaaacactaagtaagcatctgaccccttgagatatcttgca

SEQ ID NO: 554130 - DNA, 1034 bp, Homo sapiens
catctcaaaaaaaaaaaaaaaatgttttacagagtctactccattcccctctgtgaggacgggtgcactgcacagttctcatacgtgtccacgcatggtgcacataagtgggtgtctgcccccctcccagcctctcaacggtctcaaagggtgcaagccaggtcctcatgagcagccttttccattctctactagctgagttaaaagaaagttcttcccttctacagaggtcctaggtcccctgcctgtgggcaccaggtgtacacagctgtctctggctggaaatcaatggtgcatggacttttgaaagcccttatggaaggtggagttgggagcattacttgaggacatgaagaacgtcctgattcaggacagattccccatgtcaacctaaactctgcaaaaatrcagttttcttactcaagcctcaaagccaatgtctacataagaaatgcccactaggagctggtggcttctgcttctggaacactgcttggaaatttctaatccactccctgttttgccttcaggcaggaggtgcagaccgtcctgtttgcaagacctccacaagttcagtaacacctgctcacggggtccattagaaccacagggcatcagcttcacaaggtgcaattgggaagtgtctcagcatgaacaaagttgcttctcattctacaggcagtgaatcttcctgcacaatgtaactgcctgagggggctttttaaaacacacatctcatcccgacacccctgcttcaaaccttgcggcccctcggcccagcagttcaccgctgttgcaaatgcaacctcaagttcagtcagactccctcacatacccctacatgtagttctttctgtctgcaaggccctcctcccccagcatttccatttaaccctcatcttgcttgtttaagactcacttcagatgtcatctcttctggaagtcttccctggccccagcctccccagggtggattggtcctcctctgtcccctgcagctctccatcctgccttctgctgccttgctggtctca

SEQ ID NO: 554131 - DNA, 1767 bp, Homo sapiens
cctgctattttgtagaattcacctgtgtaaagtatgtctccctatttctagagcatttggatatttggatgtgacttttgagtgtgttctatatgaccaaaatgacatgctggatagtcaagtttcagagtttgtgtcaggaagawgtacaactttggcaaagtcacataaaatcataaaatagaaatttttaacaatatcaaccactttatgaataactttttttcaatattcagcattatttactaagtaaaaccacagtcttgtgtttgtccagttcttcaggcaaatatgtattttgacatatttacaatattctgtgtttctatcaacactgagtcaagatttggtccaaattgctgtccttcactgtaaatcaagctacccgtgtgttgccactgaagggcaacctcctctttacaaagcacatgtggcctttctgcatatacagtttacatgacattaatataggttccagtctttatcatgactgacaaagtaatcttagccacacaaaacaatgttaatttttttgcatgggttttaattatgaaaaaaaatcgtccttccctatatgtgcaccatccattgagagagagctgcttcacactgcaagtcagtggtttctcccaaacgtaatgtaaaatatctgctcagagatatgtgatggtaagcattcttctgtattttatgcatgtatagtatgcaatagccaatgaaattatttgataaagactctttctattttctcatcaaacttattaccctcaatgaggcacttatgtagtattggtcagcctttcctccactggaaaatatgatttttcacttgcttttgaaggccttggctcttttaagagaaatattttttctttagtttaaattttcaaaatgttcaatggctttattcttatctttaataaaacttcataatgtttggaactagaagaaaataaaattctggtctaataaaattgagtttcctttgtttttagatctccattttgccaaattataagcacatttttggacttctaggcaaaattgtcacacttacaaattcaattgtcccagcatatacggattcacaatctatatttatgccatagtccactttattaaaaacatgcatgatgtcattctgagtttaatgtatattttaggagttttattagtcatttttgtttcaccaaactaaatactgattactgtaagtcagggatgtattaacattctgttgctgaataacaaattgtcatgaatttaaaggcttaaaacaatacccatttatcatctcctggttctgtaagtcagaattcatagtggacttggctggactctctgcttaggatcttgcaaggttgaaattaagaagacaacttggctaggctttcatgcaggggctctggagaagaatctgcttccaatctcattcaggttgtttgcagaattgagttgcttgtggtcctgtctctttggtggccagtggcctcagtgctcctgaaggctgcccacattcctcctatgtggcaccttcattttcaacaccagcaacaacaggtccagtccttctcatgttctctatctctttgactcccacttctgccatcggtgagaaaagctttctgcttctaagctgtcatgtgaataggtagggtttacccaaataacctctctattttaagataaactgtaccatataatataattatgagagtgatatcataaattcatagataatgaagactaaagtgggacattttgggg

SEQ ID NO: 554132 - DNA, 1767 bp, Homo sapiens
cctgctattttgtagaattcacctgtgtaaagtatgtctccctatttctagagcatttggatatttggatgtgacttttgagtgtgttctatatgaccaaaatgacatgctggatagtcaagtttcagagtttgtgtcaggaagaagtacaactttggcaaagtcacataaaatcataaaatagaaatttttaacaatatcaaccactttatgaataactttttttcaatattcagcattatttactaagtaaaaccacagtcttgtgtttgtccagttcttcaggcaaatatgtattttgacatatttacaatattctgtgtttctatcaacactgagtcaagatttggtccaaattgctgtccttcactgtaaatcaagctacccgtgtgttgccactgaagggcaacctcctctttacaaagcacatgtggcctttctgcatatacagtttacatgacattaatataggttccagtctttatcatgactgacaaagtaatcttagccacacaaaacaatgttaatttttttgcatgggttttaattatgaaaaaaaatcgtccttccctatatgtgcaccatccattgagagagagctgcttcacactgcaagtcagtggtttctcccaaacgtaatgtaaaatatctgctcagagatatgtgatggtaagcattcttctgtattttatgcatgtatagtatgcaatagccaatgaaattatttgataaagactctttctattttctcatcaaacttattaccctcaatgaggcacttatgtagtattggtcagcctttcctccactggaaaatatgatttttcacttgcttttgaaggccttggctcttttaagagaaatattttttctttagtttaaattttcaaaatgttcaatggctttattcttatctttaataaaacttcataatgtttggaactagaagaaaataaarttctggtctaataaaattgagtttcctttgtttttagatctccattttgccaaattataagcacatttttggacttctaggcaaaattgtcacacttacaaattcaattgtcccagcatatacggattcacaatctatatttatgccatagtccactttattaaaaacatgcatgatgtcattctgagtttaatgtatattttaggagttttattagtcatttttgtttcaccaaactaaatactgattactgtaagtcagggatgtattaacattctgttgctgaataacaaattgtcatgaatttaaaggcttaaaacaatacccatttatcatctcctggttctgtaagtcagaattcatagtggacttggctggactctctgcttaggatcttgcaaggttgaaattaagaagacaacttggctaggctttcatgcaggggctctggagaagaatctgcttccaatctcattcaggttgtttgcagaattgagttgcttgtggtcctgtctctttggtggccagtggcctcagtgctcctgaaggctgcccacattcctcctatgtggcaccttcattttcaacaccagcaacaacaggtccagtccttctcatgttctctatctctttgactcccacttctgccatcggtgagaaaagctttctgcttctaagctgtcatgtgaataggtagggtttacccaaataacctctctattttaagataaactgtaccatataatataattatgagagtgatatcataaattcatagataatgaagactaaagtgggacattttgggg

SEQ ID NO: 554133 - DNA, 1767 bp, Homo sapiens
cctgctattttgtagaattcacctgtgtaaagtatgtctccctatttctagagcatttggatatttggatgtgacttttgagtgtgttctatatgaccaaaatgacatgctggatagtcaagtttcagagtttgtgtcaggaagaagtacaactttggcaaagtcacataaaatcataaaatagaaatttttaacaatatcaaccactttatgaataactttttttcaatattcagcattatttactaagtaaaaccacagtcttgtgtttgtccagttcttcaggcaaatatgtattttgacatatttacaatattctgtgtttctatcaacactgagtcaagatttggtccaaattgctgtccttcactgtaaatcaagctacccgtgtgttgccactgaagggcaacctcctctttacaaagcacatgtggcctttctgcatatacagtttacatgacattaatataggttccagtctttatcatgactgacaaagtaatcttagccacacaaaacaatgttaatttttttgcatgggttttaattatgaaaaaaaatcgtccttccctatatgtgcaccatccattgagagagagctgcttcacactgcaagtcagtggtttctcccaaacgtaatgtaaaatatctgctcagagatatgtgatggtaagcattcttctgtattttatgcatgtatagtatgcaatagccaatgaaattatttgataaagactctttctattttctcatcaaacttattaccctcaatgaggcacttatgtagtattggtcagcctttcctccactggaaaatatgatttttcacttgcttttgaaggccttggctcttttaagagaaatattttttctttagtttaaattttcaaaatgttcaatggctttattcttatctttaataaaacttcataatgtttggaactagaagaaaataaaattctggtctaataaaattgagtttcctttgtttttagatctccattttgccaaattataagcacatttttggacttctaggcaaaattgtcacacttacaaattcaattgtcccagcatatacggattcacaatctatatttatgccatagtccactttattaaaaacatgyatgatgtcattctgagtttaatgtatattttaggagttttattagtcatttttgtttcaccaaactaaatactgattactgtaagtcagggatgtattaacattctgttgctgaataacaaattgtcatgaatttaaaggcttaaaacaatacccatttatcatctcctggttctgtaagtcagaattcatagtggacttggctggactctctgcttaggatcttgcaaggttgaaattaagaagacaacttggctaggctttcatgcaggggctctggagaagaatctgcttccaatctcattcaggttgtttgcagaattgagttgcttgtggtcctgtctctttggtggccagtggcctcagtgctcctgaaggctgcccacattcctcctatgtggcaccttcattttcaacaccagcaacaacaggtccagtccttctcatgttctctatctctttgactcccacttctgccatcggtgagaaaagctttctgcttctaagctgtcatgtgaataggtagggtttacccaaataacctctctattttaagataaactgtaccatataatataattatgagagtgatatcataaattcatagataatgaagactaaagtgggacattttgggg

SEQ ID NO: 554134 - DNA, 1767 bp, Homo sapiens
cctgctattttgtagaattcacctgtgtaaagtatgtctccctatttctagagcatttggatatttggatgtgacttttgagtgtgttctatatgaccaaaatgacatgctggatagtcaagtttcagagtttgtgtcaggaagaagtacaactttggcaaagtcacataaaatcataaaatagaaatttttaacaatatcaaccactttatgaataactttttttcaatattcagcattatttactaagtaaaaccacagtcttgtgtttgtccagttcttcaggcaaatatgtattttgacatatttacaatattctgtgtttctatcaacactgagtcaagatttggtccaaattgctgtccttcactgtaaatcaagctacccgtgtgttgccactgaagggcaacctcctctttacaaagcacatgtggcctttctgcatatacagtttacatgacattaatataggttccagtctttatcatgactgacaaagtaatcttagccacacaaaacaatgttaatttttttgcatgggttttaattatgaaaaaaaatcgtccttccctatatgtgcaccatccattgagagagagctgcttcacactgcaagtcagtggtttctcccaaacgtaatgtaaaatatctgctcagagatatgtgatggtaagcattcttctgtattttatgcatgtatagtatgcaatagccaatgaaattatttgataaagactctttctattttctcatcaaacttattaccctcaatgaggcacttatgtagtattggtcagcctttcctccactggaaaatatgatttttcacttgcttttgaaggccttggctcttttaagagaaatattttttctttagtttaaattttcaaaatgttcaatggctttattcttatctttaataaaacttcataatgtttggaactagaagaaaataaaattctggtctaataaaattgagtttcctttgtttttagatctccattttgccaaattataagcacatttttggacttctaggcaaaattgtcacacttacaaattcaattgtcccagcatatacggattcacaatctatatttatgccatagtccactttattaaaaacatgcatgatgtcattctgagtttaatgtatattttaggagttttattagtcatttttgtttcaccaaactaaatactgattactgtaagtcagggatgtattaacattctgttgctgaataacaaattgtcatgaatttaaaggcttaaaacaatacccatttatcatctccyggttctgtaagtcagaattcatagtggacttggctggactctctgcttaggatcttgcaaggttgaaattaagaagacaacttggctaggctttcatgcaggggctctggagaagaatctgcttccaatctcattcaggttgtttgcagaattgagttgcttgtggtcctgtctctttggtggccagtggcctcagtgctcctgaaggctgcccacattcctcctatgtggcaccttcattttcaacaccagcaacaacaggtccagtccttctcatgttctctatctctttgactcccacttctgccatcggtgagaaaagctttctgcttctaagctgtcatgtgaataggtagggtttacccaaataacctctctattttaagataaactgtaccatataatataattatgagagtgatatcataaattcatagataatgaagactaaagtgggacattttgggg

SEQ ID NO: 554135 - DNA, 569 bp, Homo sapiens
ggaggttgcagtgagccaagatcccgccactgcattccagcctgggtgactccatctcaaaaaaacaaaaacaaagggaggatatgacttgacagggcaccctgactccaaaggcctgggctttcccttcttttacttcttccctccatccttctttctctttacttcccatcttcctcttttctttcatatttgcttcttttcctcaaaaaaatttatcaaaataatatctagaaccggatgtggtggctcacatctgtaatcccagcactwtgggaggcagaggcaggaggatcacttcaggccaggagttcgaggccagcctggccaacataacaagacctcgtctctatagaaactaaaaaaaattagccagggatagtggtgagcacctgcagtcccagctactcgggaagccaaggtgagcacctgcagtcccagctactcaggaggccaaggtgggaggatctcttgagcccaggaggtggaggctgctgtgagatgtgattgcaccactgcactccagtctgggtgacaaagcaagacctcatctaaaaaataataataaa

SEQ ID NO: 554136 - DNA, 959 bp, Homo sapiens
tgaaccacctatttttaatgtatgagaaagaaatgaaactttcgacttgagccattgttattttttttctgttagagaagaatttaatcttagcgaaaaggggaaaaaaaatacagtgccaaaaagtgtgccaagctgtgataagacattctcttcttaaaagctgttgtagtttacattaataattgtatagattcaggccgggtgcggtggctcacacctctaattccagcactttgggaggccaaggtgggcggatcacgaggtcaggagtttgagaccagcctgaccaacatggtgaaacccatcgctactaaaaatacaaaaattagctgggcttggtggtgagtgcctgtaatcccagctactcaggagcctgaggcaggagaatggcttgaacccaggagrcagaggttgcagtgagccaagattgcgccactgaactccagcttgggcaacagagtgagactccatctaaaaaaaaaaagagagagaaaattgtacagattcattcccaaataattctgaaaaaagacataaataaacaagcaaacatgagtttacttgagcacttacaaatagcttttcttttatggcattgtctcaatttaagagagcttttagaaaaaaaaatacacctccacacatatcacaataagaataacaaaaattttaaggcatttgtcacctaacttcctattttgtggagctaagatatttctaactttagaaggatatagtcttgataatgttacattaaattttcttcataaataaacatattagcatggcatagcgtagtgaagcatataagttaagcttaactgtatcaccattgtcttatttacaacgaatggaaaaaaatattttgagtaactaaaaagtcattctctttatttttaatttcccacctcacatatcctcaaaagtatgcttctaaagtaagtgaatatacgcct

SEQ ID NO: 554137 - DNA, 2799 bp, Homo sapiens
taaatttttgtagtaatgaatctttctcctgtttacagttcttcacctcccagccactacctcccacgccaagcaaaaaaaataaataaataataaatcatttttgattcctttcttccaacctctaatttcctggtttcctcagcgctcagtgtttgtgttgggagacccattagggatgagagagaggggagaaggaatggttttgaacacagaaaaattgtagtcccctggatgggctgtagcccttccgggtcacccttgccaaatctccggtcgaaaggcagctgagccagctgcgggcagacgcccctcccagcactttcctctaggcctggaagtattggattatgggcaattgattcttatttggcatgtactcacttctcgcccaggttttcaactttctttttcttcctctcttcccctctctcatttcgttattcgtctgcatctcttcccaatccctctctcccgctcccccaccaagagcttgtgaggaaagcagactggccggagtcctcgctccgggcccagcagtcctctttgttaacttcctggagcctcctctggcgtggtgccttaagactgtgggctaggccgggctttctccctcagaaacctgggcctcactgctgagacacagtttccaacagccagagggactcgaagattcccaagaggatggttgggtctagtgagagtgcttgttggaaggcggggaagggagattttaacaggtctcacgttttggaaaacaaacaaatttgaccacttgcgttggaatggtcagctgtggttccgggaccgggagtgtaggtggctaaggcacccagctcaggccggccgggcaggggacatggatactgcagctgctgtttggctctaggtccggatcccacggaattggagcttcgcttaacctgccccagcctagcccaagcccgggcggggacctggctggcggtgcccggctgtggttctggcggctgccccgcaccccattctagctgggaggaagcctttgggagtcacaattttagtaggctgtggcaccctcggccttatcatctttgcattggatggagtttccatcaaatacattcttctcctcgccgtctacagtcggcatagtttgaagtctgtttacttgtcccggggaaaggtgaactcaatcgggtttgcggaccgagacaaacaggacctcagcctctttcttgccatcaattacgctggctccatccgctcccgctcccggctgggggaattgtcgcagctgcgggaagagacctagaacgcaatctgaagcgtttcattagggaaataggtgcgcgctgggagcagtgcaagagggttccgcaacctggggacaccctccgcccctacagcaccgtcggcttctggaaagccgacagtcctcctttctgggaatctcctgcatcaactcgtgcccaatttctggcctcccctctcggagaaatcagcattctgaggatgcccctggcgctgaggtgcttggaagcttccgaggtttgggagcaagtacggttcaccccgagatcaccgcsaagctttgcctccgccaaagtaccctacccatccctaggccccaacggctgagaggagtgggggagattttgcacactgcaccccccttcctcctctccccacccccacttcgccatgtaaacactaggactttctcgagagccttggagagccgctctagtggcttcgggccctgaaaccccaggctgggcttttttgatgtttagcatcccaaagctgctccccaccctggccccagcctgggaactgggagctgtgggcaggagaggaaggaaagcagctctctcagctagcgagggggtcagggactgggccaagctcagaagcggggagaagagcgagacagagatgctctgagcaggggagacagggatcccgggctgctgccgctaccaacaagggtacacactgcggtcctcaaggccaggaggggggtgggggcagggaatgcctcagccaacagggcagcggctcggccctgctgctggcccggtgggaagtagcctggggccccgcgactgaaatccgagccaggcctgggcagtctccgctagaaacgctctgggcgcgcactcctggagacgcggaggcccgggcgctccagaccagtgtccttgtaggaggcttcttcacgaagcttagagtttggcctttcatagggaaagacttgctcgggagcaagtctaagggattttaagggattttaaatcttcctgggccagggctagggagctctagtgacagtgtcttggtctggaatccaactctccaattttgaggccgcagggaggaattctgagactttagaggccgcacagccttcagcgcgctcaccgcgtccaggcgtcagtgaggggctatctcgaggcgcgagtgcacaaaaggtagcgcgagtctcttctcaggcgatccagataagaggaaatgagagccgggttttctgacttccaactcattagggaccaggtaaggtcaatgctttctctattatgtctttatcttaaaagcgggtcaatttaagataagggaaaaaaaatccaggatctgtgtgaaccgtgctgataaagactgaccccttttctgaactaaaagcaagccaggcagacattcattttctataaacaagagagttgtgagaagctgccttgaattctgatcatatgtctccagacatcgctctcccttccctgctccccaccccccaattattagcgcgaggaagcagagtag

SEQ ID NO: 554138 - DNA, 632 bp, Homo sapiens
tggccaggctggtctcgaactcctgacctcaaatgagccacccgccttggcctcccaaagtgctgggactactacagtcgtgagccaccacaagccgcccaaattagccttttaattaaccctgaggattagaatatttgtttcctctttttcctccatcctgatttcatctccagccttctagtactcatgttttttgttttttgtgtttttcttgagattgagacagggtttcactctgccacccaggctgcagtgcagtggcacgatctcagctcactgcaaccttcacctcccagttcaagtgattctcccacctcagcctcctgagtagctggactacaggtgcgcaccaccacagccagctaatttttgtattttttggtagagatggggtttcaccatgttggccaagctggtctcaaactcctgacctcaagtgatccacccgcctcggcctcccaaagtgctgggattacaggcgtgagccagcacgcccagcctactcatcttttattgaaatgaaggcaaccacacaacacacacacacwcacacacagacactcctacctcccacagacggttgagacttcgcttcctactcacccacacctatcatttcagcaagagct

SEQ ID NO: 554139 - DNA, 636 bp, Homo sapiens
gaaagtatgtctgccatctgtagcccagatgatgatgagtgtggcaatgaattaaacatttagaaataaaatctaatggttgtttctgtttttaaggatgaggcaactgtaaaacggcttcattactcttaatgcacaaaatagctggaatttgtttatgtgccacgtatccataacttagaagatatataaggaaagacatgatgattgcggattttttgagtgtgtcttggcacaatttctatataggttatcatgcatgaataatgtgctaagacacaggaacagtgccagaagtttgaaagcattatcatcatcatcacttgctttttayagaggactcatactctaagatagagtcaccatttcatgtgttgctgctcacatgcatgaatctacatctatcaattaattcatcatgagaattaccatttttatccagcatttgtaaggaacttcaacaaatttacaagaaaaaaaaaacattgaaaagtgggcaaaggacatgaacagccagttctcaaaagaagacatagatacagccaacaaccatatgaaaaaaagctcaacatcactgatcattagagaaatgcaaatcaaaaccacaatgagataccatctcatatgagtaaggat

SEQ ID NO: 554140 - DNA, 664 bp, Homo sapiens
gatgatgagcattttttcatgtgtctgttggctgcataaatgtcttcttttgggaagtgtctgtttatatcctttgcctactttttgatggggttgtttgatttttttcttgttaatttgtttaagttatttgtagattctggatattagccctttgtcagataggtagattacaaaaattttctcccattctgtaggttgcctgttcactctgatggtagtttcctttgctgtgcagaggctctttagtttaattagatccaatttgtcaattttggcttttgttgccgttgcttttggtgttttagccatgaagtccttgcctacgaggactagcagtaataactgcattatacaaagagtgcacatctctggaaatgttatgaagatttcttgtcgctattggccaacaaagatgtctggaggattatctctgaattccktttattagtggaacatctgatttggtaataaagtaatagtaaaagtttatatcaagatggataattctcaagtgttataaaatgttattcttactgagactgaacacaagttccaaatttctacaaaaccccagaaatctctttcacttcctttttcttccccttgtcaaacatatggacgactccacatcttaagctatctgtttaagtttgatttttca

SEQ ID NO: 554141 - DNA, 674 bp, Homo sapiens
tggattctactatgaattccaacttggtcggacacctctccaggccaactgttatgaaaatgcattgttgttttaaaaaacactgtgagagatggccgggcgcagtggcttacttgaggtcaggagtttgagaccagcctggccaacatggtgagaccccagtctctttgaaaaatacaaaaaatgagccagatgtggtggcatatacctgtagtcccagctacttgggaggctgaggcaggagtatcacttgaacctggaaggcggaggttgcagtgagccgagatcatgctactgcactccagcctgggcgacagagcaatactctgtctcaaaaaaaaaaaaaaaaaaaaaaaagagaaaacactgtgagaagaaagaagtcaattatcccctctccaactcccaacacagtaagcaagaagggcccaggaacaaatgaacagggaaaaacaatcttgcatttgcttagtggaatgtggggtttgcacacattagtcagagctagacaaatcatactgaatacacttcttatggaaacgttctagctcttatggcctttcttygctgtcccaacttttgaggtgcgaaaacacagcaacacagccaggaccggccaggtgatggcatggagcccgctcccacaggctgcgtgtgtgttctcactctcttgc

SEQ ID NO: 554142 - DNA, 634 bp, Homo sapiens
ggtcttagatgaccacgagctgggaatgcttgtgctgggggcttcagttacaacagcatgggrcagtgaaatagactagtgaagctgttacaccagttaatagtatttattattatttgtggtcaccaatgccaattaaagcaataattaaatagaacatgacgaaataattcaatggtaggaaaaaaaaaccctggcctataagtgaacatggaaagtaaaagtaaatatttagaagcgaaatctggagcggaaaaaagctccagcatctcaccatggggtcttccaaagccagcaatgctggagatgtttattgtttaaggatggacttgcttgggttgggattctccaactagagccagaggggagcttctctgcctcccttgaggacacaacaagaggggctttctgcctttgttataaagcccgccgcattctgtgcctgtatggttttatttactggagtctatcataaggcctgtgagggaaggactgaatctttctcatagctgtggggctgatggccctgcgtgctgtaggcatttaataattcactgagtaaatgaatgaaccctgcaggagaatgggaggctttctgatcctgaggtctcagtttggactatctttctggagt

SEQ ID NO: 554143 - DNA, 634 bp, Homo sapiens
ggtcttagatgaccacgagctgggaatgcttgtgctgggggcttcagttacaacagcatggggcagtgaaatagactagtgaagctgttacaccagttaatagtatttattattatttgtggtcaccaatgccaattaaagcaataattaaatagaacatgacgaaataattcaatggtaggaaaaaaaaaccctggcctataagtgaacatggaaagtaaaagtaaatatttagaagcgaaatctggagcggaaaaaagctccagcatctcaccatggggtcttccaaagccagcaatgctggagatgtttattgtttaaggatggacttgcttgggttgggattctccarctagagccagaggggagcttctctgcctcccttgaggacacaacaagaggggctttctgcctttgttataaagcccgccgcattctgtgcctgtatggttttatttactggagtctatcataaggcctgtgagggaaggactgaatctttctcatagctgtggggctgatggccctgcgtgctgtaggcatttaataattcactgagtaaatgaatgaaccctgcaggagaatgggaggctttctgatcctgaggtctcagtttggactatctttctggagt

SEQ ID NO: 554144 - DNA, 634 bp, Homo sapiens
ggtcttagatgaccacgagctgggaatgcttgtgctgggggcttcagttacaacagcatggggcagtgaaatagactagtgaagctgttacaccagttaatagtatttattattatttgtggtcaccaatgccaattaaagcaataattaaatagaacatgacgaaataattcaatggtaggaaaaaaaaaccctggcctataagtgaacatggaaagtaaaagtaaatatttagaagcgaaatctggagcggaaaaaagctccagcatctcaccatggggtcttccaaagccagcaatgctggagatgtttattgtttaaggatggacttgcttgggttgggattctccaactagagccagaggggagcttctctgcctcccttgaggacacaacaagaggggctttctgcctttgttataaagcccgccgcattctgtgcctgtatggttttatttactggagtctatcataaggcctgtgagggaaggactgaatctttctcatagctgtggggctgatggccctgcgtgctgtaggcatttaataattcactgagtaaatgaatgaaccctgcaggagaatgggaggctttctgatcytgaggtctcagtttggactatctttctggagt

SEQ ID NO: 554145 - DNA, 689 bp, Homo sapiens
cattgctgccacgatttgcataatgaaattttctcgttatctaacagttacagaatctagattaaacagattgatgtttcgacaattaggcctaacgagggaccaaggcttctgtctatttttgtggagtctgttgtttaatttaccataggcatcccaatgtggccttcagcrttaaagagaaaattccatagcagaatgttcaactggaaaagtatttggcattgttgaaaggtttggaggacagttacaacactcataaaaccagaaaatgatacataaatcttttttaaagtaaaaatgttggcttatttctcaaaatgtttttattacttaataatatgagtatcagcctttgtttagcacataatattcaggataatttagtagacatgaactaaagagctttaaaccacttgcttttatcacaattcaatttcattcttctattcaagcatagtgacgttcatttagtgactttgttgtgggaacatttctttgcatatgatacacagaaccattcagatgtagtctgttttggatcattatccatttctttgggctttcttggatggaacaaatagagtcccgttaacagtctcaagtcaaaaatatcttaaagacatgacttgtcttatatgtataattaggaaaaaaaccctttattttaaaatatactttagacagtg

SEQ ID NO: 554146 - DNA, 1155 bp, Homo sapiens
atccccagaaacttgttctagccccatttctaggctctcctttccaactgtatatttgtagttctatctggatatctgcataggcacatcatactcaacttgttcaaaaccacgtggcatcttaggtgactggagtgacgcccatcaggcatcagcccggagcaggaattctggaagccttcctgattctgctgcagtgaaactcggagtgtagctttatgtcagactgtatgggtctggatagtagaaactatttttcataagcatttatctgtaaacaaataacttagaaaatctttttccccccatggaaaagaatgtaggttttttgttttgttttgtctttgagacggagtttcgctcctgttgcctaggctggagtgcaatggcatggtctcggctcactgcaacctccgcctcctgggctcaagcggttctcctgcctcagcctcccgagtaactgggattacaggcatgtgccaccacgcccggctaatttttgtatttttaggagagatggggtttcaccatgttggccaggctggtctcgaactcctgaccttaggtgatctgcccatctcagcctcccaaagtgctgggattacaggtgtgagccatcgtgctcggccaggaatgatgttgggaatggtctatttgccatgtttcagggcccctccagcctctgttctcctgcatctgtggaccctcaaagtatgttagagcctctcacagtgtggatgaaacacagcctacatgggtttccacaagtcccagtaacccagtgtaccaaagcaaagcatgataccttaaaaaggaaaccaagaacaaaattcagaatcaatctctcttcacttcccttcacttcccctagactccagctgctctgctatctttggtttaaacagtgctatttttgtcaagattaagcatctttttgtttcttttaagtctggtctttgctttgcttgggagtgttcatctgagttttactgccttcctccctgatctattcattttcattcttcagtaagcctctcactttatacaatatcttttgctttccaatattgtttgttgcatgctcatgggatgttctttgccatctaattttagatcatacataaygccctctaagcagcctttcctttggaggga

SEQ ID NO: 554147 - DNA, 1524 bp, Homo sapiens
gagttcgttagaattacattattatttgtaatctgggataaatattgaaattgtaataagaaaagtaagtcttacctaaaatacaaggactttgaagaaaatcacatgataagacaaaactgtcaaacaagcttgggttaacgtggactcatttggttccagaaaagctcagagtgaagacagctcgtgaattctgtcatcaggcagtaaggcctgtatcgcatgtcactttgctttgtttttaayatgtggttcaagctatgccaggcctgccgctgtgcgggagatgtactttctgacaaaataaggcattttcctggcatcagatccttttggaatttttactggtttgcataaacccggcgagttcctatttcccacacatatccagtgcagtcacacttggcattgcggatttatggtggtcttgaagcctgtcagtgccagcgtggtcagttccttagcaccactggaggttattctgaagaaatgaaaccaggtattcgttcatccattatttaaaaattgtctctcacctactatgcctgtaatgaggaagaaatagcggaggcaaaatagaccaatttcggaaggactgaaaatattttgtggagtggaaagtatttctagcaggctatctccttttcctctgtctcctcatcctttatgataataaagttcactggaaaagttcgtttgcattattttgtgttcaaagagataataatggtgatgatgatcacaatgatgatattaatactaacattcattcttggttgtctcttactggctgagttgaaatactgtataaataaacaagtctgaggacatgagtctgagctcttctgagttactttggaaaccctattggcttgccgtcttaactcctggctcttctctcctgaatgtatttcattgttggtcacaagagagatctgtggaactatgtgggccaacccccaagcacagatttattatctcttttcttttcttttctttcttttttttttcttttgaaatggagtctcacttcttcacccaggctggagtgcactggtgcgatctcggctcactgcaacctctgcctcccggattcaagcaatttccctgcctcagcctccccagtagctggaattacaggcatgtgccaccatgcccagttaatttttgtatttttagtagagacggggtttcaccgtgttggccaggctggtctcaaactcctcacctcaagtgatccacctgcctcgggctcctaaagtgctgggattacagacatgagccactgcgcctggccacagatttattatctcttatggaaaaataactataagtaccttctccagcattgagagcctatggtctattaactttgcatagaaagggtagaacatgatcatccgtattgaaagaaagggccaagacaaggcagagattgtacaaaatgcgagaaaactctccagtgtttcacatatgaccctggagatggttcatctgattcattcaacccgcatttgttaacca

SEQ ID NO: 554148 - DNA, 1524 bp, Homo sapiens
gagttcgttagaattacattattatttgtaatctgggataaatattgaaattgtaataagaaaagtaagtcttacctaaaatacaaggactttgaagaaaatcacatgataagacaaaactgtcaaacaagcttgggttaacgtggactcatttggttccagaaaagctcagagtgaagacagctcgtgaattctgtcatcaggcagtaaggcctgtatcgcatgtcactttgctttgtttttaatatgtggttcaagctatgccaggcctgccgctgtgcgggagatgtactttctgacaaaataaggcattttcctggcatcagatccttttggaatttttactggtttgcataaacccggcgagttyctatttcccacacatatccagtgcagtcacacttggcattgcggatttatggtggtcttgaagcctgtcagtgccagcgtggtcagttccttagcaccactggaggttattctgaagaaatgaaaccaggtattcgttcatccattatttaaaaattgtctctcacctactatgcctgtaatgaggaagaaatagcggaggcaaaatagaccaatttcggaaggactgaaaatattttgtggagtggaaagtatttctagcaggctatctccttttcctctgtctcctcatcctttatgataataaagttcactggaaaagttcgtttgcattattttgtgttcaaagagataataatggtgatgatgatcacaatgatgatattaatactaacattcattcttggttgtctcttactggctgagttgaaatactgtataaataaacaagtctgaggacatgagtctgagctcttctgagttactttggaaaccctattggcttgccgtcttaactcctggctcttctctcctgaatgtatttcattgttggtcacaagagagatctgtggaactatgtgggccaacccccaagcacagatttattatctcttttcttttcttttctttcttttttttttcttttgaaatggagtctcacttcttcacccaggctggagtgcactggtgcgatctcggctcactgcaacctctgcctcccggattcaagcaatttccctgcctcagcctccccagtagctggaattacaggcatgtgccaccatgcccagttaatttttgtatttttagtagagacggggtttcaccgtgttggccaggctggtctcaaactcctcacctcaagtgatccacctgcctcgggctcctaaagtgctgggattacagacatgagccactgcgcctggccacagatttattatctcttatggaaaaataactataagtaccttctccagcattgagagcctatggtctattaactttgcatagaaagggtagaacatgatcatccgtattgaaagaaagggccaagacaaggcagagattgtacaaaatgcgagaaaactctccagtgtttcacatatgaccctggagatggttcatctgattcattcaacccgcatttgttaacca

SEQ ID NO: 554149 - DNA, 2101 bp, Homo sapiens
tcagcatgacttcacccggaagctcatctgagtgactcacagcctgctttaggcacctcctccagggagacgctcttacccttgcccccaccccaacaggggaggggaggggagaagggaaaccccctaactgagccacggagaaggccttgccagagcactgtggaaaatacctgcagcccagcttggccctgcttcaggtgccctgggatgtatggtttctctagtcttctgagagggatcaagctgacaattcaaatttgrgggagcgatgaccctggaaactgtgtaggtcttaaaaagaaatatatatccaaacacactgacctgaaaagatgtccacaaaatacaggattcagcattaggtgaaaaataatttcattatgttcctgtttctcaaattcggtttgtgattttaaaaaattgataggttagtacatgtatttgtacatgtactatttgtactaaaagcctatttgaagaaaaattataatatattaataatagttatctctgggaggtagtattaaaagaaactttattcattattcctttctgatttttaaaaaataatcataattacctttataataaaaaaaaaaaaggtgggccaggtacagtggttcatgcctataatcccagcactttgcaaggccaaggcagattgcttgagcccaggatttcaagaccagcctgagcaacatggtgagaccttgtctctacaaaacatttttagaaacttagctgggtgtggtggtgtacccctgtggtcccagctaattgggaggctgaggcaggaggattgcttgagcccaggagtttaacgctgcagtgacctgggaggcggaggctgcagtgagccaaggtcacaccactgcacttcagcctgggcaacaaggaggctctgtctcaaaaaaaaaaaaagctgcagtgagccatgatcatgccatttcccttctgcctgggtaatagagcaagaccctgtctcaaaaagaaagggttgtttttttgttttgctttgtcttcaaaaaaataaaaagaaaaatcctcatgcaccaagcccaggtgtcctaattgtgtcctcattattaaatgcctaacttcccgtggtggactgttagcaggaagcgactgggatggacttaacattcacttagcaaacagctacctccctagccactggaggaccaaaccactatgacagggtgtctcccttcagtggctcccagcatgatggagggggtagtatatgttttgcggggcatttggggttttggggggaggttagggggttttttgagacagagtctccttctgtcacccaggctggagtgcagtggtgtgattatggctcactgcagccctgacctcacaggctcaagagatcctcccacctcagcttcccaagaagctgggaccattacgcctggctaattttatttattattatgtatttttttttaagagacagagtcccactatgttgcccaaactggtctcagtgatcctcccaccttggtctcccaaagttctgagattacaagtgggagccaccatgccccctgaccaaccaccaccctgcacccaaggccaagggctcgataaatactttgcaaacaaatggatatgtaaatgagtagatactaagtggtctgtgagagaaggctacagattgtggtggggcttcagaaggtctcgagaggtcccttgctggggattaggttaggcctcgtgatggtgcttctgggatattccttttctctaggatttaaatgtctcatttaagaacaatttttttttttttttttgagacagagtctccctctattgcccaggctggagtgcagtggcgcgatctcagctcactgcagcctccgcttcccaggttcaagtgcttctcatgcctctgcctcccaagtagctggcgctacaggcgtgcaccactatgccctgctaattttttgtatttttagtagagatggggtttcaccatgttggccaggctggtcttgaactcctgacctcaaatgatccacccacctaggcctccccaagtgctgggattacaggcatgagccaccactcccagcataagaacaat

SEQ ID NO: 554150 - DNA, 2101 bp, Homo sapiens
tcagcatgacttcacccggaagctcatctgagtgactcacagcctgctttaggcacctcctccagggagacgctcttacccttgcccccaccccaacaggggaggggaggggagaagggaaaccccctaactgagccacggagaaggccttgccagagcactgtggaaaatacctgcagcccagcttggccctgcttcaggtgccctgggatgtatggtttctctagtcttctgagagggatcaagctgacaattcaaatttgagggagcgatgaccctggaaactgtgtaggtcttaaaaagaaatatatatccaaacacactgacctgaaaagatgtccacaaaatacaggattcagcattaggtgaaaaataatttcattatgttcctgtttctcaaattcggtttgtgattttaaaaaattgataggttagtacatgtatttgtacatgtactatttgtactaaaagcctatttgaagaaaaattataatatattaataatagttatctctgggaggtagtattaaaagaaactttattcattattcctttctgatttttaaaaaataatcataattacctttataataaaaaaaaaaaaggtgggccaggtacagtggttcatgcctataatcccagcactttgcaaggccaaggcagattgcttgagcccaggatttcaagaccagcctgagcaacatggtgagaccttgtctctacaaaacatttttagaaacttagctgggtgtggtggtgtacccctgtggtcccagctaattgggaggctgaggcaggaggattgcttgagcccaggagtttaacgctgcagtgacctgggaggcggaggctgcagtgagccaaggtcacaccactgcacttcagcctgggcaacaaggaggctctgtctcaaaaaaaaaaaaagctgcagtgagccatgatcatgccatttcccttctgcctgggtaatagagcaagaccctgtctcaaaaagaaagggttgtttttttgttttgctttgtcttcaaaaaaataaawagaaaaatcctcatgcaccaagcccaggtgtcctaattgtgtcctcattattaaatgcctaacttcccgtggtggactgttagcaggaagcgactgggatggacttaacattcacttagcaaacagctacctccctagccactggaggaccaaaccactatgacagggtgtctcccttcagtggctcccagcatgatggagggggtagtatatgttttgcggggcatttggggttttggggggaggttagggggttttttgagacagagtctccttctgtcacccaggctggagtgcagtggtgtgattatggctcactgcagccctgacctcacaggctcaagagatcctcccacctcagcttcccaagaagctgggaccattacgcctggctaattttatttattattatgtatttttttttaagagacagagtcccactatgttgcccaaactggtctcagtgatcctcccaccttggtctcccaaagttctgagattacaagtgggagccaccatgccccctgaccaaccaccaccctgcacccaaggccaagggctcgataaatactttgcaaacaaatggatatgtaaatgagtagatactaagtggtctgtgagagaaggctacagattgtggtggggcttcagaaggtctcgagaggtcccttgctggggattaggttaggcctcgtgatggtgcttctgggatattccttttctctaggatttaaatgtctcatttaagaacaatttttttttttttttttgagacagagtctccctctattgcccaggctggagtgcagtggcgcgatctcagctcactgcagcctccgcttcccaggttcaagtgcttctcatgcctctgcctcccaagtagctggcgctacaggcgtgcaccactatgccctgctaattttttgtatttttagtagagatggggtttcaccatgttggccaggctggtcttgaactcctgacctcaaatgatccacccacctaggcctccccaagtgctgggattacaggcatgagccaccactcccagcataagaacaat

SEQ ID NO: 554151 - DNA, 2101 bp, Homo sapiens
tcagcatgacttcacccggaagctcatctgagtgactcacagcctgctttaggcacctcctccagggagacgctcttacccttgcccccaccccaacaggggaggggaggggagaagggaaaccccctaactgagccacggagaaggccttgccagagcactgtggaaaatacctgcagcccagcttggccctgcttcaggtgccctgggatgtatggtttctctagtcttctgagagggatcaagctgacaattcaaatttgagggagcgatgaccctggaaactgtgtaggtcttaaaaagaaatatatatccaaacacactgacctgaaaagatgtccacaaaatacaggattcagcattaggtgaaaaataatttcattatgttcctgtttctcaaattcggtttgtgattttaaaaaattgataggttagtacatgtatttgtacatgtactatttgtactaaaagcctatttgaagaaaaattataatatattaataatagttatctctgggaggtagtattaaaagaaactttattcattattcctttctgatttttaaaaaataatcataattacctttataataaaaaaaaaaaaggtgggccaggtacagtggttcatgcctataatcccagcactttgcaaggccaaggcagattgcttgagcccaggatttcaagaccagcctgagcaacatggtgagaccttgtctctacaaaacatttttagaaacttagctgggtgtggtggtgtacccctgtggtcccagctaattgggaggctgaggcaggaggattgcttgagcccaggagtttaacgctgcagtgacctgggaggcggaggctgcagtgagccaaggtcacaccactgcacttcagcctgggcaacaaggaggctctgtctcaaaaaaaaaaaaagctgcagtgagccatgatcatgccatttcccttctgcctgggtaatagagcaagaccctgtctcaaaaagaaagggttgtttttttgttttgctttgtcttcaaaaaaataaaaagaaaaatcctcatgcaccaagcccaggtgtcctaattgtgtcctcattattaaatgcctaacttcccgtggtggactgttagcaggaagcgactgggatggacttaacattcacttagcaaacagctacctccctagccamtggaggaccaaaccactatgacagggtgtctcccttcagtggctcccagcatgatggagggggtagtatatgttttgcggggcatttggggttttggggggaggttagggggttttttgagacagagtctccttctgtcacccaggctggagtgcagtggtgtgattatggctcactgcagccctgacctcacaggctcaagagatcctcccacctcagcttcccaagaagctgggaccattacgcctggctaattttatttattattatgtatttttttttaagagacagagtcccactatgttgcccaaactggtctcagtgatcctcccaccttggtctcccaaagttctgagattacaagtgggagccaccatgccccctgaccaaccaccaccctgcacccaaggccaagggctcgataaatactttgcaaacaaatggatatgtaaatgagtagatactaagtggtctgtgagagaaggctacagattgtggtggggcttcagaaggtctcgagaggtcccttgctggggattaggttaggcctcgtgatggtgcttctgggatattccttttctctaggatttaaatgtctcatttaagaacaatttttttttttttttttgagacagagtctccctctattgcccaggctggagtgcagtggcgcgatctcagctcactgcagcctccgcttcccaggttcaagtgcttctcatgcctctgcctcccaagtagctggcgctacaggcgtgcaccactatgccctgctaattttttgtatttttagtagagatggggtttcaccatgttggccaggctggtcttgaactcctgacctcaaatgatccacccacctaggcctccccaagtgctgggattacaggcatgagccaccactcccagcataagaacaat

SEQ ID NO: 554152 - DNA, 536 bp, Homo sapiens
tatttttatttccatcacttttgatccctttcggcaggtttcaccagacaattcaattatgaactgttttagaaaaattacaatttaatcaataaagagaaagggccaaatttctaaacaagatcgaaggatataaaacagcacaaaaattacctttatttcaaaaggtacatttggtgacatttttggcatgtggscgcgctgttgtatcctctttggtggttagatagatgacagccactagtttcttgtgaattaaaagaatgtgatagataaagacttaattaaaataaacagaatcctgctcactggtaggcagtgaactctgccaagaattttatgggaaataaatgaagctcctgaacttaagaagggacaaagaatggaagtatgtgctttggtagcaagactacttgtccttgtatagaaagaatgaattttttttccatgggacatttactatgatagcaggtatttttggttttgtagcattctacttcagtgtggctcaaacattagcatgcatcagaatcacc

SEQ ID NO: 554153 - DNA, 536 bp, Homo sapiens
tatttttatttccatcacttttgatccctttcggcaggtttcaccagacaattcaattatgaactgttttagaaaaattacaatttaatcaataaagagaaagggccaaatttctaaacaagatcgaaggatataaaacagcacaaaaattacctttatttcaaaaggtacatttggtgacatttttggcatgtggcygcgctgttgtatcctctttggtggttagatagatgacagccactagtttcttgtgaattaaaagaatgtgatagataaagacttaattaaaataaacagaatcctgctcactggtaggcagtgaactctgccaagaattttatgggaaataaatgaagctcctgaacttaagaagggacaaagaatggaagtatgtgctttggtagcaagactacttgtccttgtatagaaagaatgaattttttttccatgggacatttactatgatagcaggtatttttggttttgtagcattctacttcagtgtggctcaaacattagcatgcatcagaatcacc

SEQ ID NO: 554154 - DNA, 536 bp, Homo sapiens
tatttttatttccatcacttttgatccctttcggcaggtttcaccagacaattcaattatgaactgttttagaaaaattacaatttaatcaataaagagaaagggccaaatttctaaacaagatcgaaggatataaaacagcacaaaaattacctttatttcaaaaggtacatttggtgacatttttggcatgtggccgcgctgttgtatcctctttggtggttagatagatgacagccactagtttcttgtgaattaaaagaatgtgatagataaagacttaattaaaataaacagaatcctgctcrctggtaggcagtgaactctgccaagaattttatgggaaataaatgaagctcctgaacttaagaagggacaaagaatggaagtatgtgctttggtagcaagactacttgtccttgtatagaaagaatgaattttttttccatgggacatttactatgatagcaggtatttttggttttgtagcattctacttcagtgtggctcaaacattagcatgcatcagaatcacc

SEQ ID NO: 554155 - DNA, 371 bp, Homo sapiens
caccacacctggctaattttagtatttttttttagtagagatggggtttcaccattttggcaaggctggtctcaaactcctgacctcagatgatccacccaccttggcctcccaaaktgctgggattacaggtgtgagccactgtgccccctcactgcaccctgccaaaggttatgttttttgagtagctgcgaaagagacctgttcggagagtgaatacttgatcagctgtgtgcggatggggaatgagaccactccagggagccaacctgaggaacagttggcagttgtttgaagatccaccaggtttagctcagtgggctaaggaagttaagagcgagaactgaagtaaaagagaaagaggagagaga

SEQ ID NO: 554156 - DNA, 1561 bp, Homo sapiens
aagctcttttggagttttgaagtctttggggtaacacagagacacccatgagtgacagcagcaggtttctggagaaagggatgttcttgagggaccaaaagagagatgcttccagattgagaggagagtagtcggtaaagaagtaatgagcggaggcacaggtgggtggcagggaggggcttgctctgcttcccacgcagttcccctgaaaggaggaaggtccctggagagagaaaactgctgcagagggagtctaggtggatggagccatagacggacttgcagggatccctgatccctggttcctagcctgacagggaaggaacagagctgaattattcccttgccttcccacatgatgcagggaaagcagagagaaagccactagagcttcagggtgcaggaggaagaggaaatgtgagatgatgcttaggagcatatgtcagtgaccaaagacattgtcgtgcttcaaacctgctcttcccagagcaacctgatttcataaatgctccttaggactgggccaatggactgaaattatctcaaccacctggtggaaagtgaaaagcagggggggtcctcaatattaaaattaagttctaagaaaaagttatattttttcaacagctatgttgtgagctgatttatagatgctatctctatgattgctgtgcttggagagattcagccccccagaaggcccagtgctttgccacctcttaggatccacactactgtacctcttttactgtcaatatcagaagggctcagccacaagcccttggaagcttagaaaatttgtccttyctaagaccccagaattgtctcaggatttaactcttgaggcaggccaccctggaacgggttcactctgcatgtgtctataaccaggtggacttttataaccagatcatgtccaacaggggtataaaaagatccaatcgcatttaggagtccagataaatttcctagtaaatcaggagacaggctacataaatgtctcccacagagtctatgcatttaagatgtctagaaatagatgttaagcgacaggactaaaagcactggatgaatatttttcaagagcctctaattcttacctaccttgctgcctcactatggctgctactatattcctatgaatataagaaaagttaccctaggtcaaggtataaaccatctgtggctaagacagctgatggtcatcaaaatccacattctcctcttccttctggacacagggtagactacatttcccagccttccttgaagtaagtgtagtcacataaccgagttacagccagtgggactgggggaaagcagtgtgtgctgcttccaggcccagcctataaccctcccataggcactgctccatgctctttgtcctttgccaagaaaagagtggtgatcacagtagctttggttgccatgatctgaggacagcagcactttaggtcacatcggtgaccaaagacatcagactttgagtgatatggtccctgccaacgtccaggcctctttctggtttcttgggtataagtgtgaagactgtgagagagat

SEQ ID NO: 554157 - DNA, 636 bp, Homo sapiens
aggaatcacatcctttcacatcaacaamaccaagcacaaattcatgtctcagagcaatagaaatactgtaacaatgagagaattcagagaagacacaaggaattaggacaggaaacaactcagagacaacacagaagaaagatacctaaatgacagggatttctctagttctgaaaaatagaatttttttttttctgtgtttaagatcagggcttggagaaggtttataggctcctcccaaatattatgatcagaaactaatagtatggagattattttatacagacattccagaaaaacaagcctagccgacttcagtcttaagatttcttaatttcaagagactatcttaggctaagctagttgccacagaaaaggtaatataataaattgtttaattaattataccatcaaattctttaggaaatcagagaactgataaaaaaatttaaaacaatcctcaatgaaaataataagaacaaagacttcaaatgaagatctacagacctttcctatgattaaaaatacaagaatttttaaatagagacttgaaaatatctattttgcttgcaagctcttcacttccttggtgttgctggatgttttatggagagtatcctcaggaaaactgaggta

SEQ ID NO: 554158 - DNA, 568 bp, Homo sapiens
taacaaaattcattgtactttcaaaagaatgagtagctttgcccagaagtgcaggaaaaggccagtaggttacttctttccataaaagcaggaagtgctttattctaaaagatcaaatctgtaacttcagttttacctgttcaaataattaccttaactcatgaaaaaaataatcagagtgtaataaagttagtacattatggtattttatgttttctgacttatatgctctgcaacatgratgaaaatgacaaggaaatctaggtaactaagattggaaaactgctctgcaaattaagaacagtgatttcaggaaatctccatagcatttccattttctacttacaaacctaacaactcggcaatgcttgttctttatcttcaacttatggcttttaactaccttcagaaaagctgagtatagtactatgttttcattctaataaaatgtctatttagaggctgtcttttgtgtctaaaatactacatgttctgttttcttctttaatgttggatgctgtggtcccaatcacctagttttcctctcttcttggatttaactggcaga

SEQ ID NO: 554159 - DNA, 533 bp, Homo sapiens
tgaagcaggccccgccttccggtcctgcccctagcgcttctcccttggccccagtgcccttgtccatccaatgacgatggacgcaacaacatggtctgccctaaaaggaccggaccctctcaaaccccatgatccagtgacaactgcagagggttttacatatatgtcaagaggaggagacatcccataaggaagcttccagaaggcagtgcgtgagaggcaccatcattcactctgattattcaggacctttcttggcagccaygaatcccatccttgcctccgcctctgtcttcagctgcaccctccccacggctgcttggccttccttgcttcatcaatggcatcttgtctgtcgtcccccccccgctgcaagtgatgaaccaacttcactggagcgtctgctgcaggctctctgagaagggccattgttccccccacacttgtccaaagcctccatttagggccgctgtgagcgtagatggaggacattcatcactgggaacacttgccagcaaatgagagacagctgt

SEQ ID NO: 554160 - DNA, 1188 bp, Homo sapiens
gttaatgagtgccatagggaatctttatgtgccttatacacactttaaataaagtgtacagttttgtaatttttttcatttttccctaatttttaaaaattttatttttaaggcataattttttgtttgttgaattcagtaatatacactggaatttatacttcatatgtgtttatttcatttttttctagcaattcagctttgttatgttttataaaagtactgattcatgacagattggatattttaaaaaccagtcctttcccatagaattagagaagtgctgatttagtaggttgcattgattataggctaaaactgaaacaacaaaaactttatcaccagcagaaggaattcattttactgaagtatgattagttaagctttttaaaacagtttagccttgtaataattaagagaaatgtgcacttagccaggtcaattctgaaaattaaccagcaaaatatacaatgaattctcagctatgcaacatatgttaccaggacttagaacccaggcagccatattctatataaagcaaggataacatgtttcactgtctgttctgttttattcctggctacctggactagttctgctggagtccatatgcagggcaagacaaccagtagggctaaaactgattatataaatagaatttctgaaaaagtattataagaggaaagagcagtttcctccctcaactctttcaaccttttttccccccggaaaaaagataaaatgaagttaatggacaatttgtgaagaatagtccaacttacctttttaaaattggaagatcccttttacacaaagatttaaacagataatctattatatgaccacttatagctaaaacaccctcaagtttaacaaaaaggacagttatttgatagatttaggtatgtggacagccaaacaagcagaaaccatttaagataagataatccaggtaacggttggtgaagataactaactttaggatcgagtttagacttaatgttgactggcacgaggatgctgagatttaaagaagttaatatgacttgttyagagtcacaaagccagaaattggtagtcatgttcaagtctatggccgaattctgctccctcaatagccatatttttcaacccatgagttgtgatccatgagcaagtcagaaatcaacttagtgggtgacaatcaga

SEQ ID NO: 554161 - DNA, 661 bp, Homo sapiens
gaaagcagggccttttcaatgatagatatgattttgcagaggtcatgctatggcctggatagggcatgcctggcctgatttcaaaccataaatgcatgcgaatgtaaggaaatgaatcctattccagggcctatatcttcattgccttagaaatggtttttctatttccaaagcaattctggttttcagaataatttgcctggaactcaatccctatatgctgatgagaccaactgaggtctagaatggctaagacactggggcattttattttgttatttccactgtccaattctttgtagattttgatttggaaaagtattcaacccattggaacctaaaccattctccctctccctaaaatattttcatagaactgagttccccttattttcagagttcttacatcaattatacatgaagtgaatgcctgaaaggatcaggactgattgtggggaagaagtgaagtatgttacggaataaaagaytggaaacagaaaataagtagaaaacagaaaaagcaatgaagcaaacatgcatggttgacataaacgtggagcagaaactacaacaataggttcttggatagtgcctctgaatgggacaaatagtcactctggagtctcagtaaaaatctaaagagagaaacctgatccaagtt

SEQ ID NO: 554162 - DNA, 204 bp, Homo sapiens
aaagtcactgagaggcaacctatcyacccacacgtcactggaggagtgaatggggtgcaggcaagcaccaggatcactgttatctggactgagtgcatggaggctgctgctggggtgggggaggggaagcaatattcctgacagagagggcaaaacgttattaccctgacaatgaaatcagcaatgaatgaagtcaaccacccg

SEQ ID NO: 554163 - DNA, 530 bp, Homo sapiens
aaaatttaaaattccagttttctctactaattccttttaaactttaactgcttttgtctgaactcataaagtaaccgtttttatattcaggttatacattcatattttagaattatatattttactgtttatctaaacgtgcaatccaattaaagtaacattttcattaaaaaaaaaaaaaaaaactttgaatagctgggtgtggktgctcacgccccataatcccagcgctttaggaggccaaggcaggaggattgcttgagccccagaagtttgagacccagcctgggcaacatggtgaaaccctcatctctacaaaaaaatacaaaaattagccaggcatggtagcatgtgcctgtagtcccagcttcttgggaggctgaggtgggaggatcacctaagcctgagaaggttgaggctgaagtgagtcatgattgtgccactgaacttcagcctgagtgactgaatgagaccatgtcttaaataataataataacaataataaaataaaacattaaaaatctgaatag

SEQ ID NO: 554164 - DNA, 530 bp, Homo sapiens
aaaatttaaaattccagttttctctactaattccttttaaactttaactgcttttgtctgaactcataaagtaaccgtttttatattcaggttatacattcatattttagaattatatattttactgtttatctaaacgtgcaatccaattaaagtaacattttcattaaaaaaaaaaaaaaaaactttgaatagctgggtgtgggkgctcacgccccataatcccagcgctttaggaggccaaggcaggaggattgcttgagccccagaagtttgagacccagcctgggcaacatggtgaaaccctcatctctacaaaaaaatacaaaaattagccaggcatggtagcatgtgcctgtagtcccagcttcttgggaggctgaggtgggaggatcacctaagcctgagaaggttgaggctgaagtgagtcatgattgtgccactgaacttcagcctgagtgactgaatgagaccatgtcttaaataataataataacaataataaaataaaacattaaaaatctgaatag

SEQ ID NO: 554165 - DNA, 651 bp, Homo sapiens
ctttaaaacttaaaaagtttactacctatactttccaaatttcctcacatattccccattaagcctccaaatctgggctgaatcagctacttttcttccttaagtttcaagaattctccataattgtcattagatacctggcaagatttgggaagtggggaaaggttggcttttccacgtgacaggaatcgacatatcagaggtttcaaatgtcatggagtggtgaatccaaaaactgaacagtccactgatkgacagcctatatgtgtttcctgagcagaagtaattccacttggaagttagagtacctaatattgctctataaatagttttattcaaaaacattattctgtgctttccaatcgaaacaaccaggcaattccaagcaacattaaatactaactgcacacatgttaactagaaatacaccactttagagttacaatgacgtatatgttaacataaatgagtttaaatacttgtaaaatatattgatatttcattaaaacaccaccttctaagtccattcttccctataattgaaagtttatacttttgtgcaaactgagttcctgagaataatgtagtttgtaatcacaatttccaaagagccagaatacaactttgaaaatatgtctatgttacagcaca

SEQ ID NO: 554166 - DNA, 1214 bp, Homo sapiens
tcatccctcatgctaaagtctctcttttaagtcgctccttctacctacctacacacacacacacacacacacacacacacacacacacacccccctcactttgctgccagaaatgctgtggtttcagccacagcatccggcgaaggtgtcctgggtcattggaaccctcctgacctgtacaggctrcaagccactgataacttcatcagatgggcagacatgaatcaggggtcaggaagggacacgctgacacttaaagacacaacatttcctgatgctgtgtttttggtaagttgaaaagtttacttcacagaagaacaagaaattgcagacccaggccctctttctgtctctaaatctcttcttattttttttttgagacggagattcacatttttttgcccaggctggagtgcaatggtgcgatctcggctcactgaaacctctgcctcccaggttcaagtgattctcctgcctcagcctcccaagtagctgggattacaagcatgtgccaccacacctggctttgtattttcagtagagacggggtttcaccatgttggccagactggtctctaactcctgatctcaggtgatccacccgcctcagcctcccaaagtgctgggattacaggcctgagccactgggcccggcactatacatatatatatttttaaatctctgtcttgctcccttctttcccctggaatggtttaaaaaaaaaagagagaaggattttaattccaatgcaggagttatcaagtgactctaaattgctttattaaaaaccaagttcagtcaggtggttttacattgaaaagaaaaaagaaaaggtatgaatggagaatcccaaatcagttactttcttcttataaggccagggcactgggggattggacaaggtcttagaacttgggaatttaatcatggctttgccattgtccatttcaggcaagtaggtaaactttccgggtctcaggtttctcatctataaaatgaaaaaacacgtatctgctctgcctccttaaatgtggtgaaggcattttggaaagcacgacactccctgaccttccagactttcttgggcactttccatatgcaagtagctacactgcatgccatgggtataacagaggagtaagctacagttgctggtcacatggcccttcctctgtcctggcaggcagagtgggcagtagggatgcttcgtacc

SEQ ID NO: 554167 - DNA, 675 bp, Homo sapiens
ggawattaaaattatagtaggttgaatttagatctgttgtgcagctttcacacttgaaaaaaatactttaacaaggaataaattatataattttatgttagtgatgtcataaacatcatttttgctttaaaatgagaccggttaagatttacctgtacccagatgataaagttttggtagaaaatattaaatgggaaaatagaaaagtgtgtatctacatatattccttaaggtcttatgtgtatctaagtgggagggaagtctaatagttaaaaaatataactgtggccaagggcagtggctcacgcctgtaatcccagcactttgggaggccgaggtgagcagatcacgaggtcaggagattgagaccatcctgggtaacacggtgaaaccccgtctctactaaaaatacaaaaaattagctgggcgtggtggcgggcgcctatagtcccagctactggggaggctgaggcaggagaatggcgtgaacccgggaggcggtgcttgcagtgagccgagatggcgccgctgtactccagcctgggcaacagagcaagactccatctcaaaaaaaaaaaaaaaaaaaaaatatatatatatatatatatatatatatatatatatatatatccattaacttgaataaatgtcatagctatacaactaatgtggaga

SEQ ID NO: 554168 - DNA, 1135 bp, Homo sapiens
tgcttggcaccttgtaagtgcattctatatgggcaggggctttgttcactgttgtatccctgtgcccacggcaggacctggcccacagtaactatgtgttgaatgcttgaatatgtaaagaactgaatggataaatgctcactgaatgggactttttcttccctgtgtattaagaaacaggacaaccaaaagttgctgtctacagctgaattcagaccctctcttggggttgttattcttagcttttaagtatctaaagaactaggttgggcattttctgccccccaccccacatgttcatctcagtttccagagaggctataacactctcccagagggtagtactttctgcttgtctcttcagtggatgcgcaactaatttctaaacaccaaggccacatctgccaccagcaggtgaaaaggagcaggctgtttaagtggtcctggaatctggggtctagattctaactcaaagtacatctttttggagtctagctgtagcaataagatacttgttgaggttttcataagctgttgggaacaggaaagctaaagttccatttattatccccctatttttttaaccaatatcatttttcaatttaaataggaatatttcctgtcttgggcagagaaaaatctgttgattcacagggacctaaagcatgtgaatggacatgctttaggtctatgtgaatcaatagattttttttgatctttaaaatcttaggtccatgtaaatcatgttagcaaagatttacacttttaaattgtggacaaacatgccttaaacagagctttggaaaaaatacagagttcgtattttttggggtgatatgagggatagcaaatcctaagttcttacagacatttataatagaatttgcctttattagacaacataagttaacgagttaatggcaataaagggatgtaaaactggagttaaagctggaatgtgaggtgggtgaacagagatgaccrggtaggctcacttgttctttgagctgattcactttctcttgaagaagccttttcactagtttcagtttctgttcaacttctatcattcgttcctccatgacagttaccagttgttcctggtttccctgaagggaagaaaagtatattattc

SEQ ID NO: 554169 - DNA, 541 bp, Homo sapiens
atattaataactgaattccgtatgttcaaaagccccaggrttcattcagcagttcatggctgtcatcaagagttgaggctcttttcatccttctggtctgccatacttatatattgattatcaccttcaggctattttttatgatgctaaattgactgctgcagttttaatcccagtgaattgcacaaataacatccacagcaataagaaaggcagaaaaaagcttcttctaatgcgtcttccaactttgccagaaagtaaattctttccccaaatccctaagtaaatctcctcttacatatcattgacccaaactgggtcagaagcctaaacctaagtcagtcactggaaaggagagtgggatggtgggatggctgtgaatgacttacatcaatcgccattcatgtcttgaggctttattctggtggcatgatcaagtagggattatatcaacaagaaaaaagaaaaccttgttctccaacaagggtaactgttggagaattgcagagagcagccagtttctccacgacaccccagcaat

SEQ ID NO: 554170 - DNA, 541 bp, Homo sapiens
atattaataactgaattccgtatgttcaaaagccccagggttcattcagcagttcatggctgtcatcaagagttgaggctcttttcatccttctggtctgccatacttatatattgattatcaccttcaggctattttttatgatgctaaattgactgctgcagttttaatcccagtgaattgcacaaataacatccacagcaataagaaaggcagaaaaaagcttcttctaatgcgtcttccaactttgccagaaagtaaattctttccccaaatccctaagtaaatctcctcttacatatcattgacccaaactgggtcagaagcctaaacctaagtcagtcactggaaaggagagtgggatggtgggatggctgtgaatgacttacatcaatcgccattcatgtcttgaggctttattctggtggcaygatcaagtagggattatatcaacaagaaaaaagaaaaccttgttctccaacaagggtaactgttggagaattgcagagagcagccagtttctccacgacaccccagcaat

SEQ ID NO: 554171 - DNA, 961 bp, Homo sapiens
cacagccgactttcttattatgccagctgaaactggcctgtgtgggtttctctcctgatttcttggaaggtggaataagcaacttagttttgttttggtgacatggtagtttggcatgagtaacttcattttggttttgtctattgggcctagtgcaggagctcagttcaaaccaatggcctataaattttatttaacaccattagtgagctcttattatgtgctagtgacaaagctgggacttgaactctgctgtgtctgactccaaagtccctggtgaagaaaatgtttaaaatgttacatcaaattatctggccagaattgtggcatattagaaaatgcttgtaatcccaacactttgggaggcaggaggatcgcatgaagccaggagttcaagaccaaactgggcaacaaagtgcgatgttatctctactaaaaataaaatacaataaattagccagacatgatggcatgtacctgtagtcctaactactcrggaggatgacacaagagggtctcttggaccctagagttcgaggctgcagtgagctatgattccaccaccaatgcacaccagtctgggggacagaggaagaccctgtctcaaaaaaaggaagaaggggggtggggaggaaaggaaggaaggaaagggaaataaaggaaagaaagaaatgcactagacgaggtgtcagaagacctgatttagagtatcagttctgcactggctccttgcagaaccatgcttccttgatttgttaagattggacaaaaacaatgattctcaaacttaaaggtccacacaaatcacctggaggtctggttaagatgcaacttctgcttcaggatgcctgggtgaggtctgagactcttcttttctagcaggcacccaggtgagctccatgttgatccaaggaccacacttggattaaaaaaggacaggatgacctccagatcctgttac

SEQ ID NO: 554172 - DNA, 1823 bp, Homo sapiens
tatgccactacgcccggctaattttgaatttttagtagagacggggtttctccatgttggtcaggctggtcttgaactcccgacctcaggtgatccgtccgcctgggcctcccaaagtgctgggattacaggcatgtgccaccttgccccacctcacttgtcccctttttgtgtagtgttcttcatccggttagaatatcttcctccctcacttcatattccttgttttttcactttattgtacacttaccacttcttgaaaagctctgtatcttactttttaaattgtgttgtttcctggtctagaatataagttctacgggagcaggaatttttgactgacttgtatactcctgtcttttcagtgcctaaaaaagtgcctggcacatagtttgtgctcaataaatatttaataaatatgtgaatgaaatgggaaagtatttcgatgtagaaagcattatcagttttttataccaaaggtataaccatcttgaaagtggatctttttrtgttctcactcttacaaatggcttgattatttaaacatagtgaagatcagtttctctttggtgtctgtaatttatttatttatttatttttgttttctcaagcctagggagctggtttgagcaatctcagggtaaaagaaaatgattagttctcagaacatcaacattgtatgtattatcttggaagatgggttaagatcaaattgaaaaattaccggaaaaaaattaagatggcagttatgtatagattttcatttctttttcctgtgtggttttaatgataagtagtacaggcttttaggactggtacgatttttctatgtcgtagaacccttttgtaaatacttttggtattatggtgtgtgtttctagatattaaccataagaacttaattctggttgttaattaattagactcttgaaatatatacttacagctgaagggggtcttcccaactcttcattagatcttcctaatctcattgggatatagcattaattctgagtgtaccgagaatgaaataccattaaattgcattttcttactttgcaaaaaaccctcacagaatgctaactcattacttcagaaaataaatgagattttgaattacttgataagttgactttaagccttttcccccttattgtaggtccatatacttttgttcagcaacatcttatgattggcacagatcctcgaacaattcttaaagatttattgccggaaacaatacctccacctgagttggatgatatgacactgtggcagattgttattaatatcctttcagaaccaccaaaaaggaaaaaaagaaaagatattaatacaattgaagatgctgtgaaattactgcaagagtgcaaaaaaattatagttctaactggagctggggtatgtaagactagtacatggggaggtcgtatatgtattttcttatgccttttccaagtaggaaacatttttctggtttagaaggatttatccttacatgataatggatgtttgggaactgccaaaaactgagtgcagcagcagttgctaaattagttcagatttttaaaacctctccagccttaaaaaaatatttgcttctgcttatttatagcacagtgggtaaatggagttaaggcaagatttctacctacattatatcatagctcctaaaggagatgcagggaattgaaactctgcttttgttaagggatgtcagtctgatggagaaattgggtatttgttagatctttatgagaaactggaaacctaattggtattcacaagtgaaaagcttagtgttgggaagagtaacagattcc

SEQ ID NO: 554173 - DNA, 681 bp, Homo sapiens
ttccctttttttgtctataaattttcttccaccacgtggctgcactggagtctctgtgaatctgctatgattctggggtctgcccaattcatgaatcattcattgctcagttaaactcctttaaatttaatctggctgaagtgtttcttttatcacaaggcagaacaggccagtgtgatctccaggttgcaacaccaaagtgaaattaggccttcaggaatgtttccttggccagtacagtatatagtgtatagcttttttttttttttattagacagagtctccctctgtcccctaygccagaatacagtgttgcaatcacagctcactgcagcctcaacctctgggttcaagtgatcctcccacctcaactgagactacagtcatgcaccaccatgcctggctaatttttttttaatgttttatagagagagggtctcactatgttgcccaggctggtcttgaactcctgggctcaagcaatcctctttccttggcctcccaaagtgattacaagtgtgaaccaccacacctggcctcagtacatcattttttaatttttaatttagtgatcaaaatgtaagaatcatataaaaatccaaatttctagcttctcaaacaaaaatagaactgcctagcccagcctatcctgggcctagcctcctccctagtaactactgg

SEQ ID NO: 554174 - DNA, 1490 bp, Homo sapiens
cactccagacaagatgaatctgggtatgacttttcttggggactcacatttccttgacaaaagtcgcttcagggttaggaaagatgttgccttcattcctgcccagagcactgcctgggcaataaaagttgattcgcaagtaagtataatctccttccacggacatacttatattctgttcaaaggaaaagcataaaaagtaaacagatttctttcctagagattagtagttacagagatgttaaaattaagttaggagttacaaattgaccgctcttaaccttaatctaaatctaataaatttacataatttatctttttaataaygaagtatccttttcccaaaaaaatctctgaattctcaaagtaccttgtaccatgaatacaactaaaagttaaacaatgattaaacgaagttgaaagaaagataggcaaattatgtttctagactagtttagctttctactaagtgaaaaaaactgaaagaggaaggagaatgacaagacaagagggatgtcagtaactgaacagagtctgaaggagtcaaaagtgggagacatgatgaatgcagattatttatggcaaatacaattactattttaagcaacagtttggatgaaacctgatgcactgaatgtcagtaccttgattgtggcaatgtgaaacggtgttgcaatgccaaacacgggcattattacagtctcatatttcttatcgatgtagatcttcatttcccgaatatgtggttccttaggcatcagagatgggtttttataggacacattagacttgcgagctctggagtgggataaaaaaacaactgagaaatttctgcagtcccacagaaccctcagatgatctcactgctcagtgaaaactcttacttctgaatctgctgttctcccttttgttcagtcaatcgcctctttgcttcttcattgagttgagccgctagttctttctgatgtgctcttcgcttctcttctgcagtcatttcattctggtgaatggaaaatccaatttatcacaacacgtgagccatatgacagccgagatcaatgtaatttaaaatagtaaacttactcttgttctttctgtaagtaatgctgcccgagaacctcttcccaaaaggtcctctgcctcatctttctcctcctcctcttcttcctcatcttcattctatggaaaaagtcataatcaaaaaatgaaattttaattattttagccaatattatttaacttctttatatcctaaacttcctatactacttatctatcttcttcctacctttaggaaaatccccacattcttcactttcttcttcacagaagtgagaacagtagctgggccatcctagaattaaaaggagaatgaagacacattatttaaaagaggcaatttcattttctaacctagtaaacggctgggcaatgctttgaatcttttggacactaaaatgtttgacaatgaataaatatagtttttatcc

SEQ ID NO: 554175 - DNA, 954 bp, Homo sapiens
ccattcagtgtgatattgtaattgccattttactgatgaggaggctaaggctagtcaagcgaagtttgctttgattcacacagtcaattaagtgcctgacttcagatttatagccagatctacttgacccaaaagccgatgctattctcactgtctgaaatctaggacactagggagaatggttatggtgaattgaaaccaagcattttttaatggctttcaagtttggctagttaagacctagaatctactatgtgcacarcaatgacatggaggaccaagtagcggtggagcagagacagaaatgatgcagggaggtggggacaagaagcagctgctcctcaggacatgttattgcctgttatatgctaggctgcgtggaaaacaaagaggtcattggctaaggcacagttctctgctcttgagaggtttgtagcatgacacaaagtggagccaggtaggtgccattgtggggctggctgcagaatgctccagggtctacacaagcttgtttaacccatggcctgtgggctgcatgtggcccagggcaactttgaatgtggcccaacataaattcataaacttttaaaaaacgttatgagaatcttttgcaattttttttttcgctcatcagctatcattagtgttagtgtattttatgtgtagcccaagacaattattccagtccagcccaggaaagccaaaagattggacacccctggtctacaggaagccaagattggttttgaccagggacccagatcttggggcaccatcaaaactttctaacaggggagtgacatacaaccagctatgttttaggacaccctgcagaaatataacaaaggactcaagagggtctaaaccagggcagtaggaatggaagggaggtggtgaattcaagagcttctgagaagtcagagtatctggtatctgtactttctatgtgaggta

SEQ ID NO: 554176 - DNA, 618 bp, Homo sapiens
ttcccagccaccatcgttcaggccccggttacttctccccttgatgactataatagtctgtctcctatctctcttcactctagccatcctacatactgctgctagcttaattttcctaaagcacagtactgatcctatctgtgccttgataaaagccttcaacgaattaccattgtcaactgaattaggcacaggttcctctacctgactgttaaagccagccacaatgtggccgtggttcacctcttctgtcttaatttctatactttccatatatataaactgatttacaggcataaaaatgtgtcacctagtccttctatttggagtggccatatgacattttcctattaaaaaacaacaagtaatttacacacaaaagcgggaaaaagaaggtgtgagggtcatttttgcttgttttttgagacagggtctcttttttttgagacagtcactcaggctgcaatgcagtagcatgaacmtggctcactgcagcctcaaccttccagccttaagtgatcctcccacctcagccccctgagtagccgggactacaggcatgcaccaccatgcctggctaattttttgttgttgctgtttcttagagacagggtttca

SEQ ID NO: 554177 - DNA, 538 bp, Homo sapiens
cagctgggtctgctgcccatgagagggcctttgagtctttgtctccctgggcctcagtgtccccacatgtaagatgaggggcttgacacgaggtcttctggagccttcccacccctgccctgctctccttccatggctccaccccagcagatgtgcaaatggtttgcctcccacgtgcatgccttcatggccctctccataaatttccatgtgtctttcagatgcattggcttcgtagacttttagacttttggtccttgagacttgtggctgggccttctgatcccctcctctacttgatgtytggtgcgtggcttcaggcatagcaggcccttgaggccttcagtcagctgccagccgagccagctccctgggatgcgctgccggggctctccgtgaggagcgttcaccctgcttggagccagagccacagcggcgtgtgctccacagcgtcagggtcacgctgggccagccgcgtgcccagggcccggaaacctctgcgctcacccaagggtctgggtaccgccacttggtgggg

SEQ ID NO: 554178 - DNA, 632 bp, Homo sapiens
attggctgcgcgggtcccgccctccccctgcccctccccgcccttgctgggatgaccccgggggcgagtgcccggccagtgtgctcccgaagcgggctgcggttccgctcgyatcaggcttcatggcggcgcggccactgtcccggatgctgcggcggcttctgaggtccagcgcccggagctgcagctcaggggctccggtgacccagccctgccccggggagtccgcgcgagctgcctcggaggtgagcccaccccgcctgcgtccacagcttcccggggcaggagtggccccggcacactgcccttttcccccagtagctcccggcctatctgcttgaccgcttctgggagggacccgttggcactcctcagtggagcgatgttctccagatggaccgcccggtctcacccgctagcccagcgggagaggttcctgggagtcccgcttcagaacctccctgccccccagccacgccaccccttctagccctgagcttggccagaaattcgggtaagcagaggactgggactttgggtccagtgaggtgtcttagtacctttcagccttgccttgcacccaccctctttcttaaacattttccctccctatcccaagagctgagagatca

SEQ ID NO: 554179 - DNA, 551 bp, Homo sapiens
ttagacccaagtcacatttttcaggccaccaaccccaacaataaagtttatagcttgatctcgactgagatgtccctggtgtttacctttcaattagttctgagataagacaggaaataaagaaaatgaatatctccaaagaccccagctgtgtgggttttccacacatgctatatgataccagagtcatattggcttctgactgaacctcccagaggttgaacatttgttgaacaagcaaatgttcactaatgtcctgcacaaccagtaagacttctaaatggtagttgggaagctgtctttttatccaaaaaggagagctacattactgggggctgccattcttttcacaaagtgtatcatcaaagggaaatggttgtgctccaaatcagaggtgtgtggttaccaaattatataygactagaatcataaaagcagctgagtgttaaatacatatttgtgtgtattaatcacttggatatgcaaagtttaccttatacctgttttctttactgcaatagagaggatctaatacaggcctctatggggta

SEQ ID NO: 554180 - DNA, 1071 bp, Homo sapiens
tgccaaacctaattctaattaataatactaccacaaagaaaggttttaagaattaaatgagattatgtgctagctacatagtaagtgtgcaatacatcatgcttattattactattatattattattaaacaaggataatattatggtctaactattcagaaaaataaaatatatctggaaagtcttacctttcagaccagtggcattaaagaactataagggtgcctatcaaagaatagagtttctcctgagaagcaatttttgatgtattagaataaattacctgcaataaagaaaagaggtcaaacagacctggaatagctcctaatccccatggtaaccacatattttcttacaccaagtgttgcctaatgttcttagtctgaaggactctgaattttaaaaagaaatttaaaatggaaaataaaggtatgcacacatgatgccccgtaaagtgaaaccatttraatggtgaaagatctcctgatgataacctcaattaacaacaatagcactatgaacaaaagaaacaattttgtaaagggaaatacactctaaaaactcaaaacaaggaccttcactatctatcaacacacacacacatgcacacacacaatcacatacacacacatatatatgacttttatatcagaaattgtcaataatgatctataattccacaatatgtatcacagacactgatggagaattaaaaattaaggagcagccttcctctgcttccaaacacagactatgtccaaaatcatgtcaaaaatgtctctactagcgcaacccaatagtttttaaaagaatccattgacacataaaatctcagtagggccaagcttggtggctcacgcctgcaatcccaacactttgggagtccaggcaagtggatcacctgaggtcaggagttcaagacgagcctggccagcatggtgaaaccccatctctactaaaaatacaaaattagccaggtgtggtggcaggcgcctgtaatcccagctactcaggaagctaaggcaagagaattgcttaaacccgggaggcggaggttgctgtgagcccag

SEQ ID NO: 554181 - DNA, 1071 bp, Homo sapiens
tgccaaacctaattctaattaataatactaccacaaagaaaggttttaagaattaaatgagattatgtgctagctacatagtaagtgtgcaatacatcatgcttattattactattatattattattaaacaaggataatattatggtctaactattcagaaaaataaaatatatctggaaagtcttacctttcagaccagtggcattaaagaactataagggtgcctatcaaagaatagagtttctcctgagaagcaatttttgatgtattagaataaattacctgcaataaagaaaagaggtcaaacagacctggaatagctcctaatccccatggtaaccacatattttcttacaccaagtgttgcctaatgttcttagtctgaaggactctgaattttaaaaagaaatttaaaatggaaaataaaggtatgcacacatgatgccccgtaaagtgaaaccatttaaatggtgaaagatctcctgatgataacctcaattaacaacaatagcactatgaacaaaagaaacaattttgtaaagggaaatacactctaaaaactcaaaacaaggaccttcactatctatcaacacacacacacatgcacacacacaatcacatacacacacatatatatgacttttatatcagaaattgtcaataatgatctataattccacaatatgtatcacagacactgatggagaattaaaaattaaggagcagccttcctctgcttccaaacacagactatgtccaaaatcatgtcaaaaatgtctctactagcgcaacccaatagtttttaaaagaatccatkgacacataaaatctcagtagggccaagcttggtggctcacgcctgcaatcccaacactttgggagtccaggcaagtggatcacctgaggtcaggagttcaagacgagcctggccagcatggtgaaaccccatctctactaaaaatacaaaattagccaggtgtggtggcaggcgcctgtaatcccagctactcaggaagctaaggcaagagaattgcttaaacccgggaggcggaggttgctgtgagcccag

SEQ ID NO: 554182 - DNA, 1071 bp, Homo sapiens
tgccaaacctaattctaattaataatactaccacaaagaaaggttttaagaattaaatgagattatgtgctagctacatagtaagtgtgcaatacatcatgcttattattactattatattattattaaacaaggataatattatggtctaactattcagaaaaataaaatatatctggaaagtcttacctttcagaccagtggcattaaagaactataagggtgcctatcaaagaatagagtttctcctgagaagcaatttttgatgtattagaataaattacctgcaataaagaaaagaggtcaaacagacctggaatagctcctaatccccatggtaaccacatattttcttacaccaagtgttgcctaatgttcttagtctgaaggactctgaattttaaaaagaaatttaaaatggaaaataaaggtatgcacacatgatgccccgtaaagtgaaaccatttaaatggtgaaagatctcctgatgataacctcaattaacaacaatagcactatgaacaaaagaaacaattttgtaaagggaaatacactctaaaaactcaaaacaaggaccttcactatctatcaacacacacacacatgcacacacacaatcacatacacacacatatatatgacttttatatcagaaattgtcaataatgatctataattccacaatatgtatcacagacactgatggagaattaaaaattaaggagcagccttcctctgcttccaaacacagactatgtccaaaatcatgtcaaaaatgtctctactagcgcaacccaatagtttttaaaagaatccattgacacataaaatctcagtagggccaagcttggtggctcacgcctgyaatcccaacactttgggagtccaggcaagtggatcacctgaggtcaggagttcaagacgagcctggccagcatggtgaaaccccatctctactaaaaatacaaaattagccaggtgtggtggcaggcgcctgtaatcccagctactcaggaagctaaggcaagagaattgcttaaacccgggaggcggaggttgctgtgagcccag

SEQ ID NO: 554183 - DNA, 441 bp, Homo sapiens
ttttaaatattttaaaatctataatccatgctgttatagaaagcaagtcagtcagaaactggaaagcagttatgacgtcatgagtattcacagtggttatggaacctttaatattataaacctaataatattttaggcttgaaaaatgaagatcaagttatataagctcaaagaatataaacattgaagtgggtctaaagaaagtttgctctgttgtccctttttactttgctttcctatacatttttgtcatttcctatgtattcaataccaaatttaaaaaaaaaaaaatagcagaagactaacaggtgaaatatatcaaaaatatataattggcctcataaaataagagcsgaaatctctctaatacgtgtgtttcctgattagatgtaggcttcatgaaggacagaaatctgttcctttttattattgatataacta

SEQ ID NO: 554184 - DNA, 561 bp, Homo sapiens
ctgaatggtgtggatatgtttatccacttgaatgggacacagcagaggattacataactccacctacatctagtaagtgctgctttatggtgaattaatccctccctccctgcaatcagccaaatgkttggtattcttagtacttaatgtagaggttcataggttaaatatgcacatgttagcacttggcctatttgctttgtgatgtcaggttaaacaagaaataggttcttactagagaacgaatctggtactttttcaacccaagatttgcctgttaacttatatattaaacttaaggtcctttatctattgaatataataaatgtaaataaattgcagcagaagagctgcaaagcttcaaaagttaaaaatcaggaagtctcaaaccttaccctaagcttacaatttatggggagaaataaggaggtacaaaaataatttttaaaaaggccaggcacagtggctcactcctgtaatcccagcactttggtaggctgaggcaggcggttcacctgaggtcaggagttcgagaccagcctggccaaatatagtgaaacc

SEQ ID NO: 554185 - DNA, 570 bp, Homo sapiens
tagctcaaccaaaagatcttcctttgttaaaaagtagtctcttgtaaccaaagccaaatccgtaacttctattttgatataacttatatttcaggaaaatgagacacttcctctgaccttagactaggctgggtttccagctctataatttcacttcgctttttctggtactcaccatattttattggtagttgtttgataacatattcaattgttacttatcttctctgcttgcccataagcttcatagggtcaggagctgtacctgttgtgtctgcaccatttactccagagcacccggcatataggaaagcctcgataaatagttgttgaataaatacgctcaccagaatcgttatttttttcactcatttttgatgaggctaggtctctcatacacaaaaatgaaaaagactgttcttgctcttacaggctgttagagagaataatgataataaatgccataatagagggatctatgggaatactttgagaagtcagtctggccacagggcagggaaggtggtgtstgagctgatcctaaaaggtttaaaaggagttagcttggta

SEQ ID NO: 554186 - DNA, 712 bp, Homo sapiens
tgccacgtgggtagcctccccagtctagcacccagtatatagcctatgcagaatgaatacctgagggctgctgggggcraaaacaaggtccctgtgacaggacttgaagcctgggggtctcggtgacaggagtgggcctagtttttaggtgtagaattgagccttgcgtgcactggtgggatcttattgaaaggatcccctccaagactagaggaagatgcatcctgacaatgtaggctctgtaggcgtcccaagtacctgggctgggggttagatggactccaaggcatttcctcaggtggcaatgggaggatccctgggaaggcaaagctgtgcaggaagaaaatggcaagatgctacattccctcagggaaagcccctttaccgggagcagggaaggcgaggtagtttaggctgggtcagtttgtccctgccctcagagtctgttggtcctggaaaaagaaggccttattttatttatttatttttctttgagacagtgtcttgctctgtcgcccaggctagagtgcagtggctcgatctcagctcactgcaacctccgcctccaaggctcaagcgatcgttctgccttagcctccagagtagctgggaccacagggaccacaggcgcccgccaggacgcgggcttgcttttatttatttatttatttattgagagagagccgtagcctccctatgttgcccaggctgg

SEQ ID NO: 554187 - DNA, 712 bp, Homo sapiens
tgccacgtgggtagcctccccagtctagcacccagtatatagcctatgcagaatgaatacctgagggctgctgggggcgaaaacaaggtccctgtgacaggacttgaagcctgggggtctcggtgacaggagtgggcctagtttttaggtgtagaattgagccttgcgtgcactggtgggatcttattgaaaggatccyctccaagactagaggaagatgcatcctgacaatgtaggctctgtaggcgtcccaagtacctgggctgggggttagatggactccaaggcatttcctcaggtggcaatgggaggatccctgggaaggcaaagctgtgcaggaagaaaatggcaagatgctacattccctcagggaaagcccctttaccgggagcagggaaggcgaggtagtttaggctgggtcagtttgtccctgccctcagagtctgttggtcctggaaaaagaaggccttattttatttatttatttttctttgagacagtgtcttgctctgtcgcccaggctagagtgcagtggctcgatctcagctcactgcaacctccgcctccaaggctcaagcgatcgttctgccttagcctccagagtagctgggaccacagggaccacaggcgcccgccaggacgcgggcttgcttttatttatttatttatttattgagagagagccgtagcctccctatgttgcccaggctgg

SEQ ID NO: 554188 - DNA, 1564 bp, Homo sapiens
gcatatattataaaagaggcaaaactaatacaagggttaaaaaatatcagaaatgtggttccttcacgggtaggataggaattgcctgggggggtacaggaggcaatcttcttaggagattgaaaactctgtattatggtaaagatatggttacccagggacatccattagtcaaacttgtacaactaaggtttgtttattttaggctgggtgtggcagatcccagcactttgggagcctgagatsggaggatttcttgaggccagaggttcaaggttacagtgagctatgattgcaccagtgcactctaacctgagtgacagagcgacaccttgtctctattaaatatatatatacacacacacacacacacacacacacatatacacatatatgtatatatatttgtatattttcatgtgtaaaattttactataaaaaactatagaaattataatattttggtgagggagtagggattggatggaggtataggtgaaataagaataacagagtattgataattgttgaagctgggtgatgataacctatggattcattatgcaattctatttactttgtatatttttgaaattttccataaaaaaagttcataaaatcaaacactacttatatcatcatctaatatatgtttttatattagatccataccaagttcacatactttataagaatagtgtttgggacatactttagtatttcaatatttcattcataagggttgctctatgcatatctgtacaagaaaatcactctcatacaacctaagtttgtcatagtctgggtaattcaaagatacttttaaataatcaaacaagccaacaagcacagtcaacttcatgaagtaaagaacatggtggcaaaagcatgaagactttatattaaaaatgacagtttttaataagaatcgtaagatcatagaattaagcatcagaacaatgtatgaataaagctagacaaaattgtcccaacatcaatcaatgcatcagagtccaatagaagaaaaaagaaaaataatccactctgagtatttaaaacaagaggattgtaatgcagggaattgattacattttgctcctctgctgacagaggagcagaaaagtcaaagtgggaatagtgaggtaacccagagattagcaacaaccagaaatgtctactaccactttgctggagagataaagggaaggggcccatgaacaaagcccagaggctaaagtctcctattggaagttagatccataaaaggtttatccagtaagacctaaaaacaggaggagatgcagctgcttgtgaagatgccacccagagagagaggtctggataaaaactctcccaccctctcatctccagccagtggctcccattggccaaaggcatctgacataggagcctgggaaacagactgcagaggatttaagaatccttagatccaagaagaggattacatccagaaaaaagtggataatgaagaaaaaaattaacatatgctttggcacaaagcctatgtgcttccatctctatcaactttattgaacttcatcgg

SEQ ID NO: 554189 - DNA, 1349 bp, Homo sapiens
tggaaagttgggagacagacggagagtccggttagactcccagagttgaggagatgaggctggaagtctggagagaccaaagtggccatagcatcacagcagagtatcagagaagagacagctgctcagacggaacacttcagagctcttcagaagtcccccgtattcagctgagtactcatcagcatgatagctgtgcattacctgctctttacccacctccatcaggttaaagcctgcagggttgtgcataaataattgttacagatcagatttacgcatcagtaggcaccgctttaaattaattcacctggacaatgaaagagcgagagttgatttattcacagcacgtckgggatgaagcattattaaggaggggagatagaatggcatgcaatgctttgcaatgtaccaacagctaatggaactctgcaagtggctgtatacatacagatgcaggtgtcagcctgggccaggcagctggagctacagttgctatgtcctcgggattcagagtcatgggcaagctggagggaattattatttcttcatggtataattttttaaaagcatgtattgatatgtgtggtgatgaagttattgtgctattaccaggctggatggcggggtggggtggacaggaatggacaccaccacttgggttgggaacacagacttccagggcagcagcatgagcacgggagggagaaagttaacttttctcatttacccagagtatcactctgggtgcctggatgctagaaattgtgcttatataatgcctctatatgccagtcatcaaacttgcatataaagccacagaggtacacaggatgggcctgggtgttccaatgtggagaaaatcctcatcctactggtactgctactaaaattacctttcacttgggactatgtgtcaactgtgccacatgcttttacacacatcatctcacttaataggggctgagggtttcctcagatgaaaatgcaggctcagtggtaaagttatttcccaaggtctcctgagacctcccagtgatgtttggtttactccaaagcttgcttgcattttaaactttcatattacaaaatggtgcttaaggaaccacactataaaacattattgttcacagagtgctttattgtttaatatgtcatcatctgatcaatcatttgcatactcacaaccaccctgttgcgtaggtgtctttgatcccattgcacaggtgaggaaactgagctttgggttggttgtgcctcttgcacatttgggggcacctgcgatgtggcagagccagaatcaaaacactggtgctttaccccaaatcctaatctcttcccattctacc

SEQ ID NO: 554190 - DNA, 634 bp, Homo sapiens
tgcacacagtattcccagcactgtgctaagataaacgagacatggatggtatctaccttcaaactcatactctaataaagaagacaaactayggccaggcatggcttaaaggatcagatgatgcttcagataggctatttcagaagataagctgacaactagcaaagaggtctctggcaactggggaggcatgggattgagggaaagtgacaacatgtacctaggactagaactaggaatatgaaacatcatacttagtttattcatataatcctcagcattctggcatagctacggtgagataactgcatgccgtgttataaggtttactacattttattctgaaagtgatgggggacaattaaagagacaggtagaagaaggaaaagagtataaaaaagttagcaagtaggaacagagatatggagaatccaataaaccaaatcactgagaaaacataaatactttgtagtgtgttcatacaatggaatattactaaaaataaaacagcaataaaaaataatgaactgctgacatagtcacaacatagatgaagctcaagaacattatgttgaatgaaaaagccacatacaagagtacatactatatataaaatccaagaacaggcaaaact

SEQ ID NO: 554191 - DNA, 634 bp, Homo sapiens
tgcacacagtattcccagcactgtgctaagataaacgagacatggatggtatctaccttcaaactcatactctaataaagaagacaaactacggccaggcatggcttaaaggatcagatgatgcttcagataggctatttcagaagataagctgacaactagcaaagaggtctctggcaactggggaggcatgggattgagggaaagtgacaacatgtacctaggactagaactaggaatatgaaacatcatacttagtttattcatataatcctcagcattctggcatagctacggtgagataactgcatgccgtgttataaggtttactacattttattctgaaagtgatgggggacaattaaagagacaggtagaagaaggaaaagagtataraaaagttagcaagtaggaacagagatatggagaatccaataaaccaaatcactgagaaaacataaatactttgtagtgtgttcatacaatggaatattactaaaaataaaacagcaataaaaaataatgaactgctgacatagtcacaacatagatgaagctcaagaacattatgttgaatgaaaaagccacatacaagagtacatactatatataaaatccaagaacaggcaaaact

SEQ ID NO: 554192 - DNA, 633 bp, Homo sapiens
tgttggcaaatttagtccatggctgttgtttggtttaatacaatgtttgatatgatgcttgttttattgacatgtctttagggagacaaggcactcttccattactcttccatttcaacaccctctcccctggtcttatatctaacttgcttcaggcttctatgctaactcttggaggcccagaggcatttgactttatgtatttgagttttcagtatctactaaaatcattctttggggaatttttttaaaagctgcaactgtacagaaaacctacatctttacatctgtacttatggtattggggtgggaaaaaatggacaataagggtgaaaagaaacagtgctatgaaacacaatgaaaccaagtaaagcatctgcctttacttgaccttaatacagaagcaaagcttttgggaaacagtarcattgcttgctgccccacagccatggctaggacccagtcactacaagacattaatacagtagaaggcagccttcatctgcctgtctcccctggctcccattaagctccctacctactgcagggagccagagaaaaggagaggcactacaattaccacttgtcactcaccctggaggacacaatggtgcccataacatttcctgtttg

SEQ ID NO: 554193 - DNA, 636 bp, Homo sapiens
ttcctgaaacagttaccatgatttcgaacccccaaatcasaccctattttggggggtggggggtggggatggagtctcactctgttgccaggctggagtgcagtggtgctgtctcagcttactgcaacctccgcctcccagattcaaacaattctgcctcagcttcccaagtagctgggactacaagtgcgcgccaccacgcctggctaattttttgtatttttagtagaggcagggtttcaccatgttggctaggatggtctggatctcctcatctcgtgatctgcccacctcagcctcccaaagtgctgggattacaggtgtgagccaccacgcccagcccatattttaatgttctgaaaagtccaggacccaggaaggaacatcatcaaagagaaatgggctgacctggccgctagcatcccagtgaccagtcattcatcctctagatattccataagtgtctgctatgtgccagacctggcccaaggtactgagcgaaaggcccagttcctaccctgggctcttacagtctaactgtcagcgctgcttcccacgcccccagggctccctcagcttctccccacaccccaccgcaagttggcaggtggaggcaagattccacctgtcctttcc

SEQ ID NO: 554194 - DNA, 636 bp, Homo sapiens
ttcctgaaacagttaccatgatttcgaacccccaaatcagaccctattttggggggtggggggtggggatggagtctcactctgttgccaggctggagtgcagtggtgctgtctcagcttactgcaacctccgcctcccagattcaaacaattctgcctcagcttcccaagtagctgggactacaagtgcgcgccaccacgcctggctaattttttgtatttttagtagaggcagggtttcaccatgttggctaggatggtctggatctcctcatctcgtgatctgcccacctcagcctcccaaagtgctgggattacaggtgtgagccaccacgcccagcccatattttaatgttctgaaaagtccaggacccaggaaggaacatcatcaaagagaaatgggctgacctggccgctagcatcccagtgaccagtcattcatcctctagatattccataagtgtctgctatgtgccagacctggcccaaggtactgagcgaaaggcccagttcctaccctgggctcttacagtctaactgtcagcgctgyttcccacgcccccagggctccctcagcttctccccacaccccaccgcaagttggcaggtggaggcaagattccacctgtcctttcc

SEQ ID NO: 554195 - DNA, 624 bp, Homo sapiens
cttcattactcagtcccagcagcacctaccagagcccacagcgctagcaatgggctcagagcatctcactgggcttccagctgtgttttgtttttattttyaaattatatgatgtgatgccctcaaccagagttgaggacccagtgacaaggagaggctgtcctgccaccggtcctgatgtttagtctttacttggcagagcacaggggcgtatgctgggtaagccggtgccagatctgtgagcaccgtggtccagcagacagagaattccaaatccagagaatctagatattgggagttttttgtataatcaccctgtttttgtagcacttgcctcttaaatcaattaagatattgaatttctgagttggctatttaagtacattaccagaaaaacctctaaacaaagcatgtaccttaacctgccattcttacacagtctgaggccttctgatgattttcccattaacataacacattcctagaattaaggacgtgagataaacagcaggtctaaaaagaattccaggccgggcacagtgactcatgcctgtaatcccagagatctgggaggccaaggcaggaggatggcttgaggccaagagtttgagaccagcctgggaa

SEQ ID NO: 554196 - DNA, 559 bp, Homo sapiens
taatccagacaatgtatagtttaacagcaattaagtttataatatttcagcctctggtagaggctcgcatagagcctgaagaaaaaagggaaaggaacaagttagtaatggttttatrccctatcttctgcttgcctaattcagtgtacactcatttgcaagtaaagcatacatttaacagttctaataagaatcagttgaatgtcattacagtatacagggcaggaaaactcaacaaaataaaaggcaaagtatatcagtaaaatattttgttgctctatcagtccaaatttgaaatacttcaaattttagataaagctctgctttgacccagaaagaaacatggcattgatgaatccgtgtattcagtacattcagaaaatgttttaagtaacaaactcttgcctaccatgtagacagaagtctaagatcaaactcctccttcatgcttttaagatttataggataaatgtagaacttcaagcaagtcattttttaagtgatgatttttctcccactgaactggaatgtccctcttctatcaccccatgtatatttt

SEQ ID NO: 554197 - DNA, 531 bp, Homo sapiens
cctggattttctgggtgagcacaatgtgttcccagtgcattcacacgggtctttataaaagggagkcagaaggatattttaccacaaagagcaatgtcacaatgaagcagtgagagacaaatctggaaagcccacagctagctttgaagatggacacaggccatgaaccaaagaattcaggctacttctagatgctggaaaaaaggtaaggaaatagattttccctctgaagcctagaagaaaataaagccccactgatatctagattttggacttctgatttcctgaactataagataataaatttgttttgtttaaaatcactaagtttgtgtttttttttatagcagcaacagaaactaatacattgagtccctagaaggagataatggtacagcattgcaccttccaaaggacaatgccctctcataccagctccagcaaacactcttgccctccagttttcttatccctcagagagctcaataatctttgattacattgttttatctacagtctttatttactttc

SEQ ID NO: 554198 - DNA, 605 bp, Homo sapiens
tcaccaatctcaacagaacatggtccttccacatttccagcatcaagtcagacaggcagcctcaccatagcttagggcggagagcgggcattggaactgtgcgggtagctttggctgaaccatgaaaatcgggcaagtgacttaatcaactcatcctctggactgtgcttgttcaagtgtcatatgcacaacaccttaaatttgctgttgttttaagttagcatacaacgtcctgaatgatggtttaaaaaaaaaaaagaaaaaaatgaattttttttctaaagttgaaagagtgtaataatcagggacacaaggagcagatttagtgttttttgttctttttattggtgtcctgctcttcattagagtcttttttttttttctttcccgagacggagtcttgctctgttgcccaggctggagtgcagtggtgcaatctcagctcactgcaacctctgcctcctgggttcaagcgattctcctgcctcagcctcccgagtagctgggattacaggtgcgccaccccatgcctagctaatttttgtgttcttgmtagagaaaagggtttactgtgttgaccaggctgatctcgaactcttgatctc

SEQ ID NO: 554199 - DNA, 1424 bp, Homo sapiens
gccagaagcctctggagacgtcckcttttacctcaataggaatcagactttctcacatggacaaccctcactgcaagagagcagaaaagcaaatatttggcttttctagcctctctaatggaggatgccagaggaggtggatttgcaaatgggagttggactagccaaccaatggcatctgctaccatgttgtccagtgctctcagaagtcatcacccttcactgttatttatcattgtcttgctctttgggactcttttaaagtaaaacctggcaaaaatatgaagttgtgcatcgtttataaatttcatcagttaccacaacaatgtgactgctgtcttcaacaggctgttctgtacttggagaagaagcatttgcctatggtgtcagggaaaattttctaatcttgttgtttggatagatttgaaaaaaaagtgcaaataaaaacgtctgtccttggtttaacttttcactcttgtttattcatgggtgcttctaagagcttttgcaagtaaaccttctaaatcttaaactaagtgtggtaggcaaaccgtctcaaagtttacggtttacactactgatcgggaagaataacaatccattaattctgatgaggtaacttattaaagggctcatgtggagtaaacaagggggattctagcaagtttgaaatcttgaagccacaccgtcttctctttgtggtggtatatccacagacacctctctgcttcagaaacacgtgtgggtaatatgctattgtatcgatggcgaaggcagtacaaagtagtgcttaagacatgagttatggagccagactgtctagtctccagtcctacttatgaactgtgtgacctaggacaagttacttaaactctctgtgccttcaaatgttactataataatactcagttatattgagaaagtttcccaatagaatatatgtaaaaattgataaatattacctcttgtgattatataatggtgttgtataatggtaatacccaccagggcaagtgggcactttgtttctctctcttttccttcctgctggtatgtaccccttctggatgcttcattgttaaagaagaagcactcatatttgttaacatttaaatgctcaacagcacagtacttaattactgtgtgtatactctcatgcagtgtgtattattgccatgatttcacagaaagaaaaggaaattgagaagacaggtgaaggaacttgttcaagccacacaacttgctggagttagaatgagagctcaggtgtcttgtattttaagcctgaacttattcccattatgacattattgagttgcattgtaaagtttaaattagctttttatatgcatatgtatctttctgcatataattttctcatgctctgggaaaatctgcacaactcacaatcatcctcttttttt

SEQ ID NO: 554200 - DNA, 1424 bp, Homo sapiens
gccagaagcctctggagacgtccgcttttacctcaataggaatcagactttctcacatggacaaccctcactgcaagagagcagaaaagcaaatatttggcttttctagcctctctaatggaggatgccagaggaggtggatttgcaaatgggagttggactagccaaccaatggcatctgctaccatgttgtccagtgctctcagaagtcatcacccttcactgttatttatcattgtcttgctctttgggactcttttaaagtaaaacctggcaaaaatatgaagttgtgcatcgtttataaatttcatcagttaccacaacaatgtgactgctgtcttcaacaggctgttctgtacttggagaagaagcatttgcctatggtgtcagggaaaattttckaatcttgttgtttggatagatttgaaaaaaaagtgcaaataaaaacgtctgtccttggtttaacttttcactcttgtttattcatgggtgcttctaagagcttttgcaagtaaaccttctaaatcttaaactaagtgtggtaggcaaaccgtctcaaagtttacggtttacactactgatcgggaagaataacaatccattaattctgatgaggtaacttattaaagggctcatgtggagtaaacaagggggattctagcaagtttgaaatcttgaagccacaccgtcttctctttgtggtggtatatccacagacacctctctgcttcagaaacacgtgtgggtaatatgctattgtatcgatggcgaaggcagtacaaagtagtgcttaagacatgagttatggagccagactgtctagtctccagtcctacttatgaactgtgtgacctaggacaagttacttaaactctctgtgccttcaaatgttactataataatactcagttatattgagaaagtttcccaatagaatatatgtaaaaattgataaatattacctcttgtgattatataatggtgttgtataatggtaatacccaccagggcaagtgggcactttgtttctctctcttttccttcctgctggtatgtaccccttctggatgcttcattgttaaagaagaagcactcatatttgttaacatttaaatgctcaacagcacagtacttaattactgtgtgtatactctcatgcagtgtgtattattgccatgatttcacagaaagaaaaggaaattgagaagacaggtgaaggaacttgttcaagccacacaacttgctggagttagaatgagagctcaggtgtcttgtattttaagcctgaacttattcccattatgacattattgagttgcattgtaaagtttaaattagctttttatatgcatatgtatctttctgcatataattttctcatgctctgggaaaatctgcacaactcacaatcatcctcttttttt

SEQ ID NO: 554201 - DNA, 526 bp, Homo sapiens
atgtattgtaccttaaaaaattttactctttctcacctgaattgaacaactgttctctcctcaaaatacccacatttccctggtgaaacatttttgaaagacgcatccacattttcaggccactagggttagtaacaaccaaattattatttgcttaatgaaactgtaccctaatggcttgacaatgttaagacctccaaaaagaccatgtttattttgttaaaagtattttacagtctcaaaatttttggcttaaattgtacttcgggtgtttttytgaagggcagatacaaaccaccaatgtaagaactactattactgatatcttgaggatgagtgagggcacgcaaagtgtaagtgatgttcatcaccttagacatttgcaggaacattttctcactaaaaagtcattacaccaaaatttaattcttttgagagacaggggagagctgaagctctctctgaaagtacagttgtccctcattatctgcttttatctggttccagaacaccaaaatctacagat

SEQ ID NO: 554202 - DNA, 600 bp, Homo sapiens
cagccactacctacgaagctgcttagcacgccccactgtgtgcctgcccaggggaggacacgcagccctaggggtctgcttatgatttctgcccctgcttgtctctgctgcttgcagccagcgctggctggacatggagagccagcaccgagttccattgcttccatttggcaccaagtgcctgatggagctgtccactctcaacaagaaaggggcctgaggtgttggggcagaatgagggtcctcgcttgagctcaccttgactcttctcacaggccaggccatgaagggargggaaacggagcaaagccaagagacagggaaaagtgtgggggataacctgggggctggagggctggttggggggtgcaaggggcggtcgcggtgaaatctggccttacgggcacggtgctagtggggagaacgttaaaggaagtcactttaatcttcagaatgagctcagaggtccacagggtggatatggaacccctattcattcatttaatatatgattagatgtcagtgttgttggagttacattttaggaaatgactattcataatggaagtcctggcacggtttctttctaatcagcaaaac

SEQ ID NO: 554203 - DNA, 1153 bp, Homo sapiens
atggcttctgtgaagtgacctccgagaagaatccaatcaatagtgttttcaaccacattaatctggactagacgatactgtgcccttagtctaatgcatcaattacttggttattgatagtaaagctaattgccatatatataaaaatatatatgaatatatataaatatatatgaatatataaatatataaatatatatacatatataaaaatatataaatatataaatatatacatatatataaaaatatatataaatatatttatatataaatatatatacatatatataaatatatatacacatatatataaatatatgtgtatatatatttagatggagtctcgctctgttgccaggttggagtgcagtggcgtgatcatggctcactgcaacctctgcctcctgggttcaaatgattcttgtgcctcagcctcctgagtagctgggattacaggcgtgcaccactacgcctggttaatttttgtattttttgtagagacgggtttcaccatactggtattgaattcctgacctcaagtgatctgcctgccttggcctcccagagtgctgggattacaggtgtgagccaccggtgccaggccgccaattatattttgagcatatccaaaagttgacagtctttacctttggcagtggtgtagaaatggacaatatacattttggatggcttcttttctttttaaaacatgaaatgctttggggatgaaaatagttacccggaggccgtgtgattttaaaaaagttgttgaagtcttaaatgatccagaattattgactcaaaactcactaaacacttatacgctgagcattgtggcatgcaaaataatggcccccaagtggtcctcatcccaatccccagaacctgggaacaggttaggctacrtggcaaagggaaatgaaggttgttgtagacggagttaaggttggtagtcggccaactttaaaataggaagattattctagattatctgggtgggctcagtgtaatcaaaagggtccttaaatgtggaaaaggggggcagaagagtcagggtccaggtgatataatgggagagagacttgaatggccattgctggctctgaaggtggaggtgccatgagccaaggaatgtgggcaacccatgaaa

SEQ ID NO: 554204 - DNA, 671 bp, Homo sapiens
tctctgctcattagcctctgtgcttcctgctttccgaagagtgagtgacaaaggggtagatgcagtagctttgactttcggatcacaagctcgggtgatcaagaaaagtaagctactgagtttttcaaaaaccagttacataatttccacgtttctaagcctcagtttgactctctctactgctgtttgctaagctgcacctgagtttcagggagggtgggggagagctacttcagggaggaagcactgggagcagtgtttgctccttggctatcacgtccacgcttgcacctgccgaaatgttctctgctctgctgggtccccggggtctgaggatgagtcacccgcctctgtttgtgaggccctggggctgtcatctccatgagacggaggtagttggggctggtcctgctgctctggaagttgctgcggctctggcaggtccccgaggctggtccaggtgctgcttgcccagacttgccatgcagccctttctccttagggttggcatctttccagagctctacctgtgcaggaaaggtacgggtctycataccctgggtcacagacgcctccctggcctgcggaggaatcccctctcctgccccctgtggtgggtggaggagaaggaccccttctcagatgcctgccctgaagctccacctcccttc

SEQ ID NO: 554205 - DNA, 1724 bp, Homo sapiens
aaaagctattttaaatactctaggacaaaattgttaatcagctttaggcatcagcttagtagctcaagtgaagagaagaaaggatttgcagcattctcaaaaatgcaataaacaatttacactaagttataagtatcctgatttttctctgaaaatagatttgtcaggaaacttgaaggagtgcaaatattgggctttcaaacatcaacagacacacatacatgcatatgcacatacacgtgattatgcacctcgtaactgaaaatgacagctctacaatcaaaaagtaactttatatgtgtgtatggagtgttggactacccagtattctctcttactactcatccaaatataatttttgtaacacaaaatgagttttcctagtataccttaggatcttagtggacagactgggaatctgagccaaactcaagacaggcaaaagcttatcatcaagacctttctatctcttgttcatgacaccttctccttctttccacagcacctggctttatggatataaaggttctggagttagatggatctagacaattgcttaacatctttgaatatttatttagttatctagaaaatgtgaccagtaacacttgcctctgaagattgttggactgatcttacagaatatgtctcaactacatggcacaatgtaggcattcaaaaatagtatatattatcattaatgctgtcacctggctttcctggacttatagcttggatctatttacataatgctgaattttatcaaaagacattgcacatccacgaaaatatacataaacatatacacaaatgctaggcaatgggctttgttagatatcgatgaatcgatgtaaaaatatgactaaataatgttttctatcataaattaatttacaattagtaaaggatacagcagctaaacaaattaattaatttaattgcaagtagcttcatgaacaggttcatgcgatgtctacatsatcaatcataagccctgtaccaaggcatatggttagaaaagggatagaaaaggaggtgggatgtcagaatccatcaacagatgtcacgagaagagccgagaagaaggaggagtcagagataaccctgaggtttctatcctaagtgactgggaaggcagaagggtctaaataaagcaatcaggtgtggcgggggagtaaatgattttaccttcagttatgtcgagttaaacgtgatcttggaccatgaagaaatgccaatgagccaacttcaaatttcagtattgcttcaaattatttgtttttcatctagtcttttaaatatgtaaccactttaaatctcattactctaaatgtcacagctggaatgattgtgacaggcaaagcgtagcatgtcaccttttctaaatagtgtttgtattttagctggagacttaatgccataatgtaatgctgaagttactctattgtcaaaacataaaccacacacaaatattgtgaagtaggcaaaatggataatataggaagtgtgcatgttacattagagaagatatttgcaataaggtgagactttggctgctcttctaattataatactgagttagctgcctcctccatataagtggtactgagttattctaaatatgctcttcagtgtttcccagtgtaaatataccttctttgttagatagttaatgccgtatttggaattatttagattaaacattagctagatgttttttctca

SEQ ID NO: 554206 - DNA, 1345 bp, Homo sapiens
atttgtaatgcctattatttttatgttatgaaacccatctctataattattaggcagaaggcgtaatgaagttggctgattacaaaggaaggggaagccaagtgtttccagctctctgatgttttctagtgatagccattgattagagcagtgttattttgaagcaattttactgaaaagggaatatgtttatagaacattaattgagtttattgcttaagagctttaaatttcatgatttgggcattggtctctctctccaggatttcagagtgtgtcttaatatgtttagtgttgctgtaactgaacactcgagactgggtagtttataaagataaaaggttctttgactcatcactctggtggctggaaagtccaagattaggcattggtatctggtgaaagccttaggttgcttcaactcacagtggaatggagccagtrtgtgcaaagagatagggagagaggaggcaagggagatgggttttgggtggggggtacctggctctttttaaccactagatctcatgggacttaatagaatgagaattcactcaccttgagggagggcattaatctatccatgagggatctgcctccatgatccaaacacctcccaccaggcccactccaacactgccacattgggactcaaatttcaacatgaggtttagaggggacaaacatgcaaaacatagtatagcatggtgggaataggataaagcaggaatccactgttaaattttacttacaatcaatgttctaagtcttcttggtcagatcgttctttaaatatatataattcttaaattgaaagggtcagttctagagtgacattacatatgctgttgctgacaatgcaatgctctttgcaaaaacaggtttaggttaaagaaaggccagtgaccaggctgactggcaacatacaaaggaaaggccataaaaacttgaactttacaaagttgttcttcaccattttgctgtgtggcatttattattccaaaaactaaggaacagcaatattcattgaaatgttcataaagtcatcaagtttatatacctccttttaaatatatcatttgagaggtggaagaatcatctgagctcaggagttcaagaccatcctgggcaacatagcgagaccccatctctcaattttaaaaagtaaaaataaaaatatcatttgatcctggaagtctcacacattataaaggaaatatttaaataaggctcttcaggttacttgaaaaactctttggcttagcttagctgaaatgaactgagtattgttttatgttggagaatagtactttgtttgctaatatataatattatgtatgtacta

SEQ ID NO: 554207 - DNA, 1254 bp, Homo sapiens
gaataagtttcgttgcataagaaactgccaaactgtcttccaaaatggctataccattttgcattcccaccatcaaagaatgagagtcctgctgttctgcatcctcaccagcatttggtgttgttaatgttatgaatttgatcattctaacctgtgtgtagaggtatctcgttgtttcaatctgcatttctctaatgacatatgaccttgaacatttctccatttgctcattttttatctgtacatctttgatgaagtgtttattcagatcatgtactatttttttaaaarttgagttgtttgttttcttattagggccaaggccaccttttctttggaatttatcctggccatcccagcactccctgtggctcatgtggcccgtataccagttagtgctcaagtgttactgagttcactgttaccttacttgtcatgcctggtctgatttccctaacttgctgataagcttctgcaaggaagggatcacttttgtacatccttgaagtaaccataatatctaacagcatgttttgtagagagtaggctctcagaatttatttttaactaaccaaaagttaatggccaggaaagcaattcatttaaaaccaagactgtctctttaatcagaagggagggagttaagtagaataaatgaggaatcaggatatttgtggtttagttgggactctgagacgaacttattttctgaccttcagtttttttttttgtttttttgtaaaatatctagtatcaagggccaatattatatggctatcaaatcactttggaagtttgtgaaaagagaactcacttctatcatctaaaaatgttatatctttatcatttcatccccaactcaaagaaggcagaagcaagattaaagtttgtgcctaactatattcaaggaccataaatttgctggagttaggactccaaacagttcgaccacctcttaattaacaagatgtctttattaagcagaatatcttgtgtttaatagaggctggtagagaatagagggttggaggcaacattatagacataaaacagaagacttaaatagagtccactctggtagtatgctaggtccaagcaaccaataatcctattcattcattcaactgacttatttatttattcatttacttatttatttactctgtaaataaaaaagtaaaactcagtgttctttgtatttaagtgggtatgctcatgtgaaaaatgaaaatcaccagtctgcaaattgggctt

SEQ ID NO: 554208 - DNA, 1113 bp, Homo sapiens
atcccatctatgtaaatttaaaaaatattgcacatatatatgtgtgtatacatatatatacacatacatatatatatatagtatacacacatatatatagagagattaattataactatatatgtgataaatggtataatatacaacaaccttattatcatgatagtacctctgggaaaggagaagtagatatctgaggaacattttaaaatttttaaatatgggggtgaatacatacgctttgctcttttctgtaggtttaagctacttgacaataaaaattaacatttttttgaaatttgttgtctaaaaaaagaaagctgtagaaattgagacaattagaaggagctgttctagtaagtctaactttcttatttctgagctgagctgagaatatacaaggctgattattttccatcttcagaaagagaaacaatggagacttactgtagaagaaaagactatccttgcaatgagaagtcagtggcacttttggcaaatgaatggtcattttcaggtggaagtgaattatctgaatgtagttatattgagtcctccagctttaaaagaatgtttcaactcatacactatttatttgagttactcttttttttcyttatggggtgtgaatatgaggtttaagggacacagttaatagatgccaagttttcattgtttctacaaatgtttatagagtctggattttggaataacaatttgcacacttacaagtgttgattagctgggcaacattgcaattaatattacttttttaagctcctcgcaaagacttccttttctttcaaaattgccaataaacattttcaaacataatccccaaggagctcattcactgggtgctgggggactccagcaggaaggaaacctactaacattttattaattttggatcatgtgtaattcttaggattaatggcaaggagccagagaggttttttttttttttttttttttttttcattttttaaatcacagtggaaaataagcctgaaacatttcactagtaaggcaagagtcacttaagatatattattaaatatgaggggtagaaataaatcacagacacaagtggtattatacagtgggcatttt

SEQ ID NO: 554209 - DNA, 1113 bp, Homo sapiens
atcccatctatgtaaatttaaaaaatattgcacatatatatgtgtgtatacatatatatacacatacatatatatatatagtatacacacatatatatagagagattaattataactatatatgtgataaatggtataatatacaacaaccttattatcatgatagtacctctgggaaaggagaagtagatatctgaggaacattttaaaatttttaaatatgggggtgaatacatacgctttgctcttttctgtaggtttaagctacttgacaataaaaattaacatttttttgaaatttgttgtctaaaaaaagaaagctgtagaaattgagacaattagaaggagctgttctagtaagtctaactttcttatttctgagctgagctgagaatatacaaggctgattattttccatcttcagaaagagaaacaatggagacttactgtagaagaaaagactatccttgcaatgagaagtcagtggcacttttggcaaatgaatggtcattttcaggtggaagtgaattatctgaatgtagttatattgagtcctccagctttaaaagaatgtttcaactcatacactatttatttgagttactcttttttttctttatggggtgtgaatatgaggtttaagggacacagttaatagatgccaagttttcattgtttctacaaatgtttatagagtctggattttggaataacaatttgcacacttacaagtgttgattagctgggcaacattgcaattaatattacttttttaagctcctcgcaaagacttccttttctttcaaaattgccaataaacattttcwaacataatccccaaggagctcattcactgggtgctgggggactccagcaggaaggaaacctactaacattttattaattttggatcatgtgtaattcttaggattaatggcaaggagccagagaggttttttttttttttttttttttttttcattttttaaatcacagtggaaaataagcctgaaacatttcactagtaaggcaagagtcacttaagatatattattaaatatgaggggtagaaataaatcacagacacaagtggtattatacagtgggcatttt

SEQ ID NO: 554210 - DNA, 491 bp, Homo sapiens
agaaagcaactacttgcagactctcatggggatttactataaacaatggagagctaatttcaaaaacacacttatttattcattaaagcagatycctcaaggattctcccccaggcagcactttgttggcctactttatatttcatgtacacttgggagtaataaaattgcaactttaaagacatcctgtaagtccgtttttttccttttttttcttttatgacattctttgcaatcagtctaattagctgagagatccttgaatatctctgtaagatgggaaactgtaagtctggggaccacaggctaggagttgagccttattaaggaatactctgcctctcaatttcttcctgcaatggtaagtgtcccctttgggaagtgcagacagggtgagaaaggttagaggacaagaacatttgcaaggttgaatcatctgctacttaatggaaggggaaacaggatgaaatactggaaagagcattggcttt

SEQ ID NO: 554211 - DNA, 491 bp, Homo sapiens
agaaagcaactacttgcagactctcatggggatttactataaacaatggagagctaatttcaaaaacacacttatttattcattaaagcagattcctcaaggattctcccccaggcagcactttgttggcctactttatatttcatgtacasttgggagtaataaaattgcaactttaaagacatcctgtaagtccgtttttttccttttttttcttttatgacattctttgcaatcagtctaattagctgagagatccttgaatatctctgtaagatgggaaactgtaagtctggggaccacaggctaggagttgagccttattaaggaatactctgcctctcaatttcttcctgcaatggtaagtgtcccctttgggaagtgcagacagggtgagaaaggttagaggacaagaacatttgcaaggttgaatcatctgctacttaatggaaggggaaacaggatgaaatactggaaagagcattggcttt

SEQ ID NO: 554212 - DNA, 1306 bp, Homo sapiens
tcaattttcatttgcgagagaataagggaaggtgcactctgacaagagggaagttacccagaggaaaaaaatcaacgggatctaggttatgyggttaaaaagtcttcaaatgctagagaagagcattttgtgagtggttgacactttttgtttactaaaaaatatcacctataaccaaaatagcatttcctgtgcaaggcccaaggcatctaggtttcgtttcagggtgagaagagggaccacccgccttgccctgggggaggggaggaagtggtgcagcacagctggcttggaatcttgtcccttctctgccatcattgcgggtgatgctgttgttcatcattgttcataatctgtatctttgcccttctttgatacttgatgtatcaaagatgtagatttctggaagtagaattaccaagtgaaaggaaaggcatgcttatggctcttactatgtattacatgctaagcaactttccacgaaatgtgtaccaattcaccttcccagtgtatcccacagtcacacgcagagcctgcaagatgctaagtgccaacattaaagcatttacaaaattattgcagggtctttggggagtcaggttctttgactgattcctcacataatataacaagatcagaagggattggaaaatttgcaggctctattgaccaagacttgtgaaaaatggagtaacaagcaccccagaccccctgttagctcatactgtaatgttgcaaacattaaaaatcacatcttcctcaaggcactatactccatctgtcggaaaatgatcataataaatatcaaatctacaatgactgcaatggacaggcaggtcctttgagccatgtggtgcacatttgctactctcaagatgtctgccactgcaggtctagaggattctatgccaaagtttatctctgtcactgaaggccagatacacgacagaacctgtcacacctgctggtgcacacactcagtctccctccttcctccaccactccgtgatcgcaccagccaggcactgctcagttagaaaaccctaagcctcgtatttgcctggaaattacagttgcccccagaggtgtctgctttcaaaggtgttccagtctgtgtttcctgccctcttaggttgctccatttagatatcccagcagtgcctcaaatttgtcagaggagacaaatctcattctctctgccccacttctctgtctctctggggatgcttatcatcttggggttgtcaacaaatcatcccttcccttcacgccccaccaccaagctgttgccaaattctgattattc

SEQ ID NO: 554213 - DNA, 1306 bp, Homo sapiens
tcaattttcatttgcgagagaataagggaaggtgcactctgacaagagggaagttacccagaggaaaaaaatcaacgggatctaggttatgcggttaaaaagtcttcaaatgctagagaagagcattttgtgagtggttgacactttttgtttactaaaaaatatcacctataaccaaaatagcatttcctgtgcaaggcccaaggcatctaggtttcgtttcagggtgagaagagggaccacccgccttgccctgggggaggggaggaagtggtgcagcacagctggcttggaatcttgtcccttctctgccatcattgcgggtgatgctgttgttcatcattgttcataatctgtatctttgcccttctttgatacttgatgtatcaaagatgtagatttctggaagtagaattaccaagtgaaaggaaaggcatgcttatggctcttactatgtattacatgctaagcaactttccacgaaatgtgtaccaattcaccttcccagtgtatcccacagtcacacgcagagcctgcaagatgctaagtgccaacattaaagcatttacaaaattattgcagggtctttggggagtcaggttctttgactgattcctcacataatataacaagatcagaagggattggaaaatttgcaggctctattgaccaagacttgtgaaaaatggagtaacaagcaccccagaccccctgttagctcatactgtaatgttgcaaacattaaaaatcacatcttcctcaaggcactatactccatctgtcggaaaatgatcataataaatatcaaatctacaatgactgcaatggacaggcaggtcctttgagccatgtggtgcacatttgctactctcaagatgtctgccactgcaggtctagaggattctatgccaaagtttatctctgtcactgaaggccagatacacgacagaacctgtcacacctgctggtgcacacactcagtctccctccttcctccaccactccgtgatygcaccagccaggcactgctcagttagaaaaccctaagcctcgtatttgcctggaaattacagttgcccccagaggtgtctgctttcaaaggtgttccagtctgtgtttcctgccctcttaggttgctccatttagatatcccagcagtgcctcaaatttgtcagaggagacaaatctcattctctctgccccacttctctgtctctctggggatgcttatcatcttggggttgtcaacaaatcatcccttcccttcacgccccaccaccaagctgttgccaaattctgattattc

SEQ ID NO: 554214 - DNA, 1609 bp, Homo sapiens
cctcagacactcacttctatctccctgtctaagtgtcctgctagcccaaatcccccactccacccacttcagaaagccttgctatgcccacagtaccatttggatcagaaacaggtctctgccaccctgggtaacatccagtgtggcatagcctggttgctctctctaatggcttagggctgggcacatagtaattgctgagtccatggctggcttctgggctgaatctccctgggtgatgcatgcaaagccagggcggaattcyacttccagccctgctataacttgctgtgtggcccagggcaagtcagcccctctctgagcctttctctcttcatgtactttgagggtttggactggatggcccctgggttactttcctctgtaaaattctagctttaattgcaaattgtaaactccaaccttcacaggtcagtgtcaagcagaatatccttccctgatcctgggtaaggcttgactgctgagataggtaataaagtgagaagtgtctgtaaaatggcccagagagggtacagcatcttgtgggggaggagggaccgggcaacctccagaaaggatctttccatggagcgtgggaggtaggaacaaggaaccggaatgacactgagttgccaccctgtgccaggccctgctgtgggtagcctatatgttgtcttgtattcagtgctcacagcctccctgaagtgagtgctcttatcccattttacagatgaggaaagtaagacttctctccaaggtcacaaagcaagcgagtctctgagagagaatcagggcacatgtgcctgatcccaaatattagactctgcccatggtacagagctgtatctcctggcttccctggaccacatgtgcctgggtgcctggacctgtgtcctgtgtcctgtccctgtgctgaacacccgggtgtgcacgtggaggtagggaaggtgtgtgcaggggaattgtatatactcacactatatcaatatctggacatatctcacactggatctggaaagccacatcagagtgtgtgtgtgtgtgtgtgtgtgtgtgtgagagagagagagagagagagagaatatacaagtgagatgaggggaagactgggaaaccacgggggagaaaaaagaaagaatagttgaaagggcagagagggacagagttaatacgcagaataatgagagtgacaatcataacaataataataacaagaataacacaaaccttgcctttttttttttttccaagctgaatgtgagctggagcagggctgaggggattaatctcttaaaaaataagtgccgagtgaggagacaggcagtgattaaggttttaactgatcagtctgcatctgacagtgaaccagctattatcttaacggaatcaaacgaacattcaaagctgtgctcagccccaaacatgaaaggagatgtcatctgctggcagctggcaagccgcagggggagctgaaggggagagaggaatggagggagcggaggagagacagagggggaaagaagagagtcacggtgaaggacacaggaaggtggaggaaaggagggcatgacaggctcctgcggccccgttccctccacccaccagacac

SEQ ID NO: 554215 - DNA, 1609 bp, Homo sapiens
cctcagacactcacttctatctccctgtctaagtgtcctgctagcccaaatcccccactccacccacttcagaaagccttgctatgcccacagtaccatttggatcagaaacaggtctctgccaccctgggtaacatccagtgtggcatagcctggttgctctctctaatggcttagggctgggcacatagtaattgctgagtccatggctggcttctgggctgaatctccctgggtgatgcatgcaaagccagggcggaattccacttccagccctgctataacttgctgtgtggcccagggcaagtcagcccctctctgagcctttctcwcttcatgtactttgagggtttggactggatggcccctgggttactttcctctgtaaaattctagctttaattgcaaattgtaaactccaaccttcacaggtcagtgtcaagcagaatatccttccctgatcctgggtaaggcttgactgctgagataggtaataaagtgagaagtgtctgtaaaatggcccagagagggtacagcatcttgtgggggaggagggaccgggcaacctccagaaaggatctttccatggagcgtgggaggtaggaacaaggaaccggaatgacactgagttgccaccctgtgccaggccctgctgtgggtagcctatatgttgtcttgtattcagtgctcacagcctccctgaagtgagtgctcttatcccattttacagatgaggaaagtaagacttctctccaaggtcacaaagcaagcgagtctctgagagagaatcagggcacatgtgcctgatcccaaatattagactctgcccatggtacagagctgtatctcctggcttccctggaccacatgtgcctgggtgcctggacctgtgtcctgtgtcctgtccctgtgctgaacacccgggtgtgcacgtggaggtagggaaggtgtgtgcaggggaattgtatatactcacactatatcaatatctggacatatctcacactggatctggaaagccacatcagagtgtgtgtgtgtgtgtgtgtgtgtgtgtgagagagagagagagagagagagaatatacaagtgagatgaggggaagactgggaaaccacgggggagaaaaaagaaagaatagttgaaagggcagagagggacagagttaatacgcagaataatgagagtgacaatcataacaataataataacaagaataacacaaaccttgcctttttttttttttccaagctgaatgtgagctggagcagggctgaggggattaatctcttaaaaaataagtgccgagtgaggagacaggcagtgattaaggttttaactgatcagtctgcatctgacagtgaaccagctattatcttaacggaatcaaacgaacattcaaagctgtgctcagccccaaacatgaaaggagatgtcatctgctggcagctggcaagccgcagggggagctgaaggggagagaggaatggagggagcggaggagagacagagggggaaagaagagagtcacggtgaaggacacaggaaggtggaggaaaggagggcatgacaggctcctgcggccccgttccctccacccaccagacac

SEQ ID NO: 554216 - DNA, 666 bp, Homo sapiens
aatcatgtattcttttaaaacttaagattgtaagaagtgttgttctctgttgccacatagtgttagttatacttttgttgagtgtaatamtatattgcctggatataccacaattcatataatcatcttcctgtcatttaacctgtctctgtttgtcatgagtataaaaaattctgcaatgaacatcttcgtgcatacagcttttattatcttgtggattcatttgtttgggctagattcccaggtgggaatttctgagttaaagggtgctattttatttctgaaaaagtttctgatgatctaagtagagatttgaggataaagcagagagaaaggcagatttgcaacagataggagcaaattttaaaatcccgagggagaagcagggctgtgtcacccaggcatagatggtcctctgaacacaggggtgtttggtgctcatctttctaaacctttcttgatgcccccaggcaaagctgctgggcgctgagcaacaagagtgattcagaagcactctgctcagatccactggaggtagcaactccagcctgcgttcagacatagttaccaaggagacctctgcatttcccctcttttccaggttaacagtcctgaatctgagctagatggttgaatagaattagttaaaaatagggagaagaaaga

SEQ ID NO: 554217 - DNA, 666 bp, Homo sapiens
aatcatgtattcttttaaaacttaagattgtaagaagtgttgttctctgttgccacatagtgttagttatacttttgttgagtgtaatactatattgcctggatataccacaattcatataatcatcttcctgtcatttaacctgtctctgtttgtcatgagtataaaaaattctgcaatgaacatcttcrtgcatacagcttttattatcttgtggattcatttgtttgggctagattcccaggtgggaatttctgagttaaagggtgctattttatttctgaaaaagtttctgatgatctaagtagagatttgaggataaagcagagagaaaggcagatttgcaacagataggagcaaattttaaaatcccgagggagaagcagggctgtgtcacccaggcatagatggtcctctgaacacaggggtgtttggtgctcatctttctaaacctttcttgatgcccccaggcaaagctgctgggcgctgagcaacaagagtgattcagaagcactctgctcagatccactggaggtagcaactccagcctgcgttcagacatagttaccaaggagacctctgcatttcccctcttttccaggttaacagtcctgaatctgagctagatggttgaatagaattagttaaaaatagggagaagaaaga

SEQ ID NO: 554218 - DNA, 1152 bp, Homo sapiens
ctgtactaagaaaaattcttctgccttgggatcctgttgatctgtgaccttacccccaaccctgtgctctctgaaacatgtgctgtgtccactcagggttraatggattaagggtggtgcaagatgtgctttgttaaacagatgcttgaaggcagcatgcttgttaagagtcatcaccactccctaatctcaagtacccagggacacaaacactgcggaaggccgcagggtcctctgcctaggaaaaccagagacctttgttcacttgtttatctgctgaccttccctccactattgtcctatgaccctgccaaatccccctctgcgagaaacacccaagaatgatcaattaaaaaaaaaaaaaagcaatggcaaaatgcattcagagtttaaagcacctattccatttggctcaattctatacatgcacagaaacaaagcaaaaaaaaaaaaaggaaactacaacccccacccccacacaaatcgaagaacaaacagaagccattccaggcctcaagtgaagcaaggcatgcgtctcagctctgagaaatccccacccttaagacctgggaaggtcacagccttcaggctggctcaaggggttctccccagcaggaacccaggctgctcctcccgggactgtgcctgacaggtagggagtgctcataagtcacagcggatattatcactacaggggtccctaacatctcagtgaacccccaatgtcggggaaatcgagaaactgggaatgcggccccaaagcctgtaggagaccacgtgtgggcccagagcctccctgctgcctcagaaggccagagagcccacagggcaagcagggcccacggcagagcccgtccagtggaccccaagtcaccctgtcactcagcaaccatatcccggccccaggtggcagaggagggtggccctcaggcgggacagtctccccaggccaccgaggctcctcggcgcttaggcccctcgcatgatcccagagtcacctcacccccaagcactccatgaccccaagtcctctgtcctcagccttctctgctgggctcatttcaggtaggttttttttttttcttcccttctcattttcttgctccctctgagaggctaatgttctaacaaagatgtgctgctggaacgagg

SEQ ID NO: 554219 - DNA, 1152 bp, Homo sapiens
ctgtactaagaaaaattcttctgccttgggatcctgttgatctgtgaccttacccccaaccctgtgctctctgaaacatgtgctgtgtccactcagggttgmatggattaagggtggtgcaagatgtgctttgttaaacagatgcttgaaggcagcatgcttgttaagagtcatcaccactccctaatctcaagtacccagggacacaaacactgcggaaggccgcagggtcctctgcctaggaaaaccagagacctttgttcacttgtttatctgctgaccttccctccactattgtcctatgaccctgccaaatccccctctgcgagaaacacccaagaatgatcaattaaaaaaaaaaaaaagcaatggcaaaatgcattcagagtttaaagcacctattccatttggctcaattctatacatgcacagaaacaaagcaaaaaaaaaaaaaggaaactacaacccccacccccacacaaatcgaagaacaaacagaagccattccaggcctcaagtgaagcaaggcatgcgtctcagctctgagaaatccccacccttaagacctgggaaggtcacagccttcaggctggctcaaggggttctccccagcaggaacccaggctgctcctcccgggactgtgcctgacaggtagggagtgctcataagtcacagcggatattatcactacaggggtccctaacatctcagtgaacccccaatgtcggggaaatcgagaaactgggaatgcggccccaaagcctgtaggagaccacgtgtgggcccagagcctccctgctgcctcagaaggccagagagcccacagggcaagcagggcccacggcagagcccgtccagtggaccccaagtcaccctgtcactcagcaaccatatcccggccccaggtggcagaggagggtggccctcaggcgggacagtctccccaggccaccgaggctcctcggcgcttaggcccctcgcatgatcccagagtcacctcacccccaagcactccatgaccccaagtcctctgtcctcagccttctctgctgggctcatttcaggtaggttttttttttttcttcccttctcattttcttgctccctctgagaggctaatgttctaacaaagatgtgctgctggaacgagg

SEQ ID NO: 554220 - DNA, 1152 bp, Homo sapiens
ctgtactaagaaaaattcttctgccttgggatcctgttgatctgtgaccttacccccaaccctgtgctctctgaaacatgtgctgtgtccactcagggttgaatggattaagggyggtgcaagatgtgctttgttaaacagatgcttgaaggcagcatgcttgttaagagtcatcaccactccctaatctcaagtacccagggacacaaacactgcggaaggccgcagggtcctctgcctaggaaaaccagagacctttgttcacttgtttatctgctgaccttccctccactattgtcctatgaccctgccaaatccccctctgcgagaaacacccaagaatgatcaattaaaaaaaaaaaaaagcaatggcaaaatgcattcagagtttaaagcacctattccatttggctcaattctatacatgcacagaaacaaagcaaaaaaaaaaaaaggaaactacaacccccacccccacacaaatcgaagaacaaacagaagccattccaggcctcaagtgaagcaaggcatgcgtctcagctctgagaaatccccacccttaagacctgggaaggtcacagccttcaggctggctcaaggggttctccccagcaggaacccaggctgctcctcccgggactgtgcctgacaggtagggagtgctcataagtcacagcggatattatcactacaggggtccctaacatctcagtgaacccccaatgtcggggaaatcgagaaactgggaatgcggccccaaagcctgtaggagaccacgtgtgggcccagagcctccctgctgcctcagaaggccagagagcccacagggcaagcagggcccacggcagagcccgtccagtggaccccaagtcaccctgtcactcagcaaccatatcccggccccaggtggcagaggagggtggccctcaggcgggacagtctccccaggccaccgaggctcctcggcgcttaggcccctcgcatgatcccagagtcacctcacccccaagcactccatgaccccaagtcctctgtcctcagccttctctgctgggctcatttcaggtaggttttttttttttcttcccttctcattttcttgctccctctgagaggctaatgttctaacaaagatgtgctgctggaacgagg

SEQ ID NO: 554221 - DNA, 1152 bp, Homo sapiens
ctgtactaagaaaaattcttctgccttgggatcctgttgatctgtgaccttacccccaaccctgtgctctctgaaacatgtgctgtgtccactcagggttgaatggattaagggtggtgcaagatgtgctttgttaaacagatgcttgaaggcagcatgcttgttaagagtcatcaccactccctaatctcaagtacccagggacacaaacactgcggaaggccgcagggtcctctgcctaggaaaaccagagacctttgttcacttgtttatctgctgaccttccctccactattgtcctrtgaccctgccaaatccccctctgcgagaaacacccaagaatgatcaattaaaaaaaaaaaaaagcaatggcaaaatgcattcagagtttaaagcacctattccatttggctcaattctatacatgcacagaaacaaagcaaaaaaaaaaaaaggaaactacaacccccacccccacacaaatcgaagaacaaacagaagccattccaggcctcaagtgaagcaaggcatgcgtctcagctctgagaaatccccacccttaagacctgggaaggtcacagccttcaggctggctcaaggggttctccccagcaggaacccaggctgctcctcccgggactgtgcctgacaggtagggagtgctcataagtcacagcggatattatcactacaggggtccctaacatctcagtgaacccccaatgtcggggaaatcgagaaactgggaatgcggccccaaagcctgtaggagaccacgtgtgggcccagagcctccctgctgcctcagaaggccagagagcccacagggcaagcagggcccacggcagagcccgtccagtggaccccaagtcaccctgtcactcagcaaccatatcccggccccaggtggcagaggagggtggccctcaggcgggacagtctccccaggccaccgaggctcctcggcgcttaggcccctcgcatgatcccagagtcacctcacccccaagcactccatgaccccaagtcctctgtcctcagccttctctgctgggctcatttcaggtaggttttttttttttcttcccttctcattttcttgctccctctgagaggctaatgttctaacaaagatgtgctgctggaacgagg

SEQ ID NO: 554222 - DNA, 1119 bp, Homo sapiens
tcctttcaaagaagataatgtattcacttaaagttgatggarcttatctggttttatcatcattttgatgccccttatcgcaacttatattttgtaatccctacatggcattactcttactctttatcttctatttgcaaatttctatgttacacatgagaattttttaaagaaaacaaaatgggaataactgttatcatgaaaatacagttccatttgcttttcaaatcattcttctgtaagtagtttgtataaataataaaacaattgcttttcatcaaactcatggttttgatcttggagcttttcacttctttttagccagcttaggctaaaattaactatgaaaactaaaatctcaatcactttatgaagctattcatggtatgttctttcactgattattagcatatgaaaatgtaactgattcagtaaagaatttctcttaaaaaaaaaagcaaccattaggtttttagtctctttggggctaatttatgcactgaatatgttaaaagagaggtgaacatccagcatctagcacagcatggctatgtttctactataacaacaagagcaaacattccaataaaaatgaaaaatttcaattatccagggggcttcaaataaccagactacttatgtcttttagcacaacctcttggctaaagtttataatgttatctgagttcttcctgctcatgcttgttaaccaagcacttggaatctgtggtaagttgtattgttcctcatgattgcatggacacatcttgcagtccagagcttaaaaggcagaaacttgcatcccagagtctagcataaagttgatctcagtagatgaggatgaggagaatgtgagtatatcaatgtgtccttcaaggctctaaggaaggggggttgtccaatcttttggcttccctggaccactttggaggaagaattggcttgggccacacataaaatacactaacactaacaatagctgatgagcaaaaaaaaaaaaaagaagttaaaaaatcgaaaaaaaaatcacataatgtttaagaaagtttatgaatttgtgttgggccacattcaaagccatcctgggccacatgtgacctgcaggccaccagttggaca

SEQ ID NO: 554223 - DNA, 1119 bp, Homo sapiens
tcctttcaaagaagataatgtattcacttaaagttgatggaacttatctggttttatcatcattttgatgccccttatcgcaacttatattttgtaatccctacatggcattactcttactctttatcttctatttgcaaatttctatgttacacatgagaattttttaaagaaaacaaaatgggaataactgttatcatgaaaatacagttccatttgcttttcaaatcattcttctgtaagtagtttgtataaataataaaacaattgcttttcatcaaactcatggttttgatcttggagcttttcacttctttttagccagcttaggctaaaattaactatgaaaactaaaatctcaatcactttatgaagctattcatggtatgttctttcactgattattagcatatgaaaatgtaactgattyagtaaagaatttctcttaaaaaaaaaagcaaccattaggtttttagtctctttggggctaatttatgcactgaatatgttaaaagagaggtgaacatccagcatctagcacagcatggctatgtttctactataacaacaagagcaaacattccaataaaaatgaaaaatttcaattatccagggggcttcaaataaccagactacttatgtcttttagcacaacctcttggctaaagtttataatgttatctgagttcttcctgctcatgcttgttaaccaagcacttggaatctgtggtaagttgtattgttcctcatgattgcatggacacatcttgcagtccagagcttaaaaggcagaaacttgcatcccagagtctagcataaagttgatctcagtagatgaggatgaggagaatgtgagtatatcaatgtgtccttcaaggctctaaggaaggggggttgtccaatcttttggcttccctggaccactttggaggaagaattggcttgggccacacataaaatacactaacactaacaatagctgatgagcaaaaaaaaaaaaaagaagttaaaaaatcgaaaaaaaaatcacataatgtttaagaaagtttatgaatttgtgttgggccacattcaaagccatcctgggccacatgtgacctgcaggccaccagttggaca

SEQ ID NO: 554224 - DNA, 1151 bp, Homo sapiens
attcaaggactgatagagttgtggttattggtgcttgtgaaatgacatgttggtatggttcatagtcatttctgatgaaacctttagaacctgacatggtctaccatgcatatctatgtatttctacatacgcatatctacgtcaaacagataatagtcagtattaargaaacctaaaagaacatacatatagaaactacattaatcaaagtaagcagtagttacaagcttaacattacaatcaaaagtactgggtactaactccacaactgtaggcatatgaaagacaggctgttaacccagctatattttaccttatagagattgattcaagtatatacaaataatagtgctcaaagtccatatagtaggctcatgcctgtaatcttagcacactggaaggtcaaggtgggtggactgcttgagcctaggagttggagaccagcctggccaagatggtgaaaccctgtctctactaaaaatacaaaaagtagttgggcgtggtggcatgcgcctttagtcccagctactcaggaggctgaggcacgagaatcgcttcaacacaggaggcggaggttgcagtgagctgacattgcgccactgcattccagcctgggtgacagagcgagacttggtctcaaaaacaaacaaacaaacaaaaaccaataaaacaaagttcatagagtagaagtcagaggttaggggaaggatccaagagtaacaaggagagtttaggagaaaagaacttttgaagaaagaaatgaaaaatactctatcctaattacagagtatatagagagattagtaaatgatataactatttgctatcaaggttttactcaaaaagaaggtgggagaaataaaaagttttgataggttggggacagtggctcaggcctataattgcagcactttgagaggccaagatgggaggactgcttgagcccaggagatcgagaccagcatgggcaaaacagcgagaccctgtctctactaaaaattaaaaaattagctgggtgtggtggtgtatgcctgtagtttccagctgcagttatctatgatcgtgccactccagcctgggtgacaaagcaagaccctgtctcaaaaaaaaaaagttttgattaaaaaccagcagcatagccttatcaaac

SEQ ID NO: 554225 - DNA, 1151 bp, Homo sapiens
attcaaggactgatagagttgtggttattggtgcttgtgaaatgacatgttggtatggttcatagtcatttctgatgaaacctttagaacctgacatggtctaccatgcatatctatgtatttctacatacgcatatctacgtcaaacagataatagtcagtattaaggaaacctaaaagaacatacatatagaaactacattaatcaaagtaagcagtagttasaagcttaacattacaatcaaaagtactgggtactaactccacaactgtaggcatatgaaagacaggctgttaacccagctatattttaccttatagagattgattcaagtatatacaaataatagtgctcaaagtccatatagtaggctcatgcctgtaatcttagcacactggaaggtcaaggtgggtggactgcttgagcctaggagttggagaccagcctggccaagatggtgaaaccctgtctctactaaaaatacaaaaagtagttgggcgtggtggcatgcgcctttagtcccagctactcaggaggctgaggcacgagaatcgcttcaacacaggaggcggaggttgcagtgagctgacattgcgccactgcattccagcctgggtgacagagcgagacttggtctcaaaaacaaacaaacaaacaaaaaccaataaaacaaagttcatagagtagaagtcagaggttaggggaaggatccaagagtaacaaggagagtttaggagaaaagaacttttgaagaaagaaatgaaaaatactctatcctaattacagagtatatagagagattagtaaatgatataactatttgctatcaaggttttactcaaaaagaaggtgggagaaataaaaagttttgataggttggggacagtggctcaggcctataattgcagcactttgagaggccaagatgggaggactgcttgagcccaggagatcgagaccagcatgggcaaaacagcgagaccctgtctctactaaaaattaaaaaattagctgggtgtggtggtgtatgcctgtagtttccagctgcagttatctatgatcgtgccactccagcctgggtgacaaagcaagaccctgtctcaaaaaaaaaaagttttgattaaaaaccagcagcatagccttatcaaac

SEQ ID NO: 554226 - DNA, 1151 bp, Homo sapiens
attcaaggactgatagagttgtggttattggtgcttgtgaaatgacatgttggtatggttcatagtcatttctgatgaaacctttagaacctgacatggtctaccatgcatatctatgtatttctacatacgcatatctacgtcaaacagataatagtcagtattaaggaaacctaaaagaacatacatatagaaactacattaatcaaagtaagcagtagttacaagcttaacattacaatcaaaagtactgggtactaactccacaactgtaggcatatgaaagacaggctgttaacccagctatattttaccttatagagattgattcaagtatatacaaataatagtgctcaaagtccatatagtaggctcatgcctgtaatcttagcacactggaaggtcaaggtgggtggactgcttgagcctaggagttggagaccagcctggccaagatggtgaaaccctgtctctactaaaaatacaaaaagtagttgggcgtggtggcatgcgcctttagtcccagctactcaggaggctgaggcacgagaatcgcttcaacacaggaggcggaggttgcagtgagctgacattgcgccactgcattccagcctgggtgacagagcgagacttggtctcaaaaacaaacaaacaaacaaaaaccaataaaacaaagttcatagagtagaagtcagaggttaggggaaggatccaagagtaacaaggagagtttaggagaaaagaacttttgaagaaagaaatgaaaaatactctatcctaattacagagtatatagagagattagtaaatgatataactatttgctatcaaggttttactcaaaaagaaggtgggagaaataaaaagttttgataggttggggacrgtggctcaggcctataattgcagcactttgagaggccaagatgggaggactgcttgagcccaggagatcgagaccagcatgggcaaaacagcgagaccctgtctctactaaaaattaaaaaattagctgggtgtggtggtgtatgcctgtagtttccagctgcagttatctatgatcgtgccactccagcctgggtgacaaagcaagaccctgtctcaaaaaaaaaaagttttgattaaaaaccagcagcatagccttatcaaac

SEQ ID NO: 554227 - DNA, 1562 bp, Homo sapiens
tgtctacaaaccaacaaagtttataaaaattaatattcagctctcatgagcactattagctttctccatcacaccrctggaaaggtactttcctaagtattaatttggggttgagcagagtgttagagaactagaaacatgtgcataataaggatgaggagaggcaatagagattgttgttgagggagctgttgaaatgatagaagaaagtatgtggtgtgtgtctgcatatgtgtgtgtagcagacaattcctcacaatgttatagactaacacagtcactaattagcataatgtggctgagaatttaaaaaaaacttgtggcaatattttaataccaagatgacaatacaattatttcattatcaacactcactgaatcttatgtactaggtaagcactggtgataaaagcatgacaccagacttaggtaccagttgtgtccttattttacatagcaaacatagccacaggataatatacaacctcttgaagatcaggctgttgtaaactgggttaatagatctgggtttcaacacatagagtcaattatgagaatattcactgctaaacatttgaatcaactgtgtacatattataacaaatttaaactttattctataaaaatagaatgaaacaacattgaaaactatgtgccaaggctcgagacaatgagtgcagtaacgtggtagtattatcagttcagttgtgaatcagtaagacctaaattaagatgatgatattagcaataaaaataaacgatgtataaaagacatctctacttcttttgggctaatggtcaaatgcctccctttcctccatttttattgtaaaaacatattaaaatgttttaagttgagtaaatacaagcaaatgaaaataatcgctcaaatctcataatcgtaatttttatatattacttatgttttaattttttccacatgcctccatacatacatacattggcactttctcaatgtaaaaaataattacttaaacaattataacatgtcatgttttttttcatttggtgacatggtcttcagtcatatcattttaatgattgcaaaatatatacattcttctatgaggaatacatatcatgaatatattatgatttattttatatatatatatacacactataaatatatggcaatgtattcttccatgaataatatatacagtaatctaatttcaaaataatggttatttcaacatttcaccaataaaaataactaatgaagatctttatgcatacacacacatatatttttgggggttatctctgtagacaatttatgcagggaaatatttttctaggcaaaattttcatgtcaaatgagtattttagctcactactgtttacctcactagcaggcagtaacatgcatattaaaatagtgaagcataattttaccaaaatttttttcataaaaaagataaaaattttctattgaaaatagcaatatccagtagcgatgaacatgcagtcaaatgagcacatggttacaatctcgattggtctgcaatttgtgaaaacttgccaaaatgtagaaaacg

SEQ ID NO: 554228 - DNA, 1562 bp, Homo sapiens
tgtctacaaaccaacaaagtttataaaaattaatattcagctctcatgagcactattagctttctccatcacaccactggaaaggtactttcctaagtattaatttggggttgagcagagtgttagagaactagaaayatgtgcataataaggatgaggagaggcaatagagattgttgttgagggagctgttgaaatgatagaagaaagtatgtggtgtgtgtctgcatatgtgtgtgtagcagacaattcctcacaatgttatagactaacacagtcactaattagcataatgtggctgagaatttaaaaaaaacttgtggcaatattttaataccaagatgacaatacaattatttcattatcaacactcactgaatcttatgtactaggtaagcactggtgataaaagcatgacaccagacttaggtaccagttgtgtccttattttacatagcaaacatagccacaggataatatacaacctcttgaagatcaggctgttgtaaactgggttaatagatctgggtttcaacacatagagtcaattatgagaatattcactgctaaacatttgaatcaactgtgtacatattataacaaatttaaactttattctataaaaatagaatgaaacaacattgaaaactatgtgccaaggctcgagacaatgagtgcagtaacgtggtagtattatcagttcagttgtgaatcagtaagacctaaattaagatgatgatattagcaataaaaataaacgatgtataaaagacatctctacttcttttgggctaatggtcaaatgcctccctttcctccatttttattgtaaaaacatattaaaatgttttaagttgagtaaatacaagcaaatgaaaataatcgctcaaatctcataatcgtaatttttatatattacttatgttttaattttttccacatgcctccatacatacatacattggcactttctcaatgtaaaaaataattacttaaacaattataacatgtcatgttttttttcatttggtgacatggtcttcagtcatatcattttaatgattgcaaaatatatacattcttctatgaggaatacatatcatgaatatattatgatttattttatatatatatatacacactataaatatatggcaatgtattcttccatgaataatatatacagtaatctaatttcaaaataatggttatttcaacatttcaccaataaaaataactaatgaagatctttatgcatacacacacatatatttttgggggttatctctgtagacaatttatgcagggaaatatttttctaggcaaaattttcatgtcaaatgagtattttagctcactactgtttacctcactagcaggcagtaacatgcatattaaaatagtgaagcataattttaccaaaatttttttcataaaaaagataaaaattttctattgaaaatagcaatatccagtagcgatgaacatgcagtcaaatgagcacatggttacaatctcgattggtctgcaatttgtgaaaacttgccaaaatgtagaaaacg

SEQ ID NO: 554229 - DNA, 1562 bp, Homo sapiens
tgtctacaaaccaacaaagtttataaaaattaatattcagctctcatgagcactattagctttctccatcacaccactggaaaggtactttcctaagtattaatttggggttgagcagagtgttagagaactagaaacatgtgcataataaggatgaggagaggcaatagagattgttgttgagggagctgttgaaatgatagaagaaagtatgtggtgtgtgtctgcatatgtgtgtgtagcagacaattcctcacaatgttatagactaacacagtcactaattagcataatgtggctgagaatttaaaaaaaacttgtggcaatattttaataccaagatgacaatacaattatttcattatcaacactcactgaatcttatgtactaggtaagcactggtgataaaagcatgacaccagacttaggtaccagttgtgtccttattttacatagcaaacatagccacaggataatatacaacctcttgaagatcaggctgttgtaaactgggttaatagatctgggtttcaacacatagagtcaattatgagaatattcactgctaaacatttgaatcaactgtgtayatattataacaaatttaaactttattctataaaaatagaatgaaacaacattgaaaactatgtgccaaggctcgagacaatgagtgcagtaacgtggtagtattatcagttcagttgtgaatcagtaagacctaaattaagatgatgatattagcaataaaaataaacgatgtataaaagacatctctacttcttttgggctaatggtcaaatgcctccctttcctccatttttattgtaaaaacatattaaaatgttttaagttgagtaaatacaagcaaatgaaaataatcgctcaaatctcataatcgtaatttttatatattacttatgttttaattttttccacatgcctccatacatacatacattggcactttctcaatgtaaaaaataattacttaaacaattataacatgtcatgttttttttcatttggtgacatggtcttcagtcatatcattttaatgattgcaaaatatatacattcttctatgaggaatacatatcatgaatatattatgatttattttatatatatatatacacactataaatatatggcaatgtattcttccatgaataatatatacagtaatctaatttcaaaataatggttatttcaacatttcaccaataaaaataactaatgaagatctttatgcatacacacacatatatttttgggggttatctctgtagacaatttatgcagggaaatatttttctaggcaaaattttcatgtcaaatgagtattttagctcactactgtttacctcactagcaggcagtaacatgcatattaaaatagtgaagcataattttaccaaaatttttttcataaaaaagataaaaattttctattgaaaatagcaatatccagtagcgatgaacatgcagtcaaatgagcacatggttacaatctcgattggtctgcaatttgtgaaaacttgccaaaatgtagaaaacg

SEQ ID NO: 554230 - DNA, 1767 bp, Homo sapiens
gataatatttgtagttctactttatattaataaaatatatttttgtccaaatatatctttaaagatgaaatttgtgatttttttcaatgacaagttctgctatraaacaaatactttaaagttgctccactgtcctgagaatattaattttccaatttcaataaaaagagcagatggttaacattaagagtgatgaaacaggagatttaaatggttttacaataaaaaatgaaaacaaactcagttcatcattagttaaaagttacacaattgatctatcaccttcatattccaaaaatgtatacatatgcctggtaagaaggtaaatttattttctgggtgtggaatacagaagaacttttaaagggagaaaatattttagaaaggagaactcactatgcataaataaatttagaacatagctatcattcaataaatgttaattaaatccagatatttaatttgaggcataaaaatatcaaaaagaccatgtgtcttattttatttccagctttagatgaccgatttcctacaaacttattaaaagtttatagagaatttgttcatttgtttttattttagttttctacagatgaattatgtttcagaaaatgccaaacctgaatttcagtctcaaatcctctaccatctttttcacctaatacaacttatttaaatttgtcctgtcttctcaagtgtaaggtggaaatatgcttaattcagaatgttgagatatcaaatgacaaatgccttcaaattggtccacagtaggaactcacaaacattctatctttttcctattgcttttcttgactaacctatcaggcaggtgatcctatgacacatagagcaaaaatctgtccatgtcctcaaaaaccattatcaatattccattgtcaatgaaatctgagttctctatagatgcttatcttcttagcctgtttatcttatctttgatggcaggagttatgttctagatgttacttgtattattatagtatgtggtccaatattcatttactaaaccaagctgtttttatctctgaattttctgtaatattgataaaaacttcctttgcttgaacttccagaaaattccaagtctatgttagaaagccatacaaaattaaattctacttttgaaaataagccttcagactaagtgaattgtaattatttgtgtatatttcctggtcttttatcttcaatcaacacttgttataaaatgaactttcattagacaactgacattagacaagcttcactaaaagtatcattaattttgattttatttcttaaataaaaagcctgtggataattaaaacccttgtatatcatttagaagaagctctaataccatggattgttcgaatactcataaaatatataaagaaaagatggcatatttcaaaatcttgaaaacattgtctttattaattcatttacatatcattttaatcttatttaaattatatttttattttaaaaaatcacttcaagtcttctgatgttagtatttgtttgtttatttttaaatacttattgaaccctttgaatgtgacaagtgtggtttataatcctggaaattcacttgtgaataaacacaaatatttctgtactcatgtagaattggatatttttttctcattttcatagtgacaattttttctaacttattaaaacataaatgcatgttacaaaatattaatggagaaagcatgtaaaatgccactaaatgtaaattttctgttacagcttcgttatacc

SEQ ID NO: 554231 - DNA, 536 bp, Homo sapiens
tcagtgatcagttctgatatccagctccaaagcaccactctaagtttcccttcccactctccttcactcctcctgatctttattcctcaaaagcctattttagtcttattactactactaatcagagtgaagaatccagtgctatactctacattgctgctttccttattggttcagctatacatcatactctttaggagtaaaattcttgtcttcaacatatccaacaaatccttcagagcattaatattgagctttatgttcaggagacccttagtaagtgtggacagtgtggtagcatattccatgarctaaaaatggcagctggtgtgatgaattccatatatgtgtgtatacatatattaaatatacgtattatatataacttatacatatatgtttatacatatatgtgtgttacatatgtttatatacatatacattttttctatatacacacgtgtatgtgtatgtgtgtatatatatatacatagatacgtatatatatacacatatatatgtgtatatatatacac

SEQ ID NO: 554232 - DNA, 1912 bp, Homo sapiens
tgacaggggccaggaaggtatttaaactgcagggtatgtgtactatttgtcattcactatactcttcctccctgagtgcactggtaaaagtttggcctgaatcctccatgcatgacagagatgtacttttctgggatacaaagtgaaatgagtatgcctcgtattgtccagggcacgatttcttcatattacaaccttaagatattttaaattgtataactggaatcttttactctggaagaatagccagtgtacatataggttatcctttcttttaatccattaaagtccatacccatttcatgactctgcatggcatctgtaatcttggggtcagggagggagaaaccaaggtgtatgctaagactcttctgtcctcagcaaccctcttaacccaggtactgcttagattgaacaggccgtggtaactgataagcaacatctgctcatttcctcattgttcactctcatacatgactatgcataaactagtgtcattttctagaattccataggttccactaactctatttctgatgacaaacttgtttgtctttttttctttcgaaaccttatgtttcagatgaatttaaatgtagtccctgtttttcatttccagacacaaaaagagacaatggcttcctcttttcaaactgctttagaatattcttttgttcagaatctctttcaaaatgttgaggtttggttgtctttggtggtgtcccagaatgatggtttacatcatcccgctctcaacctctccccccatgcacaagctttgctttcctagaatataaccactctgctctggtgagcctcaaaagaaaaattctgattttaaaaatctaaagctttaattacttttactatttaaaagccattttccattataaaatttatcatataaatttgtctagttttgtctttaacctttttgctttgacctttgaacataccctgttatcaatgtttttgctattaaagctccttttgtttctttgcattttaatcactgttttgtttcatttgcaaactgactccgttcactgcttagtcctctgttttggttcttttattgtgtccccatgctgaatttcagacactgcaaaatgtgagccctgaaaagggcctttgcatttaccctattcaggagtgcaggatcattaaccaccacaaaataaaaactagttccaacttcctctgccatcagggatagaaagcagtggggaagctctgagagggaaggtagactagagccaaagggaaagcataggtcccggtagtgcttcacctggatatggatgtgtgtgtgtgtatggaatggtagtgtccttgcatgtggagttcccataagttccctagaagagttacagtaacagcagtcacgtgaaacttagcaaggagaccttgaagattttaaaaactcttaggcagccctgaagtgggtcctcagtttacacaytgatagcccaggcaactcacccaaagccacatgggagtaaacactagagattcagcatggcaacccagatcccttcctctaatagtaggatactagcaaatactatttgcaaatactatttgctaatactatttgtgaatactatttgctaatactagcaaagcaacatttccaccttattctttggcttttactttttctcttgtgaatttagttctatgaaatcttgtttcagcacacatcttaattatggctggctctgacagttctgtctcaagtccacaacttcaacagactttatacccacacacaagatctatatatccacgccaaaggtcaggtgtgataataatgaagagggaattatcatttttaatgataagctacccacacttgttactatactttgcaagcacatattataattttcataggcaaagacatattatc

SEQ ID NO: 554233 - DNA, 1912 bp, Homo sapiens
tgacaggggccaggaaggtatttaaactgcagggtatgtgtactatttgtcattcactatactcttcctccctgagtgcactggtaaaagtttggcctgaatcctccatgcatgacagagatgtacttttctgggatacaaagtgaaatgagtatgcctcgtattgtccagggcacgatttcttcatattacaaccttaagatattttaaattgtataactggaatcttttactctggaagaatagccagtgtacatataggttatcctttcttttaatccattaaagtccatacccatttcatgactctgcatggcatctgtaatcttggggtcagggagggagaaaccaaggtgtatgctaagactcttctgtcctcagcaaccctcttaacccaggtactgcttagattgaacaggccgtggtaactgataagcaacatctgctcatttcctcattgttcactctcatacatgactatgcataaactagtgtcattttctagaattccataggttccactaactctatttctgatgacaaacttgtttgtctttttttctttcgaaaccttatgtttcagatgaatttaaatgtagtccctgtttttcatttccagacacaaaaagagacaatggcttcctcttttcaaactgctttagaatattcttttgttcagaatctctttcaaaatgttgaggtttggttgtctttggtggtgtcccagaatgatggtttacatcatcccgctctcaacctctccccccatgcacaagctttgctttcctagaatataaccactctgctctggtgagcctcaaaagaaaaattctgattttaaaaatctaaagctttaattacttttactatttaaaagccattttccattataaaatttatcatataaatttgtctagttttgtctttaacctttttgctttgacctttgaacataccctgttatcaatgtttttgctattaaagctccttttgtttctttgcattttaatcactgttttgtttcatttgcaaactgactccgttcactgcttagtcctctgttttggttcttttattgtgtccccatgctgaatttcagacactgcaaaatgtgagccctgaaaagggcctttgcatttaccctattcaggagtgcaggatcattaaccaccacaaaataaaaactagttccaacttcctctgccatcagggatagaaagcagtggggaagctctgagagggaaggtagactagagccaaagggaaagcataggtcccggtagtgcttcacctggatatggatgtgtgtgtgtgtatggaatggtagtgtccttgcatgtggagttcccataagttccctagaagagttacagtaacagcagtcacgtgaaacttagcaaggagaccttgaagattttaaaaactcttaggcagccctgaagtgggtcctcagtttacacactgatagcccaggcaactcacccaaagccacatgggagtaaacactagagattcagcatggcaacccagatcccttcctctaatagtaggatactagcaaatactatttgcaaatactatttgctaatactatttgtgaatactatttgctaatactagcaaagcaacatttccaccttattctttggcttttactttttctcttgtgaatttagttctatgaaatcttgtttcagcacacatcttaattatggctggctctgacagttctgtctcaagtccacaacttcaacagactttatacccacacacaagatctatatatccacgccaaaggtcaggtgtgataayaatgaagagggaattatcatttttaatgataagctacccacacttgttactatactttgcaagcacatattataattttcataggcaaagacatattatc

SEQ ID NO: 554234 - DNA, 740 bp, Homo sapiens
ccatcccctcacgttctcaccccaggcccagaagtaggttgcaactgcctttggaagattttgccccttagccatccccacccacttgtaccagctaagaatgctggagactctgccaccatgctctgcgtgcccctgaacctctgtgcagcccggaaggctgatgtacaggtgtacctcaatccacattacagccatgctcctaatgtacatggacatttttgtaactcagctcatattctgactgtatttgagaagctggctgtttaagggaacccagaagtgaattcttttgtaaagtaaagcacccttttgtaatgcaattaattatcccttaatgtatctgttttgtaagtctgcatttttgtatatcggrtttaccttaagcttctctagtgaggcattctgagcagtggtgatcacatgccagatcgccctgcctatccacaaagtagatgaccaatgcacgctcctcaaacatctttggaggaactacctggccaaaacactggccaggatgcagcaagcagcagcaggggctgacagcaggcttactgccatcaacattgcttgaaatgcctctatgttctgaataaagaaaaaccataattgcttgtggtgaaacgaagcagtcttcatgttaagtagcaatggttatttttattggtagtaactgaacagtgttttgcaatttgtgaaacagtgtattgtgttttgtaaaatgatgtcatgaaatggtg

SEQ ID NO: 554235 - DNA, 1306 bp, Homo sapiens
agccaacttagatttaaatcacttactctgactgtgccaatgtgattttgggcaagtccctgtctttgagtctccgcatcttcatctgtagagtgagaaaaccaatacctacctcacttattgtttggagagcaaaagaagaaaacaaacatgtaaaatgtgtgacatcaagtacatctgccctccttgtgagagggagcccactatcacacacagaccatggtgccaaattcctatgagttcttacattttatcttaatgcttcttgggcagtttacattcagcttcctaacatatttgcatatattttattacaaattacgtttttaattacatactgctgaaaaaagtgggagaaggaggcttacatttcctggtcatttctttgagtaaaatgagccctctttcaggaagatgtaagccatctattttgtggttttgcatacccaagcacacaagagtatgtctctcagcataaccatactctagttggaaaaaactgggtaagagtctttatgaatggtagaaagaaagataagagtctttatgaatggtagaggtgataactcattcaagggggtgttggggatgtgaagcctggccagctaatcgtggaaggctgtgaaaagatgacagacacccgaaggactgcagacgtcagctcccactcactccaggatgctaacaaggcctcatttcctccttctgtctccctttccagcccttcatgggagacaattattgtgatgccatcaacaaccgagccttttgcaactatgacggtggggattgctgcacctccacagtgaagaccaaaaaggtaggccagtgtgcactcctcggcagctgcctcctgcccacttctccagcttgtggggccaggatcactccttcatggctggacaacccttgtcctaactctgccagcactgtccacacgctttatttctttttttaatttttattcttttggtcagtagttgaactaatatcataggctgggccctggttgatttttgcagatgtggttctcaaagcttagaattgggtacggaagcaggtaataaaactgcaataagtactttcggaaaggaaggacaaagtgcttggggggctaggcaaggggtcagagaaggcactstagagcaagaggcatctgcactgaaacttgagggataagaggaaggggtgaggaggtggtcaaaagaacggtgtctggagcaggagactggcatgtaaaatcccagtgagaacacacatttttagggggtagggctgaagtctaggaaacagaaaatagtacatc

SEQ ID NO: 554236 - DNA, 1306 bp, Homo sapiens
agccaacttagatttaaatcacttactctgactgtgccaatgtgattttgggcaagtccctgtctttgagtctccgcatcttcatctgtagagtgagaaaaccaatacctacctcacttattgtttggagagcaaaagaagaaaacaaacatgtaaaatgtgtgacatcaagtacatctgccctccttgtgagagggagcccactatcacacacagaccatggtgccaaattcctatgagttcttacattttatcttaatgcttcttgggcagtttacattcagcttcctaacatatttgcatatattttattacaaattacgtttttaattacatactgctgaaaaaagtgggagaaggaggcttacatttcctggtcatttctttgagtaaaatgagccctctttcaggaagatgtaagccatctattttgtggttttgcatacccaagcacacaagagtatgtctctcagcataaccatactctagttggaaaaaactgggtaagagtctttatgaatggtagaaagaaagataagagtctttatgaatggtagaggtgataactcattcaagggggtgttggggatgtgaagcctggccagctaatcgtggaaggctgtgaaaagatgacagacacccgaaggactgcagacgtcagctcccactcactccaggatgctaacaaggcctcatttcctccttctgtctccctttccagcccttcatgggagacaattattgtgatgccatcaacaaccgagccttttgcaactatgacggtggggattgctgcacctccacagtgaagaccaaaaaggtaggccagtgtgcactcctcggcagctgcctcctgcccacttctccagcttgtggggccaggatcactccttcatggctggacaacccttgtcctaactctgccagcactgtccacacgctttatttctttttttaatttttattcttttggtcagtagttgaactaatatcataggctgggccctggttgatttttgcagatgtggttctcaaagcttagaattgggtacggaagcaggtaataaaactgcaataagtactttcggaaaggaaggacaaagtgcttggggggctaggcaaggggtcagagaaggcactcyagagcaagaggcatctgcactgaaacttgagggataagaggaaggggtgaggaggtggtcaaaagaacggtgtctggagcaggagactggcatgtaaaatcccagtgagaacacacatttttagggggtagggctgaagtctaggaaacagaaaatagtacatc

SEQ ID NO: 554237 - DNA, 1124 bp, Homo sapiens
gaagaatggatgcagaggggctggtttatttattacacaacacaatcgcatggagaggcagcagcacagtggctactgacatggtagggaacctgcctgccgggctcagacatcagccctgccacacaccagctgggagacattgggccagttatctacctctcttggccttgggttttctcatccataaaatggggatgataacmataaatgagttaatatctgtcaagcacttagaacccagcctggcacatggtaaactcaaagtaagtatttgttaaataactaaactcaaaataagtaaataatggtaacctttattgagtactcactgtgagccaggcactgtcctaagctatttacctgtattcatggattgaaatgaacatttaataaaaatgaatatgggctttgagcagggcttacagattaaactagaagcacaaagtgttcatggtcctttatttttcctcaaagcggcaatatcaaaagatctaaacattcggcggggggtgaggggtgtcacctgtgctgggaggcaccaaaaccctctgaaccgaatgaaagcagagaaagccttgtgccccttatcaacccatgagtgttgatttagaatctaaagctctaattcttcagtttttagccagacccactaattctctcccaaatcatattacatctaggggtaagcaccaaatacaataccccagaattctgcccttctttccccagcaccccacgtaaacagtctgatggttttggctcgtaccagtctagtgatggggagctcacccctgctgggggaagatgtgctcaaccagtggacttcctcgcatctactgaacagaaatctacaattttccccactgccctacctgttcctggagccccgccagccacatccattgtttctgccccttgacagccttccagagattgaagacctcttaactcaggaccatgggatggctccactggggggtgggggtttcttgtgtgacttggtttcccatgtcctccccattttggttgcccatgtgctccaagctctccccatcttccaggttatactcgaactctgcagatgggggctgagaactcctcagcagagcaggtccccaaaa

SEQ ID NO: 554238 - DNA, 817 bp, Homo sapiens
aagaggaaacaaagtggataatattaatgtttatgcacaactgcatgccatttgcagcaaataaatatggcaaactcgaaaaagaagaaaagaaataaaaagacccaaccattctttttttcccagggcaattattccctttcctttaattttcaaaaaaaattaaaggaaaatattttttaattactgaaaaacaataattaraaagtttctattcttcttaagttttctgaccactccttttgattgcatgttttcaagtatacactgagtgcacatttatttcaaaagaaaattatgatttggcttgtctaacagtgctaagaaggaatactaatacagtaaaatactgacttgaattcctcaatacttacttaaacacctccaagacaggatggcatttttcctgaaggtaaaaggtacaaagcaatgaaaattcaaattgtagaagaactatttcataactatgacatgatattgtcatactaacacataggtgattttcctctataaaaaaaaatctttggaaagaatttttagctgaaatatgggccaaaatggcaagttttccttgaaagcaccagatgaaataatattttataaatacatatatatatatgtatatataaaatgtaaaaatccaattatcaatgttttggttttggttgttaccttttgttgcaatgatataatgctctctagggccagtgtaaagaagcgaagatcaaagaactaaattcttacatgtcaggttttccaaaccatcatcactgcaacaaaataatttgtcaaattgtcaaaatttacaggcatccca

SEQ ID NO: 554239 - DNA, 571 bp, Homo sapiens
acttcctaaatcaagttttataataaaccctctataaatgagaatgagagcactttcacatctgctactcacgacaaaaaggaggggccagtgttataatctagctgtatttgtaggagacaatgacgttgagaggttaaatgatttgctcaataatgctaatgagaaacaaagcggggaccgaaccaaaacccagggctcctccagcaccaacacactctaacttcattycttacaatcaaagatttcacaggtcaccatttcctccatttcttaattaatgggcattgttattgctccccaaacttaccctctttctttttttttgagacagaggcttgctctgtcaagtgccatattggccaggcagtccttgaactcctgacctcaagtgatctacccaccttggcctcccaaattgctgggattacaggtgtgagtctcagctcccagcccctctttattatactatgtacacacacataaaaacacacacacacacatttctgaaatggtaatgtgactggtatattgaatgagttgaactctatagggtgtaagtagaaaaaat

SEQ ID NO: 554240 - DNA, 571 bp, Homo sapiens
acttcctaaatcaagttttataataaaccctctataaatgagaatgagagcactttcacatctgctactcacgacaaaaaggaggggccagtgttataatctagctgtatttgtaggagacaatgacgttgagaggttaaatgatttgctcaataatgctaatgagaaacaaagcggggaccgaaccaaaacccagggctcctccagcaccaacacactctaacttcattccttacaatcaaagatttcacaggtcaccatttcctccatttcttaattaatgggcattgttattgctccccaaacttaccctctttctttttttttgagacagaggcttgctctgtcaagtgccatattggccaggcagtccttgaactcctgacctcaagtgatctacccaccttggcctcccaaattgctgggattacaggtgtgagtctcagctcccagcccctctttattatactatgtacacacacataaaaacacacacacacacatttctgaaatggtaatrtgactggtatattgaatgagttgaactctatagggtgtaagtagaaaaaat

SEQ ID NO: 554241 - DNA, 600 bp, Homo sapiens
gaccgggggtgtccagaaacatcctgtccctggatggaaactaggtctcgttgggatttttttttctttttttgccgtgttagttaggaaattatttattaatttacaaggcaggttttatctcagccaaggtgggaaatggtgtccctgtccctcccaaagcacagagcacagaaatgaggctgtttacatcgcgagtctctgcgctggtgtttaagtcattaaaaagatattcgaaaaaaaaagtctctaaatacaggtttatggaatatttcataacagctttaaggaactatcatggtacactgggaaagtcacccatattgcaggatagatttcttctgttggctgacgagcatttgtttatagtcggccttgactctactctaccacaattttatatgtagttcttttatttttttaaaagcaacattttgggacaaaatatcgtgaacaaataaggaatactactatatttgtgaaacsccttgttaatttccaagtgatattttaaatcttgaataagacatgtatgctcgtaaataaagagggaaaagaaataattaaatcgatgttcataagagcttctcagaaaataag

SEQ ID NO: 554242 - DNA, 1600 bp, Homo sapiens
acttaactctttagtttcagaaggtattaaataattattggttgtatatctttgaaaacatgtttgatgtagtcaaagctcttaatagggataatagctgtcatatatgcacaactttgaaacagaggtttaacacattcaatctgtggctttgcttaaagagatggacaatagcaagttctactctggtgaattacagcacagtcccatgaacagcctttccaaagattatgaaataccccagtagtatgctcaaagactggttctcattactgggtacagaatgctcagtttggtgcttgagtgcatttttatgttggtatacagcacctgaccctctgtctgtcttcaagcataatggggattgtcatgtaggagagattaggaaatttttgtatggattcagagggcagaactggtaataactggtcacagtgagacttttgactcagtattctgaagatctttctatgaatatagcagtgccctacactacatgagctgacttgaatagcgagttacctgctagtgaagtgttttttttttaagagaagctgaaaaaatgacaataaaagcagctagtattcttgaatttctaccacatgcatgacatgtggcaagtgcattatacccacatatcttataatggactattcttactgaggatgttcttttccaatgagggaaaagaggggtgagaggtaaaataatttactcaaggaaacactagaagtagtaaatgctggctgaggatccgaatgcccacagcctgccatcttagtcattatactctgctgcctgggagtggcgctggccaggtagttcatcattgttaaggaattaagaatcagaaaagaatgggctctccgtccttgttccacctaaagctgtaagattagctattttttgtacatgacaaatcctatacaacttccgctcaccagcacaagttatttcttgtgatgttagtgccgtattagtacatgatcatcaaatatatgtaagttacagaattgccaacagatatatttttttcttttttagagacrgggtcttgctctgttgcccaggctggagtgcagtggtatgatcatagctcactgcagccttgaactcccgtgctcaagctgtcttcctgcctcagcctctggaacagctgggagactataggcacacaccaccacacccagataatttaaaaattttgttgtagggacaaggtctcgctttgtttcctaagctggccttgaactcctggcttcaagcgatcctcccaccttggcctcccaacctgttgggattacaggtgtgagccaccatgcccagccagatggacactgttgagcaattgccgactttaggtttatatatttgaatgtatgttagtgattgttaatgttcaataaaccatttaaagtgttaaaaaaggaaacattttaatataacattgagttatactttgagctagaataggaaatagatatctaagtagtttcttctataatttataaaagtatcatcttctctcatgtgacctacatttctgtagttcgtgcataccagaaattgtacagatggttattgtatagtgcttcaaaaa

SEQ ID NO: 554243 - DNA, 565 bp, Homo sapiens
agctctcctgtccctttcatgaatggcttcatgtgtgtgggagttgcaaggaagagaagaattactaaaacagtttcttccaccccaaacactggagaaggatggcaaaaggacctgatcattaatgacagccattatggccagacacttcacaaacactatctcctttaatcctgccactccctgtaggataaatgttatcctcttccttttaataaatgaagagaccaagtctcagagaacttgaacaacttgcccaggatcacataggaccacacaccagaaacatcagcatggtaaarttcacttccattgaaaaccatttcttcctgtagacatccacagcctgctagacccttagtcaaaggctattggccagcagaaaagcaaaaaaacaacaacaacaacaaaaaatacctcttccatgatcaatctttgaacaagcacaaaccaggaaagagatatggactctggtgttctgacaccaagacttggatgttctagcatcgctgcttctatgttcagtctgaggttcagagaaggcctggttctctgaacacattca

SEQ ID NO: 554244 - DNA, 548 bp, Homo sapiens
cctcatcaattctcttcactgtccacccccttctctccttaccatcccacactcttcaccccataggaaggaccatcagaataccaacaattgagacagcgtgcctatctataacccrtttgtcattcacttgggaggtagttctgtctctgacagttacagcaaagccattttcacaagcaaaaatgactgtcactatagaaatatggaggttcttacctagatattctgaacccatttaggatatgtggaagcaggtactaaccagcaggaacagaaagttcacagcgaggggcagggctgctccaaaccccattcccttgagggtcacttgtgcagcggatggagctctccccaatgaggttgaaggtcatccctctgtctgggtgggtgtcgcatgcgtaagatatttcttttccatagggaatatctccaaagggagttcctgtgtgtctcccattaaggatagctggaggatttggacaaaagatttctagaaagaaaacaagagctttaagttctattagaatttcacttaagatgactga

SEQ ID NO: 554245 - DNA, 1166 bp, Homo sapiens
tttgtaattctccccacccttgagaatgtactttgtgagatccacccctgcctgcaaaacattgctcttaacttcaccacctatccccaaacctataagaactaatgataatccatcaccctttgctgactctcttttcggactcagctcgcctgcacccaggtgaaataaacagccatgttgctcacagaaagcctgtttggtggtctctccacacggatgcgcgtgaaaggtaccttgaccgaggtcatccaggggccagccctgggtactttccaggtatcacccatggagaacgtgtttgagcagggcctacaggtgtgtgccgagcttcacctgactctgccgagagcagctcggtccaggagaccctaacccagcggcgctagaggaattaaagacacacacacagaaatatagaggtgtgaagtgggaaatcaggggtctcacagccttcagagctgagagcccctaacagagatttgcccacatatttattaacagcaaagcagtcattagcattgtttctatagatattaaattractaaaaatatcccttatgggaaatgaagggatgggctgaattaattgcagcaggaacactttcttaagacacagatccctcatgcatttgtttgtggcttaagaatgcctttaagcagttttccgccctgggcgggccaggtgttccttgccctcattctcgtaaacccacaaccttccagcttgggcattagggccattatggatacgtcacagtgctgcagagattttgtttatggccagttttggggccagtttatggcaggattttggggggcttgctcccaacatgactctgagaagcaggtgaaaccactgggcaacttcggaaggctgttggcatccattagaatgataattggtgaacaggctgtcaggatgcaggtttagcctaaagatacctctggtgagcagagaaccacgtagtagttatgtagtgttatgtagtgttgtgtaacttctcagagtctcctctgaaagatgcagattttaggaatttttctttttatctcacagggcttccttgagggtcaagagaaaccatttgagtgaaactctgtctcaaaaaaaaaaaaaagctcaacaatgactttgttattggacatattttattcatttagtc

SEQ ID NO: 554246 - DNA, 1135 bp, Homo sapiens
gttactcaattttctttttttcccttctaattggtcttggaaatgtctctctgacagcatgtatagatctgcctcattaaaaaaaccaactgcatttctttcctttgtgtggatgccccatgtttcaccagcaagtcccctattggtttgcagtttctccctgtttttacaaacagtgctcctaggaacattcttgtatgtacatttcctggcatttagtgtatatttctgtaaggtaaattcctagatatgggcttgctgggtcaaaagatatatatattttaacttgratcactattactcgattgttttccaaaatattgtaccaatttatactcccaccagctctgtctgcgggtgcctgggcattgtttttatgatggagataaaaataataaaataaagtttgtatcagtttttaaatttttcaaaggttgtccctaagcctccctactcccattctcctgggctctgttccccccaccttctccgagctgggggactggctgcttagcttccccatccctggggcttgtatccagggtctgaagttctgggcagttcaggccctgggtgcattcctcttcatcctccacaggtgggccctggctgctgtttttagactatcagttctggagtgcaggtgtttccctgtctctcgccctgagggattggctagggaggcagcctgagtgtccctggcatcttgaggggcttgggagtggagctggagtttctgttcaagctctgacactgaatgggaatcaaggtgggcaggggaaggtgccccgtttccaattgcagggcttctgggtgagcaggttagcccagcccagagactttaagtgactcctccaaagtcacacaggaggtgtgttgaattgacaattcaagcccacttgcagaaaagaaatgtcagatctccaagatgagcactcaatacacagatggggaaactgagacatgtggctttgggtcacacaatgagaaagtggcagaggctggcatagatctgggcctcctgatccatggccaattgcttattctaagcagagagatgggatttactggggacagaagggaaagagggtctggggtactgcaggcagagaggatggtccaggctcaaggggtt

SEQ ID NO: 554247 - DNA, 1135 bp, Homo sapiens
gttactcaattttctttttttcccttctaattggtcttggaaatgtctctctgacagcatgtatagatctgcctcattaaaaaaaccaactgcatttctttcctttgtgtggatgccccatgtttcaccagcaagtcccctattggtttgcagtttctccctgtttttacaaacagtgctcctaggaacattcttgtatgtacatttcctggcatttagtgtatatttctgtaaggtaaattcctagatatgggcttgctgggtcaaaagatatatatattttaacttgaatcactattactcgattgttttccaaaatattgtaccaatttatactcccaccagctctgtctgcgggtgcctgggcattgtttttatgatggagataaaaataataaaataaagtttgtatcagtttttaaatttttcaaaggttgtccctaagcctccctactcccattctcctgggctctgttccccccaccttctccgagctgggggactggctgcttagcttccccatccctggggcttgtatccagggtctgaagttctgggcagttcaggccctgggtgcattcctcttcatcctccacaggtgggccctggctgctgtttttagactatcagttctggagtgcaggtgtttccctgtctctcgccctgagggattggctagggaggcagcctgagtgtccctggcatcttgaggggcttgggagtggagctggagtttctgttcaagctctgacactgaatgggaatcaaggtgggcaggggaaggtgccccgkttccaattgcagggcttctgggtgagcaggttagcccagcccagagactttaagtgactcctccaaagtcacacaggaggtgtgttgaattgacaattcaagcccacttgcagaaaagaaatgtcagatctccaagatgagcactcaatacacagatggggaaactgagacatgtggctttgggtcacacaatgagaaagtggcagaggctggcatagatctgggcctcctgatccatggccaattgcttattctaagcagagagatgggatttactggggacagaagggaaagagggtctggggtactgcaggcagagaggatggtccaggctcaaggggtt

SEQ ID NO: 554248 - DNA, 661 bp, Homo sapiens
aattgaactctttttaataaaaattctcccattttgcacatggtatagaattttaagagtgcaaaaagatgtacagtaaaacatcctgcttgcccctgacttgaaaccaccagttccccttctctggtgtagacactgttcccaattttggggcatctcttttatagatattttataaagatgtatatttatacatgtaagagtatgcatacataatgcatattatacattccatatgtatctgtgtataagaacacacaagcacatttttgtttttgcataaattatattgttgtatacacactatgagtactttgcttttatttttaaacctaatgatttattttggtgattgttccaaatacagtgcatacagtttccttgtttttttataacagctgcattgtatttcattgtgaattttggatagccataatttatttaggtagtctgctattgctggacaagtaggttgtttccaatcattttatattatagacaatactgccatgaaaatgttgtaacaatatyatttcatgtatgtttgagggcatctgtcagattaaattcctagaagtggaattgatgtacacacagttattaacattttaaactttcatagatattgtcaagttgtaccaatttatgctgcttttgatat

SEQ ID NO: 554249 - DNA, 679 bp, Homo sapiens
tgcttctgggccacagggtccctgggagtcctgccgcagtcctctggcacaggctgacggggcgtgatgttacttcacagtattcacgagtcgtgaatactgtgggagccaagggaaaacttccctgtgccctctgaaggtttgctgaaaaatcaatgtacaaaggacagattaactggagaaaaagcatgcaaacttattaatgtgtacacaggggagaatcacagagtaatcactccaatgccccaaggcagtgcagaagcttatataccatcttgaggttacagaaagaatggagtttcaaagccttaaragacaaacgtcagctgaattaaaatgtaaaggagttcagctgagcaatgagtgattcgcaaatcgggcagcccccagaatcacagcagattctgagagtcttcaggtatgtgttgtgatcagaacaaatttatagacaaaaaaagggaagagatgtacagacattggaagtgaggtacagaaacagctcgattggttacagctcagcgtttgccttatctgaacgcagtttgaacgcttagcagtctatgagtggttgaagtatggccactgggattgaccaagactcagctattgttacaggtgcatactcttaacttaggttttaaatcttgtctgcctattaagctatgttacctaataggca

SEQ ID NO: 554250 - DNA, 679 bp, Homo sapiens
tgcttctgggccacagggtccctgggagtcctgccgcagtcctctggcacaggctgacggggcgtgatgttacttcacagtattcacgagtcgtgaatactgtgggagccaagggaaaacttccctgtgccctctgaaggtttgctgaaaaatcaatgtacaaaggacagattaactggagaaaaagcatgcaaacttattaatgtgtacacaggggagaatcacagagtaatcactccaatgccccaaggcagtgcagaagcttatataccatcttgaggttacagaaagaatggagtttcaaagccttaaaagacaaacgtcagctgaattaaaatgtaaaggagttcagctgagcaatgagygattcgcaaatcgggcagcccccagaatcacagcagattctgagagtcttcaggtatgtgttgtgatcagaacaaatttatagacaaaaaaagggaagagatgtacagacattggaagtgaggtacagaaacagctcgattggttacagctcagcgtttgccttatctgaacgcagtttgaacgcttagcagtctatgagtggttgaagtatggccactgggattgaccaagactcagctattgttacaggtgcatactcttaacttaggttttaaatcttgtctgcctattaagctatgttacctaataggca

SEQ ID NO: 554251 - DNA, 1582 bp, Homo sapiens
actccattgaacattgatctagaccagggttgacaagctttttctggaaaggcctagatgataaatattttaagctttgcagactagtctctgttgtaactatacaactctgctgtcgcagtttagaagcagctgcagccacatgtggctatttaaatttaaatgcagtaaaactaaatacaatttaaaattcakttcctcggtggcactaactacattccaagtgtccagtgaccacatgtgtccagcagccaccatttcagacagcacaaagaacatttccatcatcacagaacagcaaaacctaactctcaagatcttcagactacgttacaattcttcggaaaagaatgggaaaaaaacatttcattccctaagctcctaaatcctagtcatttttgacacttattcaatacgaatgatttataatagcatcaaggagtgtgaaagtttcatattttgcacaaaatttccatggcgtgattttaaacaacattttaattttcaccagagatgaggtgttaaaaagcatggtggaaattttatttggaagagttaagaatggaaagccaaaactatctatacaataaaaattatggggctggcctccaattatttttttaaacatcttataaaactgaaatccaaaatacaatcattttaaatacatccaaaaatgataaggaaggaaaaaaacaggtaagagagaaagacatcaagcaaaactgtgtctagggaatgtatcatttaaaactaccacctgctttcagcggtatttgaaagggactttgtccaattactacttcccatgatatggccacacttctatcctgaagcttgttctggtttccttagagcataggagtcaaatatggacacaagatgggacagagacactttctttttaaaatcaagcactagaaaggttgccgaatgatgcaaaactaagcaggatatgaagaataaaaggaagaactttaagagaaaaatcacaccatagcatttctaacttgttatcggattttcataagctttcattttccccatgcatttcttggtggtttaggtagacacactatttattgcctacctgcaattccctctgtatagcgggagaattcacattccaagaaaactagtggaagaaaaaaaaaaaaaaaaccaatggcctaagagaagcggctcacattcatctactcaccagcagccagatgagctttgtctcttccacagcccatttgaaagtgggtacaagagcagctgcccccagcagcagcaataaacatgtgtcctcaaaaagttatgactgttgactgcagaagagaggatggagagtctgagaacaaggcagtttgcttattgattttgaagcccacagtgtgacaagagaccagacagaaatgtgttcagttaaacttggcacagacgggggccgacagccacgttttaaactgtataattttataattaaagatcggggtggtcaaaataaatagaacaacattaatcaagtctttaagatgccactgtacaaatcagccactctcatgtcaaagaaacttcgacaactttcaaagggcgt

SEQ ID NO: 554252 - DNA, 526 bp, Homo sapiens
ttggcccaggacagattctccataagcagcagctgcagcagccgtcattactgcaacagtgtagtaagcaagaacaataacaaagtggaaacagcctattaccaattttagggtgaacaatgctacatcaactcagtgaattttaaatcaagccattgaaatgtttatgactcataaagaagtggaatttagacaaaagtttagtgaaaaaacagaataaactatcatatatacttttgtgtatgcaaatctatacgcatatctgtgtgcacacatatgtgcccatgttatgtgtttatgagaaagtactagttgcgtttctaatatccacttgtcccttctttagaagaagaacctaatttttacccattgcattgcccagaatgtttgttttgtaaattgtgccttccaatgatattaagcgaaaatgttgagaacttcasagcaggctgcttacacggagataactgagatgggatctaccacttatcctgtgctgtttgccttctttcaaattacagttcga

SEQ ID NO: 554253 - DNA, 1246 bp, Homo sapiens
cagaacctgaaatgttgtaggcactcaaacatttgaactgaatctatttcacttgtcgtcgatttaaaataaatactcagataaaatccctgcaacaaagggattgttgcaaaatccctataaaaggaaacatttttcaccataattcaaagaatacagagaagcaagtgcatgtgtgtgtttatgtgtgtgtatcacagtaacagtattgtataggtatgcagagaactgcacygatttatagtcaaaaaatctaagttcacgtcccagttttcctacttaccagctgtctgatgttagaaactttgcatagcttgtccgaacatccattttgttgcttgtaagaacagaaagaatagcatcttacaccatattttataaggttattataagcataaaatcaagtgagataattctttggaaagaattacataaatctaaaatagcacaataattattgttgttgcaccagtataattttaccctccaaaccctctgaagagtagctttggaaaataacatataaattcatctgcagtaatatagaaaatttcagcatggatatgaaaattaatacatgcctgtaaagtggtttcccaaaggtatgcagcattataagaataataaatcaccataaatcagatacaatagatacattttgcacttaacacagtgaatgatttagggtccatgcaattttcatcagagaagttcacttagggcttaccaccaaatagctccacagtagcaggtagagagcaatataacaatgacctttaaaccacccagtgactcattagagaagttcctcaattctggaacagattcacaaacattttcaaaataaaagataaattggctaagatgtaaaatataaatcagcttgggagggctaacacaaatacttttgaatagaaattaaatatgtgtcacctaattcatcacaaaataatactcagaaaaacatgcagaggctttaaacataaaaggctaaatagcacatcaagatagctttgcaataattggtcattttcttttccacaataaaatgctaaatgatgaagcatggtttcctagtaacaacagtaatactaggtaaataaaacagaattcagcttacagcaatcagcagccattcagcttccaacaaaaggttgaaatcacttggatgcttgctttttcatttccattattatgaaaatgaaaaaaaaaataaaattgactttccaaatgtagaattattttt

SEQ ID NO: 554254 - DNA, 1246 bp, Homo sapiens
cagaacctgaaatgttgtaggcactcaaacatttgaactgaatctatttcacttgtcgtcgatttaaaataaatactcagataaaatccctgcaacaaagggattgttgcaaaatccctataaaaggaaacatttttcaccataattcaaagaatacagagaagcaagtgcatgtgtgtgtttatgtgtgtgtatcacagtaacagtattgtataggtatgcagagaactgcactgatttatagtcaaaaaatctaagttcacgtcccagttttcctacttaccagctgtctgatgttagaaactttgcatagcttgtccgaacatccattytgttgcttgtaagaacagaaagaatagcatcttacaccatattttataaggttattataagcataaaatcaagtgagataattctttggaaagaattacataaatctaaaatagcacaataattattgttgttgcaccagtataattttaccctccaaaccctctgaagagtagctttggaaaataacatataaattcatctgcagtaatatagaaaatttcagcatggatatgaaaattaatacatgcctgtaaagtggtttcccaaaggtatgcagcattataagaataataaatcaccataaatcagatacaatagatacattttgcacttaacacagtgaatgatttagggtccatgcaattttcatcagagaagttcacttagggcttaccaccaaatagctccacagtagcaggtagagagcaatataacaatgacctttaaaccacccagtgactcattagagaagttcctcaattctggaacagattcacaaacattttcaaaataaaagataaattggctaagatgtaaaatataaatcagcttgggagggctaacacaaatacttttgaatagaaattaaatatgtgtcacctaattcatcacaaaataatactcagaaaaacatgcagaggctttaaacataaaaggctaaatagcacatcaagatagctttgcaataattggtcattttcttttccacaataaaatgctaaatgatgaagcatggtttcctagtaacaacagtaatactaggtaaataaaacagaattcagcttacagcaatcagcagccattcagcttccaacaaaaggttgaaatcacttggatgcttgctttttcatttccattattatgaaaatgaaaaaaaaaataaaattgactttccaaatgtagaattattttt

SEQ ID NO: 554255 - DNA, 598 bp, Homo sapiens
cccggcgtggtggcgcacgtctgtagtctgtaattttttgtatttttagtcatgttggccaggctgatcttgaactcctgacctcaggtgtattctgctacttggagtattctgctactcgggaggctgaggcaggagaatcacttgcgcctgggaggcrgaggttgcagtgagccgagatcgcgccactgcgctccagccttggcaacatagtaagactgagtctcaaaaaaaagaaagaaagaaaacgcttacctttttcatttactatacttgcaggacagtaccatacaggacagattataaattctacaatttcagttaagttttcaaaagactggtaattcagcatcttcaaagagcactaccattgctatacattcttcttcaaatacaaactagtatgttcttagtcatatgtgtaattggtacatgttaccaaattcaagcttgaaagtaaatacctaccatcagtgaactcagctgctactttatctggggaatatgtctcatgacaatatgtagagtggctaaccaagtgtcacagaatatggtactaagctaatctgattagccaagagaaagtttaaaaaatcac

SEQ ID NO: 554256 - DNA, 619 bp, Homo sapiens
cttcatatagtccatggtccctcacacagagacctagcacggagatttcacacagggacttcccacagagaccccacagagacctctggaagatacctcccacacagaccttctgcaaaggcctcatacagaggcctcacaaggggcaatggagccctcttgctgccccatggagtcctcccacagagacctcatgtggcctcacaggcctcgtacagaaactgactcggatttcttagagactttccacacagaactcaygcagaaacctcaaactgaggctccacagagacctcactcagagttctcaccaggagcctggcactgaggcctcccatgcagcgctcacacagcgtcctcaccataggtgagatgcccctcacagatactcctcagagatctggcccagaggcttcacagagacctcacatccatccattctttaggggcctgagcagccacctgttgacacgtccttctcagtggatataaaaccactcagcacagtagcagcacagccgggatatcagttgcactccccaggaaccctgggacacccagatactgtcagcattgcagtgaaggcggttttctgcttggggacatcctcacacttttt

SEQ ID NO: 554257 - DNA, 544 bp, Homo sapiens
tcccttagggagtgtgtgtaattgctgtggccttagacaatcactcagcccagctggacacaagcagggtggccccactcaagccccacgcagcacccaccctctccacacacatccccacacccatttcaagagcactgccatctaatttttgtgtatttattttgttctcctttaacttaaaaaatattgaatatttccttgcacctttactgatgaataattgacaaataaaaattgtatatatttaagtgtatgacttcttaatatattgaaatatgtatacattgtgaaataatcaccataatcaagttaacgaacgtatctattatttcatatcattaccatgatcttttcttgttcttttttgggaggggtgagaaaacgagatttacagttcttagcaaatttcaagcmtataatacagccttgttaattatgttctatgttaactatgtccttgttaactatgtctattagttctctagatctcattcatcctgcataactgaaactttgtgtcccttgaccaacatctcaccat

SEQ ID NO: 554258 - DNA, 558 bp, Homo sapiens
actgggatttggggtttgttttttcttttgttttctttttcaatctgtggtataaatactagagactgtgggcttcctgtactactaccayttatcctctgattcagccactttgtttttgttttaaacctaacctcatagcaaagaggacagttttttgagcctgagaagatttattgtgaaaaactctctctctctctctctctctctctctctgtatatatatatatatatttatttatatttataattgcttcttttatttcagtgctgctcttcatttcaagatgccgttgcagctctgataaatgcaaactgacaaccttcaaggccacgacggagggaaaatcattggtgcttggagcatagaagactgcccttcacaaaggaaatccctgattattgtttgaaatgctgaggacgttgctgcgaaggagacttttttcttatcccaccaaatactactttatggttcttgttttatccctaatcaccttctccgttttaaggattcatcaaaagcctgaatttgtaagtgtcagacacttggagcttgct

SEQ ID NO: 554259 - DNA, 542 bp, Homo sapiens
gccatttttcttttttcttagatgtgcagtaatttattagaggaaacataaatggaggataaacgggagatggagcaagcgtaggtagagagagccatcagacagcagtgcaggtctgacaccatacgccccagtagtttgactcctagggagcttttatatcccttatcatttttctaagattaagctccttttgtttcctgattaatttggtggccacatctgtccggaacttgtgggacgtcctcctcttcatcatggcaggtactccagcatggcctgccggccgccgaggccgccacccacagcctacaggctcgccatcgctcattcccactcccgcagccccagctggagccagatggcgcgtcctcctgaagtaccatttctcttttgccccctttgttccctttacctttactgttttcatcttttaagtctccctgttttyccctttttttcggtttctctctttttctatttcctttcctctagaactctagttttctacccgcaaaagagtggaatcaccttaggatttt

SEQ ID NO: 554260 - DNA, 1044 bp, Homo sapiens
taaaatacacaggaaaaaatagggagtcaaaagttcaaaaaatcaggtagaaccagtccgaatgtttataaaatcctgatattctttgaataaaggtacaatgctaggaatagttatcatgattatattgcwtagtgctttcccaaagtgcatttatatgcattattatacctcctttaaacttcatgacttctccattaagtagataagtcaggttatagcccccagtgaggaaactgaggcacagagtggttaaaggaattggatcataaagtgattcagtgacaaagcaggaatcagaacccaagtttcctgggacccggttagctcctctacgtcctgctccacaggacacacccagaacacaaatattgattatcttctctgtgaggccatggctctcaccagcccttctctaatttcctacgccatcaacgctctgtaccagcccagtaagagcaaacaaacccctggggttggagaaaaatgggcaagttattaagaacagtcttaatttttaattctctttggcattctaacccaaattaaagattactattttttccctaaggcaaacgaagttctcaaatgaatagtcagtcattgtgtttagaatgggttacattcttagaaaagatcctttaagcacaaacattattcatcaaccctaattttcctataatgttatcgtgtgtcaataatatgtcatatttactcaaccataaatgatgccttctctttggcaaatgctgcccttcaacctcagcatgcagtacagggtccaacttctaattgcctgaggctgtttctcgtagcagaatgatgagtgcccctccccaagcaggcctccatcaaaggctgatgggggctggtgtataaatgtcccagctgtctcgttgcttaggtgggtgttctccactgattcctccctgtctcacttctccatcccctaccactttccctgggatcacctcccacaccagctatttgctctcaaatccttatcaggggagaaaagttctagaaatgcaagtggtagtgctg

SEQ ID NO: 554261 - DNA, 666 bp, Homo sapiens
ttagatagtatattacatcatctaatttaaaacaaacacacaaacagtggacaccctggggtgggagactggggtgaccagaaggggacccagaacagcctctgtggttctggcattgttctgtttcttgatctgtgtgccagttacaggggtcgtctaatcatctatacatttttattagttcacttttctaaatgtattttattcttctggaatattttacaataaaaacatggaaatcaaaccaattgaagttctagttacttcaaatcattatttagaaaaaagrccaaggagaaacatagtgaaaaactagatgaaaaatgatttaaaacctccctaacagacatcatctcatttacaggttgcagttttcaaaggagatcggcggtgaatagtcatgtaagaagaaaaggaaatacaaatagtaatagcacaacagttcaggatggactgccttggagagcacgtctttatgatagaattgatcatctatcacaggtttccactgaatgtgaccttgcaactacacagtctgatttactgtaataactgtattctgaggcattacatatttaatcaatttcatggaggaggcagtaagttaaaaatgatgttgaaactcagcacccatgttgttgtgctgggatgctatagtcccacaac

SEQ ID NO: 554262 - DNA, 1296 bp, Homo sapiens
tgcttcactctcaccctatttaaaaagtggataattatagcacatatgctgaagaatgattgggaagattgatacaacactacacaaacatttcttagacatcatagtaaatgatcaatatatgtaagcgattaggattattcatcactaattgtgcataactatccctttggctcttcattgagccagaaacacagcctgtctgcagaagtcataattcacagttttatgtggagaatctgcccaccatctacacaaggggattagtggagatggagagaaaagtgttgccagagggtgtgtgtgttgttttcgtgctattttagagtgactacagctggaaatccagcaattctaaaatcttgtcctaataacctctccactgggggaagttctcaagggaattctaggcaaccaacagcagtgttgattggtcaccttggtagggttggagccttctggtaagtgatggaattgaagctaaaagcttgcattttccttgcagaatttaatcctggtatcgcatcactctctagccagtcttatgaagaaatgaagtcaaggagaaagtgagagcaggggggctgaacctgcacctaggccctgggggaaaaagaaaggcttaccttcccaaatttcaccccttgttctctgtctctactgacgctgctgccaccactgtccgtcctagaagacacccagccaggaagggtcctgggcaaggggtggggtgggaggatctcagatatgtacaaaggaaagggaggattgagactgggcacagtggctcccacctctaatcccagcactttgggaggctgaggtgagtggccataatgccaccttctcagtggtgttktccccatctgtcccaccttaaaatacaacacctacaattccccattccatttctcttccttatttttctccttagcactcatcaaaatccaagatacttaatgtcttaattctcttgtttattgaagatcactcaggactaaaatgtaaactccatgaagaaagggattttgttctattttgtttactgctctgtctcagcaactgaagtacttaacatgtatttgttgaatgaaggaagtgaagaaaggaaatggagcatgactatgtactttccaacacataggagcttaagcccagcccaataaatgtcctggagtgctcagcagtcatatccactagtcttctcccggggttgggtcagagtgtggctggaaaggggagagggcaaatagtcatgggtctggtagacggagaagagactgaaaaattcttttt

SEQ ID NO: 554263 - DNA, 563 bp, Homo sapiens
acaatccttaattaggagatataacaaacattattaaaagggrgtcacataacactggaacacaccgaatagctctatcctgattgcacttgcttgaaataaatgcagggaaactttattgtaacttctctttttaatgagctttaaccagtgccggagcttcctggtcaggtacttttgtaagctgcagtacttacaagtagtaaattattaggtggtactgaaaaaattcaagacagtacttttaatggtttagaggtatctaatctcttcccagctggtttgttatgacgctcaaaggtcttggaaattttagggaaaaccttgatcattaaaatttaaggcaaaaaataatttattttgtgatattaatctttcaaatatatgtgttgtgttaacatgcacagatgtctgtgggtggtgagattatatattttctatgcttttaatgatattttccaaattttatacagtgaatgtgtatgatttttataatcagataaagctttctggcaacattaggtggggcagagcaaggtagtcatccatgcagaggggcagtc

SEQ ID NO: 554264 - DNA, 372 bp, Homo sapiens
aaaattagccagataaaaggtattttccatttaacttttttttttttttttgagacggagtcttgctgtgtcacccaggctggagtgcaatggcggaggcctcctgggttcaagtgattctcctgcctcagcctcctgagtagctgggactacaggcacccgccaccgcgcccagctaatttttgaatttttagtagagacaaggtttcaccatgttggtcaggatggtctcgaactgctgacctcatgatccgccygctttggcctcccaaagtgctgggattacaggtgtgagccaccgcgcccagccacaaactaatttttaagaactttttgactcttaacttaaaactacaactttatgaaaataca

SEQ ID NO: 554265 - DNA, 968 bp, Homo sapiens
agcactttgggaggccaaggtgagaggatcacttgagcccaggagtttgagaccagcctgggcaacatattaaaaccccgtctctacaaaaaatttaaaaattagcccaatgcgatggcatgtgcctgtagtcccagctacttgggaagctgaggtgggaggattgcttgagccgaggaggtggaggctgcagtgagtcatgatcatgccactgcactccagcctgggtgacagagcaagaccctctctcaaacaaaaaaaccaacaaaaagtcggctgggcgcagtgggtcacacctgtaatcccagcactttgggagggtgaaaccccatctctactaaaaatacaaaaaattagccaggtgtggtggcagatgcctttaatctcagctattcgggaggctgaggcaggagaatcgcttgaaccccacaggtggaggttgcagtaagctgagatcccaccactgcactccagcctgggcatcaagagtgaaactctgtctcaaaaataaataaataaataaaacccaagttttttgtgtgtgcccacatccacctagcaccaaggtcaagtaggccgtttttcctgccatccgttctgcgtgatgggtctcactcaccctgtactgaggctgaagtggaggtcaagtttcaggtgcctgcaggatgtcctgttaggttccatgttggctgggccttagcttcttcttgtgtctcccttgtcccagcagcagcccgaagggatgcatagggttgccaagtgtcactgatacccttggggtcagactggtttaggtgtttccttaccccccagagttcccctttcactttgtcttgaggcccttgagtccctgctattcaccacacaaagtgcctcttcaccaggctgtacaggtggtaatgggaggggaggagaactgacgaagcaggaagggctacaggacayccttaccagttcaatactgggga

SEQ ID NO: 554266 - DNA, 681 bp, Homo sapiens
cttctaagttaggttatcgaagttacaactaaaataacaataaaaatacctaaccacatgaaacccaaatccatcagataatgtttattttgaatacttcactccatggttgcaaagatcaaatgagataatatatacaaaaatgctgtgaagtgcaattctatgatgttaatgatgaaggacagctaaataataattatgtaccatatataatatttatataattcatataacacaaacacatacacagcagggtatatactgccaaggcaggacattgtccaaagtataactgctatcctttttatcaacattactagagatgctaacaacaattctaaaaaacatctttttaaaagaaaaaactcagctgggcgcagtggctcaagcctgtaatcccaacactttgggaggtcgaggtgggtggatcacctgaggtcaggagtttgagaccagcctggccaacatggtgaaaccctgtctctactaaaatacaaaaattagctgggtgtattggtgcaccaccagctacttgggaagctgaggcatgaatgagaatcgcttgaacccaggaggcagaggttgcagtgagctgagatcacgccactgcactccagcctaggcaacagagcaagaccgtttcaaaaaaaagaaaaaagaaaaaagaaaaaaaaraaaaaa

SEQ ID NO: 554267 - DNA, 681 bp, Homo sapiens
cttctaagttaggttatcgaagttacaactaaaataacaataaaaatacctaaccacatgaaacccaaatccatcagataatgtttattttgaatacttcactccatggttgcaaagatcaaatgagataatatatacaaaaatgctgtgaagtgcaattctatgatgttaatgatgaaggacagctaaataataattatgtaccatatataatatttatataattcatataacacaaacacatacacagcagggtatatactgccaaggcaggacattgtccaaagtataactgctatcctttttatcaacattactagagatgctaacaacaattctaaaaaacatctttttaaaagaaaaaactcagctgggcgcagtggctcaagcctgtaatcccaacactttgggaggtcgaggtgggtggatcacctgaggtcaggagtttgagaccagcctggccaacatggtgaaaccctgtctctactaaaatacaaaaattagctgggtgtattggtgcaccaccagctacttgggaagctgaggcatgaatgagaatcgcttgaacccaggaggcagaggttgcagtgagctgagatcacgccactgcactccagcctaggcaacagagcaagaccgtttcaaaaaaaagaaaaaagaaaaaagaaaaaaaagaraaaa

SEQ ID NO: 554268 - DNA, 522 bp, Homo sapiens
aaagatcatttttctgaagcacatgtttagtgtcggcaaaggttaagctgtttttgatgaacctgttttcatgtgraaattactataaatggtcagcagatacttgcttttaaggagcctacttctgattggtcagccagataagcgtgtatgtggtgattgttaagaagcagctggcgtcagtttaaaagaatgatgttctatcctcttccgtcttgaccagtctgagaacagtaacatcaatatttgaagttatatattcaatattcattacaatattctgaaactagttgttcatggaaatatatcggtaacttaacacaattccaaatgccattttttatagttatacttttttgctgtttcttaaaatgatattactagatccatattctaattgtttccaacctagggacggctaaaagttatttttttttctttttttttttttttttttttttttgagacggagtctctctcagtcccccaggctggagtgtagtggcccgatctcggctcact

SEQ ID NO: 554269 - DNA, 522 bp, Homo sapiens
aaagatcatttttctgaagcacatgtttagtgtcggcaaaggttaagctgtttttgatgaacctgttttcatgtggaaattactataaatggtcagcagatacttgcttttaaggagcctacttctgattggtcagccagataagcgtgtatgtggtgattgttaagaagcagctggcgtcagtttaaaagaatgatgttctatcctcttccgtcttgaccagtctgagaacagtaacatcaatatttgaagttatatattcaatattcattacaatattctgaaactagttgttcatggaaatatatcggtaacttaacacaattccaaatgccattttttatagttatacttttttgctgtttcttaaaatgatattactagatccatattctaattgtttccaacctagggayggctaaaagttatttttttttctttttttttttttttttttttttttgagacggagtctctctcagtcccccaggctggagtgtagtggcccgatctcggctcact

SEQ ID NO: 554270 - DNA, 542 bp, Homo sapiens
ctaagaatattataatagactctgaaaatattttactggatttgaatcatgtccatcaaacctattcacccatccttccttcttttcttttttccataagtactaattgttctaggagccaagcacattccaggccttaggaataccataaggtacaagacagctgaggtctttgccctcttgtgcttacatttcagtgggggatgcagactttcaaaaagtaaataaaacatctgcaaaaaaaatgttaatatgagtatgtggtataaaraaaacaaatggtactgagcatggagacaattgcagggagggcctctcgaagggtaacataggagttgaaaactgaaggtcaagaaggagccagccttgcagagatctgggagaagagcatttgaggcagaaggaacaagtgaaaatgccctgagataagaaagaaactttagaattcaagtaatacagtgaggtcatttcagagtgacttgtccttattgattgtgtgctgaccagcaaagagatatttccatctgctctaggtcccataa

SEQ ID NO: 554271 - DNA, 620 bp, Homo sapiens
acaaacctgcacatcctgcacatgtacccagaacttaaaataaaagttgaagaaaaaaataaattaataaaaacatgtcaatttaacagagaaaaatcccagttgtttggatattagtgaacttaaacatttttcatatgttaatcagtcatttatatttattctttctatgactttccttctatgtgaacatttttcagcttttaaaatgtcaccatgttctaaagttgtctctacaaaattaatgtgttaattattttgaagcatccagtcaggcagaaagggtaattattgtgctaactggaatcttctactctaaattttagtaggtctatgggtgcggtggctcacgcctgtaagcccatcartttgggaggttgaggtgggcagattgcttgaggtcaggaattcaagaccagcctggccaacatgacgaaatcctgtacctgctaaaaatacaaaaattagctgggtgtggtggtacgcacctgtaatcccagctactcaggaggctgaggcaggagaatcacttgaacctgggaggcagaggttgccatgagccgagatcatgccactgcactccagcctgggagacagagtgaaactctgtctcaaaaaaa

SEQ ID NO: 554272 - DNA, 609 bp, Homo sapiens
tttcttacaaaggaaatcttttttctatgtatgcaaattccataataactcaccagttcaattaggaagagcttctggtgaataaatatacttttttcggccgggtgcggtggctcatgcctgtaatcccagcactttgggacgccgaagcgggcagatcaggaagtcaggagatcgagaccatcctggccaacttggtgaaatcccgtctgtactaacatacaaaaaattacctgggcgtggtggcacgtgcctatagtcccagctacttgggaggctgaggcaggggaatcgcttgaacccgggaggtggaggttgcagtgagccgagattgcgccactgcactccagcctgggcgacatagttagactccgtctcaaaaaaaaaaaaaawatatatatatatataatatacatatatagtttatacatatagtatatataatttatatatagtttatatatagtatagtttatatatagtatatatatagtttatatagttttttcagtttttattattataaaaactgttgattattgacataactactttgtagcctagagttcttttggtgtgaccagcccatcaaaaggcattatttataat

SEQ ID NO: 554273 - DNA, 1084 bp, Homo sapiens
tccatatattgggatacatcatcctaccttttaaaaatgaaatctttttttaaatttacccttacttaatctttccctattcatatcagcctccacccccagctagtctatatttacagtgtagcatgggctcttccaaataattctcagtgctcataaaatcatatgtaaacatttatatatgtgtatgtctatacatctacctaaaaataaatgtatgtgcgtattttacaaaaccaggtcattgtttacaaaaatggattcatactactattgtgtatactttacttcgtattattcaatattttcaggcaaatcccagactttatgttgtctatatccagtaaacacttcagtattcatcactaacggatagagatttttaagaatgtaaccgattatactaatatcacctataacaaaatttataatagttctttaaaatcatccaatacccagttcatgttcaaatctccctgattgcctcaaaaacatctttttacagttggtttgtttgaatgaggattcaaatgccaaacattgcatttgcctgatatgtctctaaaatttacaatgattttcccttccccttccctgtyaatgcttctatttgttgaagaaaccaggttattttccttgtagaatttcccaccttctagatttgtcttatttcattctcgtggtgtcacttaacacctaccctgtgcttcctttacatacttagttgaatatagaggattgacgagatttctggctcgattcatttggctagaatacttaatagttggtgctgtgtactttctattgcatcacagaggtatggaataggaggaatacaacattggccagcccactttaagtgatgctgaaattggccattggggtcaggtgtggtcagctttatctttccaatataaactttctcatcaagcctgacttaacagttttagcattcagtaatgaacattacctatattcattatttcagtcagagttgtaaaataataattttctaaatctattaatctttctgccttgattggctggaattctatgaagaactctctcttatcaatcattggta

SEQ ID NO: 554274 - DNA, 1573 bp, Homo sapiens
caaaagactgcatgcagtaatattccatttatataaaagcaggcaaaactacattttctagggatgcatmtattagccaataaatgcagtaataaaacccaaagaacagtgattaccataaaagacaaggcggtggtcatcattagagtggagaaagagaggagtgttttcaaaaagagatacatgaggggcttccaggtggttgttatacagcatttgcttcaatattacactgttcacttatattttacacccctttctacataatattatatttcacaattagaaaaaaatcaacaacaattttaagaaaatataggattataatacaatttgattagtcatatttaaatatgcagttcaaatggaaaggctggtatcatcagtaaatagaaagtgtcatgagacaactcagcgggactgccccaggagagagcactggacctgggggtaacttcctaacgcaaatccaatcataaacaggatcagaaaatgcacttcaaagctagccttgcaagcccaaaaattcaaagttgagaagaaatgagagtgaatgaatcccatacttaagtcagagtaaaaattaacactttaaaatacattactaccttaaaaaagttacaagtctgtgaaacctgcgaatgttgtttatatataaatccaaccatattacctctctattctgccaagtacaagagataattttaaaattagacatatgaatggtttccaagctcaaaggaaaatattttaagacacacaaaacccatacagatactaacagcatcacagcacacttactagaattaggagttgttccagagccaaatgcagactgactaggttgctgtccaaacacagggggctggctactgcttgacactgtcccaaaagtaggtggtgcaggctgagaaccagtgggaaataatgctgtggaagatgatatagatccaaagcctgggggattgggctggctggcaccttgactttgtccaaatgttggggtctggttagcaccaaatgctggactggcagatggtgctgagggtccagttccaaatacaaaggaggatcctggaggcccaaagaaacacttaagtcaccatggtggctaatgtcagattatcctcaagaaatttctgtaaacccacaagcaaatgtcaagcttcgtttcagactcttaccttgctaaccaaattccatcaagacaagttttaaataatgattgagaatacaacgctctctaccattatttagtgaaacatactaaattcatataaacaaaaactgcaattaacaactactccacacctttacagccgacaatttctggtaaaggaacatatctcagaataatctcccaccagaaatttaatgtgtgcagaaattgcctcatgatgtgcatatatacattgcataataaagactgatgtttaataaaacaacttccagtgtctggttactgacaacctaacattttaaaaacaaagcttggggccaggcacagtggctcacacctgtaatctcagcactttgaaaggccgaggcgggcaaatcatgaggtcaggaattc

SEQ ID NO: 554275 - DNA, 1171 bp, Homo sapiens
taatacacctaatctattgaacctcgtggcttagcctaggctaacgtaaacgtgttcagaacacttacattagtccacggttgggcaaaaccttctaacaccaagcctattttacaataaagggttgaatatctcaggtaatttattaaatagtgtactgaagtcaaaaacagaatgcctgtatgggtactcaaactgctacctgtatacccagatgtggcccttctaaaaacataggtggtgatttcttttctacatgctcaaagtaaaaatttttgataaaagcagaccaagccctcagagtagagtccagaagaatataatgaacacatggccaggcacagtggctcacgcctgtaatcctagcactttgggaggccaaggcaggtggatcgcttgaggtcaggagttcgagaccagcctggccaacaggccaacatggtgaaacctcatctctacaaaatatataaaaattagccrggcatggtggcacaacctgtaatcccagctactcagaaagctgaggcacaagaatcgcttgatcccgggaggcgagactgcagcgagccgagatcgtgccactgcactccagcctgggcgacagagcaagactttgtctcaaaaaaaaaaaaaaaaagaaagagaacaaaaatgaaaaagaatataatgaacacaatctaatatgctcaagtgatccatatattctgcataaattgccttgatatgtggccataattattagtttggctttgctgacatttagatcaaatctggaatttccagattgtcttttcttcttgtctgccagcttgagaatacaatttctcataaaaaaggaaagataaaattaaattttccatgggaaaactttccagggttaaagatagcagagtatactcatcaaagaaacaaactcaagaggcccaacagttatataaagaccaagagggacatgtggcttgaattagctggacagctacttcatttggccagaagggcctaagtctgaactaccactaaattcaggtttttttctttcagatttcaggggcatacagaaacgactgtactttctccaattatctatacttagtagatagtagaggtgggggttaaggcaaaacaatagctgttagaaagattagttacctttggctccatattatatatg

SEQ ID NO: 554276 - DNA, 588 bp, Homo sapiens
aagaaggtattcaaattgcttcgcaactttcctaacccagtgcagttattttcactttaaaattttcccttcaaatctttgtctcagtgcatttgtattgtgtgttattgtaatcatgggggtgattacttaactgtatttcccttcacaccatattataactatcttctatattccgacacaatgtttattttgtatattctgacacagtataaattctaactccctcagttcagctataacaattgtttagatctctgaatgccaggaaaagattccccttagccttggagatgtaaattcatgtaatatgagaatcggaaaggatcctggatcacrtggttccatccctcactttttttcataattgctttttgagcaggtgcagtgtattgattattctggagatgaagtgcaggttaccactacagatggcacagggtattctgcacaaaaggtaagagctagggcagtacaagggtgggtagaaacctttgctgccaggggcttggagggaaggacaaatctttcctatcaaggagtttgcctttgggaatctgcctggacccttgttggatttctggtaag

SEQ ID NO: 554277 - DNA, 1083 bp, Homo sapiens
gggtgagtatggctctaaagggatagcacaagggagctgtggtgatgggacagccgcatgttgatagggatgttagtcacactaatctacacatgggataaaactgcataacagagcactagtattatgtgtgtgtgtgtgtgtcttaaatctgaataagctgtataggcggcagcaatgtcagttctctagtattcaccttgtactatagttatacaagataattttcaatgagggaacaagctgaaggatatacaggacttctctgtacattttttgcaacttcctctaaatctgcaattattcaaaataaaagtttttttaaaaaaattcagaatgaggtttaaaggtacatatgagtcaaaacttatggttatttttcatgtagactgacataatagggctgagtttctgctagatgtttatattaacccataatacttcttaggaataatttatcagacagcagaactaagtttataacacatgttgagtatatctattctgaacatctgaaatctgaaatggcccacaatctgaaacattttgcgcaccaacatgattacacaagtggaaatttccacatataagtacttaacagaaactttgtttatgcacaaaatatttaaaatagtatataaaattaccttcaggctatgtgtatatgaaacaaatgaattttatgtttagacatgggtctcatccccaagatatctcactatgtgtatgcaaatattccaatatccaaaaaaaattaaaatctaaaacacctttcatcctcagcatttcagataaaggatactcaacctgtatagaaattcagattgtgtaagtatgaaggctaaaacaaacctatgtcattatttctacctaatatatatatttatatgtaagtaattttgagttctatttatcttcacwcataattaacactgaataaatattgttctaagtcagtggttctcaaagtgtgatctgggaaccccaaagattttcagtggatctgtggggttaaaatgattttcataataatactaaaatgttgtttgtctttttttcctcttcatcctcttgggtgttcag

SEQ ID NO: 554278 - DNA, 682 bp, Homo sapiens
gaatttattgcctttgagagtagaaagggctctagaatatgagccagagacttggaatttagtaataggtctcccactgatttgctccgtgtccttaggcaattcgtttaatctctgtgtkcctagtttccccttgtaaataagagtggtaatacctgtcctcacctacctcactaaattgttggagttcttttgttctgagtcagggtctcactctgttgcccaggctgaactacagtagtgtgatcatagctcactacagcctccaactcctgggcccaaactatcctcctgcttcagcctcccaagtagctgggactagaggtacatgccaccacacccagctaattatttttcttttattgcagagatggggtctcacatgttgccaaggctgatctctaactcctgagctcaagcagtcctcctgcctcagccacccaaagtgctgggattataggcatgatcactaaattgttgtaagaataagataatgtttgcggaagcatttgagttctccaaaggaaaagctattcagacgttcaagataatagaagagtgttgtgtgaaggattcctttccagtttgcctctgtgaaaatgtctttgttgtagatcattttatgaaataggaataagagaaacataggccttatcatggtgtagtgttcacttacaaacat

SEQ ID NO: 554279 - DNA, 514 bp, Homo sapiens
cagtctctccctttcaagacgaggggcttagatcagacatcctgtaagggcctttccacctcaggccctttgtgactctatgactctcctaccctctcctagatgcctagagytcttctgaaaacatgttttattccttaaactgcaaccaggaaaagacatttgggccaccaccacttgagggcagtagaaaatgatgctgcacgcaatttggtggttttattgttttggctgctggaagaaaacaaaggccttcacatgatttaccctcaaatgtcttagggcaaataaaggtcccgtgaacacaccactttttccaaatgttttaaacaagaaaagcccaagataagttataacagggggttgaggagtaagagggtgagagggtctcacatcttgaaaaaagctggcacatactgtaagtttaataaagaataactgataacagaaaaattagagcctgtcagaattgaaagggatcctagaggaggatgaatagagccccttcgtttta

SEQ ID NO: 554280 - DNA, 536 bp, Homo sapiens
ccctagatatatgggtgaataaccatgtggttattcccatacaacttctgaggaaatgagaaatattcaacaaccattggaagactgccctagggcttgcatagagagaaggacataggtactgccacctctaagcccaggacagcatggctgttcttagactagacagtctggctttaagtagctaatgcattttttcacgttctcatgttgcacttccaacaaatgaaaacccactgtgtacacttgtacaccatatagacatcaagtcaaatggaactgaaatgagtgcaaaccatatatgtgtatrtataggtaatagataccatgggtatattgttttatatatatgtattcatattatagtgtatagcatatatatggtatatagtatacagaggatgcatgtagtatacagtatatattatacatagtatatatagtaagtattaggattcaagtgaatgaaatctagagaaacttcatgaaaaagaataagcaaagctgctgcccagggggctgagagagagtcaaag

SEQ ID NO: 554281 - DNA, 671 bp, Homo sapiens
ctcgctctgtcacccaggctggagtgcagtggtgtgatctcggctgtgaaacctctgcctcccgggttcaagcgattctcctgcctcagcctcccaagtagcttggattacaggcacctgccaccacacccggctaatttttgtatttttagtagagacggggtttcaccatgttggccaggctggtctcgaactcctgacctcatgatctgcccacctcggcctcccaaagtgctgggattacaggcatgagccaccacgcctggcctaataatatttttaaattgagtcttcaagcactgcgtggcacaaagctatactatataaagtactgctaggttcaaaagaaaaaatctgtaccgcttttagcaaaagtgcttttccagaaaagcaaatcaaaacaatgtaatcagcagaccaaggaggttacagccagacatcagggctacaccttctcatatcttgctagaagatcctatttatccagaataaaatttcaggacaaaacagggacattttaaacatttcttactttacgcatttaaaattttctatattttcagcatgatccagcagaaagagggctgctgtgagaactggctattttattttctttctgtggtgagactgtcatggagcctggatattttaggctcttatgcatmcctgac

SEQ ID NO: 554282 - DNA, 543 bp, Homo sapiens
cattttagcaggtttatttgcccaagtacgtgtgcgcaggagacaggtctatgcctttctccaaagatgattttgagggcttcagtatttaaaagggaaagagcactgtattagtctgtttcacactgctataaacaactacctgagactgggtaatttataaagaaaagaggtttaattgactcacagttccagacagcaggggaggcctcaggaaacttacaatcatggtagaaggcgaaggggaatcaaggcacatcttacatagtggtaggagagagagagagagagagcaaaaggggaagtgccatacttttaaaccatcaggtcttgtgagaactcactcactatcacaagaacagcaagggggaaattcrcccccatgatccaatcacctcccaccaggcccctcccctaacatgtgttacaatttgacataagatttgggtggggacacagagccaaaccacatcaggtgggatattcagaaatacacaattttcatgtaagggaggacagcggaaaatagtcattcatgcattc

SEQ ID NO: 554283 - DNA, 624 bp, Homo sapiens
gcattatctatttattatagataattattgaagcaaatatatggagggaaaaaagtggatatgaaaataatctccctctaccattgtatacagtcatttagaagggtatgaactttgggaaacatgcttttctttgcaacaaataaaattcaaagaatgattaaaaaataaggcataataattttatatatatgatattttctaaataacatataattttaaagaaatttaatgtgtctagagattgaaattttatatatctyaactatgtatagatatcaaaatactttcaacttaatatgtacattttattgaatgattttaaacttttaacattaaaattatctatttcatttgttaaatagatcacttttgcattcagtaaccgaatcagggatggtttagtaattaaaattgttttcctgaaaagtgctactacaattatcattaattgtactagtttatattggtaaattatgaatgagtattgaaagtgaaagctgaaaagacattaaattcaggcacctgtattctatgtcaaagaacttatttttctttgatatgacttcaaaagtctttcatcttcatacttcactgagacttaaaaggacgtcatcgtgtgag

SEQ ID NO: 554284 - DNA, 489 bp, Homo sapiens
gggaagggcaccaggaaggttttgggggtgcagtaatgctctctgtttcttgatccaggtgctgactagatggctgtgtttgttttgtgcaagtttgttgagctgtaccacttataatccgtccacatctctggatgcatattatactaagtaaaaagtttacgttcataaaataaaccatggracataaaggatacgtttttgcaaacttcctttatgtctctctaaattctcccctgcgttcctctcttcaacatgaatgtttggagaactaagagaaagaaacacaaaccctgactaacttgaatttagaattttttgacttacaataggtttattgggacgtaccccatcgtaggtcaaggagtatctggacttacaatggtttaccttaggatattttgagtttatcatgggtttatcaaggtattaaatgcattttgatttatgatattttagacttatgattagtttatcaggctgtaaccc

SEQ ID NO: 554285 - DNA, 1455 bp, Homo sapiens
gcattcaatagaaactgtactttgggtgcctgacaaccattttgtttttcactttcagtgcagtattcaataaattacatgagatattcaacactttattatgaaatagactttgtgttagatgagtttgcccaactgtaggctaacataagcattctgagcacatttaaggtaggctaggctaagctatgacattcagcagtgtaggggtattaaatgtatttttgacttatgatagtttcaacttacaatgggttattgggacttgaccgcatcataagttgagaagcatctgtataaaatataagatactcagagtgggtataaaaaacactatcatggccaggcgcggtggctcatgcctgtaatcctcagccttgggaggccaagacaggtggattatctgaggttgggagttcgagaccagcctggccaacatggtgaaaccccgtctctactaaaaaaacaaaagttagccaggagtggtggcgcacacctgtaatcccagctactcaggaggctgaggaaggagaattgcttgaacccaggaggcagaggttgcagtgagccaatactgcgccactgcactccagactaggagtcaaagcaagactccatctcaaaacaacaacaacaacaacaacaacaaaaacactatcaaaaagaaaaaattcttttgtattatcttctaaaatttaaagctttacttttcacatctcggtctttaactctattttttgtgaaaagagtgatacagggctgcatttttttttccatatagagatcaatcactacaacaccactttaaaaaattgttccttcttcatccaataatctacagtgtcactcaacctatatttgagagtctattaatttgctgagtctgccgttgggctcttgctcctgtttcactgatatctgtgcatccctacaccagtgttagactgtcttaattcctacagctttatttgaatycaagttggtggtcaagtccaccaacttgatgtcgggaatgttataggcttgatgaatgcattgacaaacaaatgaagaaatgcagaagtttctaagtaggaagagtaggctatctgtacaaatctaaacaaactctcagacacttttttttaaaggcaagccttaaaataatgtctttttttctctaaacatagctatgcttcttttaaagacctcttaaaacaatttacacaaagagcaagtgatggctactgaacgtgaattgtggagctaatcccagtaaagagatacatctttctattttctcaaaaggaattaggacaaggcacacggacttagcatcacccttcctttcaaattaaaagtgatttatggattgttgattcagaatttggttgccactaatacttcatatttgtatgttaaatgattacagagaagaaatctggatggtaaggaagttttcttttaaaaagagac

SEQ ID NO: 554286 - DNA, 594 bp, Homo sapiens
aagaatgatataatggacttttgggactcggggaagggtaggaggggrgtgagggataaaagactacacatgggttatcgtatacacagcttgggtgatggatgcgccagagtctcagaagtcaccactaaagaacttacccatgtagccaaacaccatctgtccctcaaaactagtgaaataatagtaaaataaaatctattaaaaaaaaaaaaaggaaatcacagtttttgcaggataccaaacctaagtacagggaaggctttttgtatccaccggttcctcagtgctgacagcggaacttcagtatgcctggatttgggtggggttgccgtgggggagtagtcctggaactaatttcctgcagataatagagatgactgtattggctagggtttcttttcctgtgaattggctgttcaggtccttttccatttttaaattgttttctctactgctttctgtgagctagctgtctctttctgtgagctagctgtcatattgcagtatagcagttgctttatgaaaggtgggttcaaagtaacaagagcacaggaggaggtcagcactagacccgagtcttgaaaggttggg

SEQ ID NO: 554287 - DNA, 594 bp, Homo sapiens
aagaatgatataatggacttttgggactcggggaagggtaggaggggggtgagggataaaagactacacatkggttatcgtatacacagcttgggtgatggatgcgccagagtctcagaagtcaccactaaagaacttacccatgtagccaaacaccatctgtccctcaaaactagtgaaataatagtaaaataaaatctattaaaaaaaaaaaaaggaaatcacagtttttgcaggataccaaacctaagtacagggaaggctttttgtatccaccggttcctcagtgctgacagcggaacttcagtatgcctggatttgggtggggttgccgtgggggagtagtcctggaactaatttcctgcagataatagagatgactgtattggctagggtttcttttcctgtgaattggctgttcaggtccttttccatttttaaattgttttctctactgctttctgtgagctagctgtctctttctgtgagctagctgtcatattgcagtatagcagttgctttatgaaaggtgggttcaaagtaacaagagcacaggaggaggtcagcactagacccgagtcttgaaaggttggg

SEQ ID NO: 554288 - DNA, 594 bp, Homo sapiens
aagaatgatataatggacttttgggactcggggaagggtaggaggggggtgagggataaaagactacacatgggtkatcgtatacacagcttgggtgatggatgcgccagagtctcagaagtcaccactaaagaacttacccatgtagccaaacaccatctgtccctcaaaactagtgaaataatagtaaaataaaatctattaaaaaaaaaaaaaggaaatcacagtttttgcaggataccaaacctaagtacagggaaggctttttgtatccaccggttcctcagtgctgacagcggaacttcagtatgcctggatttgggtggggttgccgtgggggagtagtcctggaactaatttcctgcagataatagagatgactgtattggctagggtttcttttcctgtgaattggctgttcaggtccttttccatttttaaattgttttctctactgctttctgtgagctagctgtctctttctgtgagctagctgtcatattgcagtatagcagttgctttatgaaaggtgggttcaaagtaacaagagcacaggaggaggtcagcactagacccgagtcttgaaaggttggg

SEQ ID NO: 554289 - DNA, 594 bp, Homo sapiens
aagaatgatataatggacttttgggactcggggaagggtaggaggggggtgagggataaaagactacacatgggttatcgyatacacagcttgggtgatggatgcgccagagtctcagaagtcaccactaaagaacttacccatgtagccaaacaccatctgtccctcaaaactagtgaaataatagtaaaataaaatctattaaaaaaaaaaaaaggaaatcacagtttttgcaggataccaaacctaagtacagggaaggctttttgtatccaccggttcctcagtgctgacagcggaacttcagtatgcctggatttgggtggggttgccgtgggggagtagtcctggaactaatttcctgcagataatagagatgactgtattggctagggtttcttttcctgtgaattggctgttcaggtccttttccatttttaaattgttttctctactgctttctgtgagctagctgtctctttctgtgagctagctgtcatattgcagtatagcagttgctttatgaaaggtgggttcaaagtaacaagagcacaggaggaggtcagcactagacccgagtcttgaaaggttggg

SEQ ID NO: 554290 - DNA, 614 bp, Homo sapiens
tggaagaaaaataatgcaaaaaaggcaacaatagtttactccctaacctttctcactgctttaccttactgttttgtatttagtgactcagattagttcctctactttttctttctttctttcttttttttgagacgtagtcttgctctgttacctaggctggagtgcagtggcacaatctcggctcattgcamgctccccctcctgggttcacgccattctcctgcctcagcctcccgaatagttgggactataggcacccgccagcacatcgggctaattttttgtatttttagtagagatggggtttcactgtgttagccaggatggtcttgatctcctgatctcctgatctcgtgatccgcctgccttggcctcgtaaagtgctaggattacaggtgtgagccactgcacccggcctagttcctctacttttaaaactaattattgcatgaatacggtctatatagtacaagtgcaaagtaattttgagcacctactatgttttaacattctacttaaaaattttttttttaaggtagagaaggggctcttgctctgttgcccagggtgatctcaaactactgtggctcaagtgatcctcccaccttgac

SEQ ID NO: 554291 - DNA, 614 bp, Homo sapiens
tggaagaaaaataatgcaaaaaaggcaacaatagtttactccctaacctttctcactgctttaccttactgttttgtatttagtgactcagattagttcctctactttttctttctttctttcttttttttgagacgtagtcttgctctgttacctaggctggagtgcagtggcacaatctcggctcattgcacgctccccctcctgggttcacgccattctcctgcctcagcctcccgaatagttgggactataggcacccgccagcacatckggctaattttttgtatttttagtagagatggggtttcactgtgttagccaggatggtcttgatctcctgatctcctgatctcgtgatccgcctgccttggcctcgtaaagtgctaggattacaggtgtgagccactgcacccggcctagttcctctacttttaaaactaattattgcatgaatacggtctatatagtacaagtgcaaagtaattttgagcacctactatgttttaacattctacttaaaaattttttttttaaggtagagaaggggctcttgctctgttgcccagggtgatctcaaactactgtggctcaagtgatcctcccaccttgac

SEQ ID NO: 554292 - DNA, 614 bp, Homo sapiens
tggaagaaaaataatgcaaaaaaggcaacaatagtttactccctaacctttctcactgctttaccttactgttttgtatttagtgactcagattagttcctctactttttctttctttctttcttttttttgagacgtagtcttgctctgttacctaggctggagtgcagtggcacaatctcggctcattgcacgctccccctcctgggttcacgccattctcctgcctcagcctcccgaatagttgggactataggcacccgccagcacatcgggctaattttttgtatttttagtagagatggggtttcacygtgttagccaggatggtcttgatctcctgatctcctgatctcgtgatccgcctgccttggcctcgtaaagtgctaggattacaggtgtgagccactgcacccggcctagttcctctacttttaaaactaattattgcatgaatacggtctatatagtacaagtgcaaagtaattttgagcacctactatgttttaacattctacttaaaaattttttttttaaggtagagaaggggctcttgctctgttgcccagggtgatctcaaactactgtggctcaagtgatcctcccaccttgac

SEQ ID NO: 554293 - DNA, 510 bp, Homo sapiens
aaactcacaaaacaggaatcacaaaggtatcaacatgaagttataatacttgtgctgtgataggtgacaagatgcaagagagaataagaatacctagagaagggaagattgtgtagatgaggaagcatctaagcagagtcttaaaggatgacaattaacccttcaattcctttgatgtttccactcttcygcctttctacatattttctattacgatactatattcttccctccgtttactcagctactttctttctttttgtctccttttatagtcacttttttatttgctctctgtatcaatcagggttccaccagagaaatagagctagtaggatttgtgtgtctatgtatatgtacacgtgtgtgtgtgtatgtgtgtgtgtgtgttgtatggagaaagaaagtcagagacagagagagatttattgcaaggaaatggctaacacaatttcacacaatgacctggctaggcaaatctgaaatctgtagggcaggatgtcaggaagc

SEQ ID NO: 554294 - DNA, 667 bp, Homo sapiens
aattccaagtggccattatatacattgtttaagcttcttgttagcattctacctgtatttcattgactcataagaatacactctaggagggatttgtgttacgacttttacagatgaggaaactgaggtgtagagaaaacgaatttctttcttggaaagcagaactagaatcaaacactcagactttatcccacactttattcctcttccatctcccacactactcagagcaggtaggtataaaggccctgtaaactataaatctgtcaaayatgaaagggactaggattatagtcaggagcagtaataagcaccttttgaactagaaaagaaaactgcagtgaaaaaattgtatgtttcttatcctgcactgtgttggtccatcattaccaaaaccaattaatctttttaattacgctcaaacctttttatgcactccaaattagaaatcagaacagtttaggaaaacctctccagaatatatattcaaggttttataaaaagaaaagaaaatgcaggctttgataaactcaacatgtatttacttgaggaaaaatgagatttttagaaaaaagtaggggcaagtgaattcaccaagctgtgaaaagtatactttatccactgggaagtttctgtgagtttgcttgttacaggaatactagcaata

SEQ ID NO: 554295 - DNA, 648 bp, Homo sapiens
ggctccagatggaggcctagggggaaggggaactggggttatggggaccaagagaggcctcggacactcttggtcaggagggatcacatgaactcaggagaggacaaatactgagtgcctggagcgggagcaaggtcgcagggagacacagacccacagccacatctggttcactcctggctcctctgagggtgtcctggggcagcaaagccagtcctagttaccgggtgttcatccactctgggccaagccctgtgttgggagaggcggcctcgtgcagtgggctcagcacaggatgtgggctccaacacggctgggttcaaattgtggctctgcrcttaactagtcaaggggctttgggaagtcgcttcgcctgttccatttcagtttcccacctgacaaatggagttcactgtgcctgacacacggggttttcgtggtgatgaaatcaaacaccatctgtaaagtttctgcttcagagataatcattatgaattatggtatttgtcaggaacctttgggttacgagtggaagaagccaaactggcttaagataaaaacaggcaagaaaacaaagaagaattcactggctcacataactaaaaaactaggtcaggactggctggatccacgttcccaaatcttgtc

SEQ ID NO: 554296 - DNA, 648 bp, Homo sapiens
ggctccagatggaggcctagggggaaggggaactggggttatggggaccaagagaggcctcggacactcttggtcaggagggatcacatgaactcaggagaggacaaatactgagtgcctggagcgggagcaaggtcgcagggagacacagacccacagccacatctggttcactcctggctcctctgagggtgtcctggggcagcaaagccagtcctagttaccgggtgttcatccactctgggccaagccctgtgttgggagaggcggcctcgtgcagtgggctcagcacaggatgtgggctccaacacggctgggttcaaattgtggctctgcacttaactagtcaaggggctttgggaagtcgcttcgcctgttccatttcagtttcccacctgacaaatggagttcactgtgcctgacacacggggttttcgtggtgatgaaatcraacaccatctgtaaagtttctgcttcagagataatcattatgaattatggtatttgtcaggaacctttgggttacgagtggaagaagccaaactggcttaagataaaaacaggcaagaaaacaaagaagaattcactggctcacataactaaaaaactaggtcaggactggctggatccacgttcccaaatcttgtc

SEQ ID NO: 554297 - DNA, 648 bp, Homo sapiens
ggctccagatggaggcctagggggaaggggaactggggttatggggaccaagagaggcctcggacactcttggtcaggagggatcacatgaactcaggagaggacaaatactgagtgcctggagcgggagcaaggtcgcagggagacacagacccacagccacatctggttcactcctggctcctctgagggtgtcctggggcagcaaagccagtcctagttaccgggtgttcatccactctgggccaagccctgtgttgggagaggcggcctcgtgcagtgggctcagcacaggatgtgggctccaacacggctgggttcaaattgtggctctgcacttaactagtcaaggggctttgggaagtcgcttcgcctgttccatttcagtttcccacctgacaaatggagttcactgtgcctgacacacggggttttcgtggtgatgaaatcaaacaccatctgtaaagtttctgcttcagagataatcattatgaattatggtatttgtcaggaacctttgggttacragtggaagaagccaaactggcttaagataaaaacaggcaagaaaacaaagaagaattcactggctcacataactaaaaaactaggtcaggactggctggatccacgttcccaaatcttgtc

SEQ ID NO: 554298 - DNA, 650 bp, Homo sapiens
gggaacactgcagagacaatgctgtgagtttccaacctcagcccatctgcgggcagagaaggtctagtttgtccatcaccattatgatatcaggactggttacttggttaaggaggggtctaggagatctgtcccttttagagacaccttacttataatgaagtacttgggaaagcggttttcaagagtataaatatcctgtattctaatgatcatcctctaaacattttatcatttattaatcctccctgcctgtgtctattattatatacatatctctacgctgcaaattttgggtctcaatttttactgtgcctttgtttttactagtgtctgctgttgcaaaaagaagaaaacattctctgcctgagttttaatttttgtccaaagttaattttaatctatacaattaaaaccttttgcctatcactctggacttttggattgttttttacattcagtgttataatatttgattatgctgattggttttggtgggtactgatgygaattaataaaaacatttcatttccatgtttattttctaatctcttccacattgtaggctatgtttaccatacgtagcagaatgtatttacatttcttggttctagtcatttgtattcttcgtgagtgtgtgtgtgtgtgtg

SEQ ID NO: 554299 - DNA, 612 bp, Homo sapiens
ctctcacggcacagaggatgacttctcatactgtgcctgtagccccttactgtgcttatctacttgagtgtgtgtcttgccctctagtgtgggggctccgtggaggcagggctgtccctacgcacctatgggtctccagcagctcagacagcacagccacaggttcctggtttctctcactggcaaggtgctctcagaagctttgctgactgccttccctccctctatgcagtctgcacaaggaaatgccttggctgccaggcttctcgccccttccacacgtgggggccatacacctgcaaatccttcagtttctgtccatcccattgagtctactctgcccacagatggttcatgtgcctgcatgactgtggtagataataagctaccaaaggctgctaggcaatgcsacatgtttctgtgggtttgaggggaaatatccagtcagctacatatggaacagagcagaactcacagtgaaaataggagatagagaagaaagggcctggctgctatacatggaagaggaagcctcagctctggagagatgcaaagcatgaaaaaaaacaaaaatggtgggagaatgagataacatcaaaggaagaaagggca

SEQ ID NO: 554300 - DNA, 489 bp, Homo sapiens
aaaaggaagccagacacaaaagagtacattatgtaagagtccatttgtataaagtttaaaacaggtgaaattaatctatggtatgagaggtcagaatggtgttacctttagggaggaaggaggaaataatgatkgggagaataccatagtgtttctaggatgctgataatgtcctgtttgttaaccaggtgatagatacatggatgtattcactatgtgatcgttctttgcagtgaacacttaagcacttctctatatgtatatgagactttaaaaagatttttaaagtattcgttaggatgttagggtgacattaatgaaggtaatgaaacaggaagaagttagttcagaataaaactagaaattattgggatgggaggaagtggagctaactaagtataatctgcatttttgagaagtgtggataataataggaacaagttaattgatccatagtggaaaatttgggtttaaagtgatgggttaaga

SEQ ID NO: 554301 - DNA, 602 bp, Homo sapiens
cccaaagttcagtggtttcagcgattatcttttaccctcagttctgtgggtggctgggcagttcctctgctggttttgtctaggttcacttgtaagactgttgatttcttttttccattatttcattttttgttgggaacaggcccctaaaactggccataaacaaaatctctgcagcactgtgagatgtttgcaatggccacgatgcccatgctgaaggttgcaggtttaccggaatgagggcaagggacacctggcccacccaggttggaaaactgcttaaggctttcttaaaccacaaacaatagcatgagcaatctgtgccttaaggacatgttcctgctgcagataactagccagacccatccccttgttttggcccatccctttatttcccrtaagaaatgcttttagttaatctctaatctatagaaacaatgcttatactggcttgctatcaataaatatgtgggtaaatctctgtttggggctctcagctctgaaggctgtgagacccctgattgcccactccacactctatatttctgtgtgtgtgtgtctttaattcctctagcgccactgggttaaggtctccacgacca

SEQ ID NO: 554302 - DNA, 598 bp, Homo sapiens
atgcctggctaatttttgcatttttagtagagaggggtttcaccatgttggccaggctagtctcaaactcctggcctcgtgatcgtctcacctcagcctcccaaagtgctagcattacaggcatgagccactgtgccctttttaataagaagagaagttacaatcaaaatatttatatccatgaaaaaatattttttcacttttggatttaccctgtaaattccttaagacaaggacttaccttatcattttattccttctagtactctgtaatatggatttctataaaatggggatgakcctccctgagattataaaaatatgcttccaaagaaaacattttaaataatacatttactttttaaatcataaaaaatctgacaagaataaaatatttttaaataacgatcaatccagttttcatattttatttttcttcatagcatttatcgttacttgacattttgttgttgtccacccctctgcagaatgtaagcatgtttagggcaggaactttgtcttgttcactgctgtatccctagcacccagcacagtgcctagtataccatggacacttaataaatatttttaaaatata

SEQ ID NO: 554303 - DNA, 534 bp, Homo sapiens
tacaactaaataacccagarctctatcagggtatatgacatttccatcttccttcccacttaatcccagtgtgtctttaaaaactgaaaaggtacttatggaatttaattttgttttactagcttcttttccagggttttctttgttctccttcactcagatactgtctacattctttaacctttttatattatatgtatttctgtaacccattttaaatatttggggagtaaataagtagattaaataatagggtgattttcaatgggttattttcaaatcgatataagctgatatatttttaaggaaaataatgatgtatcagtttataaaaatgatttatttttagaggaaagttgataagaatttatattatctatgatataaaagtatattcaatttaaaaataatttaataagcagttagacctaactgaatttcatttagaaaaaatatatataaaattataatcatttgtgtaactagcatatgctagaatcctttactttcatttttagtggtttaccctttgat

SEQ ID NO: 554304 - DNA, 601 bp, Homo sapiens
attttatttatcatatatggtacagatacaarcatatatgtctatctgtatatctatatatacaactatatatagatacatagacatatatgttttattgacaaatttattgaatagcataaagattttatatatgaaaatatatatcaccatatataaaatcttaagtatgctatttaattaattttgccaaatatatatacatataacatatatattacatatatataaacacctggattagatgtcttacatggacagttttaaataatacatatatatatataatatatatatacacattatttttttgcaaaatatatatacatatatgaaaaatctattgactagcatacttgagatttttgcatttcaccctgttaattttatctagaaaaacacaaacatttaacttataagtttaagcatattgaagggtttagggataaaatataatgatatctgttattcattttgaaatgtataaaaataaggtggattgatggatggatagataggtagataagtttgtgatatataacaaaatgttgattgtagaatttaagtagggagtaacacaggtgttcaatgacatttctaa

SEQ ID NO: 554305 - DNA, 1688 bp, Homo sapiens
caaaacccggcatttcctgccagcgccgcagcacaagcaatgcctgggcctcttcagggtccccgctcgccactgtggggctgctgctgcctgaagcaagaggtgtgtgagcttagggctccacacagtttccatctctcctcccgccctcccccgccccgcccccccaacagaagctctaagctggggaagccactgtgttggataaagccctgtggactaggagagcagctctgtaatgcacaaaaagtgggagacgctgctataactttgcccagtgaaaagccagcagtcagtgggacagtgggattggaggtactgccacctttgcctagaccctatttagagaataagccaccagagcaggcacactggctcatgcctgtaatccgagcacttttggaggccaagatgagaggattgcttgagtccaggagtttgagaccagtctgagcaacatggcgaaacctcatctctaccaaaaaaaaaaaaaaaaaaaaaaaagaaagaaacttaggtgggcgtgatggtacgtgcctgtaatcccagctactcagggggctgagatgggaggatcacttgagcctgggaggtccaggctccagtgagctgagatggcaccactgcactccagcctgggtgacagagcaagaccctgtctcaaaaaaaataaataaataaaaaataagcctccagccatttaattctgcagccacattctgttatatggggcgctctatgggacctctgtgttccgggaacttgattagttatgggtccactttggctctttgggggaatctcacactcaccaataaagactgttttctccctaatacccaagaacctcgtccttactcaaccaaattcacatctacttgctgaagaaatgggttattttggggagcacacaagactgggccccctgtaccttgttctaccgacatcttgcttgaacagaaaggggctgatacctgggggcagggtctccggtggtgtcaggaagactttgctgcccaccttgacagcaccggctcggtattcaggggcagggaggccacagcgttggcacagccccgccaggatctgcgaaggccagaatgcatcacgccaggcattgtaaccatctctacaggcagaaaaagaagatgcgtcagctggggctggtgtagggacacagctgggcctggggcagtgatgacgtcatgaagacatgaggtctaggttcaaaactcccaacgggagacaggttagtcctcatttatgataacaatgaatgaaaaaaatgtagtccaggtgcttccattaagaagatactgatcttattacctctgttttgcagatgagaaaacagacttgaagaggttaagwgggcctggcatggtggctcacacctgtaatcccagcactttgggaggcagaggtgggtggatcacttgaggtcaggggttcaagaccagcctggacaacatggtgaaaccctgtctctactaaaaatataaaaattagctggacatgggggcccacgcctgtaatcccagctactggggaggctgaggcaggagaatcgcttgaacccaggaggtggaggttgcagtcagccgagatcgtgccactgcactccaacctgggagacagagcgagactgtttcataaaaaaagaaagcggtcaagtgacattcgttaca

SEQ ID NO: 554306 - DNA, 775 bp, Homo sapiens
cttgtcaaagtgttgggattacaggtgtgagccactgtgcctggtcaaaaataaatacttaactaagtttaaggcaggatatgctaaattctgtaagaaagacattaccaggagagatcacaagcccagttgaagggccaagaaagacctgtataaggatttgaataatttcctactccaaaaccctagaccttgtcttcaccagaaattaatgcatgcttcaaatcttaaattcttgaaaccctctttcagattaaactcttataggatacataattctacctaaccatgataaataatttttagagccctattgcaccgtttgatgactatacataacaatcccatatgctatagctccaagcaaccctcggaaaatattggtgggtggmaaacgaacaaattgctgaagcttttgatgatggatatcctaattaccttgatctgatcactgtacattgcatatatcgaaacatcactatgtatcctacaaatatgtacaatcattgtgtgtcattacaaaaataaaaagcattaaaaaacaaataaatgttgattgggggaaaaccttattcaccctccatgaggctccagcagagagacgattattcttcactgctcagggaaaagcaagtggctaatcctactagtaggactggtgaagttctttctatctcaccctaccccaccttcaagtggaagaaagaaggaataagcaaggttttggccttaggtctccaacaattcatcagaagctctgcatttagtggttgtt

SEQ ID NO: 554307 - DNA, 775 bp, Homo sapiens
cttgtcaaagtgttgggattacaggtgtgagccactgtgcctggtcaaaaataaatacttaactaagtttaaggcaggatatgctaaattctgtaagaaagacattaccaggagagatcacaagcccagttgaagggccaagaaagacctgtataaggatttgaataatttcctactccaaaaccctagaccttgtcttcaccagaaattaatgcatgcttcaaatcttaaattcttgaaaccctctttcagattaaactcttataggatacataattctacctaaccatgataaataatttttagagccctattgcaccgtttgatgactatacataacaatcccatatgctatagctccaagcaaccctcggaaaatattggtgggtggcamacgaacaaattgctgaagcttttgatgatggatatcctaattaccttgatctgatcactgtacattgcatatatcgaaacatcactatgtatcctacaaatatgtacaatcattgtgtgtcattacaaaaataaaaagcattaaaaaacaaataaatgttgattgggggaaaaccttattcaccctccatgaggctccagcagagagacgattattcttcactgctcagggaaaagcaagtggctaatcctactagtaggactggtgaagttctttctatctcaccctaccccaccttcaagtggaagaaagaaggaataagcaaggttttggccttaggtctccaacaattcatcagaagctctgcatttagtggttgtt

SEQ ID NO: 554308 - DNA, 959 bp, Homo sapiens
ttttaaactctaaccaggaacagacccaaaaaaggactgactgagaactgttcagaagagccacttattaaaactaaaatacaacggttgtattaggaaggtatactccaatgtttaaataaatcatttttaaatgccctagcaatattaggggtacactgtatagctaattcatcatagcagagaggcagcacaatttaaaacacatattcagaacaataactacactgagtttctctaggcaatgtactggtagtacctgttcttaatatcttttcatactaaattacctcttttgtgttatatctggaattctgagctctcaaacaagttctctgaataaaaattacccattttaaaattaccatttagtactttgtgttgtcagaaatgtaaacttcaaaatcacagaatgatagtcttaaagactaggagaactttaaggcaatttttagcctcatccagcacaggctttatctctataatatcttacagacaaagcatcatccagcatctgcttgaacagatccagtgcctagtarctcaccacttttttaaaaagctcagttcaaggatatcatttttttacctaaaaacgaatattgcctttttatacagaaagaattctttctctcttgaaagacactgcctatagtttttcatttgtgcattttatatttatttgttttcaatttaaccccaattgcctctgataaagactgtgggcatcctacaataaaatatttaaattcaagtttgtgaaagtctgtgtgtaaaaacttaaaaacccacaacaaaatgtgtattagaaaagaaagtataccaattgtctaacctcactaacagcgttactgtgagcatttaatatagtcctgaacttcctagcagccaaagccaacagaggcactagtaacagtggtctcattatctaattttaaaatttattaaaaataaaacaa

SEQ ID NO: 554309 - DNA, 959 bp, Homo sapiens
ttttaaactctaaccaggaacagacccaaaaaaggactgactgagaactgttcagaagagccacttattaaaactaaaatacaacggttgtattaggaaggtatactccaatgtttaaataaatcatttttaaatgccctagcaatattaggggtacactgtatagctaattcatcatagcagagaggcagcacaatttaaaacacatattcagaacaataactacactgagtttctctaggcaatgtactggtagtacctgttcttaatatcttttcatactaaattacctcttttgtgttatatctggaattctgagctctcaaacaagttctctgaataaaaattacccattttaaaattaccatttagtactttgtgttgtcagaaatgtaaacttcaaaatcacagaatgatagtcttaaagactaggagaactttaaggcaatttttagcctcatccagcacaggctttatctctataatatcttacagacaaagcatcatccagcatctgcttgaacagatccagtgcctagtagctcaccacttttttaaaaagctcagttcaaggatatcatttttwtacctaaaaacgaatattgcctttttatacagaaagaattctttctctcttgaaagacactgcctatagtttttcatttgtgcattttatatttatttgttttcaatttaaccccaattgcctctgataaagactgtgggcatcctacaataaaatatttaaattcaagtttgtgaaagtctgtgtgtaaaaacttaaaaacccacaacaaaatgtgtattagaaaagaaagtataccaattgtctaacctcactaacagcgttactgtgagcatttaatatagtcctgaacttcctagcagccaaagccaacagaggcactagtaacagtggtctcattatctaattttaaaatttattaaaaataaaacaa

SEQ ID NO: 554310 - DNA, 1583 bp, Homo sapiens
tgtcttgaaggccctggggtgacagggccaggacagaaagttatccccctctgtgaaggggaagccacaagtgtggggttacggagatggagcctcgcacacagcacctctctccccatctagggctagggcccatccacctgagtgaggtgcgctgcaggggatatgagcggaccctcagcgactgccctgccctggaagggtcccagaatggttgccaacatgagaatgmtgctgctgtcaggtgcaatgtccctaacatgggctttcagaatcaggtgagtttgggtctgagcatggcctcaggctgggggccgggaaaccctggggagtccccaggacaccacatcgagctagcggggagaggtccaggaggagcggctagcgcttctgctttgggcaccagtctgccttcccttagagccgacctggctgcagcccctccgaaatgtcagaggccacaggggctctgcagatggatgtgctctcccatacccgtctcgggtcccctgtgaagctgagaaagaaggtgcctgggaaagagggccacagggctgtcggcacgagggagtctgtgtgggatgctcagggcaaagtgtcagtgctaacatggactgtgagcaagtcactggtgccactgtaaaatggggttcacgctctcagggggtcactgtgaatgaggcaagggacatgaaagccctttgcaaattgccagttgtcgttaatggtggagggcaagtgccagagcaggaggagcccctggtccaggcactttgagtcagatttctctagcaggcagggacattagagactacctgctacactgtcctcaccttacagagaaggagaccaaggcagagaaggggactgtcttgtctagggtgacacagtgagctggcttgggcagacctccaggctcgcagcctgagctcttccctgcaaggctaccccactcctcacacacccctcgccattgcaggtgcgcttggctggtgggcgtatccctgaggaggggctattggaggtgcaggtggaggtgaacggggtcccacgctgggggagcgtgtgcagtgaaaactgggggctcaccgaagccatggtggcctgccgacagctcggcctgggttttgccatccatgcctacaaggtaggtccctctgttgtttcttccgtatgacctctcaccctcctgttctgaggcccaaaacttcctgtgctaaagctgctgcctctttgcccatttggcaattcattactgagtgaaactatgagccgacatgatgctgagtgctgggaacagtgtggtaaacaagaagacatagtcctaatgaaatcgtcaatgagggacacatttgcatctgcaggaaagatgaatagaaattagtcagacaaggtggaggaggaatgaatagcttatgcaaaagccctgtggccagagaaagcttgattcagctgaggaaatcagggccagggattgtagtgtggctctctctcgagagtgctgtcaaacatgagggcagaggaggcaggggcaagatcactcaaagcttgcaatccacatgtttgaaagatttcttcctttg

SEQ ID NO: 554311 - DNA, 1583 bp, Homo sapiens
tgtcttgaaggccctggggtgacagggccaggacagaaagttatccccctctgtgaaggggaagccacaagtgtggggttacggagatggagcctcgcacacagcacctctctccccatctagggctagggcccatccacctgagtgaggtgcgctgcaggggatatgagcggaccctcagcgactgccctgccctggaagggtcccagaatggttgccaacatgagaatgatgctgctgtcaggtgcaatgtccctaacatgggctttcagaatcaggtgagtttgggtctgagcatggcctcaggctgggggccgggaaaccctggggagtccccaggacaccacatcgagctagcggggagaggtccaggaggagcggctagcgcttctgctttgggcaccagtctgccttcccttagagccgacctggctgcagcccctccgaaatgtcagaggccacaggggctctgcagatggatgtgctctcccatacccgtctcgggtcccctgtgaagctgagaaagaaggtgcctgggaaagagggccacagggctgtcggcacgagggagtctgtgtgggatgctcagggcaaagtgtcagtgctaacatggactgtgagcaagtcactggtgccactgtaaaatggggttcacgctctcagggggtcactgtgaatgaggcaagggacatgaaagccctttgcaaattgccagttgtcgttaatggtggagggcaagtgccagagcaggaggagcccctggtccaggcactttgagtcagatttctctagcaggcagggacattagagactacctgctacactgtcctcaccttacagagaaggagaccaaggcagagaaggggactgtcttgtctagggtgacacagtgagctggcttgggcagacctccaggctcgcagcctgagctcttccctgcaaggctaccccactcctcacacacccctcgccattgcaggtgcgcttggctggtgggcgtatccctgaggaggggctattggaggtgcaggtggaggtgaacggggtcccacgctgggggagcgtgtgcagtgaaaactgggggctcaccgaagccatggtggcctgccgacagctcggcctgggttttgccatccatgcctacaaggtaggtccctctgttgtttcttccgtatgacctctcaccctcctgttctgaggcccaaaacttcctgtgctaaagctgctgcctctttgcccatttggcaattcattactgagtgaaactatgagccgacatgatgctgagtgctgggaacagtgtggtaaacaagaagacatagtcctaatgaaatcgtcaatgagrgacacatttgcatctgcaggaaagatgaatagaaattagtcagacaaggtggaggaggaatgaatagcttatgcaaaagccctgtggccagagaaagcttgattcagctgaggaaatcagggccagggattgtagtgtggctctctctcgagagtgctgtcaaacatgagggcagaggaggcaggggcaagatcactcaaagcttgcaatccacatgtttgaaagatttcttcctttg

SEQ ID NO: 554312 - DNA, 1583 bp, Homo sapiens
tgtcttgaaggccctggggtgacagggccaggacagaaagttatccccctctgtgaaggggaagccacaagtgtggggttacggagatggagcctcgcacacagcacctctctccccatctagggctagggcccatccacctgagtgaggtgcgctgcaggggatatgagcggaccctcagcgactgccctgccctggaagggtcccagaatggttgccaacatgagaatgatgctgctgtcaggtgcaatgtccctaacatgggctttcagaatcaggtgagtttgggtctgagcatggcctcaggctgggggccgggaaaccctggggagtccccaggacaccacatcgagctagcggggagaggtccaggaggagcggctagcgcttctgctttgggcaccagtctgccttcccttagagccgacctggctgcagcccctccgaaatgtcagaggccacaggggctctgcagatggatgtgctctcccatacccgtctcgggtcccctgtgaagctgagaaagaaggtgcctgggaaagagggccacagggctgtcggcacgagggagtctgtgtgggatgctcagggcaaagtgtcagtgctaacatggactgtgagcaagtcactggtgccactgtaaaatggggttcacgctctcagggggtcactgtgaatgaggcaagggacatgaaagccctttgcaaattgccagttgtcgttaatggtggagggcaagtgccagagcaggaggagcccctggtccaggcactttgagtcagatttctctagcaggcagggacattagagactacctgctacactgtcctcaccttacagagaaggagaccaaggcagagaaggggactgtcttgtctagggtgacacagtgagctggcttgggcagacctccaggctcgcagcctgagctcttccctgcaaggctaccccactcctcacacacccctcgccattgcaggtgcgcttggctggtgggcgtatccctgaggaggggctattggaggtgcaggtggaggtgaacggggtcccacgctgggggagcgtgtgcagtgaaaactgggggctcaccgaagccatggtggcctgccgacagctcggcctgggttttgccatccatgcctacaaggtaggtccctctgttgtttcttccgtatgacctctcaccctcctgttctgaggcccaaaacttcctgtgctaaagctgctgcctctttgcccatttggcaattcattactgagtgaaactatgagccgacatgatgctgagtgctgggaacagtgtggtaaacaagaagacatagtcctaatgaaatcgtcaatgagggacacatttgcatctgcaggaaagawgaatagaaattagtcagacaaggtggaggaggaatgaatagcttatgcaaaagccctgtggccagagaaagcttgattcagctgaggaaatcagggccagggattgtagtgtggctctctctcgagagtgctgtcaaacatgagggcagaggaggcaggggcaagatcactcaaagcttgcaatccacatgtttgaaagatttcttcctttg

SEQ ID NO: 554313 - DNA, 1583 bp, Homo sapiens
tgtcttgaaggccctggggtgacagggccaggacagaaagttatccccctctgtgaaggggaagccacaagtgtggggttacggagatggagcctcgcacacagcacctctctccccatctagggctagggcccatccacctgagtgaggtgcgctgcaggggatatgagcggaccctcagcgactgccctgccctggaagggtcccagaatggttgccaacatgagaatgatgctgctgtcaggtgcaatgtccctaacatgggctttcagaatcaggtgagtttgggtctgagcatggcctcaggctgggggccgggaaaccctggggagtccccaggacaccacatcgagctagcggggagaggtccaggaggagcggctagcgcttctgctttgggcaccagtctgccttcccttagagccgacctggctgcagcccctccgaaatgtcagaggccacaggggctctgcagatggatgtgctctcccatacccgtctcgggtcccctgtgaagctgagaaagaaggtgcctgggaaagagggccacagggctgtcggcacgagggagtctgtgtgggatgctcagggcaaagtgtcagtgctaacatggactgtgagcaagtcactggtgccactgtaaaatggggttcacgctctcagggggtcactgtgaatgaggcaagggacatgaaagccctttgcaaattgccagttgtcgttaatggtggagggcaagtgccagagcaggaggagcccctggtccaggcactttgagtcagatttctctagcaggcagggacattagagactacctgctacactgtcctcaccttacagagaaggagaccaaggcagagaaggggactgtcttgtctagggtgacacagtgagctggcttgggcagacctccaggctcgcagcctgagctcttccctgcaaggctaccccactcctcacacacccctcgccattgcaggtgcgcttggctggtgggcgtatccctgaggaggggctattggaggtgcaggtggaggtgaacggggtcccacgctgggggagcgtgtgcagtgaaaactgggggctcaccgaagccatggtggcctgccgacagctcggcctgggttttgccatccatgcctacaaggtaggtccctctgttgtttcttccgtatgacctctcaccctcctgttctgaggcccaaaacttcctgtgctaaagctgctgcctctttgcccatttggcaattcattactgagtgaaactatgagccgacatgatgctgagtgctgggaacagtgtggtaaacaagaagacatagtcctaatgaaatcgtcaatgagggacacatttgcatctgcaggaaagatgaatagaaattagtcagacaaggtggaggaggaatgaatagcttatgcaaaagccctgtggccagagaaagcttgattcagctgaggaaatcagggccagggattgtagtgtggctstctctcgagagtgctgtcaaacatgagggcagaggaggcaggggcaagatcactcaaagcttgcaatccacatgtttgaaagatttcttcctttg

SEQ ID NO: 554314 - DNA, 1156 bp, Homo sapiens
ggtctctgggcaagcttccttatataacctgcacattgtcaacgctccactcaggcagctctcccattccttactacataattattagataatgcataagggagaggtttgaatgactagcctgcctgggaggctgcctctctacggtcctgcttccaccacacgggagccctgaaacgagcaggccagctggagaggtggccaacacattcctcacccagaggctccgggctccccagatggccactgccacctgaccacacagagtcactttgccagaaggactgccctgctttaggcctgatctgatctttttccaggaaactcgtctggtgtaagatttatgtgtccaaacttgccagccttcccctttcaccctggactaacagggacaagaattctaatcaatgtgcaggaacacagaaaaaaaacagggaaacagcaggcaggcccaaccccaaaagccccaaacttatttcccaattttgggttgcacatgtatttctactcacataagacagtttgcatccaactggggggaattttgagtttcaattaaactttgctaaaatacaaaactcatttccccttaactgtgcttcctgacaatgaagtggtggtgtcacggggcagaagggctgatggtgtgggttaccacagcaaggtccatgctgcaaagacgggctgcccctcctgctctgggagtcaacgcttcctgggtccaccaggcccagcatttccacaggctgtcatcggtgtgtccccagcacagcacctagctagatctcagcaaatgatttgaatgtgtggggctccctccaggtaagaaaggaacccctgctcacggcactccccagaagtccttggtaactcactttctctttctgttctgaacatccattcgggctggtttaaagcacagctcgctcaagaggcagccctccagaggagatcggggttaattacgtttastgacagctgtcttctttctcctacagtcacttcttcccatgtcctgatttcattgcttgtgaaaagagatggccttccaatgggaaaaggcaaggagtaaaactcacgagagaaagcgtcctggagattttaaggagaaaggcacatcggttctgccagcacaagagctgcctgtttccctatc

SEQ ID NO: 554315 - DNA, 1322 bp, Homo sapiens
tgggattacgggcgtgagccacggcgcccagcccttaatcctacatttaaataggattcagccaatcctattacctgttccagtgtctttattaaactcttggactttattaagaatagttcatggaaactatattcccatggaaactatccctttgcatattggaaaatatttttcttttgcccttatatttgaatgacagtggctagatataaaataggtatttaatactttttccctagtgattttgtacacagacctgatattaaatattttttgtttgttttttattttttggagatggagtctcactctgtcgcccaggctggaatgagtgcagtggtacaatctaggctcactgcaatctccacctcccgagttcaagtgattctccgcttcagcctcctgattagctgggattacaggcacatgccaccacacccagctaattttatatttttagaagagatggaatttcaccatgttagctaggctggtctcaaacttccgacctcaggtgatctgccctcctcggcctcccaaagtgttgggattacaggtgtgagccaccgtgcctggcctaaatattgttttagagaagtttgaaggcagaccaattttaagattccccccttaggtgaattgatttgtatcaggagaaggttgtctagatcagcagtctccaacctttttcrcaccaaggaccagtttcatgaaagacaatttttccacggatggggtggcgggggagatggtttcaggacaaaactgttctatatcagatcatcaggcattagttaaggagtgtgcaacctagatccctcgcataccatagggagggataggtttaccatagggtttgcgctcctgtgagactctaatgctgctgttgatctgagaggaggtggtgctcagatggtaatgctccctggagtgccactcacctcctgctgtgtggcctggttcctgacaggcgatggaccgattctggggtctgcagtccaggggtggggaccctcatctagatgaccataagatgctttatcaaggtgtatcctggttttttatgtttttgttttttgagggggtctcgcactgtcacccaggctacagtgcagtggcgcgatcatggttcactgtagccttgacctcctgggctcaagtgatcttcccaccctagcttcctaagtagctgggaccatgggtgcacactatcacacctggctaagttttttgtttgttgttgtttgagacaaagtctcactctgttgcccaagttagagtgcaatggggcaatcttggctcactgcaacctctgcctc

SEQ ID NO: 554316 - DNA, 654 bp, Homo sapiens
actcttttttctttacagcactaaccataactttatatatttatttaatgttgatatcctcccgagactataagctccacgtgaacatgggctatgtctgttttgttctttggtttagctccagaacaagtcaggcaccaggcaggtggtaggatcccaatgaaaagtcactgaaaaaagcatcacaacaaggcatggcctgatgcacggaggcagcagatagtgagggctctgggagataaaggacgccaccaggcttagctggraagtgacccaggcagcctctcagaggcaggtgtaggtaccttgctgtatttcttctggaataaagggctctggatttagccccaacatctaggttctcgtctgaaggaacctgggtgtgataaaggaagtctgagagatgcactgttattggtatggcaccagaaacaagacccatttcatagatagaaatgacggtttttacagctgaaccaatccaaagcacttcgctgggattgcaacacttgtttgggacaggatggttgggaaagttaacccagggaaccaaatttgtagggaaacgagggtagattgcaagtccactgttttgagttttgcatccacatagaagagaagtctgtagattcattcaatacccagtctcatttt

SEQ ID NO: 554317 - DNA, 717 bp, Homo sapiens
cagaatttaattgtctaaaacagagactttaggtgtcaagaagcttttacttaattattatcatgcttaaaaatcaatcaatgaattcaacatattttgctaccactgcatggcagaaaatcttgccatttaagaccaagaatgaaaatgagtttatgtcatactaaaatatcctaaaaattgtgtcaatttttactatggtgtaatacaattttgatacctatttaagttttaaggcaaaaaatgatgattttgtataaattctaccatctcttttatgttggaaatttgaatgggttgagaatgcattgaartattattactctatatacctaaatctaacattattccttaacttggaaaaaggcatcagtaagaaaaactcaatacaaaaaatagcaaaggaaaatatattatctgagaccataagtcagaataaatatgaatttactatttctagcaagaaaggacacatcatagattttatttcacactttgtggttgtcttaagcaacatatatatatatatatatatatatatggatatatatacggaaaagattatgcagaaataatattacatcactgtgaaatccatcaagaaactaagaaatcagatgtattaacaacatacatgaatatagtccacctagtgaatgacaggaaatggagcaaagaaaagtagccagtccaggtgtggtccagctgacacacaga

SEQ ID NO: 554318 - DNA, 903 bp, Homo sapiens
tgaacgtgaggatgtccatagggaactagatttttatctgtgagacgcaaatctgtttttttttttttgtttttkttttttttgaggtggagtctcactctgctgctcaggctggaatgcagtggcacgatttcggctcactgcaacctctgcctcctgggttcaagtgattctcctgcctcagcctcctgagtagctgggattacaggcgtgcgccaccacgcccggctaatttttctatttttagtagagacggggtttcacaccatgttggtcaggctggtcttgaactcctgacctcgtaatccgcttgcctcggcttcccaatgtgctgggattacaggccacaattcttatctatcgagacatgtgagcaacttaggagtaagaggttttatgttaccaggcttttacctttcctgtccttctcaaggttggcttcttgatggcaggaactctgggtgggggccgacggggaaggagtgggggcgcctgtggggtctctggtttggctgcccccggtgtgggctctggttcagaggatgcttcaaggtcccttggggccacggcacttagggcttcttcggaggcacctgaaacataaaaccacatggctgaagtgtaaaggacaaggcaattcactgcatgatttcgtccttagacagtctacatcctaagtgtcatttactaattcagtgtatttcaggagtaatcagctagattcagtcccagctttttttcttttttcttttttaagatgggctctcgctctgccacccaggccggagtgcagcggcatgatcacggctcactgcagtctcaacctcccaggctcgagcaattctcccatttcagcctcctgagtagctgggattacgggtgagcactgccacgcccagccaa

SEQ ID NO: 554319 - DNA, 903 bp, Homo sapiens
tgaacgtgaggatgtccatagggaactagatttttatctgtgagacgcaaatctgtttttttttttttgttttttttttttttgaggtggagtctcactctgctgctcaggctggaatgcagtggcacgatttcggctcactgcaacctctgcctcctgggttcaagtgattctcctgcctcagcctcctgagtagctgggattacaggcgtgcgccaccacgcccggctaatttttctatttttagtagagacggggtttcacaccatgttggtcaggctggtcttgaactcctgacctcgtaatccgcttgcctcggcttcccaatgtgctgggattacaggccacaattcttatctatcgagacatgtgagcaacttaggagtaagaggttttatgttaccaggcttttacctttcctgtccttctcaaggttggcttcttgatggcaggaactctgggtgggggccgacggggaaggagtgggggcgcctgtggggtctctggtttggctgcccccggtgtgggctctggttcagaggatgcttcaaggtcccttggggccacggcacttagggcttcttcggaggcacctgaaacataaaaccacatggctgaagtgtaaaggacaaggcaattcactgcatgatttcgtccttagacagtctacatcctaagtgtcatttactaattcagtgtatttcaggagtaatcagctagattcagtcccagctttttttcttttttcttttttaagatgggctctcgctctgccacccaggcckgagtgcagcggcatgatcacggctcactgcagtctcaacctcccaggctcgagcaattctcccatttcagcctcctgagtagctgggattacgggtgagcactgccacgcccagccaa

SEQ ID NO: 554320 - DNA, 602 bp, Homo sapiens
tttttgctcccgggaataggtgagtggggtcagaaacgaattcactgctcaataaactaagactggatcttgcagaaagaggaagaacgctcaaatccttaactagaaagttagttcccagagctgccatcgcttccgaggaacacatctagagacatccaaacaacacacaatcttccttcttgactcctccgaatctggcagctcatctgagcagctataattaattatgagcttcttcctccctgcagctgatgtggctcattaatgaatttgttcctaatgaggaygtagcctccttagagttgaaacccttcagtagtgcatcactttcttcctggctccgctttagaaacatccttccctaccccctcctggggccccaggaccacatgaagcctctgatcattaaacaaacggaaatctgtcggggcagagccgagacaggaacaatgaccagtaaattcctggggctggactggcagctccttattcctgctgctctaccaatctgctgccctagagcaccaaaacacacccagttctggcaggaatgaaaaagcaaggaagtacctgctgtgacgaccaaattactgttcagt

SEQ ID NO: 554321 - DNA, 602 bp, Homo sapiens
tttttgctcccgggaataggtgagtggggtcagaaacgaattcactgctcaataaactaagactggatcttgcagaaagaggaagaacgctcaaatccttaactagaaagttagttcccagagctgccatcgcttccgaggaacacatctagagacatccaaacaacacacaatcttccttcttgactcctccgaatctggcagctcatctgagcagctataattaattatgagcttcttcctccctgcagctgatgtggctcattaatgaatttgttcctaatgaggacgtagcctccttagagttgaaacccttcagtagtgcatcactttcttcctggctccgctttagaaacatccttccctaccccctcctgggrccccaggaccacatgaagcctctgatcattaaacaaacggaaatctgtcggggcagagccgagacaggaacaatgaccagtaaattcctggggctggactggcagctccttattcctgctgctctaccaatctgctgccctagagcaccaaaacacacccagttctggcaggaatgaaaaagcaaggaagtacctgctgtgacgaccaaattactgttcagt

SEQ ID NO: 554322 - DNA, 644 bp, Homo sapiens
tgcctaatatatgaacatatgaacaacatacatagtgaatgcaatatttttaaatctagaaaataaacatgaaagctggaaaccaaggaaggggcggcaacttacaagtgtcagatattctgctgggcactgaggttaagtctctcatgaaatttaatattctataggtgtggtcaggtcagataaattagagcttgctaatgaaaatgtgaaataaattgtagaagcatcacacacttttgaaaactatttacatttagctaaatcactgaatagaccaacatgatctattgactatgcaatgagttaacaggcctgggtaaccatatgttgtttgattttgggaaatagtacagcaaagtcacttaagataatctgcctatggttcaatggagagagcattctaacaatttctttatttttcacctggaaaaacttctctcattcaattgcttttttttatgactactctagatatctaaacattgcacttgaaccacaggygaaattttataattcttttatttaaaaatcttcttagggctggtggggttttgttattattttaggcactatcaaaaatatggataaaagagaaatctcaaattctctttccctggaacttgtgaagaaatggagataat

SEQ ID NO: 554323 - DNA, 654 bp, Homo sapiens
gggagaaggagcgagcctggaacataggggctgtaagtggagcacgtggactcctccttgggtcctagagagagaaggaaggctataagtgaatatagaaggctgtttcattaaaatacttataggaggccaacactttgggaggccaaggcgggtggatcacctgaggycaggagttcgagaccagcctggccaacatggtgaaaccccatctctactaaaaatacaaaaattagctgggcatggtggcaggcgcttgtaatcccagccactcgggaggctaaggcaggagaattgcttaaacccgggaggcagaggttgcagtgagccgagattgagcccttgcactccagcttaagtaacagagcaaaactccatctcaaaaaaaaaaaacaaaaaaacaaaaaccagcgtcatggtaggacttcatggtgcatgtgttacaggttgcatacctacacacacacaaacacacacatgtacctgtgcacactcacagcatagagcaacacacagagaagtgttgattctccttcatcctgccccagaccacgacacagtattggcaccaggagggcccagtgaatgagaagcaatgcccagaggaagatgtgaaggtacctgtggaagaccacagggcccagcaaaagatag

SEQ ID NO: 554324 - DNA, 654 bp, Homo sapiens
gggagaaggagcgagcctggaacataggggctgtaagtggagcacgtggactcctccttgggtcctagagagagaaggaaggctataagtgaatatagaaggctgtttcattaaaatacttataggaggccaacactttgggaggccaaggcgggtggatcacctgaggccaggagttcgagaccagcctggccaacatggtgaaaccccatctctactaaaaatacaaaaattagctgggcatggtggcaggcgcttgtaatcccagccactcgggaggctaaggcaggagaattgcttaaacccgggaggcagaggttgcagtgagccgagattgagcccttgcactccagcttaagtaacagagcaaaactccatctcaaaaaaaaaaaacaaaaaaacaaaaaccagcgtcatggtaggacttcatggtgcatgtgttacaggttgcatacctacacacacacaaacacacacatgtacctgtgcacactcacagcatagagcaacacacagagaagtgttgattctccttcatcctgccccagaccacgacacagtattggcacmaggagggcccagtgaatgagaagcaatgcccagaggaagatgtgaaggtacctgtggaagaccacagggcccagcaaaagatag

SEQ ID NO: 554325 - DNA, 1626 bp, Homo sapiens
caacagtgacgtcatgaggactgacatggagcaaaaagcaaagtgggattcttgttacctggcctaaaccatcagtgcacgaaaggagaagaaccagtatctgtgaagcatacttcacagccataggccgaggaggcctggtgcttcacttaccttcgtttcccctctctggcttgcataatgagccttggttcccatttgtcttcagcctgccagatctggcctgcccatgtacttaccctgttctcttgcatctctctaacaactggcatgcaaggaatgtttttctgattaaaaacaaacaaacaaagctcttcaaagaaaatttagaaagtatagaaaagttttaagtagctaagtaaaaataatttacgcattatcccataatccagaagtaaatacatttgacccttgaataacatgggtttaaactgttagagggtaccataaacgaatcaaaaatatatcattaaccaaacacaaaacccacttatagagcaggctgacttttcatatactcagtttccaaagagccgactgcaggacttgagttatgtgtgtatttgggtatatgtggaaggtcctggaaccgatcccccatgtaaaccaagggctaactgtactacattttaacctacttctgtttgaacattatggtatggttattgcttttgcctcattgtcctattagtttgaagtttaaaaaaacctaacccgcctttcttacccaatctgctataatgtgacgaccaaaaagtctagtcccagcccatctgcctcaactcctctcccttttaggttgtagggaagaggctggagtgcagattgtatcttctgccctccttatgccaacaagatggccttcccctctgaaacaaagtaaaactgcaacactgtgactgcttaaatgagggatatgtgaaaaggctatgaaaaatacaaaagctttcctaggaaatgtattataatgcagtgggaagctaattactgaaatatgcatattgtagtcactcagtctcacatactctagttaccagcaaataagttactgagaatatgtcattcaaaggcgtagaagcctttgaaaggagcaaatgctttcacatcatttaaactaaaaaaaaaaaaaaamctccaacaactatgaatttatagtttaagatcagttaacactgaatttcaaataaaaggactataaaacttgtcatttttctgtaagggctgtaacacataaatacatttcaatatccctgtttttaaataaaatacacatttatacagaaaaaagtttataaattaggcacagtaagagataactaataataactaacaataactaataactaataaaataataataactaataataaaatgagataattataacagtatgccagtatcactactgttgcactttggggcaatattaagtaaaataagggttacctaaacaagtactgcaataccacaacagttgatttgataactcagagggcaacaatgggtagcgtctacaatgtggatacattggacaaagagataattcctgtcccaggtgggcagtttaaaacttacaaattgcttatttacgggatttttcacttattatttttggaccacagttg

SEQ ID NO: 554326 - DNA, 1842 bp, Homo sapiens
attaaaggatatatgaaactgattaagccttggaacttcatttctttctgatgaactgtatacacctggtaaagagtgcaaacctcagatagaccatggaattgattttgtatattgtgtgagacagggattaagatttattcttttcaaaattgatataatattgacctcataccatgtattgaaaagaccattctttccacaatagtcaacaatgtcatctttattgtaaatcaaatctatatataatatacaaatgtatacacacacacattgacatctacagggaaagaaagaaggaaagaaagaatgaaagaaagaaagaaaaagacagaaaagagggaggaaggaaggaagaaaggatagttcttgactccatgttatattccattatttgactattgcaacagtaccacactgtcttgattagtgtagtttcataataagtcatatttggtagtgtctttccactttgatggtagtggtgttttgttttgtttttttcctagaatgtcttgggtgtatgtagccgtacatattaacatatacattttaaatgatcttgttaatttccaattcctttggaaagcatttgagtacatagttaaacctgtgtacccaggcactccactttaagtaccttccccaaagcactgtaagcatgatgtagcaaaagacattcaagaatcctcataacagcactctgaaataggcaaaatctagaaaaattaaaatgttcaatacagtagaatgaatacattgtcttatatttatacaagtaaatgctacacatagcaatgaaaatgaactactactataagtaatgatatggatgaatcttacaatattgaattaaagaaacgagatacatttgagtataaattgtgattctatgtatacaaaccttagaaaccagcaaagtaaattgatggtattagaagtcagtatatcagctctctttggagtgtaagtaatgactgagagtggtatagggagggtaattgggtacttgtaatcttcttggcctgtgtgctagttacacaagaggatttattttgtgaaaatttctcaagctgtacatttatgatttatgtactctttttctatgcatcttgtacctcaatgaaaattatttgaatatatggatatcatacatgagccataatagcttcattttggttctgttttattttgttcttacagagcaaaatttgggaacaaatggaaaagtctgtggatccatagtttctgctataacaaacaaagcttttatgtttatattgcacttccacgtcagaagaacctgtggaagaatccaggaaaatgcctagtgtcaatgtgaggaaagtacatggatggcagcagactaccaggtaacccaggaaagaaactgtggaggaaaagagagaataagagtggaccaaatgggcacctgtatcctagacaggatgtagaagtcatataattttgcttcgtgtttagtgagaatttttcttccctttccttccttttcccttccatttcctttcctttcctttcttgaaacttgtattaacagcaaactcatatcgatgcagcatcaacagatgaagccaaattttgcacaaacatcgtaagatttctaactaaccactttaggrtatgtgtgacttgtgtccagtggcttattagtgtgaacaaaatcacggaatcaaacgagcctgacgacaactgcatggagtgagagattgggtctgggccacatggcatactcctattagttttatattatcagttaataataatcgtgtgttactgtctcaacaaccctgtcatgtagacaagaaaacgaatgctggggat

SEQ ID NO: 554327 - DNA, 665 bp, Homo sapiens
gtcattttattgtactttctytcccgttctactctatgactgaactacctttatgtaactttgatttctggaggaatgtattatttcttatgtgagtacaacacagttcgggagccctcaagaccactctcacttctaacactaactgcacatttgagggactcccaaagagtcactcacatctaacattggctgcaagttcatggtttctcaagaccatattgaggttcaataatttgctagatggactcaggcaactcactaagagctgttatactcatggttatgttttatacagcaagagagtacactacaatcaaccaagggaagaggagcatagggcaaagtctaggaaggttgcaagcatggagtttctagttgtcttctcagtggagttgtgtggataacacttattagtttcagcaatgatgtgtgatgatacataaaaaggattgacaaccagagaaactcatcccttccttggtgtctggagttttgttggggctcagccttgagacttggctgacctcccgggtggctgactttagtcttcagctcctccaaaggttaagctgacactgcatggtctgaaactccctcaccataaatcacatttttaacatagactctggcatggcccaaggcccacaggtaaacaaacacat

SEQ ID NO: 554328 - DNA, 665 bp, Homo sapiens
gtcattttattgtactttctttcccgttctactctatgactgaactacctttatgtaactttgatttctggaggaatgtattatttcttatgtgagtacaacacagttcgggagccctcaagaccactctcacttctaacactaactgcacatttgagggactcccaaagagtcactcacatctaacattggctgcaagttcatggtttctcaagaccatattgaggttcaataatttgctagatggactcaggcaactcactaagagctgttatactcatggttatgttktatacagcaagagagtacactacaatcaaccaagggaagaggagcatagggcaaagtctaggaaggttgcaagcatggagtttctagttgtcttctcagtggagttgtgtggataacacttattagtttcagcaatgatgtgtgatgatacataaaaaggattgacaaccagagaaactcatcccttccttggtgtctggagttttgttggggctcagccttgagacttggctgacctcccgggtggctgactttagtcttcagctcctccaaaggttaagctgacactgcatggtctgaaactccctcaccataaatcacatttttaacatagactctggcatggcccaaggcccacaggtaaacaaacacat

SEQ ID NO: 554329 - DNA, 665 bp, Homo sapiens
gtcattttattgtactttctttcccgttctactctatgactgaactacctttatgtaactttgatttctggaggaatgtattatttcttatgtgagtacaacacagttcgggagccctcaagaccactctcacttctaacactaactgcacatttgagggactcccaaagagtcactcacatctaacattggctgcaagttcatggtttctcaagaccatattgaggttcaataatttgctagatggactcaggcaactcactaagagctgttatactcatggttatgttttatacagcaagagagtacactacaatcaaccaagggaagaggagcatagggcaaagtctaggaaggttgcaagcatggagtttctagttgtcttctcagtggagttgtgtggataacacttattagtttcagcaatgatgtgtgatgatacataaaaaggattgacaaccagagaaactcatcccttccttggtgtckggagttttgttggggctcagccttgagacttggctgacctcccgggtggctgactttagtcttcagctcctccaaaggttaagctgacactgcatggtctgaaactccctcaccataaatcacatttttaacatagactctggcatggcccaaggcccacaggtaaacaaacacat

SEQ ID NO: 554330 - DNA, 1344 bp, Homo sapiens
gatatgtttacattttttagttttaattctaataaagttaatagcgacaactataacttgtataaacaaaactctttggagcctagataattttagacttttattcatgttctgagacctacattttgacaacatggtttcagagaaagggaatcagcagcagcagtttgccatacaacacttaagagtagaaagtggtcagatttcttagaagttgattgtgatttcatagcggtgttgttgtttttgttgttgttgttgtttagacaagcttaggctggagtgcaatggtacaatcaaggctcactccagccttgaactcccggactccagtgatttttccactccagcctcccaaatagctgggaccacaggtatgcaaaaccatgcctaattaattttttttttctgtggagacaggggtcttgccatgttgcccaggttggtctcaaactctggcactcaagtgatcctctcaccttggcctcccgaagtgctgggattacagaggtgagccactgtgcctggctgcaatttaatcaattgacctcaatatgttctcagagaaatagacaagaatgattgaatagaaactatttgaagagttaaaaaaatattgcccttatgcttaataatatttttggaagaaattttaatttttacctatcaaagaatttcttccaaagcatatatagagtcatctttaactactctgggtgtttctatattttttctattcctgaacataagacccagtatacattacctctttgctagatgttcctctgaattggtttgttttacctagaattttgttttacatttaagttttaattccaaatattagttgtttttctcaactgagaactaattaaagtatcaacttgtttgataaatttctgtgctcaccagtcttcactgtcttctggggttcaaatttcttcttgttgatgtatacgttttaataattctttcagataggrttgactgcaggtgattaattcttcatatgcttcagaagtaaatgataattttctatacattctattttcatggttatgttattagcttttagtttttttgttttttgctgatgaaaaatctaattaccattccttggtagacaacctgtttttggggggtctaaaagtaggcaataaaaaagaaaatgtaggataaaaaagggacatatttggggcaggggatgcttccaaatcccactacatagaaaaatgtcagttttgcttctgaaatctgaattagacatatccctgaggcctatttctattcccagcccgtaagagatacttagtttaattttttgttgttattttgttttacttg

SEQ ID NO: 554331 - DNA, 1344 bp, Homo sapiens
gatatgtttacattttttagttttaattctaataaagttaatagcgacaactataacttgtataaacaaaactctttggagcctagataattttagacttttattcatgttctgagacctacattttgacaacatggtttcagagaaagggaatcagcagcagcagtttgccatacaacacttaagagtagaaagtggtcagatttcttagaagttgattgtgatttcatagcggtgttgttgtttttgttgttgttgttgtttagacaagcttaggctggagtgcaatggtacaatcaaggctcactccagccttgaactcccggactccagtgatttttccactccagcctcccaaatagctgggaccacaggtatgcaaaaccatgcctaattaattttttttttctgtggagacaggggtcttgccatgttgcccaggttggtctcaaactctggcactcaagtgatcctctcaccttggcctcccgaagtgctgggattacagaggtgagccactgtgcctggctgcaatttaatcaattgacctcaatatgttctcagagaaatagacaagaatgattgaatagaaactatttgaagagttaaaaaaatattgcccttatgcttaataatatttttggaagaaattttaatttttacctatcaaagaatttcttccaaagcatatatagagtcatctttaactactctgggtgtttctatattttttctattcctgaacataagacccagtatacattacctctttgctagatgttcctctgaattggtttgttttacctagaattttgttttacatttaagttttaattccaaatattagttgtttttctcaactgagaactaattaaagtatcaacttgtttgataaatttctgtgctcaccagtcttcactgtcttctggggttcaaatttcttcttgttgatgtatacgttttaataattctttcagatagggttgactgcaggtgattaaytcttcatatgcttcagaagtaaatgataattttctatacattctattttcatggttatgttattagcttttagtttttttgttttttgctgatgaaaaatctaattaccattccttggtagacaacctgtttttggggggtctaaaagtaggcaataaaaaagaaaatgtaggataaaaaagggacatatttggggcaggggatgcttccaaatcccactacatagaaaaatgtcagttttgcttctgaaatctgaattagacatatccctgaggcctatttctattcccagcccgtaagagatacttagtttaattttttgttgttattttgttttacttg

SEQ ID NO: 554332 - DNA, 639 bp, Homo sapiens
tgataataacastacggggagctgccgagaggtctgacgaaacgatgcacatgaagagcctgggcatggcacctgccgcgtgcccagagggctccttcattgctggggtgcttcccactctcaagaagagtgcagtggagcccaaatccctgcactatcacttactagacaagtgacctggaacaagttagttaaattctttaagcctcagttttcacatctgttaagtgagggtcttaatagctccttattggagggtgaggattgtttgcaaagtactagagcccagtgtctggcatgtaagtgctcaagaagttgcagccacttccctcacattttcacagtgatttcataatcacagctttttttttttttttttttgagatggagtctcactctgtcactcaggctggagtgcagtggctcaatctcagctcaatgaaacctctacctcctgggttcaagcaattctcctacctcagcctccttagtagctgggattacaggcatgtgctaccacgcccaactagtttttgtatttttagtagagacaggattttgctatactggtcaggctggtctcgaactcctgacctgcagtgatccacccgccttggcctcccaaagtgctgggattac

SEQ ID NO: 554333 - DNA, 639 bp, Homo sapiens
tgataataacactacggggagctgccgagaggtctgacgaaacgatgcacatgaagagcctgggcatggcacctgccgcgtgcccagagggctccttcattgctggggtgcttcccactctcaagaagagtgcagtggagcccaaatccctgcactatcacttactagacaagtgacctggaacaagttagttaaattctttaagcctcagttttcacatctgttaagtgagggtcttaatagctccttattggagrgtgaggattgtttgcaaagtactagagcccagtgtctggcatgtaagtgctcaagaagttgcagccacttccctcacattttcacagtgatttcataatcacagctttttttttttttttttttgagatggagtctcactctgtcactcaggctggagtgcagtggctcaatctcagctcaatgaaacctctacctcctgggttcaagcaattctcctacctcagcctccttagtagctgggattacaggcatgtgctaccacgcccaactagtttttgtatttttagtagagacaggattttgctatactggtcaggctggtctcgaactcctgacctgcagtgatccacccgccttggcctcccaaagtgctgggattac

SEQ ID NO: 554334 - DNA, 1477 bp, Homo sapiens
gatggatgaatggcttgatggatggatggatacatggatgaatggtgaatggatgggtggatggatgaatggatgcatggatgaatgaatgggtggggatggctaaatagttgaaggatacatgaatagataaaatatgccaccccagaatatgaagaattgttgaattgaacccaacttggaagaagaagcaaatacaggaaagctccctgacctccctctatttgtgtaaaagcaggacttatttacaaaggaggaatgaaggatgcatctccttcatctctcctctctgccaaggagaaaaaaggtacactggaatgaacaaaggtacaaagagacactggtaggttcttcgacctggagatgttccagaagaatctacattaacaagccttggtaactaacatttatctgtcatttatttgcctttccacaagttgctgcctctagagactcaaggtctttttcttttgttttgtcatttctctaaaatgttactgtcctttgttgaaaatgttatataagctggaattccaagccacctctactcactccttaggtgtctcccatatatacatgaaatatacatgttaataaatttctgtttgtttgcctctttataatctgttcttttttggtacaggggtccatcccaactaaaaatcttggaggatggaagaacaaattattttactttccctacagatggatggatgtatggatggaggaacgaatgagtgattggatagatgggtggatagatggatgaatgaatcaattaataaatggatggatggatgagtggatggatgggtggatggatggtggatggatggtggatggaaagatggatggatggatggatggatggatggatggatggatggataaatgagtggatggatgaatgraggagtggatggatgtatggtggatgaatggtggatgggtagtggacgaatggatagatagataaatgaatagattgatagctggatgatgaatggatggatagatagatgaaccaattctagtattattagctcttatgtaaagcagtaaggaatagaaaagagaaaggacagcctcttctgtgggatcagggagaccttctaattgattttcagatttcacaggccccagtcctgccttgtttcccagcccaatctgtcctccccttttcctatcactttagcccatgcccctatgttctctcccttgcttctctaccattgactttgggtgtctctctggctcccctgctcagctggacacttgacccttgttcttatgggtgaccaaccctgtccagtgaccccataattcatagtgaacagagtctcagattttagatcccaaaaattgtatccctgtctgtctggaactttggcacattttccaaggacaaagaagcacttaatgggcatcttagtaaagaggaaaatgaggaaggaaagggtggctaagaagaggccgt

SEQ ID NO: 554335 - DNA, 1477 bp, Homo sapiens
gatggatgaatggcttgatggatggatggatacatggatgaatggtgaatggatgggtggatggatgaatggatgcatggatgaatgaatgggtggggatggctaaatagttgaaggatacatgaatagataaaatatgccaccccagaatatgaagaattgttgaattgaacccaacttggaagaagaagcaaatacaggaaagctccctgacctccctctatttgtgtaaaagcaggacttatttacaaaggaggaatgaaggatgcatctccttcatctctcctctctgccaaggagaaaaaaggtacactggaatgaacaaaggtacaaagagacactggtaggttcttcgacctggagatgttccagaagaatctacattaacaagccttggtaactaacatttatctgtcatttatttgcctttccacaagttgctgcctctagagactcaaggtctttttcttttgttttgtcatttctctaaaatgttactgtcctttgttgaaaatgttatataagctggaattccaagccacctctactcactccttaggtgtctcccatatatacatgaaatatacatgttaataaatttctgtttgtttgcctctttataatctgttcttttttggtacaggggtccatcccaactaaaaatcttggaggatggaagaacaaattattttactttccctacagatggatggatgtatggatggaggaacgaatgagtgattggatagatgggtggatagatggatgaatgaatcaattaataaatggatggatggatgagtggatggatgggtggatggatggtggatggatggtggatggaaagatggatggatggatggatggatggatggatggatggatggataaatgagtggatggatgaatgaaggagtggatggatgkatggtggatgaatggtggatgggtagtggacgaatggatagatagataaatgaatagattgatagctggatgatgaatggatggatagatagatgaaccaattctagtattattagctcttatgtaaagcagtaaggaatagaaaagagaaaggacagcctcttctgtgggatcagggagaccttctaattgattttcagatttcacaggccccagtcctgccttgtttcccagcccaatctgtcctccccttttcctatcactttagcccatgcccctatgttctctcccttgcttctctaccattgactttgggtgtctctctggctcccctgctcagctggacacttgacccttgttcttatgggtgaccaaccctgtccagtgaccccataattcatagtgaacagagtctcagattttagatcccaaaaattgtatccctgtctgtctggaactttggcacattttccaaggacaaagaagcacttaatgggcatcttagtaaagaggaaaatgaggaaggaaagggtggctaagaagaggccgt

SEQ ID NO: 554336 - DNA, 817 bp, Homo sapiens
caaatgatctttatcttgatttttatgttttccaagttgattcatagtttaaattcttacacagagaatcataaccacagtggggcccttctgaccagagcctagataaaaagaaacatcactgttataggaccaatagattcatatgcctgctgtgcagtaacagatcaattacactgagacagcaggaacgcagcagagaaagagtttaatgattgcggggtgccaagcaagaagatgtgaaaagaccttcaaatccatcttcctgagaagttctgggctggggtttttttaaggatcatggagagcgaggagctggagaattgaggttgttgattggttggggtaagggggatgaaatcatcaggacgtggaaactgcattctttgatgagtcagcttcttgtggagttcctcagacagctggcatcaatggaatccctcagaccagctgacgtcagtcgtttcactggtatgcaggatataaaataatatctcaaaggaaaaattcaccatttcataatgttcaaattgttatctatagagyagtcaaaggaaactataatcttgtaacatggtctacattattctacaacaataggcaccacacaactatgaggaagaaagtcagagagcacactgatttcatgattaatgtcaatcatgctgcaagcttggtttattttcatttctccccctcacttcttctctgattaattttataaagtgtataggggcagtttcaccactgccactgccagagccccaggagaacgcaaggcattgaactgggcattcaactgtccacacaaagctcc

SEQ ID NO: 554337 - DNA, 1246 bp, Homo sapiens
caatagttttaagtcataacagccccggcatatataacaatcctctcaagtattcgacataattttaggaaacaatttactcattacctaagtttcttaaaaatatttttatcaacacctaatatttaccaacctgatgtgacagacattagagagccaatgatgaagtagagcgggtcatgaggtcaaactaatctactaattactaattaagaattgctcattactaatgagtaggggtacatagaagtaaatgataatacataaytggtattataatatagataattttaaattaattcaaataatatttactgatcagttactatatgttcttgtaagaccctggaaatataaagatgaaaaattatagtcagttcaagaaatttatgttgatgaacaaatcatggtagatattcgaaggactgagtcgtcaattacgctttggatgggatcagggagggataacagagttgttgacaattgtatcttaaaaagtaaagaatagcttatcagatgaaagcaggattggtaaataaaaagattattctagaccaactaaatacttttaaagggatgaagctataacacaattcgaggtctttgaatgattttgtatgattggaacgaatagaacagggttggcaggaaatgagggtgggacagggaataacatagattcctaattgacgaagctgtcagggacgtgccagatctttttgtacggcaagctaacaaatttagcatttattctgtgatgactaaaaggcactgaaagaataaaacagcagtgcatgatattaagatttttgtcaggaataaagtgatagcggcaatatagagggtggatagatagaaggacaaaaaagaccagattcaatgacagccctcagttacctttacagttttctagacaagagatgataaaagctcaagtgaaagtatcatgagtagaaagaacagtaagaactattcagtcatacaatttgagaggaattaaaaaccaattagatgtggcatatgaagaaaaaattgttaaggctaaattatctggtttaggttactgcattgatagtagtactcattttaaaaggacatgaaatttcaaacataaacaggttccagggaaaataagaaattcaatttttaaaatattgggtttggtgaaaagttagatttataatttaaaactcaagacattagagttagatctaggagatatcagcatttatgtggcaaccaaatc

SEQ ID NO: 554338 - DNA, 2613 bp, Homo sapiens
gaaatatttataataattttataccttgtctactgcaaatctttataatgaacaccatatactatggacatgtgttatattttccccaaaacagatgtaaattaaagcagctgctcagaaagtcttccgatcttgaagaaaattatagctgtgaagtgtaaaggcaaatactccaattacaggaactacacagctttgcaataatgayaatcaaattattttaaaaactgtgatgagaatccccgcccaaccccaagaaattactttctgagcatttgctacaagtctccaaaagatagcatttcctaaccattttagcctgcatttttaaagcacaggaatgattgttttatcaattaaaatttctagtttacagatggttacctagtcttaatctggtgaaattagaacctcagacttcattttaagacaagaaaagaaagtaaattgtggtaacaaggtacactgggaacagtaagaatttgttttcagacaaaactgaggctcaattcctagtttggccatttactaggtacatgatacaaggcaagagactccaactctccaagtctcagcctctttcataacaaaaaattaaatagtgctatctgcctcataagatagttttaattcctgaaagagatgactgatggaacacaccagacacagagtagatactcaatgtatgttagctcttgtacccttcttcacaaatactacaaaattttccaaactgaccaaataactttacacacataaggttcggacactattgtaacagtttcatgtactattggaggtatatttagaacattaattttttaaatgatgtttaagaaagttaaaatgtattaataaaaaccctcagatattccatcatgctctacaaagctatctctaggtggccctctaagtggcttactttgggtggttccagtaagatgcatttcattatttagatgtctccttgttgagtaaatataaggtgaagtaaaagaatcaatacattcatcatctgcctgtatacatatgccgtggtcttgattccgtaagaagacatgtctttattcatctaaagccatgtacaaatggaagtagaatttccaaagactgcttttaaaattaaaggcatgtttcacaagttagcaaaagccgtgcagcctcttagatctctgtattggctaaccacacaccacgacatgctatcctcagttggaaagtccccccacacagtatgtaaactcattttgaaactggagagaacagttcctcctataactcatctgggcaagtttatataaaagaataatttttcagaaagccacagaggttctctcccaagattgctgaagtataattatggacaagtgtaaatatggaaagagaagctgactaaaagtaaaaagcacagtgaataagcgtttataaagatttatataaaaagaaacaaaaacaaataaaaacttcagcccacctaataaagtaattttagtaatacccattcatgtaccaccctccccaccacctcccttcccgagaaacaaaaaaaatggttagactgcatgttaacatgtaaagatacctgtatctatttatattttatctatatattatatttaattagggtgaaataataaaatgcactaattatatagtatttacatacatacactatgtatacacacacatagtaaaggcaaaaatggaaagataaaacataatattcttaaatggttacttactggaggggagaaggcagagatagaagatggacttttttgacagtatcttgttttctagatgctactttggagtcatgtaaatattttctgtgattgtaaaacaaaaattttaaataaaaactcctaaaaatcaaaaataaaatgtgacaaatgaaccctgcatttataaggtggtagcataaccacacagagaagaatgactgacagtgaaatacattaatcctatatccgtagtgggacataaactaatgacaaaagaaaaatggtggtattggtgctggcattagtagtctgaactgctgtgtatatcaaagcaagtaagtaattctgccattccaggagtacaagcattctcgctgtgagagaaaggagacagaagtataagatccaagaggtgaagtaaaaaccctgtcgtcctgatatttattttaatatacatatatatatatatatatatatatatatatgcacttgtgtatctgctacacacatgcactcagcgtccactgaacaggcctggaagcaacggccaacccagtagcaatgagcatgcctagcgcctggcctgtggttccccgataccatttcccaccacttctaccttcatcaatagaacatttcaataggtggagattaagaccccccaaaagtaggagcaaagacttggaagcaggaaaggcctacttaggatgagcaaatggcccaccaggccaagggctagaaagcaagggcatctacagtgagactgtctggaggggcctgacagggcccgactgcgagagctaatcttgaaagcaaagaaagatgtttatgattcttgaggagaggatgggagtcgcccagctggacccatggtgtttaatttttttat

SEQ ID NO: 554339 - DNA, 641 bp, Homo sapiens
aagakaattatacaagtgaagtcttaaacccatgaaacaacatagagatccaggaaacacatatttttgtgtatataaatatacaaaatatatatttgtgcatataaaatacacatggctttacaaagcagtggagaaatggtgggctactcattcataatgctaagacaaatggacaaaagacatgaacaggtgatttgaaagaaagaaaaactcatggccaataaacatatgaaaatctgttctatatgcctagatatcagagtgatatggtttggctgtgtccccacccaaatctcatattgaattgtagttcccataatccccacgtgtcatgagagggacctggtgggaagtggttggatcatggttgtggggggaggtgagggtggtttccttcatgctgtcctcatgataatgagtgagttttcatgagatctgatggttttataagcatctggcatttccctgctggcacttctctctcctgctgccttgtgaagaagaaagtgtttgcttcccattccaccatgattataagtttcctgaggcctccccagccatatggaactgtgaatcaattaaacctcttttccttatgaatacttagtctcaggtatttcttcaaagcagcatgagaa

SEQ ID NO: 554340 - DNA, 641 bp, Homo sapiens
aagataattatacaagtgaagtcttaaacccatgaaacaacatagagatccaggaaacacatatttttgtgtatataaatatacaaaatatatatttgtgcatataaaatacacatggctttacaaagcagtggagaaatggtgggctactcattcataatgctaagacaaatggacaaaagayatgaacaggtgatttgaaagaaagaaaaactcatggccaataaacatatgaaaatctgttctatatgcctagatatcagagtgatatggtttggctgtgtccccacccaaatctcatattgaattgtagttcccataatccccacgtgtcatgagagggacctggtgggaagtggttggatcatggttgtggggggaggtgagggtggtttccttcatgctgtcctcatgataatgagtgagttttcatgagatctgatggttttataagcatctggcatttccctgctggcacttctctctcctgctgccttgtgaagaagaaagtgtttgcttcccattccaccatgattataagtttcctgaggcctccccagccatatggaactgtgaatcaattaaacctcttttccttatgaatacttagtctcaggtatttcttcaaagcagcatgagaa

SEQ ID NO: 554341 - DNA, 643 bp, Homo sapiens
gccgatgaccactctttagagtttgggattattcttccaaatggagatgattcagccatgtctgatattggtgatttgagaaggaggatgtctaggattgatgctttgagaagacgatctcaattttcttagaatatgattccttttgtccttggagagttatttttaagtagcagattctgggaactccccatgccctccacctcctactcccaaattccgcccccgcccgcccccgcggccaagtaggcctggtctctagacgcatggaaagcgttcaggtccactcagactgtgctgcgatctgaargaatgataacatacgagaaggccctttggtcctacactgtgaatgagtaaggggcagctgcaaaatgctaagaatgctgagtgcattaagtgaagtgtttctcccaggtgtgcacagggtgtggcttccaaggggaatgtggatgctggaatgagggaggcagccacctaggccggtcaagtcagaggcccagcaaggagaaagcgagccaaggcaaacgccgacagaagagaacgataaatccgcggcgcactcggcagaacgtacaccgcaccgcataatttagcggggcaatgccgccgggagtccacgccaagttaatggaatatttcc

SEQ ID NO: 554342 - DNA, 643 bp, Homo sapiens
gccgatgaccactctttagagtttgggattattcttccaaatggagatgattcagccatgtctgatattggtgatttgagaaggaggatgtctaggattgatgctttgagaagacgatctcaattttcttagaatatgattccttttgtccttggagagttatttttaagtagcagattctgggaactccccatgccctccacctcctactcccaaattccgcccccgcccgcccccgcggccaagtaggcctggtctctagacgcatggaaagcgttcaggtccactcagactgtgctgcgatctgaaagaatgataacatacgagaaggccctttggtcctacactgtgaatgagtaaggggcagctgcaaaatgctaagaatgctgagtgcattaagtgaagtgtttctcccaggtgtgcacagggtgtggcttccaaggggaatgtggatgctggaatgagggaggcagccacctaggccggtcaagtcagaggcccagcaaggagaaagcgagccaaggcaaacgccgacagaagagaacgataaatccgcggcgcactcggcagaacgtmcaccgcaccgcataatttagcggggcaatgccgccgggagtccacgccaagttaatggaatatttcc

SEQ ID NO: 554343 - DNA, 2710 bp, Homo sapiens
acctcaagtgatccacccaccttggcctcccaaagtactgggattacaggcgtgagccaccatggctggcttatcttggatttctaatcaagaaatataagactggagcccaggccgggtgcagtggctcacccctgtaatcccagtgtttagggaggctgacatggggggattgcttgagcccaggagtttgagaccagcctggcaacacagtgagaccttgtctctatacaaaaatacaaaaattagccaggcatggtggggtatgcctgcagtcccagctacttgggaggctgaggtgggaggattgcttgagcccaggaggtcaaggctgcagtgagctacaattgcaccactgcattccagcctgggtgacagagtgagaccctggctcaaaaacaaaaaacaaaagaacaaaaagactggagcccaggttttgggatcagctccttggaagaaatggtaccgtgggaacaagaggaagcagacagcagagatgacgcatgaatgcccgggctgagctccctggggcccttcttatcctcatcttcccagtcctgttcacacagggcctcatgggggaatggcaggcattgaccttaaccaagtgcccacagcctacctgctctgaatgcgtagtcaggaatggaaggctttccaggaggatggaatgttctggaatttgggcttggttaatatgaaccatgaagcaacaaaagccccataggaatgcttggagaacaacagcaaaccagctaccagaattagacaggcgctccctccttttttgaaatcttaggtgtttttgtttttgtttttgagacgcagtctcccttgtcactcaggctggagtgctgtggagcgatcttggctcaccgcaacctctgcctcccagtttaaagcaattcttgtgcctcagcctcctgagtagctgggattacaggtgtgtgtcaccacaccttgctaatttttstatttttagtagagatggggttttgcatgttggccaggctggtctcaaactccgggcctcaggtcatctgcccacccctgcctcccaaagtgctgggattacaggcgtgagccaccgcgcccagctgaaatcctagttctaatataacaagaggttagctggctccttggcagcagtggcaagcccgcctcctgagaagtgactctggtgcccatgaggtaggagatacggccgctcccacccccgctttcggaagggcagagccaacctggggaatcccagggaagcaggtgcaggcagaaagccccaaccccacctgctgaggtgtggagtcgacacctcggtctccctggtctggccccagagccttggaacctcagttctcactctcaggtcttactcctcttcaccctccctgtcctctgtcaaagctctgtgaggggagctgattctaggggtgtaccctcgagatctcaatagaggatctttattatctattatttttgagacaaggttttgctctctcgcccagactggagtgcagtggtatgatcctgactcactgcaacctccatctcccaagttcaagcaattatcctgcctcagtcttccgaatagctgggattataggtgtgcaccaccacgcctggctaatttttgtatttttagtagagatgaggtttcaccacattgaccaggctggtctcaaactcctgacctcaaataatctgcccatctcagcctcctgaaatgctgggattacaggtgtgagtcactatacccggccctattatctattatccatcagcccaggatctacctaaagccttcttttacccacctttttgttttcagttttagcaaggccagtgttgggggtaacaggttctacacattcatcacctagtccttgggggtaatttatttctcttccaatgactaccttaacctccaactagtatcttttaattttaatactctggaatttgatgcatagaggacagtgagaggtcttgataaagaagggtctttataaatacccagaatgaggaccagccagctacagggggccttgcctcagttggagagtcacttctgtggggtctggatatcctctattcagaaaggggcagacccagccatctctctccttggctcccacatgccgaggaagttctatatcaagtgtgacaaggtcgtctcctgaagacgattctcgaaaagcatgctccccaagggcaggcccagcctcactaatcctgcagaactgcgtcaggaggttcagcggctccacttccttccatcccactcactaaatcaacagctgccttggcgtgtttcctaccacgtgacatggggttttgtgaagtcgactcctagatccagggtcaagcaactcagtgtagatagggacctttttcctttgcagcactagggagagagggtccctggggtgagttcaggaggtgcaagtcaacatagcactgtagccatgaacacacagaaggctcaggagaaacaccagtgaaagaaagtcaaaaccactgtcagaaagccgcgtcgctgtttaaccacgacatgtcctgaccacagggttctgggtggccgacagcagcagaaatctttgccgccccctgtttgccctgtaactcctgctctctgaggccatctgtgaagccacaataattgccttctccatcctcagcttttcctgcttgttttgcccccttaaacatg

SEQ ID NO: 554344 - DNA, 2710 bp, Homo sapiens
acctcaagtgatccacccaccttggcctcccaaagtactgggattacaggcgtgagccaccatggctggcttatcttggatttctaatcaagaaatataagactggagcccaggccgggtgcagtggctcacccctgtaatcccagtgtttagggaggctgacatggggggattgcttgagcccaggagtttgagaccagcctggcaacacagtgagaccttgtctctatacaaaaatacaaaaattagccaggcatggtggggtatgcctgcagtcccagctacttgggaggctgaggtgggaggattgcttgagcccaggaggtcaaggctgcagtgagctacaattgcaccactgcattccagcctgggtgacagagtgagaccctggctcaaaaacaaaaaacaaaagaacaaaaagactggagcccaggttttgggatcagctccttggaagaaatggtaccgtgggaacaagaggaagcagacagcagagatgacgcatgaatgcccgggctgagctccctggggcccttcttatcctcatcttcccagtcctgttcacacagggcctcatgggggaatggcaggcattgaccttaaccaagtgcccacagcctacctgctctgaatgcgtagtcaggaatggaaggctttccaggaggatggaatgttctggaatttgggcttggttaatatgaaccatgaagcaacaaaagccccataggaatgcttggagaacaacagcaaaccagctaccagaattagacaggcgctccctccttttttgaaatcttaggtgtttttgtttttgtttttgagacgcagtctcccttgtcactcaggctggagtgctgtggagcgatcttggctcaccgcaacctctgcctcccagtttaaagcaattcttgtgcctcagcctcctgagtagctgggattacaggtgtgtgtcaccacaccttgctaatttttgtatttttagtagagatggggttttgcatgttggccaggctggtctcaaactccgggcctcaggtcatctgcccacccctgcctcccaaagtgctgggattacaggcgtgagccaccgcgcccagctgaaatcctagttctaatataacaagaggttagctggctccttggcagcagtggcaagcccgcctcctgagaagtgactctggtgcccatgaggtaggagatacggccgctcccacccccgctttcggaagggcagagccaacctggggaatcccagggaagcaggtgcaggcagaaagccccaaccccacctgctgaggtgkggagtcgacacctcggtctccctggtctggccccagagccttggaacctcagttctcactctcaggtcttactcctcttcaccctccctgtcctctgtcaaagctctgtgaggggagctgattctaggggtgtaccctcgagatctcaatagaggatctttattatctattatttttgagacaaggttttgctctctcgcccagactggagtgcagtggtatgatcctgactcactgcaacctccatctcccaagttcaagcaattatcctgcctcagtcttccgaatagctgggattataggtgtgcaccaccacgcctggctaatttttgtatttttagtagagatgaggtttcaccacattgaccaggctggtctcaaactcctgacctcaaataatctgcccatctcagcctcctgaaatgctgggattacaggtgtgagtcactatacccggccctattatctattatccatcagcccaggatctacctaaagccttcttttacccacctttttgttttcagttttagcaaggccagtgttgggggtaacaggttctacacattcatcacctagtccttgggggtaatttatttctcttccaatgactaccttaacctccaactagtatcttttaattttaatactctggaatttgatgcatagaggacagtgagaggtcttgataaagaagggtctttataaatacccagaatgaggaccagccagctacagggggccttgcctcagttggagagtcacttctgtggggtctggatatcctctattcagaaaggggcagacccagccatctctctccttggctcccacatgccgaggaagttctatatcaagtgtgacaaggtcgtctcctgaagacgattctcgaaaagcatgctccccaagggcaggcccagcctcactaatcctgcagaactgcgtcaggaggttcagcggctccacttccttccatcccactcactaaatcaacagctgccttggcgtgtttcctaccacgtgacatggggttttgtgaagtcgactcctagatccagggtcaagcaactcagtgtagatagggacctttttcctttgcagcactagggagagagggtccctggggtgagttcaggaggtgcaagtcaacatagcactgtagccatgaacacacagaaggctcaggagaaacaccagtgaaagaaagtcaaaaccactgtcagaaagccgcgtcgctgtttaaccacgacatgtcctgaccacagggttctgggtggccgacagcagcagaaatctttgccgccccctgtttgccctgtaactcctgctctctgaggccatctgtgaagccacaataattgccttctccatcctcagcttttcctgcttgttttgcccccttaaacatg

SEQ ID NO: 554345 - DNA, 611 bp, Homo sapiens
cacaagaatgttcatcacagaactgttcacaataacaaaaccaaaaaactggtaacaacccaaatttccatccataggaggacatatgaaaaaaactttagtgtgctcacaaatgggatatcttacagcagtaaaaatgaattaactctagctacatgtaacaattcggccagtctcaaccaggttccaatagagaattaagctccaaatgcccagcctaaggcatccattgtatgtaacgagataacttctcccttatgcatctaaaatttaggagactatttatgtatcatgtttggaggactgagaaaatacactccaattattttctgtgttctgtggtcaagatgaggggctctggttgggaaaggccgatgtatatgaatcttagaagcaatgtcgaaagtaaaaagcaagtggcatgaagtgttactaccttcagtgacatccttttcataaaattcaaaaacaagtaaaaaatgtattacttagaaatgcacatataacatggtggaackgtttttcaaaaagaaaggaaatgacaaacttaagtgcaaggtaatggttacttctggagtatggaaggacaatattgtttcaatggttttcag

SEQ ID NO: 554346 - DNA, 2187 bp, Homo sapiens
  misc_feature 1200, 1201, 1202, 1203, 1204, 1205, 1206, 1207, 1208, 1209,1210, 1211, 1212, 1213, 1214, 1215, 1216, 1217, 1218, 1219,1220, 1221, 1222, 1223, 1224, 1225, 1226, 1227, 1228, 1229,1230, 1231, 1232, 1233, 1234, 1235, 1236, 1237, 1238: n = A,T,C or G
  misc_feature 1239, 1240, 1241, 1242, 1243, 1244, 1245, 1246, 1247, 1248,1249, 1250, 1251, 1252, 1253, 1254, 1255, 1256, 1257, 1258,1259, 1260, 1261, 1262, 1263, 1264, 1265, 1266, 1267, 1268,1269, 1270, 1271, 1272, 1273, 1274, 1275, 1276, 1277: n = A,T,C or G
  misc_feature 1278, 1279, 1280, 1281, 1282, 1283, 1284, 1285, 1286, 1287,1288, 1289, 1290, 1291, 1292, 1293, 1294, 1295, 1296, 1297,1298, 1299: n = A,T,C or G
cttattaaatagattaagtaaaaataaatacacatgtgaaagtcattgttgtgaaactgcagaacacataggaagtagtaggggaagctttaaaaattaccagaggaaaaaaaattacagattacctacaaaggaatgatatttacaccaagagcagacataatcaacagcaacagatgttaagaaaacatggtttaatatttttaaagtgctgaggaaaattacaaatggccttgtatagaattctaaacccaaacaaattaccaatcaggagtaagcatagaaaaaaattctaaatttcattgattatataccttattcagatagttgtacagaaactgatgattcaatatctaaaaagtgtctgatctaatcagaggtcagaagaccctgtgggcatgccaataaagaagaccaagatgtttgaatatgcaatgctttcaatgtgatctgtgagctccttctgcaaatagcctttttttctgcagctcatgggtgacctttgggtgattctcctacccagtatgcccaccacaaagagaaccaggttcaccagaatgaggatgattctggaccgtggggtcacctcaactcgggaatgtggctgtgctcattgacatgggagaagtcatgcttggggccactaggtgaagccatgaggaaaaaaaccacatcaccaagtacaaagacttctccactgtcttcctcccaaaggaactcaaagttcttgctctgagttcaccaaagtggaatagggtgttctctaacttaatcttgtcttgcaaagtagaacttgcacttctggccatgaagaataactagtacctaacttgccctacttctgtctagaaatagaaaactggagagcagacagcacagactatgatggctcagaaaagagaaattaatgagygaaccctgtgatcactcagactttctgcctaaagacactttccagaccataacacaggagggaaccctaagcaaagcacaactatcttaccgacatgcttacatgttgaaatgctaatactttgggactcatgggttaaatagaatatattactagcattaaattgcagaaaagaaaggtggcccactggccagcatgtagctgaatggataatatgcaggaaaaaaatattcaaaatcctcatttggctttcttataataaaacctaccctttgaatgttactttnnnnnnnnnnnnnnnnnnnnnnnnnnnnnnnnnnnnnnnnnnnnnnnnnnnnnnnnnnnnnnnnnnnnnnnnnnnnnnnnnnnnnnnnnnnnnnnnnnnnactcgccttttcagtcgactcttaaagcaccccaccccttgaaatgtatactttcttatccacattccagtatctggaatacgaaactgtttgacgaataatcatgtgctgtttggaagaggtcttcttggcaatagcaacctatggaaataattatttaactactaaaagggttaaggttaaaaaggaagtaccttctaagggatccaagaagcattaaagacaagttatatttagcatcagttagagaaaaggaagacaaaaccaaaaagcaagcccctaccaaaaaagagaaaaccagaaataccaaaaacattatttaattacgtacttttacctatattttataattccaaacacaaggggcaaaaaaatcctccataaatggaagttctttaggtggttccaggtatctgcttcagtttataactatcttcacagtttacatttacagaaatataaatattatttcttaaaattcacatttaatacaaactttcaaagatatttaaacgtaggatagtagtaaggagaatcttaaatcttagaaacttgggggtatgacaagagcaattcctaaatccagatgatgattttaccattgctatgtataagctgccatttgtagcaggttttacatgggacattattgaacattttcgggggtgggggaaaaataagaatctattttatcatctttgattgcaaacatgggttcatgacatgtcacaaagctactttctctgagagcagttagtatctccaaaccaggctagaatttctaagggcagtcttgccttttggtggactattaagtattttttggtgatatttccatgtttgggggtgcattaggccattaagatgagcaccaaggcaaaaatggag

SEQ ID NO: 554347 - DNA, 608 bp, Homo sapiens
aagttaggtgtaatcgtcagctccctctgtccttttccctgccataattgcaatggcaggtggacctggacttagctccatggacgtaactgctacagaagacaaattttatccaaggccaagggttccagataaagcgtgcatcatcccgcctgtatcagactcgccaccgccgccgtcatagtaaggccagagcacatgccctcagaggtggatggkgccgtggctgcatatttggtctttgatcctgttttctggtccagagcttccaaaacccttgggatctccagagggatgagtgttttttgaatgtcagtgagaggactgggcagctccaggatgggggctgggagctggaattagtcagaactttcagctcagacctctgacctttggggaggggagaggggctggagattaagttaatcaccaacagccagtgattaatcaatcatgcctacataatgaatccaaaaaaaaaaaaaaaaagagccccaaatgacagaatgtgagccaggcagggtggctcacacctgtaatcccagcactgggaggccgaggtgggtggatcactggaggtcaggagtttgagaccagcctggtcaaca

SEQ ID NO: 554348 - DNA, 608 bp, Homo sapiens
aagttaggtgtaatcgtcagctccctctgtccttttccctgccataattgcaatggcaggtggacctggacttagctccatggacgtaactgctacagaagacaaattttatccaaggccaagggttccagataaagcgtgcatcatcccgcctgtatcagactcgccaccgccgccgtcatagtaaggccagagcacatgccctcagaggtggatggggccrtggctgcatatttggtctttgatcctgttttctggtccagagcttccaaaacccttgggatctccagagggatgagtgttttttgaatgtcagtgagaggactgggcagctccaggatgggggctgggagctggaattagtcagaactttcagctcagacctctgacctttggggaggggagaggggctggagattaagttaatcaccaacagccagtgattaatcaatcatgcctacataatgaatccaaaaaaaaaaaaaaaaagagccccaaatgacagaatgtgagccaggcagggtggctcacacctgtaatcccagcactgggaggccgaggtgggtggatcactggaggtcaggagtttgagaccagcctggtcaaca

SEQ ID NO: 554349 - DNA, 608 bp, Homo sapiens
aagttaggtgtaatcgtcagctccctctgtccttttccctgccataattgcaatggcaggtggacctggacttagctccatggacgtaactgctacagaagacaaattttatccaaggccaagggttccagataaagcgtgcatcatcccgcctgtatcagactcgccaccgccgccgtcatagtaaggccagagcacatgccctcagaggtggatggggccgtggctgcatatttggtctttgatcctgttttctggtccagagcttccaaarcccttgggatctccagagggatgagtgttttttgaatgtcagtgagaggactgggcagctccaggatgggggctgggagctggaattagtcagaactttcagctcagacctctgacctttggggaggggagaggggctggagattaagttaatcaccaacagccagtgattaatcaatcatgcctacataatgaatccaaaaaaaaaaaaaaaaagagccccaaatgacagaatgtgagccaggcagggtggctcacacctgtaatcccagcactgggaggccgaggtgggtggatcactggaggtcaggagtttgagaccagcctggtcaaca

SEQ ID NO: 554350 - DNA, 1613 bp, Homo sapiens
aaaattttaaaaattagctgggtgtggtggcagtgcacgcctggactcccagccactgggaaggctgaggagggaggatggcttgaacctgggaggttgaggctgcagtgagtcatggtcacgccattgcactccagcctgggcaacagagagagacacgtttcgaaaaaaaggaaaagaaaaatcagttttcttccactaaaacagtaagtttaattttcctaatttgctgtttgtacagtatggtcctctgctccaagcttaaaacaaaaatctataggaaacgtcacctttctagaggaagctgagatggagcagctctcgttctacaggaggggctgcacaagctctcaccacacatctctgtcctcaggaaaagcctgtgctgagtgaccaggagtttcttgtcactgctgcattttcttcttcttgttttttgtttgtttgtttgtttgtttttgagacaggactgtggcccaggctggaatgaatgcagtggcgtgatcaccgttcactgcggcctcaacctcccgggctcaagcagtcctcccatctcagcttcccagatacctgggatcacaggtatgtgccatcacacccagctaattttttgtatttttggtagagacggggtttcaccatgttgtccaagctggtcttgaaactctaggctcaagtgatctgcctgccttggcctcctgaagtgctgggattacaggtgtgagccaccacacctggcctcatccctgaagcattttctgcacgttcttaggctgcattggtgacatatctgggggctgccgcccctcacagctacgtgacttcatatgcaagctccttggcctcactgtgcctcagtttcttcatctgtaaaatggagacaataataacacctgcccctagggtggctgtgagcattgcatgagataacatgtgtgtcagtcaggagttttggctgcaagctagggatccaactctgggtgattaaatcagagaggaatttattggagggtatcgagtagctcacaggtttgggagaaagtcaggagaactagccaaagctgccagaactctggccaaattcacatcagagggcggctctggcaaactcaggacgctagatccgcatgggggcaccgcctcttgagcctgctcctttgtctcttgagttaccttaagaggctgggcaggagcttctggctccccccgtggaggtctcaacctcacccccttagctgcagggaaggctggggaagtatctgatggtttcagcagctactgctgcctccatggtaagacatacctagttatgaataactaactaaaataagtctgtaaggtggggaattccccaacctaggaaaggagctcagatgaggagcaagagagaaagaagaggggatggggtgtggagaagaggagagggtgcctttggagcagaagccagccgtggcaagcacacrggttggtcatcgcgggtgtcctccaccaccccaggctcccttgcctccccttggactgctatcggatctaaagaggctactgaaaaagaggaggcgcaaaacagaggcatgagttgttcaaagtcaaagaacacaatgagggaagaatta

SEQ ID NO: 554351 - DNA, 960 bp, Homo sapiens
aaatttatgggggaaaatgctcaatgactaggaatcagcaaaaaaacacctccaccatgtggtgcttcccctccagaagaactaccagccctcaggaacagcacccgctcccctcagaaaaggacaactcaagggtaagctgcagccacagactggcccagaacataagcaggacaggcaggagacggagcccaacccagaacagtgacgtgaaacagatgggcaggagtgtgccctttgccccagcctgatgcagcccttcccacaggtggtggggaggacaggcgcgccttgctaagaaactgtctcgatagcactattattaatcttttggtcatttttcatcaagcggttttgtgcaattcatgatgctgtttaaatgaccacagtcattatttgaacgccatctgtggaaagataaatgtatacttaaattgtgggtataattttaactagtttattcactcattttacctcattttgtctagttttaactatgattttgagttatccttttccagatcttcttcatcctcaataacccaatttatagagttgaccacatgtttgtttttaagcatatgtaaaatcactggaatcatacaggttagggtggtagaagtgggttttaaaacccctttctctgttttaatccacaataaatcagtaagtactaacactgtttatgatagcaaaaaatagaaacaacccatatatccagcattaaaggaattaaattatagtccatctatatacaagggaatatagtgaagccataaacgtgatcatacagtcctgtattttttgacagagtcacaacgtattaagtaagaaaagcaagttagcagaaggtggagtaggcacaggatggaaaaatattamgtttttcacttccggattgtatgactgaaggtaatttgtttttctttctgcgtatctctagtttctgatttttctaca

SEQ ID NO: 554352 - DNA, 522 bp, Homo sapiens
attccagtttcacagatgagacagccagaggtaggcactgagttgtcaagatggcacaataaaggctgcgtagacctcactctcccagttcctagttcagggctcagcacacctgcccctttgctgcttctccatcacacagtcgctgtgggaaatggaggcagcgaggcctcgagcatagtggatgctaaggaaatgtctgttgatgagtaaattagagcatttcatttccaacctgaaagggttctgtgatagaaaagcaacgctgcccgctggccctaagtagccactctagtgccatctgcaaactcgataggaagtggggtaggagagggtctgtggaccacacgctggtcccattctcctcgtaytctctgtggctctccaagctcctctgcctttgtctgtctgttggtccttgtccctctgctctcagtaaacaagccctggaaatgcaatcctggcctttgggagtaatgagttgacagagaggagagagataaacagggcgagtcagaagtc

SEQ ID NO: 554353 - DNA, 522 bp, Homo sapiens
cccagtgtggggattttctcagggaccccacaaatacccttaggactctctctgataggggccatgaagcctaggagaagtgtgtgccagattttgggaggggaggtcttgggggctggtctgggtgcgctggccaagttggggccaggagggccgagctggtggggtggaggcaggcagagccgctggcggcggtgctgaggccacgctgaaaggcgtcctgggcctctggagtgcgcactcccattgtccatgggttgcgggggtgacaggtcagcgagggtcacgggagggttgcctagcgtctgggaactcccactgcagttgccgtggcaactgggccaaatcccatmccgttcacatcctgtgaggagattcaaaagggttggggggctttgcacattaatgggcttttacctcacccccccttcaaagagatggggggaatgtcaggcagttgggggaggggagaagaagaatgggagagatttttctttccttttcctcccccatctgggcctc

SEQ ID NO: 554354 - DNA, 2058 bp, Homo sapiens
gaaaagagttttactgattttctttgggaatggtggaggggtagaagacttctctcctgatggaaagaggaaagatgaggaatatggcttaatgttattcctaacttaccttctgccccttccctccagaattctgtgtgcaagtgttttaaggaaatgagttgggagtttgggtaagtgagatctagattttgggcatttgtagaagtccccggctatctgggggagttgtcactcttctttcagcctagagaaggtgactatgggtgctagtgtgctgtggggcacactcgggggtgggaaagctgctgtggagtgggatgtcctctgtgtgcatcatggggtcgagtgtggccttgggatgacctcatgagaccttgctgcatttccttgtatagttcycttgtctaatcatggcctatttttgcttttccttcttgaaacaaaccatttttctccccttttcctttctagttcaagaagggctgggcctgacccatctgaagtttccctcaccctaagtacttaggaaacgtgctgaagaggaatggacagtcttacccatctcatatccctaattccggtaccccatcagtgaaagaaagaaagattatttggcaagctggattagattgccatttagttatggtgcatggacaaggggctattttaaggttgatgggggaggctttgcttgtcatttactctccattcaccagacattcagtgcccgtcatgtgccaggcactgggtttactgctgttaacaagactataaggcaggtgaggaggatatttaaagaactgggctgggtacagtggcttgtgcctgtaatcccagtgctttgggaggctgaagcaggaggactgcttgaggccaggagtgtgagaccagcctgggcaacatagtgaccctcatctctacgaaaaattagctgggtgtggcagcgcgctcctgtggttgaagctactcaggaggctgaggcaggtggaatgcttgtgaccaagagtttgagaccaggctgggcaacatagtgacccccatctctacaacacatttttaaaaattagctgggagtggtggtgcatgcctgtagtcccagctaccctggaggctgaagcaggaggatcacttgagcccaggagttcgaggctgcagtgagctgtgatcacgccagtgcactccagtctgggtgacagagtgagagcctgtcgctaaaaaatacatatacatatacataaaaaagaattatacaaaattacacaaaaattgtttaattacagttaagagctgggaagggaaagcactgcttggtgaattaaggtatctcagaaagaatgatgtcaatgccattgaaggtgggggttgggtttctgatggtggaaatgtcagggtgggtgggtgcggcgggccatggagctgcatagggatttgcctagcgcccatcagttcagagcctgctggtaggggcttagctgaacagatgaggtggactgttcagttctgtctggaatttggctgtggggttcggacactttgtcgcttgggattgaaggtggatcgggaaaccgtatggttctgtcccagtgtccttgctgaaggtaaacctcatggccagtagccctgggaagccggttgtggtaggacgtggtgtcctgagctggcctggattccagaagtgaggacttgtatcatgcaaagggcacccaactacagctgtgcccaccagaggttttgttgcaaatgaaaagataagaggaatttgtggggaaagagtgagaagacttatttaagaacattattcggactcagatgagctgtaggaaggaaaacggggagagagatgcagaaaaaggaggtaatgttgctttgacaccaggtgaactcttgactttgggactgactttttgtttttaagtgaaaataaatctttcagctttaaaaatatttaaagagtaaaattgagttctgagattcatgagatgtatgtgatggaaaagagtttttttttttttttttgtagatcaaggaatagcagtgatcccacagcagggtaca

SEQ ID NO: 554355 - DNA, 2058 bp, Homo sapiens
gaaaagagttttactgattttctttgggaatggtggaggggtagaagacttctctcctgatggaaagaggaaagatgaggaatatggcttaatgttattcctaacttaccttctgccccttccctccagaattctgtgtgcaagtgttttaaggaaatgagttgggagtttgggtaagtgagatctagattttgggcatttgtagaagtccccggctatctgggggagttgtcactcttctttcagcctagagaaggtgactatgggtgctagtgtgctgtggggcacactcgggggtgggaaagctgctgtggagtgggatgtcctctgtgtgcatcatggggtcgagtgtggccttgggatgacctcatgagaccttgctgcatttccttgtatagttcccttgtctaatcatggcctatttttgcttttccttcttgaaacaaaccatttttctccccttttcctttctagttcaagaagggctgggcctgacccatctgaagtttccctcaccctaagtacttaggaaacgtgctgaagaggaatggacagtcttacccatctcatatccctaattccggtaccccatcagtgaaagaaagaaagattatttggcaagctggattagattgccatttagttatggtgcatggacaaggggctattttaaggttgatgggggaggctttgcttgtcatttactctccattcaccagacattcagtgcccgtcatgtgccaggcactgggtttactgctgttaacaagactataaggcaggtgaggaggatatttaaagaactgggctgggtacagtggcttgtgcctgtaatcccagtgctttgggaggctgaagcaggaggactgcttgaggccaggagtgtgagaccagcctgggcaacatagtgaccctcatctctacgaaaaattagctgggtgtggcagcgcgctcctgtggttgaagctactcaggaggctgaggcaggtggaatgcttgtgaccaagagtttgagaccaggctgggcaacatagtgacccccatctctacaacacatttttaaaaattagctgggagtggtggtgcatgcctgtagtcccagctaccctggaggctgaagcaggaggatcacttgagcccaggagttcgaggctgcagtgagctgtgatcacgccagtgcactccagtctgggtgacagagtgagagcctgtcgctaaaaaatacatatacatatacataaaaaagaattatacaaaattacacaaaaattgtttaattacagttaagagctgggaagggaaagcactgcttggtgaattaaggtatctcagaaagaatgatgtcaatgccattgaaggtgggggttgggtttctgatggtggaaatgtcagggtgggtgggtgcggcgggccatggagctgcatagggatttgcctagcgcccatcagttcagagcctgctggtaggggcttagctgaacagatgaggtggactgttcagttctgtctggaatttggctgtggggttcggacactttgtcgcttgggattgaaggtggatcgggaaaccgtatggttctgtcccagtgtccttgctgaaggtaaacctcatggccagtagccstgggaagccggttgtggtaggacgtggtgtcctgagctggcctggattccagaagtgaggacttgtatcatgcaaagggcacccaactacagctgtgcccaccagaggttttgttgcaaatgaaaagataagaggaatttgtggggaaagagtgagaagacttatttaagaacattattcggactcagatgagctgtaggaaggaaaacggggagagagatgcagaaaaaggaggtaatgttgctttgacaccaggtgaactcttgactttgggactgactttttgtttttaagtgaaaataaatctttcagctttaaaaatatttaaagagtaaaattgagttctgagattcatgagatgtatgtgatggaaaagagtttttttttttttttttgtagatcaaggaatagcagtgatcccacagcagggtaca

SEQ ID NO: 554356 - DNA, 927 bp, Homo sapiens
atgatcttatatatagaaaatcttacagattttaccaaaaaactgttacagctaataaacaaactcggtaaagctgcgtgatacaaaatcaacacacaacagtagcatttctatacactaacagtgaactatctgaaaaagaaatcaagggaataatcccatttacaatagctgcaaaaaaagagaagatacttaggaataaatttaaccaaggaggtgaaagatttgtacactgaaatttataaaacaatgatgaaagaaattgaaaaagaaagaaattgaaaataaatggaaagatatcctgttcatggattagaagaattaatattgttaaaatggccatactatccaaagcaacctacagattcaatgccatctctatcaaaattccaatgtttgaagcttggtctaggagaatcaatagtattgtgttctctcaaaggataatctatagggcacttgattgacaaggggcttgaacaaaaatataagacacaatcaataatctatctcccataaaacatgcagggagataacttgaacttatctatattccactctgcttttcgctagactgtatgccttgtaaaartcaatttttccgaaagtcaatttttccaaaagtcattctttctttcaaagcatattgtttgcagtcttgaatggtggaaaataagagcagagaggaaacttctacgttgaacctgatattttaacaccataggccctccaaaagttatttttactttgaacaaatacaaaaataatgcataactttattccatcctgatttgccccccagctggctgacttcattggttcataaattgcccatgatgaatgaattgacctaaagccttgagcagatgaattttgtggtcaagatttgctgaaaaatatattttttctcttgtttagatatatcat

SEQ ID NO: 554357 - DNA, 611 bp, Homo sapiens
tttgattaatgggtaaaaatatacagtttgatagaagaaataagacgtcatgtttgatagataagtaggtgaygatagttaaaataatctgttttatatttcaaaatatctgcaagtgaatagttagaatgtctctatcagaaaaaaagacaaatatttaaggtaatggatgccccaattacactgatttgatcttcataaattttatgaatatattatcacatgtaccttctcaaaaaagcaagataatagattaaaatactgtatactatttaaatataaaaacctgtaaaaagtaaataaatgaactatgaactcgagtcatgaaaagacataaaggaacctgaatgtgtatcactatgtgacagaaatcaatctaaaaaaggttaaattttacatgattacaactatatgacattctggaaagggcaaaaccattgagatagcaaaacaatcagtgaatgccagggtttctggtaaaagggagcgatgaataggtaaagaacatgggatgtacagggcaatgaaactattctgtatagtactgtaatggtagatacttgtcatttatcaaaactcataaactgtagaacacaaagagtgaaacttaa

SEQ ID NO: 554358 - DNA, 611 bp, Homo sapiens
tttgattaatgggtaaaaatatacagtttgatagaagaaataagacgtcatgtttgatagataagtaggtgatgatagttaaaataatctgttttatatttcaaaatatctgcaagtgaatagttagaatgtctctatcagaaaaaaagacaaatatttaaggtaatggatgccccaattacactgatttgatcttcataaattttatgaatatattatcacatgtaccttctcaaaaaagcaagataatagattaaaatactgtatactatttaaatataaaaacctgtaaaaagtaaataaatgaactatgaactcgagtcatgaaaagacataaaggaacctgaatgtgtatcactatgtgacagaaatcaatctaaaaaaggttaaattttacatgattacaactatatgacattctggaaagggcaaaaccattgagatagcaaaacaatcagtgaatgccagggtttctggtaaaagggagcgaygaataggtaaagaacatgggatgtacagggcaatgaaactattctgtatagtactgtaatggtagatacttgtcatttatcaaaactcataaactgtagaacacaaagagtgaaacttaa

SEQ ID NO: 554359 - DNA, 597 bp, Homo sapiens
taaaattttgttcaatttaaagcattaaaacagaaattgttgaaatctaacagcatttttggttaagagcacagattctgagccagatctcctaggtcagaatactggccatataacaaattgtgtgaccttatgcaaattacttaatgtctccacacctcactttcctcatctgcaaaatggaartattacaggatacctaacccataagaagctatgaggattcaatgatttaacattcataaaatgttaatattttaaaatatttgataaataaaaaagaaaacactaaatcccaccactgggcaagagccagctccagcctttaaggaaatcaacaactagttaggaacatgaaacaaaggtaaacagcagtacaaagagacataaaacaactattaaaccattactggcttttgatagtggctctgggtgttcagtgaccagaatatttgcctaaaaacagacaacacttctgaagtcctttgaatagataaggtaatccaatatttacactgaaagtcataaagccaaaagtcactttatttatcacaatggctaggtttaacgctatggtcaagaaggaaaattatccac

SEQ ID NO: 554360 - DNA, 553 bp, Homo sapiens
ctcaaaacccaggccctgctgtaaggcctggaccgggtggggtcctagaggtcatctccctgcacccatgtgaagcttccgagcatttgtccttggggttttgccccatggcatcccagagccacscaggcactatgttcacctcctgctgcccttcaagatgaacaagaagaagagaaacaaagggagttcgccagaggcctgagtgtggaggagacagagaaagaacagcacagaaaagagaggccaggaaggccccagatgccaggtcaggttcatttcatgtagaaatcacttcagcagattgctctgctaaagagaagaaaatacacttaacatgatgcatggcccccgcttggctcaaagctgattgcatctctaggctagcgacaagctggcagagcttattaaaaacagtgcacatgattctctgcccaagctcagagccctttccctctgagccactcagggcatttcccagtgtgggtgaggaagtgtgcaaggcctggtagaccttagactgcatggctgcagtttctgtaactattgttca

SEQ ID NO: 554361 - DNA, 553 bp, Homo sapiens
ctcaaaacccaggccctgctgtaaggcctggaccgggtggggtcctagaggtcatctccctgcacccatgtgaagcttccgagcatttgtccttggggttttgccccatggcatcccagagccacgcaggcactatgttcacctcctgctgcccttcaagatgaacaagaagaagagaaacaaagggagttcgccasaggcctgagtgtggaggagacagagaaagaacagcacagaaaagagaggccaggaaggccccagatgccaggtcaggttcatttcatgtagaaatcacttcagcagattgctctgctaaagagaagaaaatacacttaacatgatgcatggcccccgcttggctcaaagctgattgcatctctaggctagcgacaagctggcagagcttattaaaaacagtgcacatgattctctgcccaagctcagagccctttccctctgagccactcagggcatttcccagtgtgggtgaggaagtgtgcaaggcctggtagaccttagactgcatggctgcagtttctgtaactattgttca

SEQ ID NO: 554362 - DNA, 2309 bp, Homo sapiens
aaaataactattttccattctacattaagaaaaaacaaaaacattggggaaagatatttcattcaatctgtttctatgagactgaacaagtcttaatggctgaatgaagattgatggtacacaatggctctcagactgaagaagatttctttacaaagttttaataaaccaggattttctataaaatggaatgcccttcctgccactggagcctggagccattcaatttagatgggtttccaaaagactggttaacatttccctggaaatgacaggaaggaaagtcagacagtgaaggactcagcagggaggaatgactgagcaaaggaacttgctgcagtgctggacttgaactccttggctgcatgactcatttaaagcacccaaggttttgtcaagggaaggtagtggtgaatagacgggagaagagtccactggacatctgcgataaactagctgccaggaaaaattgtcaaaacatccagagtattagcaaagggtcaggggcttctgttctggacacatccagaaaaataaatagctttggatcttgttgggtgaagttggaagaaaagaggattatgctctctaatggaaggcgcaatcccggagagctttaaaacccagggaaaggagacattgaaaggcaaactctctctggagaatggagcaagaacagcctaaggtcatcttagctccttcaccaagacactrcagtggggtctgcagtaggaacatgatgcctgctcacagtgtgacctagaaaaacccggctcctctgttcatctggcccgtgtttccctctgggtcactaggagcctgcctctcccccaggtgcgttcttcttcatggaggagtcttggagacctctcctgcccttccccttcaacagccgacagcacagggccagatgctgcccacccatctttgaaaaacctggacattctcctgactgtcatcaacaagtgaaaggactcattctggagtaagggaaagaggatgagatttaggattagggaaactgggtttggatcttgacttttctttggctgagactctttcacagagtttcgataaatcaggatttattgaagtgaagtgcatgtctcactaccatgtaacctaactgagaccttctggctgacccagcaaattccttctcatctgccagtgggctacagccactgtctttgtccctgtgattcttttgtggatccctttcaaaaccttattttgtgacccgcttgctgcctgatgatcacatttggtaatatccttctccttaggagcaactttgacccctaacgacgtggcaaaccttgtcctatgcattcaataagacagacctgttagataactacttcataaatctaaatgttgaacaggagacacatcgtttggggtagcatataagaagcaggctagagttgctacttaaaatcaaatatcaaattctaagcagttgccagggattggcgtgctggataaaatgtggattcttggcaagcagaattaggctctcttcttgtagcagatgcctctcatgtcccacatcacgttccattggcccatctctgatttcatctctagtttcagtgagcagttctgggtaagcttgacaatgttccacctcaagcgcatgcctgggccttctctgatgtcatgtagcccacttgtattagtccattcttgcattgctataaagaaatacctgagactgggtaatttataaagaaaaaaggtttaattgctcatggttctgcaggctgtacaggaagcaagatgctggcatctgcttggcttctggggagccctcaggaaacttataatcatggtggaaggcaaagcagggagccagcacttcacatggctgggagcaggggcaagacagagagagaggggcagtgctacacagttttaaacaatcagatcttgtgagaactcaccgtagtgagaacagcaccaagggagatggtgctaaaccatttgtgagaaagcacccgatgatccagtcacctctcacagcccccacctttaacattggggattacaattcaacatgagatttgtgtggggacatagatccaaaccatatcacgctcaaccagcatgaaaacagcctggcagtgaggagaggccagtgctcctaggaccagctctcaaaggaagtggacgcctgaaaataaatgctccagaagccctttgctcagatgggctattctgggagctctcagaatcgggaggttttggcagaatcgatctgttcccagttgtggcctttcattaccctgtgtggaagggagaataat

SEQ ID NO: 554363 - DNA, 520 bp, Homo sapiens
ttgcctgattttccccttcctgtgcttgcagcctgaaaactctccaggcagtaaggcataayatttgtagggctcatcttatttacttctccatctcaggaatcactgtcttttgccatttgatttgcaatgtctgaaagtgatttttttttaagttgttgcaagtggaagggtaaatccagttcctttactccatcttgcccagaagatgtatgacatcatatgtcttcatgtcattcatgtatgacaacaggtaagttcccttagtggggtctgtatgctagactggggtcttgcctcagggttgtggtatttgaggaggattaaagagaactcatcctagtataaactcagctcttattcatgcaattacactgccacactagtttccacttcttagtcatggtcccatgttgtgttcctgagaaggtttgttctttggttcattcacttatcccttaactatgagttaagaatattttatataataaaactcaattattggggcaatagcaagaaa

SEQ ID NO: 554364 - DNA, 520 bp, Homo sapiens
ttgcctgattttccccttcctgtgcttgcagcctgaaaactctccaggcagtaaggcataatatttgtagggctcatcttatttacttctccatctcaggaatcactgtcttttgccatttgatttgcaatgtctgaaagtgatttttttttaagttgttgcaagtggaagggtaaatccagttcctttactccatcttgcccagaagatgtatgacatcatatgtcttcatgtcattcatgtatgacaacaggtaagttcccttagtggggtctgtatgctagactggggtcttgcctcagggttgtggtatttgaggaggattaaagagaactcatcctagtataaactcagctcttattcatgcaattacactgccacactagtttccacttcttagtcatggtyccatgttgtgttcctgagaaggtttgttctttggttcattcacttatcccttaactatgagttaagaatattttatataataaaactcaattattggggcaatagcaagaaa

SEQ ID NO: 554365 - DNA, 588 bp, Homo sapiens
ttgaacttgttttctaaatgcttcataaaatgggcaatttgatgcttaagaatgtatctttggaagcaacactgatattgtgccacatgacacataatgtcacaatgtggtacttaacagatcagttcactgatgcaccaattaaagaatagcagctatattatacttcttatttttccttttgctcctccctcccttkcttttattttttctaattataaaaacaatgcagattcatgtaaaaaattagagaaaacaaaaatttaaaaaataagaatcatccagagtcccacaattcaaaaaaaattcactaggatattaacattttaaccactaacttctaatttatatctaatgatttagaaaagttttgataaacattttccattttactgtctttctctgcaattgagatcttagataataaatcaaaaaatattttcattatcaaacactagagtgtatgtctcacaaacaatgctcaatcctcaataaaaattttgaatagtgcagccccttttgagaaaaacagccctatcttataatcagctttttgcatgtcccaatgcatatgtcacctccataggg

SEQ ID NO: 554366 - DNA, 533 bp, Homo sapiens
gaggcacccaagtgttagctgtatcatataccaaatgctttactcacacggcttggtgaattcgagaatccacagtcctggaaagaaaagaggcctgaaggaaaccgggttctatttaattttaaactgaattatgaacccaaacctcaaggttgggggagatttcaattgaaaatgaagagtatccttgctgtggaatggagcagcagctaaacccaccatgtacaaactactcacttttcagactctgtactttaaaaaatccatttcaaggctatgtatrtcacagaaaatagcatatgaagaaactctgcaaacacagccatgaaggaagcacccaaagacagaactgaattcccgggtccaaaatatattccctctagaagcaactcattctatttttaagaattaatcacagtgccaaacgaatacaacaacatctagaaatggggaaaaaggcctgcgtcccccagaccatcagcaacaaactcctttccaccttgcgccacaccacgctgtcacccaggctcaag

SEQ ID NO: 554367 - DNA, 628 bp, Homo sapiens
ttagtaagaaaatggctgtatgcacacaccagataccatcactcattcttattcacaagagtcaaaaagtgaaaacaaacctgtatgtgtagataaacaaaatgtggcatgtacatacaagggaagattatttagccataaaaagggaatgatgttctgatacatgtttacaacatgggtaaaccttgaaaatattatgctaaataaaataagccagacacaaaaggacaaacagtatatgattctacttatatgaaagatcatgaatagtcaaattcatgcagtgggaatgcagattgcatgtttccagggcatggaggctggggcaaggggaatggagaattagtgcttaatggtacagaacttctgtttgatgtgatagaaaagttatgaaaacagtgttaattatacaacattgtgaatgtattcaatatcactgagttttagaattgaaaatgattaaatggtaccttttatgttatgtatatttaccactgggcaataaaattgtattagtgtaggcgaggcaattttaacagtcgtaccactctggaggaagatattgataatgaaggaggccatgcatgtggaggcaggatatrttacatatataatataatatataaca

SEQ ID NO: 554368 - DNA, 595 bp, Homo sapiens
agtaatgcagatccctccaagttcatgaattacatttgggaccaggcagatggtccagccccaaaatcgtgactccaccagtttcacagasaggaggtttccacaggacagcgagcgcaaatgaagatgggaagatagttgccattttgctctgtgttccacaggctgagctctctggcgcatggtggcctctcacatgggaggcaggctctgtccccagcatccccatgggctttgagttgaaaggcaagccctctgaaagcaagcttctgagacccgttccgtctctttctgatgagaatgcgtcctccctgcaaagtgtcagagcctcatccaggggctgtggagtgacagtaccaaagctgtggattggggagagaagaactgctgaaaagctactatttttgcagtattaactgaaagccaacgtcctgctgggttctttacatccatcggctcgtggaaaccctgcaaccacgtgaggtgcgcatctgccgtggcattttcagatgacaaagctgggacttaagggaataacctgcgcaaggccacacagttaagtaaacaggagtcaggagtcagttgtgcgtcttca

SEQ ID NO: 554369 - DNA, 958 bp, Homo sapiens
ggaaacccaacaacaaagacatctcaaaagccagtgtttccagtttgttttgcactgtccaagcactagggtaggttccctttgtgaccacaggcatcttgagtctcaggatccctgtcttaaggggcaaccattcttctgtgttggaggacacccattctgtcccctctgcccgatgcttttaataaggacctaggtatcctggaacctatgtcaggactgacaagtgaaattaggtaatccacaacctcccacaaatattctctgagcacctactttgtgccagcgcattctgatgccatcagaaatttgcaaagtaatataactcttcctattcacaaatgagggacccgtgcttggagatggtcaggcagctctctgaggtcatggtacaaggtggaagctgacctcaaattccatcatgtctgatgctgcaaacctttgytttttctactgagtcacagtgctcggtgtgatcctgactgttcccaagaactgttttgtttttcaagacatgagagtacacagagacagctaagccccatgtaacaccttcagagaagggactggggaacttcagaagtgcccagggcaagctgggaggctgcctgtgtgcatcctcagtccagactcatttagggaacatagtctgccggcggggaggagaaatgatgtttttggtcaagacttgaattttttcagatgtttaatcacaagcgatgctagtcctgcctgaaaccctgaactacttgctattgagagtgatgaaagtacatttccccctaattcaagataagagagaagggtggagatttctagaatgtatgtttccctatctattgcgaatggtgtctagagcctatctgtgaagtgacgaagcagttttcatgccagggtgtctactgtccatgacgaccatgtggtcctgacaatcccgggtctgggttgtcctctgctg

SEQ ID NO: 554370 - DNA, 958 bp, Homo sapiens
ggaaacccaacaacaaagacatctcaaaagccagtgtttccagtttgttttgcactgtccaagcactagggtaggttccctttgtgaccacaggcatcttgagtctcaggatccctgtcttaaggggcaaccattcttctgtgttggaggacacccattctgtcccctctgcccgatgcttttaataaggacctaggtatcctggaacctatgtcaggactgacaagtgaaattaggtaatccacaacctcccacaaatattctctgagcacctactttgtgccagcgcattctgatgccatcagaaatttgcaaagtaatataactcttcctattcacaaatgagggacccgtgcttggagatggtcaggcagctctctgaggtcatggtacaaggtggaagctgacctcaaattccatcatgtctgatgctgcaaacctttgctttttctactgagtcacagtgctcggtgtgatcctgactgttcccaagaactgttttgtttttcaagacatgagagtacacagagacagctaagccccatgtaacaccttcagagaagggactggggaacttcagaagtgcccagggcaagctgggaggctgcctgtgtgcatcctcagtccagactcatttagggaacatagtctgccggcggggaggagaaatgatgtttttggtcaagacttgaattttttcagatgtttaatcacaagcgatgctagtcctgcctgaaaccctgaactacttgctattgagagtgatgaaagtacatttccccctaattcaagataagagagaagggtggagatttctagaatgtatgtttccctatctattgcgaatggtgtctagagcctatctgtgaagtgacraagcagttttcatgccagggtgtctactgtccatgacgaccatgtggtcctgacaatcccgggtctgggttgtcctctgctg

SEQ ID NO: 554371 - DNA, 929 bp, Homo sapiens
gtggcatctgtttatgtacttttacatttttaagtttgatacgttttatatttaattcagcaactttacagttattgcattttgcccattgaatttaaatgttgaaagttaatatagagcattttcaatattatcactctttcttctttccttcctttctactttccccaagctcttaaacagcattttccctttctgttctaggagttgaggcacagtggtaaattctgtccattacacagacaggtgatatgcattatatatcttctgcaatatttttattttcctgaaaatgctaatccttttaatccactcacaccaacgtaagayttttttccttttctttttctttcgtttttaaattctctgcttaccatgttcttaattgtgcaaagtattagttttctaactgcccctcttctctcagccccactgtttctccatggagaccctccttctgaagcctccaccttttggttctaagctggaactgttagacatctatcatcctggggcaacccttcataaatgtgctgattagatctgcctctaaccggaccccatgacttcattctttacttaatcccttttcatgctgtagcatatcctcaataaactttctaagataatatgcaggaaatacagccgtgtctagaaagtctttcttttgtccttatatgcgatttgatgatttagttcaatataggatatctagtctaaaattattagtcctcataattttaaaggtatttctctgttactttctagcatttaatattgctgataatgtccgatgccagtctgattttgctctttttgtaagataaagaaatattttatctccttccttcttccttccttccttccttcatttcttcctttcttcccttctcctttccttttttctttatctccttcccttctttctt

SEQ ID NO: 554372 - DNA, 929 bp, Homo sapiens
gtggcatctgtttatgtacttttacatttttaagtttgatacgttttatatttaattcagcaactttacagttattgcattttgcccattgaatttaaatgttgaaagttaatatagagcattttcaatattatcactctttcttctttccttcctttctactttccccaagctcttaaacagcattttccctttctgttctaggagttgaggcacagtggtaaattctgtccattacacagacaggtgatatgcattatatatcttctgcaatatttttattttcctgaaaatgctaatccttttaatccactcacaccaacgtaagatttttttccttttctttttctttcgtttttaaattctctgcttaccatgttcttaattgtgcaaagtattagttttctaactgcccctcttctctcagccccactgtttctccatggagaccctccttctgaagcctccaccttttggttctaagctggaactgttagacatctatcatcctggggcaacccttcataaatgtgctgattagatctgcctctaaccggaccccatgacttcattctttacttaatcccttttcatgctgtagcatatcctcaataaactttctaagataatatgcaggaaatacagccgtgtctagaaagtctttcttttgtccttatatgcgatttgatgatttagttcaatataggatatctagtctaaaattattagtcctcataattttaaaggtatttctctgttaytttctagcatttaatattgctgataatgtccgatgccagtctgattttgctctttttgtaagataaagaaatattttatctccttccttcttccttccttccttccttcatttcttcctttcttcccttctcctttccttttttctttatctccttcccttctttctt

SEQ ID NO: 554373 - DNA, 1051 bp, Homo sapiens
aatcttatacataaaacccctacagaaaatgcaaattatcagaattaagagtttgaagaagcttcattcatttcttttttatcattatgtgataatccattattgtcactgttctttttggtgcttaaattgccttacatgactgtggaaatccctttaggccagctcaagcatctctatgacatgattcccattactctttgagcatctccttgctttctgctccaaaaagatgatctagactcatcttagtctttccctaatccagatctggaagtagccatttgtataaaaagtactgtttcctttgggtagaaaacggtacttagaaatcaagacattagtgctgaatgtgtatattgttaatgaggtgtcattctccagacgccttcaatgcacagagctaggaaatatattatctgaaatcaccaattcatttaatagagtcaattcaaatatatcacagagtttttcttacctttatatttacacctcttttatagtaaaaattgtggtttagaattacaataatgtacttacctactatatactactgtatttatttttaataattacaatataaatactaacactaacaataaacctagtaagtagagtttaagatttctttgcagattttttgtccttaaaatttgtcccacaaaaatatatattcagagcactatgcttaaaaatagtgtgaattaattaattgctctgtggctatgtaatctatttgatatacagttagaattcttttctttctgtttccattcagttttaaggtttactactttttatcctttatggttttaattttatgtttattaaaaataatattaaatattaataatattttaataaaataatattttattaaaatatattggttcaaaagtcraaactatttaagtaggtattctccaatcattatcactttcaatacaattaccactgacaccatctagtcaacctttttattaccttctggcttatctatcctgtacttctttttgcaaaattaagcaaataaataccaagacataagcac

SEQ ID NO: 554374 - DNA, 610 bp, Homo sapiens
agttattttccagtgccctgtaataagtttttcttcttaaaataattttgtatatttgtatgcttgttgtatatagagggtaattgcctgaattgctaatgctgcctttctggtagcagaaatgaatatttttttaaaaaactaatattttccagtggttgaaaatgcaataaacatgcagattagagtgaaaagtcttctttcagctttgtctctcagccaccctggaagagaatcaacaaatttcagtaaattactattatccttccagggatattttatgcatatatttgctgtgtgtacatacattamtttttcttttttttcacaaattgttctgcatcttttttcctataagaaatatcaacaaataaatataattcttaatgttatgcatatctatttcactgaatatatgtatattaaattttatatattcaacatgtataaacatttcgacttctaaaatctttattatgaacaatgttacaatgaataaaataatagataactgtattagttgtatattcatgtgtaacaagttacttagaacattagaaagtttttgagtcagaaattcaggtgtagttttgttgggtgttcctgactc

SEQ ID NO: 554375 - DNA, 567 bp, Homo sapiens
atcccctaatgaaaaaatgggcaaaggctaacaacaggcaatttacaaaagtaaagttatcaagggccaataaaacaagttccattttactagaaataaaagataggtaaatcatccaggtctttaatcccttctctgtgattccaaatgccaaaaagctctaaaaatagaaaataattattctgtgatataaactaattttgtagcaaaatccaaagtctgacatgaagctctttacagtctatttattctactgaacatgactcttaatatccttccccagtacatagctttttgggaaaattttgtaatatacagcatgtaactttattacctttataaaatatgaattatgaagcagatctcgccatagcaatttggataagagacctctacaagctttatagaaggaartgtgtattaaatgactttaaagtgataaggaaagtgtaagaaaatatacttacaagactgttcattgcagcacagtttaataataataaaactagaaacagcctgaagattcaaaaataagatattgtttaaatatataatggcatgtaacta

SEQ ID NO: 554376 - DNA, 1055 bp, Homo sapiens
tgccatgtatttaaataaatatatactctatcttcctatcatgctgttactcctttgaactattacttcttaatatgttaataagggaagtggtttgaaatttcttgaagggcagcgctgaaccctcaatggcgtaattaacattttaatgagcagtgaaggcctttcctgttttggatctcaactgtgtgtctcctgagtggatctcaatctgttgagctcagagaatgaggtgattctatcttagtgagattttaaataacaatagatcatacaggccacagtttcagcctgctactgctctctcctttgttaggaaagttcacttgtattctgatgtaccacatcagagtacaatgactactttcagctctggtttcttttttggtatgcacagaaactgtacgcataacagtcataatccaggagtggctaatttttagtaactgaccaagtaattgtaagttctccttatttgcaaggtacagtagctaactgctatttggagacacaacaatttgcagaagaagtattggataatacttgtaatttaattatttgcaaatcaagctttgcctaatacaccaaaggtackaaacctcttcattggagacaagtttgaaaaggtcattaaaaagctatttgttttgagatttcagaaagcaaagtacctaaaaaaatggtctaatggacagaaaaaaacttttattctcagagaaaatctcccaaaaacattaaaaaccaatatccttattttcattactaggcaaaagaagaaaaaaaaactgtcatgagaaaaattcctgtgggaaagcttcaagcatcttaaaaatgaggcttataatggaaaagccttctctgtcataattaatatagcatcactaatataaaacccaggctgcttctcctgtctttataactcatttctgactactgcagacccattactataatgtacattacacatatagcacaatatagtttatattattatttaaggtaaaggatgtaaaatgtaagggaattttgacactgatttcttggtgataagaatg

SEQ ID NO: 554377 - DNA, 1055 bp, Homo sapiens
tgccatgtatttaaataaatatatactctatcttcctatcatgctgttactcctttgaactattacttcttaatatgttaataagggaagtggtttgaaatttcttgaagggcagcgctgaaccctcaatggcgtaattaacattttaatgagcagtgaaggcctttcctgttttggatctcaactgtgtgtctcctgagtggatctcaatctgttgagctcagagaatgaggtgattctatcttagtgagattttaaataacaatagatcatacaggccacagtttcagcctgctactgctctctcctttgttaggaaagttcacttgtattctgatgtaccacatcagagtacaatgactactttcagctctggtttcttttttggtatgcacagaaactgtacgcataacagtcataatccaggagtggctaatttttagtaactgaccaagtaattgtaagttctccttatttgcaaggtacagtagctaactgctatttggagacacaacaatttgcagaagaagtattggataatacttgtaatttaattatttgcaaatcaagctttgcctaatacaccaaaggtacgaaacctcttcattggagacaagtttgaaaaggtcattaaaaagctatttgttttgagatttcagaaagcaaagtacctaaaaaaatggtctaatggacagaaaaaaacttttattctcagakaaaatctcccaaaaacattaaaaaccaatatccttattttcattactaggcaaaagaagaaaaaaaaactgtcatgagaaaaattcctgtgggaaagcttcaagcatcttaaaaatgaggcttataatggaaaagccttctctgtcataattaatatagcatcactaatataaaacccaggctgcttctcctgtctttataactcatttctgactactgcagacccattactataatgtacattacacatatagcacaatatagtttatattattatttaaggtaaaggatgtaaaatgtaagggaattttgacactgatttcttggtgataagaatg

SEQ ID NO: 554378 - DNA, 1055 bp, Homo sapiens
tgccatgtatttaaataaatatatactctatcttcctatcatgctgttactcctttgaactattacttcttaatatgttaataagggaagtggtttgaaatttcttgaagggcagcgctgaaccctcaatggcgtaattaacattttaatgagcagtgaaggcctttcctgttttggatctcaactgtgtgtctcctgagtggatctcaatctgttgagctcagagaatgaggtgattctatcttagtgagattttaaataacaatagatcatacaggccacagtttcagcctgctactgctctctcctttgttaggaaagttcacttgtattctgatgtaccacatcagagtacaatgactactttcagctctggtttcttttttggtatgcacagaaactgtacgcataacagtcataatccaggagtggctaatttttagtaactgaccaagtaattgtaagttctccttatttgcaaggtacagtagctaactgctatttggagacacaacaatttgcagaagaagtattggataatacttgtaatttaattatttgcaaatcaagctttgcctaatacaccaaaggtacgaaacctcttcattggagacaagtttgaaaaggtcattaaaaagctatttgttttgagatttcagaaagcaaagtacctaaaaaaatggtctaatggacagaaaaaaacttttattctcagagaaaatctcccaaaaacattaaaaaccaatatccttattttcattactaggcaaaagaagaaaaaaaaactgtcatgagaaaaattcctgtgggaaagcttcaagcatcttaaaaatgaggcttataatggaaaagccttctctgtcakaattaatatagcatcactaatataaaacccaggctgcttctcctgtctttataactcatttctgactactgcagacccattactataatgtacattacacatatagcacaatatagtttatattattatttaaggtaaaggatgtaaaatgtaagggaattttgacactgatttcttggtgataagaatg

SEQ ID NO: 554379 - DNA, 1055 bp, Homo sapiens
tgccatgtatttaaataaatatatactctatcttcctatcatgctgttactcctttgaactattacttcttaatatgttaataagggaagtggtttgaaatttcttgaagggcagcgctgaaccctcaatggcgtaattaacattttaatgagcagtgaaggcctttcctgttttggatctcaactgtgtgtctcctgagtggatctcaatctgttgagctcagagaatgaggtgattctatcttagtgagattttaaataacaatagatcatacaggccacagtttcagcctgctactgctctctcctttgttaggaaagttcacttgtattctgatgtaccacatcagagtacaatgactactttcagctctggtttcttttttggtatgcacagaaactgtacgcataacagtcataatccaggagtggctaatttttagtaactgaccaagtaattgtaagttctccttatttgcaaggtacagtagctaactgctatttggagacacaacaatttgcagaagaagtattggataatacttgtaatttaattatttgcaaatcaagctttgcctaatacaccaaaggtacgaaacctcttcattggagacaagtttgaaaaggtcattaaaaagctatttgttttgagatttcagaaagcaaagtacctaaaaaaatggtctaatggacagaaaaaaacttttattctcagagaaaatctcccaaaaacattaaaaaccaatatccttattttcattactaggcaaaagaagaaaaaaaaactgtcatgagaaaaattcctgtgggaaagcttcaagcatcttaaaaatgaggcttataatggaaaagccttctctgtcataattaatatagcatcactaatataaaacycaggctgcttctcctgtctttataactcatttctgactactgcagacccattactataatgtacattacacatatagcacaatatagtttatattattatttaaggtaaaggatgtaaaatgtaagggaattttgacactgatttcttggtgataagaatg

SEQ ID NO: 554380 - DNA, 1055 bp, Homo sapiens
tgccatgtatttaaataaatatatactctatcttcctatcatgctgttactcctttgaactattacttcttaatatgttaataagggaagtggtttgaaatttcttgaagggcagcgctgaaccctcaatggcgtaattaacattttaatgagcagtgaaggcctttcctgttttggatctcaactgtgtgtctcctgagtggatctcaatctgttgagctcagagaatgaggtgattctatcttagtgagattttaaataacaatagatcatacaggccacagtttcagcctgctactgctctctcctttgttaggaaagttcacttgtattctgatgtaccacatcagagtacaatgactactttcagctctggtttcttttttggtatgcacagaaactgtacgcataacagtcataatccaggagtggctaatttttagtaactgaccaagtaattgtaagttctccttatttgcaaggtacagtagctaactgctatttggagacacaacaatttgcagaagaagtattggataatacttgtaatttaattatttgcaaatcaagctttgcctaatacaccaaaggtacgaaacctcttcattggagacaagtttgaaaaggtcattaaaaagctatttgttttgagatttcagaaagcaaagtacctaaaaaaatggtctaatggacagaaaaaaacttttattctcagagaaaatctcccaaaaacattaaaaaccaatatccttattttcattactaggcaaaagaagaaaaaaaaactgtcatgagaaaaattcctgtgggaaagcttcaagcatcttaaaaatgaggcttataatggaaaagccttctctgtcataattaatatagcatcactaatataaaacccaggctgcttctmctgtctttataactcatttctgactactgcagacccattactataatgtacattacacatatagcacaatatagtttatattattatttaaggtaaaggatgtaaaatgtaagggaattttgacactgatttcttggtgataagaatg

SEQ ID NO: 554381 - DNA, 613 bp, Homo sapiens
  misc_feature 71: n = A,T,C or G
gcctgggaagaggatcacttatcaagcatagatcagtactgacatccagtggtcacagagaattatctkgntgaagcttttcatttttctcttcccaaaaatgaatgggtattcacacagaggaaggaggagtggcgaaaaatgacagctaccagtgctgttaactttggagaactgtgcaacttgcagccagataccaagtaactcaggtcaaggccttgccagtttgcaagatgtccatggttatttgagtgctgacccaagagccaggaggagaaatggggcccatcttcgtaagggggtaagaccataaagaataaaacacaccagccatggtggctcacacctgtaatcccagtgttttgggaagccaaggcaggggaatcacttaagaccaggaattcaaaaccagcctgggtaacatagtgagacctcatctctacaaaaaattaaaataaaaataattagctgggcatcaatctcatgactgggtatatacccaaaggattataaatctttctactatagagacacatgcacacatatgtttattgtggcattctttatagtagcaaagacttggaaccaacccaaatgcccatcaacgatagac

SEQ ID NO: 554382 - DNA, 613 bp, Homo sapiens
  misc_feature 71: n = A,T,C or G
gcctgggaagaggatcacttatcaagcatagatcagtactgacatccagtggtcacagagaattatcttgntgaagcttttcatttttctcttcccaaaaatgaaygggtattcacacagaggaaggaggagtggcgaaaaatgacagctaccagtgctgttaactttggagaactgtgcaacttgcagccagataccaagtaactcaggtcaaggccttgccagtttgcaagatgtccatggttatttgagtgctgacccaagagccaggaggagaaatggggcccatcttcgtaagggggtaagaccataaagaataaaacacaccagccatggtggctcacacctgtaatcccagtgttttgggaagccaaggcaggggaatcacttaagaccaggaattcaaaaccagcctgggtaacatagtgagacctcatctctacaaaaaattaaaataaaaataattagctgggcatcaatctcatgactgggtatatacccaaaggattataaatctttctactatagagacacatgcacacatatgtttattgtggcattctttatagtagcaaagacttggaaccaacccaaatgcccatcaacgatagac

SEQ ID NO: 554383 - DNA, 667 bp, Homo sapiens
gaaggtgctgcatgtctgcagacaatgattcaagttaggataaatgcggaggcagaatttctggggaaaaggcctagcagacaaaggaggtaggagtctagaatgttccttcagtctggtctactcaacaatcttttcaaatgcaaactaccgtcttagcttaggayggggaaagatccactttcttagagatgggagcttgcagccacctgtcacacacttaaaaaggaatttgagtcctggtgcagtggctcacgcctgtaatcccaacactttgagaggccaaggtgggcagatcacttgaggtcaggagttcaagaccagccctggccaacatggtgaaaccccatgcctactaaaaatgcaaaacttagccacatgtggtggcacatgacacatgactttaatcccagctactcaggaagttgaggcaggagaatcacttgaaccccggaggtggagactgcagtgagcagagatggcaccactgcattctagcctaggcaacaaagtgagaccctgtctcaaaaaaaaaaaaaaaaaaaaaataaaagagagagaagaattcgataggacagttgaggctacaacaaagcaccctccctggaattgctactgtgggccaggagaattctcccaaacacacacacacacacacacacacaca

SEQ ID NO: 554384 - DNA, 667 bp, Homo sapiens
gaaggtgctgcatgtctgcagacaatgattcaagttaggataaatgcggaggcagaatttctggggaaaaggcctagcagacaaaggaggtaggagtctagaatgttccttcagtctggtctactcaacaatcttttcaaatgcaaactaccgtcttagcttaggatggggaaagatccactttcttagagatgggagcttgcagccacctgtcacacacttaaaaaggaatttgagtcctggtgcagtggctcacgcctgtaatcccaacactttgagaggccaaggtgggcagatcacttgaggtcaggagttcaagaccagccctggccaacatggtgaaaccccatgcctactaaaaatgcaaaacttagccacatgtggtggcacatgacacatgactttaatcccagctactcaggaagttgaggcaggagaatcacttgaaccccggaggtggagactgcagtgagcagagatggcaccactgcattctagcctaggcaacaaagtgagaccctgtctcaaaaaaaaaaaaawaaaaaaaataaaagagagagaagaattcgataggacagttgaggctacaacaaagcaccctccctggaattgctactgtgggccaggagaattctcccaaacacacacacacacacacacacacaca

SEQ ID NO: 554385 - DNA, 667 bp, Homo sapiens
gaaggtgctgcatgtctgcagacaatgattcaagttaggataaatgcggaggcagaatttctggggaaaaggcctagcagacaaaggaggtaggagtctagaatgttccttcagtctggtctactcaacaatcttttcaaatgcaaactaccgtcttagcttaggatggggaaagatccactttcttagagatgggagcttgcagccacctgtcacacacttaaaaaggaatttgagtcctggtgcagtggctcacgcctgtaatcccaacactttgagaggccaaggtgggcagatcacttgaggtcaggagttcaagaccagccctggccaacatggtgaaaccccatgcctactaaaaatgcaaaacttagccacatgtggtggcacatgacacatgactttaatcccagctactcaggaagttgaggcaggagaatcacttgaaccccggaggtggagactgcagtgagcagagatggcaccactgcattctagcctaggcaacaaagtgagaccctgtctcaaaaaaaaaaaaaaaaawaaaataaaagagagagaagaattcgataggacagttgaggctacaacaaagcaccctccctggaattgctactgtgggccaggagaattctcccaaacacacacacacacacacacacacaca

SEQ ID NO: 554386 - DNA, 536 bp, Homo sapiens
tcataattctcatgttttacattaagaacagagaaatatagtgacttgcccagggtcacacagatactaagtggctgagctgggactccagcttgcatctctctaaccgcaagcctggcactttccccttccctgagagaagaactgtaggaagttagcacagagtcaggtgccaaaaaagggctaccacctggacgtggcaggcaacattctgtggtgtttctgcaggcatctcccgagtcaccccagctcaggaacaaggcaraaaaagttgggggttggcaagttaggaacaagaggaagaggacggggacaaagctgcaagtccgggagcggggctgcctgtcttctctggcagttcctgggttgaggctgagcaaaacaggataaaatctgagcaggagcccacggctgggggacttggcaaagacccagtgtggtgggtgggagggaggctgtgccctggagggggattccagggttcctgttcttagtggggaagagccctggatcgagggtggcccaagctcaactct

SEQ ID NO: 554387 - DNA, 1503 bp, Homo sapiens
gatatttttatatagccaaataaatcactcttttctttaattgtgggttcttcctttgcttttatctttgaggtctggaataatggatgatttttagatcatagatgaggatgataacaggtgttctgatttaaggaaaaatcacatatgaaaatcaatttctacaagagattaaactgaacaaattcttcattttatataactgatttcccacaatatctctaactacagatgtgctgaagatataattccatttttaacaatttgttatatacattttagtggataaacttgggttgataggtacattgaatttatttcaccttaaattagatacattttctaaaggtaaaattaattatcacagatactgtaaatatttgagtattttaagtggattttattaatatgctgcagagtattctacatcaacattatgtttaaaaactattttaagaatttccacactggcatccacagaccaaatgatttgtatccagcatatcagaaattcagatgataaggttttattgaaatataaattattcttrtaaatagagagattaagtatttccagggtgaaaatggattgctgccacgctttctctggtattgtaagtattctgtttcctttaaagatttaatatttttccaagtgcagctgtatgaaaaagctgaagtgcagcatttcctgaggaaccatttgtcacttacctacatttaccgtgtttactgtcctctgtgtattgctaaacttcacttttaataggagaaaattggccttaaacggggagcagtattttactgctgagcaagaaactatttgtattcctctttcaaaccctgccttagaagcatgtagaatgcttcttgaccaaaggagatggtatgaatattcatgtgttttatgaatcacagagttgagtccgtatggttttcccatttatcaattaccggtttaggattatccagctgaagagttgaactgattaacaacgctctttttgtttgctcggtgttgaggtgaaacagcccagtgacaactgtattatttcttgcctcttcagctgtccacacttgtgcaagaagcttaacatcctgtcaggtttcatcatgtatcctctttattaccacgttgtgagaatttgtatagttgtaaatcagaatgactttttaaagtttaatttctcattgcagaaaagaccccatggttactatgcctaacaagcatggctaatcatgcccatcataaatgatctcaggtatgcttggcatctgactggaaaattaaagttttaaaagttaatgctacaagcagttgagaatagcagctgcagtgagaactcggctgttacagagaaggtggaattaatcagacaaacacaaactcaccttgattgacgaagctagcatatttagtttggtttcgttttacatttgtttttgtttttctttcatttttcctctaacagcctatctgaattcttatttaaaatgtcactg

SEQ ID NO: 554388 - DNA, 968 bp, Homo sapiens
cccttagaaaaacccaccaagtgcagttgttttggcttctttcagggtcygggatccctttgtgagcctcatgacgcaaggacctttgcttcataaagaaggcacgaaatgtgactttagaaagctcatgatttccagaacccagagtggatcctggttcagaacgactgctccaagggccacacttctgcgcaggtttccccaagagtgcatttggaggaggacttgagggatgctccctggtgctcctctgtcaatgctttctttgttttattctgctttactctaggtcttctcagagctctcaatatggttacatgcatggggaatcttgtttctcaaacttgctcttggagcagagttgcagtgggggaagtgtggtctatgggcacagctcccactagggcctgcagcttcctggttcaagcagaagccttgcaaacatattcatctggaaaaagcatagcacagaggccccagttgcagagatgctccggaagcctgaggtatgcacagggctagtgagctaagaatattcctctgtcgccttttcaaggacaagggaagccagggtggagactgtgctgagctaaggtaaatataaaacaatcccagggcggtccctcagaggaaggcttagctccccggagccttgggtagagacgcttcctgcctgcctcggggagtcctcctgccaggaagaggcctcagactctgctatgtctggccctgtggggtgatcccacgtgctgggaaggagggaaaagcagggtggggtggggcaccctgacattgtttcagatctcctgcagtacgcctcactacatgataaagcaaaaccagactttgttttaaaataaaatttttattttagatttttttttctcttatggccttccccaaagacagatttaaaagaaattattttattatggaaaatttcctgcaaatgcatgcatcaacttcca

SEQ ID NO: 554389 - DNA, 968 bp, Homo sapiens
cccttagaaaaacccaccaagtgcagttgttttggcttctttcagggtctgggatccctttgtgagcctcatgacgcaaggaccyttgcttcataaagaaggcacgaaatgtgactttagaaagctcatgatttccagaacccagagtggatcctggttcagaacgactgctccaagggccacacttctgcgcaggtttccccaagagtgcatttggaggaggacttgagggatgctccctggtgctcctctgtcaatgctttctttgttttattctgctttactctaggtcttctcagagctctcaatatggttacatgcatggggaatcttgtttctcaaacttgctcttggagcagagttgcagtgggggaagtgtggtctatgggcacagctcccactagggcctgcagcttcctggttcaagcagaagccttgcaaacatattcatctggaaaaagcatagcacagaggccccagttgcagagatgctccggaagcctgaggtatgcacagggctagtgagctaagaatattcctctgtcgccttttcaaggacaagggaagccagggtggagactgtgctgagctaaggtaaatataaaacaatcccagggcggtccctcagaggaaggcttagctccccggagccttgggtagagacgcttcctgcctgcctcggggagtcctcctgccaggaagaggcctcagactctgctatgtctggccctgtggggtgatcccacgtgctgggaaggagggaaaagcagggtggggtggggcaccctgacattgtttcagatctcctgcagtacgcctcactacatgataaagcaaaaccagactttgttttaaaataaaatttttattttagatttttttttctcttatggccttccccaaagacagatttaaaagaaattattttattatggaaaatttcctgcaaatgcatgcatcaacttcca

SEQ ID NO: 554390 - DNA, 968 bp, Homo sapiens
cccttagaaaaacccaccaagtgcagttgttttggcttctttcagggtctgggatccctttgtgagcctcatgacgcaaggacctttgcttcataaagaaggcacgaaatgtgactttagaaagctcatgatttccagaacccagagtggatcctggttcagaacgactgctccaagggccacacttctgcgcaggtttccccaagagtgcatttggaggaggacttgagggatgctccctggtgctcctctgtcaatgctttctttgttttattctgctttactctaggtcttctcagagctctcaatatggttacatgcatggggaatcttgtttctcaaacttgctcttggagcagagttgcagtgggggaagtgtggtctatgggcacagctcccactagggcctgcagcttcctggttcaagcagaagccttgcaaacatattcatctggaaaaagcatagcacagaggccccagttgcagagatgctccggaagcctgaggtatgcacagggctagtgagctaagaatattcctctgtcgccttttcaaggacaagggaagccagggtggagactgtgctgagctaaggtaaatataaaacaatcccagggcggtccctcagaggaaggcttagctccccrgagccttgggtagagacgcttcctgcctgcctcggggagtcctcctgccaggaagaggcctcagactctgctatgtctggccctgtggggtgatcccacgtgctgggaaggagggaaaagcagggtggggtggggcaccctgacattgtttcagatctcctgcagtacgcctcactacatgataaagcaaaaccagactttgttttaaaataaaatttttattttagatttttttttctcttatggccttccccaaagacagatttaaaagaaattattttattatggaaaatttcctgcaaatgcatgcatcaacttcca

SEQ ID NO: 554391 - DNA, 968 bp, Homo sapiens
cccttagaaaaacccaccaagtgcagttgttttggcttctttcagggtctgggatccctttgtgagcctcatgacgcaaggacctttgcttcataaagaaggcacgaaatgtgactttagaaagctcatgatttccagaacccagagtggatcctggttcagaacgactgctccaagggccacacttctgcgcaggtttccccaagagtgcatttggaggaggacttgagggatgctccctggtgctcctctgtcaatgctttctttgttttattctgctttactctaggtcttctcagagctctcaatatggttacatgcatggggaatcttgtttctcaaacttgctcttggagcagagttgcagtgggggaagtgtggtctatgggcacagctcccactagggcctgcagcttcctggttcaagcagaagccttgcaaacatattcatctggaaaaagcatagcacagaggccccagttgcagagatgctccggaagcctgaggtatgcacagggctagtgagctaagaatattcctctgtcgccttttcaaggacaagggaagccagggtggagactgtgctgagctaaggtaaatataaaacaatcccagggcggtccctcagaggaaggcttagctccccggagccttgggtagagacgcttcctgcctgcctcggggagtcctcctgccaggaagaggcctcagactctgctatgtctggccctgtggggtgatcccacgtgctgggaaggagggaaaagcagggtggggtggggcrccctgacattgtttcagatctcctgcagtacgcctcactacatgataaagcaaaaccagactttgttttaaaataaaatttttattttagatttttttttctcttatggccttccccaaagacagatttaaaagaaattattttattatggaaaatttcctgcaaatgcatgcatcaacttcca

SEQ ID NO: 554392 - DNA, 968 bp, Homo sapiens
cccttagaaaaacccaccaagtgcagttgttttggcttctttcagggtctgggatccctttgtgagcctcatgacgcaaggacctttgcttcataaagaaggcacgaaatgtgactttagaaagctcatgatttccagaacccagagtggatcctggttcagaacgactgctccaagggccacacttctgcgcaggtttccccaagagtgcatttggaggaggacttgagggatgctccctggtgctcctctgtcaatgctttctttgttttattctgctttactctaggtcttctcagagctctcaatatggttacatgcatggggaatcttgtttctcaaacttgctcttggagcagagttgcagtgggggaagtgtggtctatgggcacagctcccactagggcctgcagcttcctggttcaagcagaagccttgcaaacatattcatctggaaaaagcatagcacagaggccccagttgcagagatgctccggaagcctgaggtatgcacagggctagtgagctaagaatattcctctgtcgccttttcaaggacaagggaagccagggtggagactgtgctgagctaaggtaaatataaaacaatcccagggcggtccctcagaggaaggcttagctccccggagccttgggtagagacgcttcctgcctgcctcggggagtcctcctgccaggaagaggcctcagactctgctatgtctggccctgtggggtgatcccacgtgctgggaaggagggaaaagcagggtggggtggggcaccctgacattgtttcagatctcctgcagtacgcctcactacatgataaagcaaaaccagactttgttttaaaataaaatttttattttagatwtttttttctcttatggccttccccaaagacagatttaaaagaaattattttattatggaaaatttcctgcaaatgcatgcatcaacttcca

SEQ ID NO: 554393 - DNA, 511 bp, Homo sapiens
cggtatttagccgatccttgctgtcatcttcggtggtggtggtggtgaaagaggcatgacactaaatcgacccttaggacgctcccctccgtccccaccccgcaccccctccccacacacaccctcattcccgcaccccctcctcaaacgcaagaaaggaagaaatgaaagtaagagrtgagcctgcaaggcggtggaggcgggggatctcagagggcgagcaagcgatggcggtcgggggatgtgtcggctgaggtatcaaaaataggggacccagttttcagccccaacacaccccctaatcctcagccgcagccagcctctgggtggggttgcgcctgtcaaagcttccgaatggagagaagcccaaggctacggaaggcatcagctccaactccaggaagggaataaggctctgtgcatacgaatggggctttgaaaggcgttgccgcggcttccaaagcgatgcgctgtgcctcgcctcgcctcgccccgccccgcccagagcgag

SEQ ID NO: 554394 - DNA, 1248 bp, Homo sapiens
tgaggcatttcaaacagtcaagaaaacagggagaagaaaacaagctctcagtcaccaccatccagatttaataaatgttcccatttccccatgtttacttcacatgtttctaaggaaataaagtatcacagatgtagttgaagtcctgtttctccctgttcttgaagtcacgttattattttttaactttaaaaacttaaatacctagattgtgaacatagcggtaataaatctgaaaagagcgttcaaaggcaaagtgaaaattctattcttgtgttctacgggctttgatttaactagtgatagggccacattttccttctcatttatggtgccattctttttcctttttcaaagaatctcaaacccagaattagagtttttcattgtgtactagcaggttgtgaacaaaaagtagatccatatttccttccaaatttctacctgacttcaatctaaattattaasgtttaaaatgcccaaagacatcacagaggtcttgcgtaatttcacaagttaagacatttggttttatattttattttctcatagagtaaccatttagggttgcaatgtggcagagtgctaaacaaataaacaaaaagaaagaaaaaagccaaaaaacgaagtgctgcttttgcccaatcaaaatctttctattcaactcactttttattcatttccatcaaaatctgaatatttacttatccaccaatttgttcaaatttatgtaactcagggtgaaagctcagtaaatttaataaaaatttatgttatgttattaactggattttagttagcatctgaatttttacatcctataagactggactgtctagaagttaagaactttttattactttccaaggatctatttggaaaatctagatttccccttaagttcattattttaaattattctttaagaaataaaaggcattcaaatagaaaagaaaattagtaaaattttcactatttgcacttatatatacaaaaccctgaagactccattaaaaaaattgttagaaccaataagcaaattctgtaaagttgcaaggtacaaaatcaatgcacaaaaatcactagggtttctatacattaacagcaggctatacaaaaaataaatcaagaaaacaatcccatttacaatagctacaaaaaaagtaagtacttagaaataaatttaaccaaagaggtgaaaggtctgtacactaaaactataaaatattaatgaaaaaatttgaagac

SEQ ID NO: 554395 - DNA, 1248 bp, Homo sapiens
tgaggcatttcaaacagtcaagaaaacagggagaagaaaacaagctctcagtcaccaccatccagatttaataaatgttcccatttccccatgtttacttcacatgtttctaaggaaataaagtatcacagatgtagttgaagtcctgtttctccctgttcttgaagtcacgttattattttttaactttaaaaacttaaatacctagattgtgaacatagcggtaataaatctgaaaagagcgttcaaaggcaaagtgaaaattctattcttgtgttctacgggctttgatttaactagtgatagggccacattttccttctcatttatggtgccattctttttcctttttcaaagaatctcaaacccagaattagagtttttcattgtgtactagcaggttgtgaacaaaaagtagatccatatttccttccaaatttctacctgacttcaatctaaattattaaggtttaaaatgcccaaagacatcacagaggtcttgcgtaatttcrcaagttaagacatttggttttatattttattttctcatagagtaaccatttagggttgcaatgtggcagagtgctaaacaaataaacaaaaagaaagaaaaaagccaaaaaacgaagtgctgcttttgcccaatcaaaatctttctattcaactcactttttattcatttccatcaaaatctgaatatttacttatccaccaatttgttcaaatttatgtaactcagggtgaaagctcagtaaatttaataaaaatttatgttatgttattaactggattttagttagcatctgaatttttacatcctataagactggactgtctagaagttaagaactttttattactttccaaggatctatttggaaaatctagatttccccttaagttcattattttaaattattctttaagaaataaaaggcattcaaatagaaaagaaaattagtaaaattttcactatttgcacttatatatacaaaaccctgaagactccattaaaaaaattgttagaaccaataagcaaattctgtaaagttgcaaggtacaaaatcaatgcacaaaaatcactagggtttctatacattaacagcaggctatacaaaaaataaatcaagaaaacaatcccatttacaatagctacaaaaaaagtaagtacttagaaataaatttaaccaaagaggtgaaaggtctgtacactaaaactataaaatattaatgaaaaaatttgaagac

SEQ ID NO: 554396 - DNA, 1504 bp, Homo sapiens
gcaggtccagtaatcttaaaacagtagttaaaatcgaaaatctgccctggtttggctttctagcttcaaaaggtttttgaatctgagattcctatgtaatcatgtaaagaaaaaaagttacgtttctaaaagtaacactattatacaccagtattagattataggcctgtgcattagtttcaagttcttgttatctacctattgactagactaaatcctaaattcttctagcttcctcctatccaagtttcttccatggaattattaaaaataggaactgctctgtttctaaagccctatcaccttaagttagttttaaagaacaagtcttatgcatgatgtacaagccacacagaaagttcatcaggctgtttggttccataaccagcgacattcagactgcaaaccaggacaagaagttgatgacttcacgatgcaggcagcttttctcaagacgtagagtaagactccataccaaaataagactcttaccccttgtaatgttaccttttcaatgacagaataatggtattattaaaattttataatctgtagcttctgctggtaactcgacagaatctgacctaagagatccgctacttcacgtgtcacgtgaaggatatcttggcaaaggatatcagaatctgacttaagagatcctctactacaatttggagtaactccctcaatatgcacataatttactatgatgtgcatattcccattgcaatgtcccattcctgaacaaacatcactttcttttagagaacctctctctttttgttatgtaggttgactatatattcttactttaggttatatgggctccaggtttatttttaagtctactggataaagactatataatctcccttagaaacctagagtggaaatattttaaggaaagcaaatgtaagaaaaattagctgccactccaggcggaattctctaggttaaatctaactggtgctacagcaaattaatttccagctacttgctccactgtatcttcctgatgaaaacacgtcccttcctggtttgcccaaaagccttcattcatgcatcaactttgtccatgaacctttgattcctcttgttctctagaccctccttttagtgtctgcttgttcttccaaaatyaactttaataccctcaaactattttgaatatagttaatcacttttggactctgttttgaggggttgtattctgtatttcttttcacctaatctctacaatattcctccctatagctgacacatgattagcttccagccacaaatggggactttacttttttttttttttttgagacggagtcttgttctatcaccaggctggagtgcagtggcacgatctcggctcactgcaacctcctcttcccgggttcaaccgattctcctgcctcagcctcccaagtagctgggactacaggcacatggcaccatgcccagagatattttttgtagtgttttagtagagacggagtttagtagagacgga

SEQ ID NO: 554397 - DNA, 613 bp, Homo sapiens
tagaagcaggcagacatagtccgggtgagttaggtgggtaagatcacagcctatagagctagactcttgtggttagaatcctggccctgctacatgtacccaggcaagtcacgtaacctctttgtgcctcaacttcctcatctgaaaagtaggcataataacagtacctacctcatagtgtcattgagaggaaaaagtgatagaaggcgtggcaagctctcagagcagcatctggtccacggtaagcactcagtaaggtcctgctagtattatctttgttattattgagagccagagcagagagggaggctgagactcagagagggaggtgactgctagaagctagccagcaggatcgtgtctcttgccttccgaccccaacccggtgcccctgatgtgcactgattaccccctcggccccccaccacagtcctgcaaaccgttcccaccctctcatgtcacagaatcgttgcacactcggcctctccaggcactcagttgtctgagctgagcccagaaaactcccgtcctcttgggcattcaccasttcctggctgtgtgacaagggcagtgtttcacctttaagcttcagtgtcatcttccatccaatggg

SEQ ID NO: 554398 - DNA, 738 bp, Homo sapiens
tcaaaaaaaaaaaaaagaataccacttagcatgactactgctagaattagcctctctccttactctagtgtaggtggagaggtggagggttattgggtttatgtcccttcagagttatcaccctagtacttggaaactgcatgctgttcccaggagcatsatatgctctcccccaaccatctgctccatcatgggtccccactcacttaattgcagatcactgccccaaactcctggacacactttcttttgtaggatattattccctgtgatgggtgtagcaaaagagtaaatgtgaggcaaggcacatttttctttaattctttatcccctcattctccacaccttcaccacataagatagtataagtctattagacttagtgaatcgttgaagtaacttaaggaaataatattttaggaagagggaaaaattaaacataacacagtctgctctggttgcacaattatagtgcatttgataggtaggagctctatttaagctgtcttcctagaagtcccatcaatactttcacttaatctcattcattaggaacctagactcatggccacacagactcactgctttaagaataaagtctgtgttccactctcaaatttctcatgtcactatggttttagcttaatgaacttttaccacaaaggctctacaagggaggcgagcaaaatgagtcccttgccctgcaactaccaccataaaaggaagtcaggtgttggg

SEQ ID NO: 554399 - DNA, 1495 bp, Homo sapiens
cctttgsttgcgttgaatatgcagaaacccctatgaacatcctaggttagagaaggagagcggacagtgggctggcttcccacgctgttgctgctgctgctttctgtgtttactcagcacccgggaacgccaagaggctcatctctccaggcactgcctcagggtcctctccagacgtctatttggataatagggcgacaattaaaactacacgctattttctctctggcaaggctgagcaaatcctattgaatttgtatgtggggtctaagaccacctgcatccccagcttgagggacagttctaatctctcctccaactggcactgcggcccttccggccctcgacccctcccagagtggctgcccctcctgccaggacctcaccacacagcgcccaaggtgtcctgtgtgctcagacttaatgctgtgttcacccccaggctttccagggctgactgggcctccagggtcgcagggagagctggggcggattggactgcctggtggcaaaggagatgatggctggccgggagctccgggcttaccaggtaaggtcacgtaaaacacgtggtcacccagacccagagttgtgggctgtgcaggaggcaccgctgagcaggccagcctctctcagggcgacttctaaggcccatacgagagcaaaggcaggtctgctgtggcttacggtggtctgcgccaacatagcagcacagggtatactggcgccccaggcaactgggaatcaagccagatgcacaaatctgcccagggcttcacctcccagaaggatgaatgaaagcctcccagagaggcttcagggtccacttgtcatcgccacacagggacgcacagcaagatcagggtgcaggagcagcctcagtgtaccactgtgctgcacgggccacccccggggcctccttacagccccgagacgggccaccctgccatgctcactgcccatgtaacagaaggaattgccacctgtttgctgtgtcctgctttagaaatatttaccctcagaaatccagagggaatggaaatgacaccgggctatttgttccaagcagcttttacaaaccaaacatacagcagtggccaggcgtcaagaagaggcatgggacatgtcactccccaggccccttctggcctagtgagtctgttaaaaagattctatgaagacagtgttccagttcaatggtgttcctaggtaacataagagtgcttagtttacatgtcgtgtaagttgagcgtgtggcttagctgcttcctatttgtggggctttagcaggattgtatgggtgacagtatcaggtgacagtttcagagccaacaaaacacatctgagttatcttgagggtttctcccacccagaaccccctgtgctgtcccacacatgaaataacaatgagtgacacccccacaggtgaaataacgatgagtgacacccccatgggtgaaataacgatgagtgacacccccgcaggtgaaataaa

SEQ ID NO: 554400 - DNA, 834 bp, Homo sapiens
caaaaaaaaaaaagacattttttggattaataattttcagctcctgctaattatttcctcggcctcttaggtgaagttaaccatgggggtgtctgtccctccactggtgggcacgctctgtggggtcaggaccaatttatgattttgatcccatcagcctctagcctattactgaatacacagtaaatgcttagggggcggagctcaattattttcactgagccagatttcacttactcctccagtgagcatggattccggggcatccccagcctgaactagcacagtttcccgcccggcccgcagctctgggcccctcccctcctgcaatttctcagctcctcagaaccccccggagacctcccttccatgcttctcctccctgtgaaggtgcctacaggagggcacggagctggcgcctgcctcacgggccttcctgcttgtgaccgaggtccatcatggtctcatcagagcacacacaacaaaatgaccttctcacaaagcatcctatgggagtcacactggctttgaccgctccctctgcatctgctggcaggcacgtccccctactgtggtgctgtgtgctcagtgacaccagccccaggcccaggaccctggagccacccccaactccaactactccgatggacacaggagaggcttctccggcgcccttggtctctctccaaggcttccctgcttgggggagacgtgcagcccyatggctcagggaccaggccttcacctgtgttctcctgcgtggtctggagcccccagaaaatgacagcactctattcccttccaggcagccgaggggaccctgggcccccagga

SEQ ID NO: 554401 - DNA, 520 bp, Homo sapiens
acctttcacagtcctgagacattccacgctttcctttgtcagtgtagacgtttcccagtagagtcagatgaggatgctgttttgcctcatctgttctcgcacgtacaagggatgacccaactgtgargtttctgagcccccaccagcctcccctcagcagctgaaacatgcagcctctcctgtaggactacagtgacagaggccttgcccggaagttcagagatggctttcccgttccctgcccatttcaaagccttcctgcccccaccagcaacatatacgacacaccttcacacacgtgcacgccccagacgagccagtaactcttatctgtttcaaaattgcctcactctgtccttatgtcttccccccagattgtgacacagatgtgaaaagggccgttggaggtgacagacaggaggccatccagccaggtactctgggaagtgcaggtggctttaggacactagagaactctcatttggtctgctggttaagctcttgcagtatgcgtgggata

SEQ ID NO: 554402 - DNA, 520 bp, Homo sapiens
acctttcacagtcctgagacattccacgctttcctttgtcagtgtagacgtttcccagtagagtcagatgaggatgctgttttgcctcatctgttctcgcacgtacaagggatgacccaactgtgaggtttctgagcccccaccagcctcccctcagcagctgaaacatgcagcctctcctgtaggactacagtgacagaggccttgcccggaagttcagagatggctttcccgttccctgcccayttcaaagccttcctgcccccaccagcaacatatacgacacaccttcacacacgtgcacgccccagacgagccagtaactcttatctgtttcaaaattgcctcactctgtccttatgtcttccccccagattgtgacacagatgtgaaaagggccgttggaggtgacagacaggaggccatccagccaggtactctgggaagtgcaggtggctttaggacactagagaactctcatttggtctgctggttaagctcttgcagtatgcgtgggata

SEQ ID NO: 554403 - DNA, 601 bp, Homo sapiens
caaagagtttagaaaataacctcaggttaggaaacttggaatgtcagggttttgagctcagggctttggacttcttttgccatgttccagctgtatacctcaagatwgttttatacattaaacaaatgaattatgcacatggaagccctttatcatctgtacggggttatggcaataaaagtttttaaaattatatttttataatgttctctatttcagaagcagggattaaattttatattcccaaaattgattctttcaagaggtagctagtctgagtttattatgtgtgctaaaggtactaggatttgaggctataatgatgaaaatatgtgttcctgtccttacagagtttatagtcaagtggaaagatagataagtgaaaaacaaattcaatacaagatgatgatcctcataatagacaaatgactaaggaagggcagaaataaggagtagaggatgaagagggcaaagaaggaaagaatgaaatgtttattcaaagcagaaagaaaactaacataatgagtatctgctttatgaactgtgctaggttctctgacatatttaatcattgcaaaatattataaaatattactattag

SEQ ID NO: 554404 - DNA, 601 bp, Homo sapiens
caaagagtttagaaaataacctcaggttaggaaacttggaatgtcagggttttgagctcagggctttggacttcttttgccatgttccagctgtatacctcaagattgttttatacattaaacaaatgaattatgcacrtggaagccctttatcatctgtacggggttatggcaataaaagtttttaaaattatatttttataatgttctctatttcagaagcagggattaaattttatattcccaaaattgattctttcaagaggtagctagtctgagtttattatgtgtgctaaaggtactaggatttgaggctataatgatgaaaatatgtgttcctgtccttacagagtttatagtcaagtggaaagatagataagtgaaaaacaaattcaatacaagatgatgatcctcataatagacaaatgactaaggaagggcagaaataaggagtagaggatgaagagggcaaagaaggaaagaatgaaatgtttattcaaagcagaaagaaaactaacataatgagtatctgctttatgaactgtgctaggttctctgacatatttaatcattgcaaaatattataaaatattactattag

SEQ ID NO: 554405 - DNA, 842 bp, Homo sapiens
ttgtatgaagaatgtattcttatcctgaggaaacaactggaagatacaatatagccaagagtgtcaaatgaagaagtttatagtaaggtagaactggaaacgatttaaatgtcaggagtgtaggataaacagatcatgctataacaaatgtcatgaagccatttgaattggagatgcacattaatatttaatgtctatagcatatcactgtgtcaaaaagcaggcttctaagcagcatatgtactatgttttgaagtatatatatatatacacactttatatatatatttatatatatatatgaagtatttaaaatatatatatatwtatttttttccataggtatgtggaaaaagtctaggacagtccttagttttgttcttaaaatattcaagcttgcttgagtaaagagatctcattgatgggctacgtaagaaattgtaagagaaatctcctgggaatccaggagttgaagccattatacagctgatgtcatgaagtctggagctagaggaagttctggctttaaggaggctccaggggatcagaatttggaggcttccctctaatactgccgtttaatgtggctcagtcacacagtgactgtgactcccagcttctttctgttccattttcaactggcgtgtgcataatgcctgcttcttgtaaatttaacttgcctgtagaacagtatggtttctttaattcataaccttttggtttcagaacttattgctgttttttagtttaaattctgaagacagaaattattacttggaatcttattgatctgagttagttgctggacaatcagttgattagttttctacggagatgcctac

SEQ ID NO: 554406 - DNA, 842 bp, Homo sapiens
ttgtatgaagaatgtattcttatcctgaggaaacaactggaagatacaatatagccaagagtgtcaaatgaagaagtttatagtaaggtagaactggaaacgatttaaatgtcaggagtgtaggataaacagatcatgctataacaaatgtcatgaagccatttgaattggagatgcacattaatatttaatgtctatagcatatcactgtgtcaaaaagcaggcttctaagcagcatatgtactatgttttgaagtatatatatatatacacactttatatatatatttatatatatatatgaagtatttaaaatatatatatatatwtttttttccataggtatgtggaaaaagtctaggacagtccttagttttgttcttaaaatattcaagcttgcttgagtaaagagatctcattgatgggctacgtaagaaattgtaagagaaatctcctgggaatccaggagttgaagccattatacagctgatgtcatgaagtctggagctagaggaagttctggctttaaggaggctccaggggatcagaatttggaggcttccctctaatactgccgtttaatgtggctcagtcacacagtgactgtgactcccagcttctttctgttccattttcaactggcgtgtgcataatgcctgcttcttgtaaatttaacttgcctgtagaacagtatggtttctttaattcataaccttttggtttcagaacttattgctgttttttagtttaaattctgaagacagaaattattacttggaatcttattgatctgagttagttgctggacaatcagttgattagttttctacggagatgcctac

SEQ ID NO: 554407 - DNA, 389 bp, Homo sapiens
aatggctaataaatatgtacacgattatttaaaaatattttgaatgtctgctgcaaagagttatagctcatcagtttgcaattcatatgaaacatttgctttacaacatgtcagtttaaaaaaattcaatgataaagactgccagaggtggccgggcgcggtggctcacgcctgtaatcccagcactttgggaggcagagatgggcagatcacgaggtcaggagatcgagaccatcctggctaacacggtgaaaccctgactcyactaaaaataccaaaaattagccgggcgcggtggcgggcgcctgtaatcccagctactcgggaggctgaggcaggagaatggcgtgaacccgggaggcggaggttgcagtgagccgagatcgcgc

SEQ ID NO: 554408 - DNA, 450 bp, Homo sapiens
agtattccatggtgtctatgtgccacatttgcttaatccagtctgtcactgatggacatttgggttggttccaagtctttgctattgtgaatagtgctgcaataaatatacatgtgcctgtgtctttatagcagcatgatttataatcctttgggtatatacccagtaatgggatrgctgggggaattttacaggttttatatgatccctagaccaaatgtatgaagtagctactgatattcccattacacagatgaccttgagcaaagttgagtagtctgcttgaagtttctaaggtattagctggggagctaagagtcagacccagatctgtctacctaaagtttatgccctattccataaatcattttcttcctaaccaacaagtttgcacttaactgctttatgcccacatattgatgtccaaattgattatgggcctggggcttc

SEQ ID NO: 554409 - DNA, 1257 bp, Homo sapiens
tcccaactttgttctttttcaaaattgctttgactatccaagctagattttttacctttcatataaattttagaagcagtttgttaatttatatattaaaaaatttgaaattttgatagaaattatattcaatctataggtcaattttgggggaagtggatatcataayaacattaaagtcttccaatgcatgaacatggtgtagctgtccatttaaattaggtctttaatttcttcagtgacttttcatagttttcagtgtacaggttttttgacctcttttgtcaaatatttcatgttttggatgccactggaaatccattttgaaaattttgacttctaatttttttgttgctagaagataggacgtgcaggcagataagcataaaggactgacatttttaatgtttgaaataactgactgcagaggctctagagcatgcattctcaatgggaaaaatattgttcccaaggggatggaaaaatcttactcttttaatgtctaaatcatagatatacatttacgtaagccaatgcataaaagtgtatacattatatctgccatattaaaatcttatgcaatggagtaattataaaaaaatgtttaaaatactccttaggggagcaataatttaaaaaccattgggaaacactggttgttcatagctcttgggatatatgatactaaaagaatacaagtactttgagtatttgggtacttaatctctgtaaatttcttatacattgatcacattcaggcttagtaaatagatttaaataagacctaagtcaagaccacatgattcccagaaaaattagttaatacaaattataaacaaattttaaatgttgagcagcaagaattttaggtcagtgaatgctggattttgtcatattcctttaaagagtgttggactgtgttcttcctgcagttacattacttgcagatcagactgatccttttgaggcttgcttttcaggcttataagggtagatccagagcagcccttactctaaggctaacagtctcactactaaggtgtggcccttctaaggactctccctatccaatgccctgtgtattgtgaggtctcttataattgatgggattgcaaactctccccagccctgtgagaactccgggaattgttcaacctattgcttctcagtggttctttctctggtgttgtggattttccttccatgcatgctcagatcacaatttggccaaagacgccaggggactcctctgttctc

SEQ ID NO: 554410 - DNA, 624 bp, Homo sapiens
tcccatttttcagataaacaatctgacatcacaaatggttaacaatttgcctaagttttcacaatgaatttaagcccaatggagcagaaactgcgcaaaaggaattgtrcaaaagtttagaggcttctcagaaaaactaaggaacttgaaatgtagctatatttagacatccagacataatcagtttaaccattttgaccaaatcagaacgattaaatggtttggttgaggtttcagactagaaaccttgacccagaatcctgtgacttaagtcaaagagactgaatagttgtgcctctgtttagaccctggaatttcaatgggtgcagatgatgtttatcagaatcgtcttgagaattctttcaaaccacacatacctgtcctcccctcctccccaaagagaagggactgagtggcagttgctgatacaagaaaatcctgagaccagacatagatgccctgcaatttggggaaacagaagggaatttttcttttcccatgaagactcatagcccagctttactgtctctaggcactaggagaaaatgaaatttcaaaggtcaaaaataaaagtactcattttgcacaatgccactggagtgacactgcaatgacgggaaaatg

SEQ ID NO: 554411 - DNA, 679 bp, Homo sapiens
atgtcttcttagctccaaaagttkcccaagctgaacaaaaccaaggaaaggccttgtcctagaagtctcctttgatattcacttggactctcagcatcttgtaacttccgctcagcatcttcaagcttggctgtctcctccttgtctagacacaaatggtcaggtcagtagcagccaatgagagaaagaagtccatatccttattcacagggatccataactcaccccaagcaaagataccttcagctaagaaacaggggaaaaaaggatatgtagctaggattttaataaatgaagattacataagaagatctgagaagcaaaacacttaaaagtctgatcaggacataataggctttcaaagaacagattaactgcttcaaaatatgtaacctagaaagcagaagtttcccccacatctcacccttcccccaggttaatcactgctgactgtgccgtgtgtatttcagcaatttttataaaaacaaattaggggctggacatgatgactcacacctataatcctagcactttgggaggccaaggcaggcagatcacttgagcccaggagttcaagaccagcctgggcaacgtgacaagatcctgtctctacaaaaaatagaaaaattagccaggtatggtggcatgtgcctttagtcccacgtactcaggaggctga

SEQ ID NO: 554412 - DNA, 679 bp, Homo sapiens
atgtcttcttagctccaaaagtttcccaagctgaacaaaaccaaggaaaggccttgtcctagaagtctcctttgatattcacttggactctcagcatcttgtaacttccgctcagcatcttcaagcttggctgtctcctccttgtctagacacaaatggtcaggtcagtagcagccaatgagagaaagaagtccatatccttattcacagggatccataactcaccccaagcaaagataccttcagctaagaaacaggggaaaaaaggatatgtagctaggattttaataaatgaagattacataagaagatctgagaagcaaaacacttaaaagtctgatcrggacataataggctttcaaagaacagattaactgcttcaaaatatgtaacctagaaagcagaagtttcccccacatctcacccttcccccaggttaatcactgctgactgtgccgtgtgtatttcagcaatttttataaaaacaaattaggggctggacatgatgactcacacctataatcctagcactttgggaggccaaggcaggcagatcacttgagcccaggagttcaagaccagcctgggcaacgtgacaagatcctgtctctacaaaaaatagaaaaattagccaggtatggtggcatgtgcctttagtcccacgtactcaggaggctga

SEQ ID NO: 554413 - DNA, 563 bp, Homo sapiens
tatttctcataaaagatgtgtaaaaaattctatcagattaggcaaaaatgatctcttctgattaatttacttccttttattagaaaaggggagccataaaatttctggttttctgtatttactttggctattagaaagctcagagagaagctcagagtgaattgtggtaggtttacagtgttagagttttgttgtgattatttccctctcctattcttcattactgaactctgttattttctttttaatataatacaagcyaaacaaatgcaattgctttaaagtaaacattttaatctcattacttaagtattttaatttgaacacatttgaaaaaaatatggtcttttagacaagcaaccaaactggactttagtggataattttatccactcctctggttgaaggaatgctgtcatttatggtttgcattattcactgtacaggacagacttactgttttctagaattctaatgggtacagatttggttgagaaacaaatataatctgctgtattatttttcacaaacttatatttcaaatttatactgaatatattaca

SEQ ID NO: 554414 - DNA, 441 bp, Homo sapiens
tcttacaaycccatgaaaaacattgctgatttcaaaaagagtccagtagcaaaaagagtccagagtatgaaaaagaaccagtcaaatcctgggactagataatgatatatatcactggttgcaaaaactcttagccctggagaaagaaaacagtagcttggaaataggactgaaataggactcttaggaatgagagtaagaaaggctagtattaaatttcaagtttaaccaggcatagaagaacaggcaaagggaattagagaaaatggaaacatggctaaatgtccaacaacagttaccaaaagaggaaaatgcatcgaaatatgtaactatctcagtgctcctaattctaccttttacccttgaaggacagctccagattctatcatttgggataagtgcagctctgggtggtatgacttttgcatgaagcctgatgca

SEQ ID NO: 554415 - DNA, 441 bp, Homo sapiens
tcttacaaccccatgaaaaacattgctgatttcaaaaagagtccagtagcaaaaagagtccagagtatgaaaaagaaccagtcaaatcctgggactagataatgatatatatcactggttgcaaaaactcttagccctggagaaagaaaacagtagcttggaaataggactgaaataggactcttaggaatgagagtaagaaaggctagtatkaaatttcaagtttaaccaggcatagaagaacaggcaaagggaattagagaaaatggaaacatggctaaatgtccaacaacagttaccaaaagaggaaaatgcatcgaaatatgtaactatctcagtgctcctaattctaccttttacccttgaaggacagctccagattctatcatttgggataagtgcagctctgggtggtatgacttttgcatgaagcctgatgca

SEQ ID NO: 554416 - DNA, 612 bp, Homo sapiens
gaacgtaattgatctcagtggtttgtattccagcatgatttagacataattggaatgtcaagtgagaaaaaagacatatcaagcatgctggcttcatgtatccattatagtttttgtaaatttcatcttaccttgtctcttttctaaaattttctatgagaaatcatgtcaaaacttgattcttttttataactttctcagaagggaaaccttggaaacaccttgtacagacaaagaacgctggtggttttatctataaaaagggttatttttgtaaactgttttccaagttaacatttattgagtgcctactatatgcatgggcctgttggaagatgaataaggcasggccctagctatcaagaactttataatgaggactaaaacatagacacaagtgcagataactagaaggtcatgtgtgctttgataaaggcacaaaaggtcacaagagcacagagggtaaaataaatgcgtggcgcattcttcacgagaatcctatcaatggaacagtgtatgttaatatccacaaaaatggcaatagaatgactctatttttcctcttccccttttccatcaaaaactggatctaagctgagggtcagcctggat

SEQ ID NO: 554417 - DNA, 653 bp, Homo sapiens
ttagatgttattattgaattctgggaaggcagaaggaagcataggttggagtaaatggagaaagtgtcatggasaaaataccacggcagtttttgcctctgtagtatatataaagacatagatatattgccacctgtgttattgtatccaagctctataaggctagagtagctccatgtatttaagaaagtgtgaaataaaataaatacgtttgtcttagagttccctattttatccctcatgttgtgtcaacatgggaagaatgaagcattgactttaaaaaaaattatccagagtttcttcttcagggaagaaagcaccacggagaggaaaagtttcattgatctaaattggctcatcagtgccctacatggactaaatttgctttataattgctcagctccacactattttctaaagagttgagcaaaactctttaggaaagagtgtccttgaacataaagagcaaatgtcggagaaaacatagttgcataattctttatgatagagaaatcccttctaaagaaccatcatctacaactttcagaaagtgcatcaatgccaagtgatgatttcaaagctctctattgattacattcctctgagatttccttagctaactcttggctacttgtttaacaacaacaacaaca

SEQ ID NO: 554418 - DNA, 653 bp, Homo sapiens
ttagatgttattattgaattctgggaaggcagaaggaagcataggttggagtaaatggagaaagtgtcatggagaaaataccacggcagtttttgcctctgtagtatatataaagacatagatatattgccacctgtgttattgtatccaagctctataaggctagagtagctccaygtatttaagaaagtgtgaaataaaataaatacgtttgtcttagagttccctattttatccctcatgttgtgtcaacatgggaagaatgaagcattgactttaaaaaaaattatccagagtttcttcttcagggaagaaagcaccacggagaggaaaagtttcattgatctaaattggctcatcagtgccctacatggactaaatttgctttataattgctcagctccacactattttctaaagagttgagcaaaactctttaggaaagagtgtccttgaacataaagagcaaatgtcggagaaaacatagttgcataattctttatgatagagaaatcccttctaaagaaccatcatctacaactttcagaaagtgcatcaatgccaagtgatgatttcaaagctctctattgattacattcctctgagatttccttagctaactcttggctacttgtttaacaacaacaacaaca

SEQ ID NO: 554419 - DNA, 1439 bp, Homo sapiens
tgaggagggaaactggcacaaagagaaaaaccctgcacacagggagaagacgatttacgygcctccagtcagccccatggacagcatggccccatgacattgctctgctcccccaaatttattttcaataaaatcatccatcaggatgtgactaggtcgtgctccaagccttaagaaagaaaagccagacacgaattccagactctagcatgacttctatagtagcaagcatgtatggttcgaatactgacagtttacctgtccaagagcttggctggaagccttgtatttttatgacaaataatgcctttggttggtgcatgaaacgaatagtgagtgtgtttgttgtatcgtttgtgtgggaagccacgtctcagtttagcacatgcctattcatattcaataaaatatccgaggggaaccccattctgaagaaagatgcacatccattctgtaggcatcttttatctgtgtctgaaaactgagctctctgagaagaatttttcacatgttcttaataataccattttttctttacagaatacactgtgtagcaggaaaacggaaatgaattgtcatagagtgaattgggtatgtttgtattcagtcatcacttggggaattttttctccattgtcaaacaccaaatactaaatgcctatggaaataataggcaagttttatttccatgcttttcaactttctgcccctgggaggtaccatgtgtcatctggccgccagtcactcaatgaccggagacttccatgtgctgtgtgagacaggggagtgtctaaacgctgaatgttccttggacaagctgaggggtaaaacggagtctgacatctgaccaccccccaggggttttctttctgtggactttccctgcttttgtagcatgctcatgctcattttatgtcagaaatttttctcaagaagtgacttgaactttattactcacaggaagggttagatgaggggaaggaggttagagggccagggagttccactgtgcaagtatctgagggaggctaggcctgcctgtctcccaaaaccagtcctcgaaaaggcctgggttgaattggtgtggagaatgccttagggttctaattttgtccaagtgtcacagtgtcgaaaaatagatcagactatagcgtcaggagcagtgccagacccaagtgtagggtttttttttcttttttttttttttttctctgatttctctcaagaagaaagcagtgtcatgctgttgtctggatccttcttgttgacctgggtcactaggagttaggagggccggctttttgcttttattttctctgtttttgttgttttaaaaggcaatttgtataaagtcttaaatgtaatgagttaaaagcacaggacgaggcagggcacagcaggaactggggcccacccaaacagggtaactgagaacagca

SEQ ID NO: 554420 - DNA, 1439 bp, Homo sapiens
tgaggagggaaactggcacaaagagaaaaaccctgcacacagggagaagacgatttacgtgcctccagtcagccccatggacagcatggccccatgacattgctctgctcccccaaatttattttcaataaaatcatccatcaggatgtgactaggtcgtgctccaagccttaagaaagaaaagccagacacgaattccagactctagcatgacttctatagtagcaagcatgtatggttcgaatactgacagtttacctgtccaagagcttggctggaagccttgtatttttatgacaaataatgcctttggttggtgcatgaaacgaatagtgagtgtgtttgttgtatcgtttgtgtgggaagccacgtctcagtttagcacatgcctattcatattcaataaaatatccgaggggaaccccattctgaagaaagatgcacatccattctgtaggcatcttttatctgtgtctgaaaactgagctctctgagaagaatttttcacatgttcttaataataccattttttctttacagaatacactgtgtagcaggaaaacggaaatgaattgtcatagagtgaattgggtatgtttgtattcagtcatcacttggggaattttttctccattgtcaaacaccaaatactaaatgcctatggaaataataggcaagttttatttccatgcttttcaactttctgcccctgggaggtaccatgtgtcatctggccgccagtcactcaatgaccggagacttccatgtgctgtgtgagacaggggagtgtctaaacgctgaatgttccttggacaagctgaggggtaaaacggagtctgacatctgaccaccccccaggggttttctttctgtggactttccctgcttttgtagcatgctcatgctcattttatgtcagaaatttttctcaagaagtgacttgaactttattactcacaggaagggttagatgaggggaaggaggttagagggccagggagttccactgtgcaagtatctgagggaggctaggcctgcctgtctcccaaaaccagtcctcgaaaaggcctgggttgaattggtgtggagaatgccttagggttctaattttgtccaagtgtcacagtgtcgaaaaatagatcagactatagcgtcaggagcagtgccagacccaagtgtagggkttttttttcttttttttttttttttctctgatttctctcaagaagaaagcagtgtcatgctgttgtctggatccttcttgttgacctgggtcactaggagttaggagggccggctttttgcttttattttctctgtttttgttgttttaaaaggcaatttgtataaagtcttaaatgtaatgagttaaaagcacaggacgaggcagggcacagcaggaactggggcccacccaaacagggtaactgagaacagca

SEQ ID NO: 554421 - DNA, 1134 bp, Homo sapiens
aaaaacacagaaaaagtctattgaaacctatcaagaaataaaataatggatagtgatcctgtttataaaagacacatgaaataaaaaacaatatagagatgaacagattagtagttgccaaagcttagggtttgaagagcaaggaagggagtgaggctataaataaacgttttgtgtcttgattctggtggtgcttacatgaagctacaagtgtgctaaaattgagcatgattctatagatacacacagaaacacaaaaaatgaatgcatgtataaccaatgaaatctgagtaaactatgtggttgtcaatttcctgattttgctattggagtatcaatatcaaagttacacaatttatcaacatttggaaaggcaggacgaagggtgcataaaacttctctggacattttaaaaatattccctgcaaacctataattatttcaaaacaaaaacttttaaaaatgaaatgcagacagaaataagtaaactactggtgtcctaaatatactcataattggaggctctaatgaaaggtaggagtggtggttgaaaaactaacactgaaaactttccaaaatatataaaaagtagaaatcatgactcaaagaagctcaacaaattctcagaaaaaaaatatatacagacattataagaattgttaaaagcactccttcgggcataaggaaaataataaaagttggaaatctataaatctgtgtctacatataggaaagaaacaagaagcacaacagaaatagtaaatatgaaggtagttatagaagacttgtttcttattctgtaaatatctacaaaagacaattgtcagtgtaagcaaaagtaataagtgaaataaaatatgtaaaaatttgaggttgggttttttgagagtgaatcgtaacaagtgctttcctgcattgaaagctttctcttatcctgcagatgtaggataatttgccctttatagtgataacttaatttctgtayaaaaccagcttcttctttttctgcttctgtcattctttttttttctcattctctttgaaaatcttgtagaataattgatcataaaagaacatatattgtgtgattatgggtacacttttaaatatctaattgaaataaaagctacaaat

SEQ ID NO: 554422 - DNA, 582 bp, Homo sapiens
ctatgggggagagataagaaatgaagtagaccaagtgaactaggatcagaacatgagaatcctaacacatcttgttatgaagggaatttatttaattgcttcttggtagccatttaaattcaatgataggaatacggttgctagtgagaatcaagagaactaaaaagaagtacttgaagttagaatattataacttcactcaaagttaaactgaagaaatacctgcaaagaataagaaacttcctaggaaaaaaaggaaaaaaaaagcattatttgcacaaatttaaaatgatatagaggtcactatttagagattaattttagcttaacaaaagtttgaaaggggcaaaaaaaaaatgactaactcacccataagaatagttttcttaaagcattcatagaatgcctagctttatacagtaccacttcctactaaattctccaagaaagtctttatttcggaaaaaaaaaatcttagtaaggtgaccttactataatggtcattatttgccacaaattaggctgagaygtagtaatgttccccaagaagatactggaccatctttgcttgtagttattttt

SEQ ID NO: 554423 - DNA, 553 bp, Homo sapiens
tttatgactactgcttgatattttcatttgtttatttttcaaaataaatttcagaatcattttgctaaattccacagcacaaaaaagtacagattaaattttaattgaattctaactctaattctataagataactagactagacatctttgcaacattttgtcaccactttctgaaatacagtacacttatccacatgtttctctttctgtctctctctctytatatataaacatatatatgtcttgattttattttattttgtctttttttaaagctaggttacatatatatacacatatatatatatgtaatgttctttaactatttcatttttcatgattccaaatgaaacatttcttttttccattgtgttttacttctggctgttatcaatgtttaaaatataatttttggcataattatgttatattcctacatttaaatgtcttgtgattcaaacattttaggagttttaaaataatttttaggtataccttattgatttcaaaaatgattactatgtaactttccaatacttaaacaattactg

SEQ ID NO: 554424 - DNA, 544 bp, Homo sapiens
tgtaaaaatatttggagaattgtctggcataaagtaagtgctcaatataattcctgaaagttctgcatgaattgtgtatkcttagagttccaagtgcaaccttttgatggtcccaggttagttacttctttcaatatatatttgtttaaggcaaagttatccttctctggacactggtgctttatatatacagccagtttcctaactgattccctgtgacttcgggaaaaccactctagctctcaatttaacagcttctattcacttaaaggtggcacacagctaattagccagtagaattgcaaagtcatggttcactttttttttttttttgacggagtcttgctctgtcgtcaggctggagcacagtggcgcaatcttgggtcactgcaacctctgcctcccaggttcaagtgattctcctgcctcagcctcccgagtagctgggactacaggcacgcgccacctcgcccagctaatttttgtatttttagtagagatggagtatcaccatgttggccaggatggtgaccttgtgatcttc

SEQ ID NO: 554425 - DNA, 638 bp, Homo sapiens
ttatcttgttttcccattataaaggtaaaacatgtatgttatcatttttttaagtacaaaaaataggcagaaaagaaaaaagtcactaatagttttactcataggtgagctcctcgttacatttttattaatttgtaaaggttagaatttttaaaaaagaagacacgtttttatacacagtatgcattgaatcatttaaataaaagattatgttacttttctttttaaacaaatactagaattttgtcacatcataaactctttataaacattgtttatagtggccaggcatcattctaggaaacatcattgtgtttgyggcggtagtgcaaagatagccattgtgtttgcggtatatctactgggtagatataccaagtttatgagtctgttctcctaggttgaacagttggactgatttcaaacttttgtttttattaataactttgcaatgaatctatttggacatacaccgttttccaaatttcagattatttccataggactgtgtcccagaaatggaactgtagggccaaagggaaaaataatccaagtctaaaaatacatccaaccaaaatgcttttgaaaaaggatatatgtattcccattagccctgtaagaaagaatatgacttcact

SEQ ID NO: 554426 - DNA, 638 bp, Homo sapiens
ttatcttgttttcccattataaaggtaaaacatgtatgttatcatttttttaagtacaaaaaataggcagaaaagaaaaaagtcactaatagttttactcataggtgagctcctcgttacatttttattaatttgtaaaggttagaatttttaaaaaagaagacacgtttttatacacagtatgcattgaatcatttaaataaaagattatgttacttttctttttaaacaaatactagaattttgtcacatcataaactctttataaacattgtttatagtggccaggcatcattctaggaaacatcattgtgtttgcggcggtagtgcaaagatagccattgtgtttgcggtatatctactgggtagatataccaagtttatgagtctgttctcctaggttgaacagttggactgatttcaaacttttgtttttattaataactttgcaatgaatctatttggacatacaccgttttccaaatttcagattatttccataggactgtgtcccagaaatggaactgtagggccaaagggaaaaataatccaagtctaaaaatacatccaaccaaaatgcttttgaaaaaggayatatgtattcccattagccctgtaagaaagaatatgacttcact

SEQ ID NO: 554427 - DNA, 963 bp, Homo sapiens
aaatgtgtctttatctcatttttatattgtacaagataaggaagctaaactgtttcaaggttttagccattattagacaaggaactggttctgaagaaagttcatttaaaaaaaatagctagtgctgggaaaagaatattaattctttttatttaaaatactccaagctattttcaaagcatatttattaagagttgcattgagagcccaataactttttatttggttgttactcagggccacaggctccgggaagattttatagatgggctccatgaagtctgtgggaactttgatctgcaatttcaaaaaatawatatctgcaggtatatgaatttttctggagcaggcctatagcctttaaattatactcaaaggagtccaaaacataaagctttttagaaatgacaatttttaaatgaaatatttaaagcagcaaatatatttctgttatatcgataaccatttatatgcttaaggctgttgtatatctccaaaatgattaaaataagtaattgccaaaaggcacaatattacatgtatgtatttagcacatatattttaaaaatcctcttaaatgtatcaattaatattgatgatttataaatgacttaatattaaaactcttacaattctatataagacatgaactaataatgcaaagaaagtaacacatggttatcaacaaaacagcatagattttccagtatttattgtttttgatattttaaaaataaaacataattttattaaatatatatttacactaaaaatagcaaatagaatatagttgttcaatgatttttatgaactatagggataatacatttattttaaatatcatgtacagatttttttaaacaaaagcacaaatattaggtgttattttttccattatagggaacatactttgttctatcttgcaaatatgtcaaggggaaaaataaatgaaataaaatgtta

SEQ ID NO: 554428 - DNA, 624 bp, Homo sapiens
ttgcctccattgatcaatctgtgcaaagtgcccgtcaaattgacctgaccaatctttaagcagcctctctccttcctccaggccccagaacttcattttgcttctaagcttaagcaagcgccaaaatgccgaacaactctcgtacacagccaacccctcctgagagctggctgactgtagggaaaataatttcctgattgactgtccaatcayacttcctgcttagccgcctctccaacactgtgttctttccagctttgtttactcttgcctataaaatgaaaagccctttctgcctaatctttgcagatcttgtcactggtgtattctccctattgcaataatctttttgaataaagtctttgcttattttagatttgtttttgacaataccaaagctattttctagacaaaattcttaaatttatttctttgttttctcatttccacttctcattattgcttacagtctttcaatcttaatatcatttgaaacaactggtggggaggctactttcttaagccaatctcagccatgagtcattttattcaactaagagatatagctgggccatgatagcttcatgacaaatggaaaatctcatatatgttaatgcccagtta

SEQ ID NO: 554429 - DNA, 624 bp, Homo sapiens
ttgcctccattgatcaatctgtgcaaagtgcccgtcaaattgacctgaccaatctttaagcagcctctctccttcctccaggccccagaacttcattttgcttctaagcttaagcaagcgccaaaatgccgaacaactctcgtacacagccaacccctcctgagagctggctgactgtagggaaaataatttcctgattgactgtccaatcatacttcctgcttagccscctctccaacactgtgttctttccagctttgtttactcttgcctataaaatgaaaagccctttctgcctaatctttgcagatcttgtcactggtgtattctccctattgcaataatctttttgaataaagtctttgcttattttagatttgtttttgacaataccaaagctattttctagacaaaattcttaaatttatttctttgttttctcatttccacttctcattattgcttacagtctttcaatcttaatatcatttgaaacaactggtggggaggctactttcttaagccaatctcagccatgagtcattttattcaactaagagatatagctgggccatgatagcttcatgacaaatggaaaatctcatatatgttaatgcccagtta

SEQ ID NO: 554430 - DNA, 624 bp, Homo sapiens
ttgcctccattgatcaatctgtgcaaagtgcccgtcaaattgacctgaccaatctttaagcagcctctctccttcctccaggccccagaacttcattttgcttctaagcttaagcaagcgccaaaatgccgaacaactctcgtacacagccaacccctcctgagagctggctgactgtagggaaaataatttcctgattgactgtccaatcatacttcctgcttagccgcctctccaacactgtgttctttccagctttgtttactcttgcctataaaatgaaaagccctttctgcctaatctttgcagatcttgtcactggygtattctccctattgcaataatctttttgaataaagtctttgcttattttagatttgtttttgacaataccaaagctattttctagacaaaattcttaaatttatttctttgttttctcatttccacttctcattattgcttacagtctttcaatcttaatatcatttgaaacaactggtggggaggctactttcttaagccaatctcagccatgagtcattttattcaactaagagatatagctgggccatgatagcttcatgacaaatggaaaatctcatatatgttaatgcccagtta

SEQ ID NO: 554431 - DNA, 624 bp, Homo sapiens
ttgcctccattgatcaatctgtgcaaagtgcccgtcaaattgacctgaccaatctttaagcagcctctctccttcctccaggccccagaacttcattttgcttctaagcttaagcaagcgccaaaatgccgaacaactctcgtacacagccaacccctcctgagagctggctgactgtagggaaaataatttcctgattgactgtccaatcatacttcctgcttagccgcctctccaacactgtgttctttccagctttgtttactcttgcctataaaatgaaaagccctttctgcctaatctttgcagatcttgtcactggtgtattctccctattgcaataatctttttgaataaagtctttgcttattttagatttgtttttgacaataccaaagctattttctagacaaaattcttaaatttatttctttgttttctcatttccacttctcattattgcttacagtctttcaatcttaatatcatttraaacaactggtggggaggctactttcttaagccaatctcagccatgagtcattttattcaactaagagatatagctgggccatgatagcttcatgacaaatggaaaatctcatatatgttaatgcccagtta

SEQ ID NO: 554432 - DNA, 624 bp, Homo sapiens
ttgcctccattgatcaatctgtgcaaagtgcccgtcaaattgacctgaccaatctttaagcagcctctctccttcctccaggccccagaacttcattttgcttctaagcttaagcaagcgccaaaatgccgaacaactctcgtacacagccaacccctcctgagagctggctgactgtagggaaaataatttcctgattgactgtccaatcatacttcctgcttagccgcctctccaacactgtgttctttccagctttgtttactcttgcctataaaatgaaaagccctttctgcctaatctttgcagatcttgtcactggtgtattctccctattgcaataatctttttgaataaagtctttgcttattttagatttgtttttgacaataccaaagctattttctagacaaaattcttaaatttatttctttgttttctcatttccacttctcattattgcttacagtctttcaatcttaatatcatttgaaacaactggtggggaggctactttcttaarccaatctcagccatgagtcattttattcaactaagagatatagctgggccatgatagcttcatgacaaatggaaaatctcatatatgttaatgcccagtta

SEQ ID NO: 554433 - DNA, 624 bp, Homo sapiens
ttgcctccattgatcaatctgtgcaaagtgcccgtcaaattgacctgaccaatctttaagcagcctctctccttcctccaggccccagaacttcattttgcttctaagcttaagcaagcgccaaaatgccgaacaactctcgtacacagccaacccctcctgagagctggctgactgtagggaaaataatttcctgattgactgtccaatcatacttcctgcttagccgcctctccaacactgtgttctttccagctttgtttactcttgcctataaaatgaaaagccctttctgcctaatctttgcagatcttgtcactggtgtattctccctattgcaataatctttttgaataaagtctttgcttattttagatttgtttttgacaataccaaagctattttctagacaaaattcttaaatttatttctttgttttctcatttccacttctcattattgcttacagtctttcaatcttaatatcatttgaaacaactggtggggaggctactttcttaagccaatctcagccatgagtcattttattcaactaagagatatagctgggccatgatagcttcatgacaaatggaaaatctcatatatgttaatgcccartta

SEQ ID NO: 554434 - DNA, 651 bp, Homo sapiens
tgatccacctgcttcgtcctcccaaagtgctaggattacaggcgtaagccacagtgcccggcctaacagctgacttctcatcagaagcagtggagtccagaaggcagtggaataacattcaaagtactgaaaagaaagtccatgaaaaagaatagagtgttttataggcatgacattaagtctgacttcattatgcatatttagtgatatggtttggctgtgtccccacccaaatctcatcttgaattatagctcccataattcccacatgccacgggagggacctggtgggaagtaattgaatcatgggggtgggtctttctcttgctgttctcatgataatgagtaagtctcacaagatgtgatggttttataaagcagagatccccctgcacacactctcttgcctgctgccatgtaagatgtgactttgctcctccttcgccttctgccacgattgtgaggcctccccagccatgtggaactstgagtcaattaaacttctttcctttataaatcacccagtctagggtatgtctttattagcagcatgagaacagaatactacacttaggaatactgctgtgtctggcatgccctcataaggaagagtagacagagttacataaggaacacagtcatattcatctc

SEQ ID NO: 554435 - DNA, 651 bp, Homo sapiens
tgatccacctgcttcgtcctcccaaagtgctaggattacaggcgtaagccacagtgcccggcctaacagctgacttctcatcagaagcagtggagtccagaaggcagtggaataacattcaaagtactgaaaagaaagtccatgaaaaagaatagagtgttttataggcatgacattaagtctgacttcattatgcatatttagtgatatggtttggctgtgtccccacccaaatctcatcttgaattatagctcccataattcccacatgccacgggagggacctggtgggaagtaattgaatcatgggggtgggtctttctcttgctgttctcatgataatgagtaagtctcacaagatgtgatggttttataaagcagagatccccctgcacacactctcttgcctgctgccatgtaagatgtgactttgctcctccttcgccttctgccacgattgtgaggcctccccagccatgtggaactctgagtcaattaaacttctttcctttataaatcacccagtctagggtatgtctttattagcagcatgagaacagamtactacacttaggaatactgctgtgtctggcatgccctcataaggaagagtagacagagttacataaggaacacagtcatattcatctc

SEQ ID NO: 554436 - DNA, 613 bp, Homo sapiens
cccgggaggtggaggttgcagtgagccaagatcgtgccactgcactccagcctgggccatagaacgaaacttcgtctcaaaataaaaataaaaaacaaggaaacaataagcttcaccttggaccactgtgtcttaactggaattcccacttcacccctttctttgtcttgacaaataatggtgtttaattttatgcctttgagatgtcaatttttaaactcgtttcatccaagagtcatctttttggaaggacagatttagggttgtctggctaacaactgcttagggtgatggaacagaaaatggaaagattaatggtttgaaatataaagaatcatatttaacttctgtttctttgattctgtgattttttttayacctgtcttgtttgtcaacaaaaataaaataatgtaagatgatggggcagaggagggactgatgacagctgagttcttctgagaatctgtctttgggcaggtacgagttcagagaatgcctctccctgcatttgttgtatttcaagtacatgcagctggaagtgatcaatatactaatgcgacatattctggaatggcatttcctgaactccttcactgattagttttaagaagca

SEQ ID NO: 554437 - DNA, 1152 bp, Homo sapiens
gtcaaagcaatggaaatgcagaacataaaaggcaggattcatacagagggtggatgtctcggccaaactcctgggcagcgactgacccctcagaggctcccacttgcccagctcaggaagggcggttccccaaggaagggtgctggcatggcggtgagtcagccccagtacccactctgtccccccgaccaggctgtcctccaactctccacctgcagagagcctccagccatgccttgtcttcctcatcagagagacctggtccagccagtgctgggyggggctctgagcacagcccgcatgtcggcggcggctcctgacatggctccatctagcctgaccgtggactgctggcgtgggcccaggagtcagacttgagtttgagaacagtctctgcttcacagttgggggacctcaggggaaatacgtaatctcttcagaccccagaaagagcattttattcaacctcttcatttttctcctcttttgaagcccagagagatggagacgtgcccaaggctgcagagttaatttgtactcagtgtacagggaatgggtttctgattccagggccccatgtcagctccaccagcctaaccattttaccatccgcctttgccactcccctccctagcgccactgggccctggcaacagagcaggagtgagcagaaccttccacaacccctcactctggcttcccagccactgctggctttgaagccggtttttgtgacttcggaatattgattgtattccctgctggcatggctgtttgttggtcaggcttttgtttggaagagtcctcttgcaggcagcctggggtcaccttcacatcccgtcggccctaccagaggatctcctggccacggagaaaggcagggaagaaaggcaggaccctggggacaccccattcgatgggggttattcttccagtgcagcagcagccctgcttccaggcagaggtggagagggcctccaagtacctttgtgcagctgtgattctgctgtccagaaaagaagaactggaccccacagagggccagaagccattgcagagttgagctgcagcttgggcggagctcagggataccacaggagcttcagcacaagccaagtgggaggaacagaacaggcatgggccaggggtctg

SEQ ID NO: 554438 - DNA, 591 bp, Homo sapiens
caattttcagaaaaatttataaacaatttccttctaaatttagccaacttgattacatacaaaatttatttcataagattcatstttcacaaaccttttgcaagttgctcaaacctcttatggcttgcttaggcctaattttgttttagactttcttttttaatattggaacaaataattattctaccttaggacaaaaatttgcttttctttttctttatcatttttaccacacaagattctttctcatacaaagttatgtatctttttcatctttcttaccaaagataccttctcatatttataattttctttgcatgtctcttcctacttattgatttctttgccttgtttttattttcttcttaaatctatattttgaaaccacctttaaataatgtctgaattagatataattattatttttaaattaaaaacatatattcatgttcttttttaaaacaattttttactggctaggtgcagtggctcacatctataatcccaacactttgggaggctgaggcaggagaactgcttgagctcaggagtttgagactagcctgagtaacatagcaagactccatcact

SEQ ID NO: 554439 - DNA, 864 bp, Homo sapiens
cagagcagcccctaggttggtgccaaggaggacaagtttaaatgtagctgaaaacactaaatgcttaatcttctctctcaccacgccacacatcccaggatcctccacccccatgccttaaaaaaatcaattttcatataatgttctatataaatgggaaattaacctgtcaatcttgatactccaccatcacatgggtctcaatagtttaatgacaaaaccctatgggctgtgaggaacaagtgtgttacccacgtgaagatacacagcatagcaattcttctgtaaatcatgtgagttgctcatggatggaggcttcccggaacctctgaatgagaagcattttcattaggagcccaagtacccaagaaaagaaaggaaaatgagccacagccaggtctcttgacctttccaaggttagttcgtgcacagttacctgcctgggcagaggtgcttagaggagatatgctggagatgccgtgccagatgaaagggagacctctctcaaggtggagaattgtccctccaagtcactccctttaaaagcccccaaatcccacaagttaagaacttcaggaagaactgaagtcaattattccgagtctgtgaacacctccagtcaatggtttacactctggtgttgaataaaagaaccacaattcactgtttatacrtaaaccaaataaacagcaacaagtgtcctgtatttcttatctcagtggatgttaactacccattaacataagccaggaacctggtggcatccttgactcactttatactgctaaataaaacgtacaagggcctacatttctggcactcagctggctactttgaaactctgtaagaaatttacatctataa

SEQ ID NO: 554440 - DNA, 568 bp, Homo sapiens
gtaaaatcccctccctagcccatctccatgacactcacagaacattcacaacctttattatgggtgagagcttcactacaactttagaaataaaaagtaaaattacaacataggtcctaggccttggcgagcctgaaaaagaagattgggaaggagggcacagggtccttccacctccctggmaaggtgcagaatgagccaggcctaactacagggccatgagcctctagaagcttaggggggaataagaaacactgtgaacttagatatataaatggagagagacccaagcaataggccgggcctgactcccagacccctgcagatcatggctaaggccttacatcctcctctgtcatactggagtaggaggcaggggaagtcatctttggagtattttggtttttcttatttatgtacaaaaaagtccacatccacaatccaaaataaagttctctgtccatctctgaaactgcctgtctcagtttttccacctgtctgtttggccgaagggaatggaatagacatgaagagacaatggatgtgaagaagaaatagagccatgggt

SEQ ID NO: 554441 - DNA, 568 bp, Homo sapiens
gtaaaatcccctccctagcccatctccatgacactcacagaacattcacaacctttattatgggtgagagcttcactacaactttagaaataaaaagtaaaattacaacataggtcctaggccttggcgagcctgaaaaagaagattgggaaggagggcacagggtccttccacctccctggcaaggtgcagaatgagccaggcctaactacagggccatgagcctctagaagcttaggggggaataagaaacactgtgaacttagatatataaatrgagagagacccaagcaataggccgggcctgactcccagacccctgcagatcatggctaaggccttacatcctcctctgtcatactggagtaggaggcaggggaagtcatctttggagtattttggtttttcttatttatgtacaaaaaagtccacatccacaatccaaaataaagttctctgtccatctctgaaactgcctgtctcagtttttccacctgtctgtttggccgaagggaatggaatagacatgaagagacaatggatgtgaagaagaaatagagccatgggt

SEQ ID NO: 554442 - DNA, 528 bp, Homo sapiens
gtaggtatgagtataaacttaatcttctcatttcaacatggaatttcttgctttttaagatgactgggaattttataaaatgctaagtttaccatcaaattagcagggcatattttgccttttacaaagctcaatggtccagccctaccctggactggtgccacacccctccagcggcctttccataggggctggatgttccaagatcatgttgattgagtggttttgtttttagctacagaaaattgtggcctctggacctgttacataatcactcatgttgctggaatacttatgttcacttgctaacttattttggcacatatgtctttgagactataaggaaagagattaaaaacatctgtaaatgcttttgtggtgaatgacacaaaaatgttgggcaacaactcacggttctttagcgtggatctgatgggaagttgacaaaatataatttcagaaaatgaaccaaaaaaaccaaaacctatgtattataatccayatgtaactttcataaacatacccttc

SEQ ID NO: 554443 - DNA, 739 bp, Homo sapiens
  misc_feature 639, 640, 641, 642, 643, 644, 645, 646, 647, 648, 649, 650,651, 652, 653, 654, 655, 656, 657, 658, 659, 660, 661, 662,663, 664, 665, 666, 667, 668, 669, 670, 671, 672, 673, 674,675, 676, 677, 678, 679, 680, 681, 682, 683, 684, 685: n = A,T,C or G
  misc_feature 686, 687, 688, 689, 690, 691, 692, 693, 694, 695, 696, 697,698, 699, 700, 701, 702, 703, 704, 705, 706, 707, 708, 709,710, 711, 712, 713, 714, 715, 716, 717, 718, 719, 720, 721,722, 723, 724, 725, 726, 727, 728, 729, 730, 731, 732: n = A,T,C or G
  misc_feature 733, 734, 735, 736, 737, 738: n = A,T,C or G
ccgtcatgtgaaaggggagcaatttaatgagcagaaagtgggactaattaaatgaatatgatctaattctcaaccatgagaattagttctcaaccatgatctaattctcaaccaaaaaaaaaaaaaaaaaagatttccagtgtttggggaactgcttacaagttttatctatgaatgccattttctcaggagctgtagtttgaaagccttgctttcctccaatgaatttacattcctaattatgactggattaaggtttgggtgaatctggaggtgagctttcatttcttagcactctttgctgaggctatccaggagatacggtttctacaaaaattcccaagcttccaagttctgctgtctgaactggcccatgtttctaatgtttctccacctttcccatgtttctctacttcagttcaatttctcctccttttcctctctatggtcatggcctttacttctcattttcaggattcagtcctcttcagccctgatctcaaaacttgtttgcaagaatggagttaaagctcatttacattatgtatcccataacctgttgtaaacctcamatatatacaataaaatttatttttaaaaagacgtaaataacctccacttaaacaggtaaaggacctnnnnnnnnnnnnnnnnnnnnnnnnnnnnnnnnnnnnnnnnnnnnnnnnnnnnnnnnnnnnnnnnnnnnnnnnnnnnnnnnnnnnnnnnnnnnnnnnnnnnt

SEQ ID NO: 554444 - DNA, 1781 bp, Homo sapiens
  misc_feature 1133, 1134, 1135, 1136, 1137, 1138, 1139, 1140, 1141, 1142,1143, 1144, 1145, 1146, 1147, 1148, 1149, 1150, 1151, 1152,1153, 1154, 1155, 1156, 1157, 1158, 1159, 1160, 1161, 1162,1163, 1164, 1165, 1166, 1167, 1168, 1169, 1170, 1171: n = A,T,C or G
  misc_feature 1172, 1173, 1174, 1175, 1176, 1177, 1178, 1179, 1180, 1181,1182, 1183, 1184, 1185, 1186, 1187, 1188, 1189, 1190, 1191,1192, 1193, 1194, 1195, 1196, 1197, 1198, 1199, 1200, 1201,1202, 1203, 1204, 1205, 1206, 1207, 1208, 1209, 1210: n = A,T,C or G
  misc_feature 1211, 1212, 1213, 1214, 1215, 1216, 1217, 1218, 1219, 1220,1221, 1222, 1223, 1224, 1225, 1226, 1227, 1228, 1229, 1230,1231, 1232: n = A,T,C or G
tgaaattgctggtatttgaacatctttgagctacaaaatggcaatttcatatagtttaatctaattcaaggttaagcccttgaatgtatrtattttaaagcaactgaaatgtcccaccagctaggagccaggcccaaggggattgaattgcctaaggttacacaatgagtacctcatagaactggaattcaaatccaaatctctctactgaaaatgctgagctcattcggtttgtccacatgggctcccatagaaaatgaggctcttgaatttctcatgcagcaattacgaccattatttccatgaaaagtagccatatacgagtgtactttttttcaaaaggggaagggagaattggagcacccatttccaaactggagtggattcttggcagagctaaaatcagagcttagtatcctctattttagacttcagttaaggtgtttctctatctctcacgttgctaatagtattgtcatctctaggtaggcaggacttcccatttataaatccttgcctgttttccatgacaagagaatgaaagagggaacccaggaactttatccaaaacagaaacaatcaatgatgcacaagttggctaagactgttaactttgaaataacaaactgcttttaatcttacttgattcatttctaattttatctcagggtttctctaccctaatccggtcttgccaaaaattctcagagttggatgtataagtgcaaacattttaataactagaatttttctcctctgttccttgccagtttcctctcttatttgatgctttattatcattctatgcctatttcctccaattttctccatttaagagttagcacaagcctcttgctagtgttagttgcattgaatgtcacatgaatgcaatgaaaaaatataaagttcagaccgtatcaccaaatatacatttatgagttggggtttttatttattgggtttcgttgaggtttttttgttttgtttgggtttggttttacaattttttcaggggaaaggatgaatggtcttataaagacaaagtatgacctgtgtgtttgggaaaaaatgaaagaaattccggcttcctcacccacccttcctttaaacactaccctgtttttatctttccnnnnnnnnnnnnnnnnnnnnnnnnnnnnnnnnnnnnnnnnnnnnnnnnnnnnnnnnnnnnnnnnnnnnnnnnnnnnnnnnnnnnnnnnnnnnnnnnnnnntttatgatttacttatttctttattttctctctccctatactcatagaaaaactccatgagataagggttgggggttttctgatatatcccgagtgttaaaatacagcctattctataggagcctctcaatacatattaatatttggcaaataaataaatgaatgaataacaatgaaataaaagaaacaattactttaaggagaattatagatcattttcctccaaattttttatttaaagttattacaatattgtacttaacagcaaataaaaaccaaagaaaaaatactccttattcctcctgaaaatgctcaatttgaatgttgacagcctttgtgagagtagctgactggtctgaaacatgagaggagggcagagattaaatgatttaccaaggggagaggagcggccatgggggcccctgggcagaatgattggtaaaggggaggccagagaaaaagaagctcacttgccaaaagcatgtaataaactctctttctttttttcccccacctctctcttttcctttgaggcatagctgatttctt

SEQ ID NO: 554445 - DNA, 969 bp, Homo sapiens
tgccacaatttaaaaaattgaaaaaaaaaaatcagtggctctttccctacctaagagatttgtgaagacttgtcccgaggtaggattctggactttctaaccccaggcgtcctctgggcatccgcttctccctaagccctaaggttcccttccccgtgwcctctagggcgagagcctgaaagagtggttggacagctggtccaattcattcaggtaaaggacttcattcgctttaagtgtcaactcttttggctttcacctttttgggtagcctgttttcgtagagctcactttttgttctcaagctccccgagcacaatgcattttgtgagccaaatcattaaaataggacatttgttttttgttttttcttttggccacaagtaaatacacgtttaagcaatagcttcctacagctcttgaattatgcaatataaaaatgccagtgtgttttaattttagttttctaggtcatgtaattagaaaatgatttgaatgaaaacaatgaaaaaaatgtaatatatcttttaatctgtgaaacaagaatgagaaagttatttctcatctcactctccaaaagtcccagggccttgtgcctctctgtgccctgggctggcctcaccgtgggtcagtcctgctcccgcgcctgctgctgagcttcctgatgcctggccctgcccattcagaccggatttgtccagattctcccagcattgtagaaaaaacaatcgctcatatttaatgagttcttttgtgtgtgtcagacagggttctaagggttctacgtacactaacacacataagcctcatgagcgactggggctacagagggtcaccaccatgcccagctactttttaatttttacttttgtagagatggtgtctggctctattgcccaggctagtctagaattcctggcctcaagcaatcctccactgtaattacagctgagagccactgggtccagc

SEQ ID NO: 554446 - DNA, 969 bp, Homo sapiens
tgccacaatttaaaaaattgaaaaaaaaaaatcagtggctctttccctacctaagagatttgtgaagacttgtcccgaggtaggattctggactttctaaccccaggcgtcctctgggcatccgcttctccctaagccctaaggttcccttccccgtgacctctagggcgagagcctgaaagagtggttggacagctggtccaattcattcaggtaaaggacttcattcgctttaagtgtcaactcttttggctttcacctttttgggtagcctgttttcgtagagctcactttttgttctcaagctccccgagcacaatgcattttgtgagccaaatcattaaaataggacatttgttttttgttttttcttttggccacaagtaaatacacgtttaagcaatagcttcctacagctcttgaattatgcaatataaaaatgccagtgtgttttaattttagttttctaggtcatgtaattagaaaatgatttgaatgaaaacaatgaaaaaaatgtaatatatcttttaatctgtgaaacaagaatgagaaagttatttctcatctcactctccaaaagtcccagggccttgtgcctctctgtgccctgggctggcctcaccgtgggtcagtcctgctcccgcgcctgctgctgagcttcctgatgcctggccctgcccattcagaccggatttgtccagattctcccagcattgtagaaaaaacaatcgctcatatttaatgagttcttttgtgtgtgtcagacagggttctaagggttctacgtacactaacacacataagcctcatgagcgactggggctacagagggkcaccaccatgcccagctactttttaatttttacttttgtagagatggtgtctggctctattgcccaggctagtctagaattcctggcctcaagcaatcctccactgtaattacagctgagagccactgggtccagc

SEQ ID NO: 554447 - DNA, 532 bp, Homo sapiens
ccttggctctgcctgtgttgcgttcactcacagtgcggttcgtaaggaggaggagggtctccacaaggcacacactccatgtcttgaaagccgacaagtttcgtcttcctataaaatctagaagagaaaggaaaatactccttgttaactctttcatctaagcttacagttgtggtcataaattaccagcagtctccattaccagttctacggttaaaagtacacagaggcttaaataatagtatcttaggtagacacatttttgaagaggaagcagtggacacttaagaaatatcaattcccctaaacgtaactttgcagatgcttctcagtgcacttcttctatattggggtgggggtgcaggtgggggaatataaagtcagtggtcttcggcatttttattgaaacttaaacgacaaaataccttatmaatgaataaagaactaggttttagcatttggaattcagacaccaaaaaaccaagcaaccataaaagcaacggaaaaatgtagggaaatactcatacaatct

SEQ ID NO: 554448 - DNA, 537 bp, Homo sapiens
aattttctatgacaaaaatagtaatatagagaacaagtctacaaaggacaggtagatgcaattatcttgtgaaactgcataatgtagtagcaaatctgtataatttatggtagaagcaaaatttgcatttgaaactaggtaagttatctcaaatgcccagatacattcagaaattgctcaacattctattttcacttgattatgacaatcttttcaaaggatatataatacagtgacttcccattagatattaataaaattactccttttggaatttatgaagtaaaaattaaaaaaaaaaacaaagttcraggactcatacttcctgatttcaaaacttaatacaatgcaacaataatcaaaatatgtagtactggcataaagacagacaactagaccagtggaatagacaagagatcccagaagtaaaccgtcatgtatatggtcaatgactttcaacaaggtgccaagaccactcagtgaggaaagaacagtctctttaaggaatgttggagaaactggacatccacatgcaac

SEQ ID NO: 554449 - DNA, 502 bp, Homo sapiens
tagacrtcatacctgatggaaccagtctgtgagccctatgtaaatcagacaccgccttctccaacttattatatctgttttggtccactgcctccccacttttcagatgtctctctctctctctctctctaagagctgctctcctctctcctttcttctatctattaaattttccactccctaacccacccacatgtgattgtgtcctgaattcttggtgtgtgacgatgaaccccagggtgtataccccagacagcacagccacttcaccagcagggacagcagctgtcacatgaactggagatgaactggaggtgagtctgatgtctcggaattttgaggaaagtgggtagaaagttgccaagcaagctgaagagacaagcaaaagggatcatattccagaagaattcttagcaagaccacagtcagaacttcaatcaaggtgattgattggtctgaaagggggaatagaatgtaaataaaatacaaccatgagaaacca

SEQ ID NO: 554450 - DNA, 502 bp, Homo sapiens
tagacgtcatacctgatggaaccagtctgtgagccctatgtaaatcagacaccgccttctccaacttattatatctgttttggtccactgcctccccacttttcagatgtctctctctctctctctctctaagagctgctctcctctctcctttcttctatctattaaaytttccactccctaacccacccacatgtgattgtgtcctgaattcttggtgtgtgacgatgaaccccagggtgtataccccagacagcacagccacttcaccagcagggacagcagctgtcacatgaactggagatgaactggaggtgagtctgatgtctcggaattttgaggaaagtgggtagaaagttgccaagcaagctgaagagacaagcaaaagggatcatattccagaagaattcttagcaagaccacagtcagaacttcaatcaaggtgattgattggtctgaaagggggaatagaatgtaaataaaatacaaccatgagaaacca

SEQ ID NO: 554451 - DNA, 502 bp, Homo sapiens
tagacgtcatacctgatggaaccagtctgtgagccctatgtaaatcagacaccgccttctccaacttattatatctgttttggtccactgcctccccacttttcagatgtctctctctctctctctctctaagagctgctctcctctctcctttcttctatctattaaattttccactccctaacccacccacatgtgattgtgtcctgaattcttggtgtgtgacratgaaccccagggtgtataccccagacagcacagccacttcaccagcagggacagcagctgtcacatgaactggagatgaactggaggtgagtctgatgtctcggaattttgaggaaagtgggtagaaagttgccaagcaagctgaagagacaagcaaaagggatcatattccagaagaattcttagcaagaccacagtcagaacttcaatcaaggtgattgattggtctgaaagggggaatagaatgtaaataaaatacaaccatgagaaacca

SEQ ID NO: 554452 - DNA, 502 bp, Homo sapiens
tagacgtcatacctgatggaaccagtctgtgagccctatgtaaatcagacaccgccttctccaacttattatatctgttttggtccactgcctccccacttttcagatgtctctctctctctctctctctaagagctgctctcctctctcctttcttctatctattaaattttccactccctaacccacccacatgtgattgtgtcctgaattcttggtgtgtgacgatgaaccccagggtgtataccccagacagcacagccacttcaccagcagggacagcagctgtcacatgaactggagatgaactggaggtgagtctgatgtctcggaattttgaggaaagtgggtagaaagttgccaagcaagctgaagagacaagcaaaagggatcatrttccagaagaattcttagcaagaccacagtcagaacttcaatcaaggtgattgattggtctgaaagggggaatagaatgtaaataaaatacaaccatgagaaacca

SEQ ID NO: 554453 - DNA, 529 bp, Homo sapiens
gggctaatatgagttcaggctgctttcactgcattcagcactgtagcataagggcactagatagccttgcccccacaggcgttgaaggaggcttgtctatctgtctgttacaacatctctttcatctatagacacatggtcttcgtaaattttccccaggagagttcagtattaatgcacttgggccactctatttccacaaggtcatgtaaattatttaaaaaagaaaaaggtgggaacgggatggtcttgggcagctgattagcatcttaygcataatgaagaattttgcatgtttgcggccaggcacagtggctcacacctgtaatctcagcactttgggaggccgaagtgggtggattatgaggtcaggagttcaagaccagcctggccaagatggtgataccctgtctctactaaatatacaaaaattagccaggcgtggtggcaggcacctgtaatcccagctactcaggaggctaaggcagagaattgcttgaatctgggaggcagaggttgcagtaagcca

SEQ ID NO: 554454 - DNA, 622 bp, Homo sapiens
gggactttgctgcctctgcctggagggtctaaagtttcattttcatatgacccgcagggcgcagactggcggaaaattagcagagccctgggcatgggctgcacctggcccttaagggacaatgatggaaatattccttattagcacaatactgagyacaggctgtgtgataatgtgtcaagggaactgcagacatcctttcagaaaaagttcataaaacggagaaagtttggttcccaacctagatttttaacctgttgaactctgtctaaatgggtcatctcgggatgtcctccactcaacatgaccacgtctgcccctctgtcccacctgtctcctcagtccttcctccccacctttcaggatgaaatgaaaccctcagtccagctgcacccctgccccacccacctcatctcatgtgccctcccgcccctctcaggccggacagccttgcttctggaacacacgagcacagcttcaccaggcactttctgagcaccctgcaggcgcctcccaggagtggtcagtggtcaatcagctaatgaagctgcataggacatgacccttgtttaccgcagaatgcccagagctggcaggatgtcttatatgcaggaagtaccca

SEQ ID NO: 554455 - DNA, 1464 bp, Homo sapiens
tttctgagacagggtctccttctgttacccaggctggagtgcagtggcgtaatctctgctcactgcaacctttgcctcctggactcaagcgatcttcccacttcagcctcccaagtagttgggaccaccatgccctgctgatttttctattttttctttttggaagagacagggtttggccatgttgcccaggctgctttcgaactcctgagctcaagcgatccactcgccctgacctctcaatgtgttgggattacaggcatgagccactgtgcctggccagttttttcactttttaaggtactataaaagaaacattttacaggattgaacatatgcttatatctattatgaaaaaatacataatttaaaaaaatacctggctgggcacagcmgcccacgcctataatcccaacaatttgcaaggccaaggtgggaggagttcaagaccaacctgggcaatgtagggagacttcgtctctataaaaaattaaaaaataagttggtcatggtggcttgtacctgtaatcccagctactcacgaggtcaaggtgggaggattgcttgagccaggaagattgaggctgcaataagctgtgattttgccactgtactccagcctgggcaacagagcaagatcctatctaaaaataaaaataaaaataattaataaaaagctaacttcagagctgttaacccttcatttcacttaaccttagagtaaatatgtatggctttatataaatagcttatcagttgtcatttgtctgaaacatctgacttgatataaattctatgtgaaaagtacaaagtttagaatatatacactttagcatataacatgaaattctaaatcactcatgaaatttaagataaaaagtaaagcaacagcttttatttttgtagccaaaatcctatgggtatttaccaagacttgtgcctttaattacaaggtagggaagtaagggtaagatagcaaacaaagggaatgtaacctcataaggtgaagttattttggcaatttgggctctgaaatatgaagaattggccaggtgcagtggcttacgcctgtaatcccaacacttcgggaggccgaggcgggtggatcacttgagcccaggatatctggatcaacctgggcaacatggcaaaaccctgtctttataaaaaaaaatacaagaagttagccaggtgtggtggtgtgtgcctgtggtcccagctacttgggaggtgggaggattgcttgagcccaggaagtcgaggctgtggtgagccatgatctcccctccagcctaggccatggccatacagtgagatcctctctcaaaaaaagaaatatgaagaatagaggtttgacagtcacatcatttgagatctccttatccaaatgcatggtcagagtttgagtcacttgtggaatctttgagtaactgaaataaaatccagttgatcagaattctttgg

SEQ ID NO: 554456 - DNA, 1464 bp, Homo sapiens
tttctgagacagggtctccttctgttacccaggctggagtgcagtggcgtaatctctgctcactgcaacctttgcctcctggactcaagcgatcttcccacttcagcctcccaagtagttgggaccaccatgccctgctgatttttctattttttctttttggaagagacagggtttggccatgttgcccaggctgctttcgaactcctgagctcaagcgatccactcgccctgacctctcaatgtgttgggattacaggcatgagccactgtgcctggccagttttttcactttttaaggtactataaaagaaacattttacaggattgaacatatgcttatatctattatgaaaaaatacataatttaaaaaaatacctggctgggcacagcagcccacgcctataatcccaacaatttgcaaggccaaggtgggaggagttcaagaccaacctgggcaatgtagggagacttcgtctctataaaaaattaaaaaataagttggtcatggtggcttgtacctgtaatcccagctactcacgaggtcaaggtgggaggattgcttgagccaggaagattgaggctgcaataagctgtgattttgccactgtactccagcctgggcaacagagcaagatcctatctaaaaataaaaataaaaataattaataaaaagctaacttcagagctgttaacccttcatttcacttaaccttagagtaaatatgtatggctttatataaatagcttatcagttgtcatttgtctgaaacatctgacttgatataaattctatgtgaaaagtacaaagtttagaatatatacactttagcatataacatgaaattctaaatcactcatgaaatttaagataaaaagtaaagcaacagcttttatttttgtagccaaaatcctatgggtatttaccaagacttgtgcctttaattacaaggtagggaagtaagggtaagatagcaaacaaagggaatgtaacctcataaggtgaagttattttggcaatttgggctctgaaatatgaagaattggccaggtgcagtggcttacgcctgtaatcccaacacttcgggaggccgaggcgggtggatcacttgagcccaggatatctggatcaacctgggcaacatggcaaaaccctgtctttataaaaaaaaatacaagaagttagccaggtgtggtggtgtgtgcctgtggtcccagctacttgggaggtgggaggattgcttgagcccaggaagtcraggctgtggtgagccatgatctcccctccagcctaggccatggccatacagtgagatcctctctcaaaaaaagaaatatgaagaatagaggtttgacagtcacatcatttgagatctccttatccaaatgcatggtcagagtttgagtcacttgtggaatctttgagtaactgaaataaaatccagttgatcagaattctttgg

SEQ ID NO: 554457 - DNA, 608 bp, Homo sapiens
aactagggcccttgaccacaggatgaattcacagtcccactagccctgcccaaaggtgaacctgggccagaattcagttcatttgtcacccaacctctataagctcaaaatgttgatggcaaacagcaacattttgggtcccagaaattagtgttagtttgggatttgcatatgatagtcactaaaaagtttgggtatttccttttctccagagcaattatctataagggagcacaaactctttggggagatgaaagtttgcttgcagttttaggtacaatatttccacagcgtccttatacaagaatatttgggctatgctcaaaaggctgtggatctgggatctgatttagtgcyggtaatggggtgacaagttgtatctctcttgctcaggagaggtctctgttccccagacataaagctgtgttttgtgggttgttttttgttttttttttttttagagacaggatcccactctgttgcccaggccgaaatgcagtggcatgatcatggctcgctgaagacctgaacacctgggctcaagcagtcctcccttctcagcctcttgagtagctagtcatgcatgctccaccatacttagctacttt

SEQ ID NO: 554458 - DNA, 538 bp, Homo sapiens
gaactcactcaaaaactagagcagaacaaaaaaatgaaccgagattatacaaggaatgcttctaatctggaaagaaatgacctacggattgaggatggcatctcttccacactgccgtccaaagaatcaagaaggaagggtggtctggactacctaaagcaggtagagaatgaaacaagaaacaaatcagaaaatgaaaagaaccgcaatcaggaagacaacaaagtcaaagaccttaaccaagagattgagaaacttaagacrcaaatcaaacactttgaatcgttggaagaagagcttaagaaaatgaagtccaaaaataacgaccttcaggataattacctaagtgaacaaaataaaaacaaattattagccagccaactggaggagataaagctacaaatcaagaaacagaaagagttagaaaatggagaggtagaaggggaagatgctttcctgtccagcaaaggcagacatgagaggactaagtttagaggccacggaagtgaagcttctgtgtccaagcacacagcgcggg

SEQ ID NO: 554459 - DNA, 563 bp, Homo sapiens
agccctcacttgtttcatctccaagacagaataccttgtaacaaggggcaccgtgggtaggtgggtgggtgggaaggtaggaggagtgggagagtgtaggaatcggctgtaggtggacaactaatcagacaccttcaagtgaccaggcccccgcagattcccactggctacaatcagtaaaggaagcagtatttgctttactccaattgttctgacttttgagaacaattcaagttactgtagcttgtagaaatggttaaggaagagcaaggcagaacagtgtaaaagatgagactgaatgagattggagttatcaccctaaaaggatatttacatacagggctagccccagactaagctctgggatggaaaaaaaaatgtctacacattcctggtgaatgctctttaagcaccgctgcgcagtgaagtaataaataacaattgactccattgttttttggtcttagtgttgttattgttgtttattttcatgtttccagaaaggggraaaaatgtggcttagaaattaattaccttgggttagaagatctaagcctcagaca

SEQ ID NO: 554460 - DNA, 535 bp, Homo sapiens
ccaacaacctactatcaaaggaaaaaatagtaactagatcattacggcatgtcggttttgaggtactcttactttttccaccacagatattccctgactttactaaaagcattcagcagaattaaaagcttctgtcttttaaatgaaatgttaggtcggctacttcccctagactcagaactgcgttaggaaatcacagttaattagaatatggcacaagaaggctgggtgtggtggttcatgcctatgaagccgatgttttgggagggtgaggcrggaggatcacttgagcacagaagtttagaccagcctgggcaacaaagtgagaccccctcaactacaaaaagtttaaaaattagacaggtgtggtagcaactgtttgtagtctcagctacttgggaggctgaggtggaagtatcactggagcctgggaggttgaggctgcagtgagatacgattgtaccactgcactccagctcgggcaacggggcaagaccctgtcactaaaaataaaaataaaaggaatagggtacaa

SEQ ID NO: 554461 - DNA, 622 bp, Homo sapiens
aggctgtgtcacgggcacgtcctcaaccttggcaaaataacctttctaaattaactgaaaaaaaaaaaaggaaaattagtcttttataattgccttcacattcttagttttatagcttatcttgttattttaactgtatcaaagtttttaatacttataatctgttttgtaattatcatccttcaagtattgtgttctagttctctatttaaatatatctaatcctcaacactgattatttttactgtaggttttccatttctgagtatattcaacaaatgtatttgaagcatctaaacattggagatgcgactagaaaaacaggtaagagctttgtttttatggaacatattctagaacaggagagagaaaacagaagtaaacaagacaaaccaaaaaccaatataactttcagattgtgtgtgataagtactgtgtaccttayataaggacatatactgaataagtaaggaaaaagctattctcatcaagaaaggcttccctttggatgtggcatgtgagctgagtcctgaatgattcaaaagagccaatcaaagaaagggatgggggagcaggaagaggagggacattttacatagaaggaacagaaaatgcttaaggc

SEQ ID NO: 554462 - DNA, 622 bp, Homo sapiens
aggctgtgtcacgggcacgtcctcaaccttggcaaaataacctttctaaattaactgaaaaaaaaaaaaggaaaattagtcttttataattgccttcacattcttagttttatagcttatcttgttattttaactgtatcaaagtttttaatacttataatctgttttgtaattatcatccttcaagtattgtgttctagttctctatttaaatatatctaatcctcaacactgattatttttactgtaggttttccatttctgagtatattcaacaaatgtatttgaagcatctaaacattggagatgcgactagaaaaacaggtaagagctttgtttttatggaacatattctagaacaggagagagaaaacagaagtaaacaagacaaaccaaaaaccaatataactttcagattgtgtgtgataagtactgtgtaccttacataaggacatatactgaataagtaaggaaaaagctattctcatcaagaaaggcttccctttggatgtggcatgtgagctgagtcctgaatgattcaaaagagccaatcaaagaaagggatgggggagcaggaagaggagggacattttacatagaaggaacagaaaatgcttamggc

SEQ ID NO: 554463 - DNA, 772 bp, Homo sapiens
tatgacatcaggatctatagcagtcctattttttttttttctcctttgaaagctggcctagaattgcagaattcccagcaaggcaggaacagtgaaaactccacagactgttgccatttcattcttgtgcccagaaaattctgaggccccttgtcagctgctgagacttccagagcccatgtgatccagaggaggtgtggagctgttggaagcgggggaaatgtgctggctggacagaccctcataaagcatgggcactgctgaggggcctgaggatgacagctgagcattcctccccttgatgcacgcccaccaggctgctcggcactcgcatgtctgtactttggaaagggtcagtttttccagtcggtaggcgtgaaagcatgtggtttctgcatcctcattcccactccctctggcttgcttctattgggttccgggcaaccagctctgctatttcccaccccaggcttactttttttttttttttttttttttttagacagggtctcactctctcmcccaggctggagtactgtagtacaatcatagcttgttgcagccttgaactcctgggcttaagggatcttcctacctcagcctcccaagtagctggcactacagggatgctgcacaccaccatgccaggctattttttttttttttaagagacagggtctggctgtgttgcctaggctggtcttgaattcttgaactcaagtgatcctcccgcctgggcctcccagtgctgggattacaggtgtgagccacc

SEQ ID NO: 554464 - DNA, 542 bp, Homo sapiens
acaactacaaaatgcacaagcttaggtaacaacactaataagttgctgttcttgttcraaatggtgatatgactaggaacatcaaacacacggggacacgaagcaaagttgaggaaaattttttaaaaaaataatatatatgatgctatggtctgaatgtctgtatcccttcaaaattcatatgttgaaacctaaccatctaggggatggtattaagaggcggggccttagaggagactcacccttatgaatgggattagtacccctataaagggcttgaggcagcctgtttactccctctgtctcctctgccatgtgaggacacaacaacaagttgtcatccgtaaagccctcaccagacactgaatctgctggtgccttgattttgaacttcacagttttcagaaccatgagcaataaatttcttttgtttataaattaccctgtttaaggcattttgttatagtagtctaaatagactaagacacatgggaaatgttattttaaaagccatgcttgggcatttcagaggactgtaattt

SEQ ID NO: 554465 - DNA, 542 bp, Homo sapiens
acaactacaaaatgcacaagcttaggtaacaacactaataagttgctgttcttgttcaaaatggtgatatgactaggaacatcaaacacacggggacaygaagcaaagttgaggaaaattttttaaaaaaataatatatatgatgctatggtctgaatgtctgtatcccttcaaaattcatatgttgaaacctaaccatctaggggatggtattaagaggcggggccttagaggagactcacccttatgaatgggattagtacccctataaagggcttgaggcagcctgtttactccctctgtctcctctgccatgtgaggacacaacaacaagttgtcatccgtaaagccctcaccagacactgaatctgctggtgccttgattttgaacttcacagttttcagaaccatgagcaataaatttcttttgtttataaattaccctgtttaaggcattttgttatagtagtctaaatagactaagacacatgggaaatgttattttaaaagccatgcttgggcatttcagaggactgtaattt

SEQ ID NO: 554466 - DNA, 975 bp, Homo sapiens
ataaagttagaatgggtttattactcaacccccattttcttcccactaactcctcactgaaacatttggctttggacatgccaggatcatccaaaaacttcgtcagccaggatgcttctggtatgcttagcagcacccattaggcacctaatcagcactttacaattttttaaattgtgtctaaaaaaacacataacataaaatttaccatcataaccatttttaagtgtacagctcagtagtgttaagtatattcacatgttgtgcactgttcgtagcaatgtaaaatggtgcagctgctatggaaaactgtatagtggttcctcaaaaatcaaaaatagaattaccatatgattgcgcatttgaatctgagtacatctctaacttaattgccaagatagagcataactctgtggcctgtggtgcagcagtccccaggggcagagattggagaaagaaagtttatagtcacccagttckatgtcactaatatctccctccttcataccttatatctatttagctattaaattccgttagattgtctcatcaatgttttttcttttatcttttacttcttctccaatcacataagactgattgtcaaattcttactcaagaagacagtctgcaaggtatccaaagcatcaaaagcaaaggaactgaaacagagaatttgcccatttatttaacatatatcattgaacacctaccatgtccttagcactaagccatatactgagaatgcagtgacaaataaaaagaaaatgtctccttgctttaaaggtacttatagtctaatgaaaggcaataaataaattaacaaatgaatagttacgtagtataagtctatgaaggaaagcaacagggagctaccacagaggattacagagaaaatccacttagactacttggtcctggaaggaccaggctgcatcactgaagcagaggtcccaggataagcagctgttctaa

SEQ ID NO: 554467 - DNA, 664 bp, Homo sapiens
ttttttaagatttctagtagagatggggtctctgygttgctcaggctgttctagaactccaggcctcaagcgattctcccacacagcttcccgaagtgtcaggattacaggtgtgagccattgagcctggctatatttaccatttgaaccatttttaagtgcacagttcagtggcagtaagaacattcacgttgtgttgcagccctcactaacgtttatctccagaactttttcgtcatcccaagctgaaactgtgtatccattaaatactaactacatttccttctcctcctagcccctggcaattacctttctactttctgtctctgaatttaaatctacttttgagaagacacattgttctggtcctgatattgttgatatttaagttccagctggccagctaggcagtaaaccaagcaaaatctcactcatcagacctgagtatttttttccttgacttgtgtctgtcatgtggggggggttgggtgattggaaatatttggtatctacacagcagtctttctgcctttgccatcatcctgtgcatatgcttcttgataattaatatgtgcattcagttaaccattcatgggatcttttcttttatccgattctccgctccttaaggacatgggctgtgtcttgtttgtccctgtatccc

SEQ ID NO: 554468 - DNA, 664 bp, Homo sapiens
ttttttaagatttctagtagagatggggtctctgcgttgctcaggctgttctagaactccaggcctcaagcgatyctcccacacagcttcccgaagtgtcaggattacaggtgtgagccattgagcctggctatatttaccatttgaaccatttttaagtgcacagttcagtggcagtaagaacattcacgttgtgttgcagccctcactaacgtttatctccagaactttttcgtcatcccaagctgaaactgtgtatccattaaatactaactacatttccttctcctcctagcccctggcaattacctttctactttctgtctctgaatttaaatctacttttgagaagacacattgttctggtcctgatattgttgatatttaagttccagctggccagctaggcagtaaaccaagcaaaatctcactcatcagacctgagtatttttttccttgacttgtgtctgtcatgtggggggggttgggtgattggaaatatttggtatctacacagcagtctttctgcctttgccatcatcctgtgcatatgcttcttgataattaatatgtgcattcagttaaccattcatgggatcttttcttttatccgattctccgctccttaaggacatgggctgtgtcttgtttgtccctgtatccc

SEQ ID NO: 554469 - DNA, 664 bp, Homo sapiens
ttttttaagatttctagtagagatggggtctctgcgttgctcaggctgttctagaactccaggcctcaagcgattctcccacacagcttcccgaagtgtcaggattacaggtgtgagccattgagcctggctatatttaccatttgaaccatttttaagtgcacagttcagtggcagtaagaacattcacgttgtgttgcagccctcactaacgtttatctcsagaactttttcgtcatcccaagctgaaactgtgtatccattaaatactaactacatttccttctcctcctagcccctggcaattacctttctactttctgtctctgaatttaaatctacttttgagaagacacattgttctggtcctgatattgttgatatttaagttccagctggccagctaggcagtaaaccaagcaaaatctcactcatcagacctgagtatttttttccttgacttgtgtctgtcatgtggggggggttgggtgattggaaatatttggtatctacacagcagtctttctgcctttgccatcatcctgtgcatatgcttcttgataattaatatgtgcattcagttaaccattcatgggatcttttcttttatccgattctccgctccttaaggacatgggctgtgtcttgtttgtccctgtatccc

SEQ ID NO: 554470 - DNA, 664 bp, Homo sapiens
ttttttaagatttctagtagagatggggtctctgcgttgctcaggctgttctagaactccaggcctcaagcgattctcccacacagcttcccgaagtgtcaggattacaggtgtgagccattgagcctggctatatttaccatttgaaccatttttaagtgcacagttcagtggcagtaagaacattcacgttgtgttgcagccctcactaacgtttatctccagaactttttcgtcatcccaagctgaaactgtgtatccattaaatactaactacatttccttctcctcctagcccctggcaattacctttctacttkctgtctctgaatttaaatctacttttgagaagacacattgttctggtcctgatattgttgatatttaagttccagctggccagctaggcagtaaaccaagcaaaatctcactcatcagacctgagtatttttttccttgacttgtgtctgtcatgtggggggggttgggtgattggaaatatttggtatctacacagcagtctttctgcctttgccatcatcctgtgcatatgcttcttgataattaatatgtgcattcagttaaccattcatgggatcttttcttttatccgattctccgctccttaaggacatgggctgtgtcttgtttgtccctgtatccc

SEQ ID NO: 554471 - DNA, 1080 bp, Homo sapiens
cccagcacccacggccaaacctcctacgcccagcctcacccagggctgaccccagtacccacagccacacctcccacacccagcctcacccaggcctgaccccggcacccacggccacacctcccacacccagcctcacccaggcctgaccccggcacccacggccacacctcccacacccagcctcacccaggcctgaccccggcacccacggccacacctcccacacccagcctcacccaggcctgaccccggcacccacggccaaacctcccacacccagcctcacccagggctgaccccgggacccacagccacacctcccacacccagcctcacccagggctgaccccagcacacatggccacagctcccatacccagcttcatccagggctgaccccggcacccatggccacagctcccacacccagcctcacccagggctggccccggcacccatggccacagctcccacacccagcctcatccagaatccaagctcgtcccagacactgtctctctggccgttgctcagcatggacctggctcttaatggaccctccatcaatgtctgctgagtctcacttcccctctccctctcctgctctgtgctaggaaaaaggcaatgtgagtttttattttacatccaaacaaaagctggcagctcatcatgcacgagtggaactaaatcaatgtcgtggcctgaggtcgtgcagcacaatgcactcagctgagcagtgtcagcacggaaagcccactcggaccttggatctccagacacgcccattcagcccggtttgagccactctttccaaccaactccacaatgtccctaacatgttttttaaaaaatgtttccacacaggaaaagtcaaaagtcaggaaaatctcagaactccaggtagaatatttacaaggttctagctaaacctgccatacacacgtctgcaaacatccttctaaaaggggaaaacttttagagccacaagaatgaaataaagtggatcagaagtaaattcamcactgagaggacagtgaaaagaacacatgaaacacttggcatctgtgtatcaaaagg

SEQ ID NO: 554472 - DNA, 500 bp, Homo sapiens
tgccctgtggaataaaacagtcgcatttgttcatccaacaaatgtttattgcttatttaccatgtgtcagatattttcctaggagctagaaattcaaacgtgagtagttcctgctatagtgagacacagacaaacagatatatatacacaaacatacgtacatagatacaaattaacgttagtattatcagtcttagagagtttatttaaataaacacattaacaatttttttttttttgaaacggagtctccctctgtttcccagggtggagtgcagtggcgtgatctyggctcactacaacctctgcctcccgagttcaagcgattctcctgcctcagcctccgagtagctgggactacagccgcatgcaaccacacccggctaatattttatatttttagtagagatggggtttcaccgtgttagccaggatggtctcaatctcctgacctcatgatccacccgcctcagccttcgaaagtgctgggattataggca

SEQ ID NO: 554473 - DNA, 648 bp, Homo sapiens
tgtctggcctacccagtcactgtcccatgggcataagtgacagtcagtgggcagggaatgcatgtggtaaagtagtatgtatcagtcatgtgtgaaaagaccatccagaccctcacttggtggaggctgagggcaaagggcaccaagagctctggggctaacacagataacttagcagaaagttacttgaggaagctgttgttcctagggcctgaggaagagggcrgctgcaggattaggtcatatataaagaacatatgatcctaacacggggaagtggtctttgagcataggaaatgttgggactgactcagatgggcttgaccagcaaatttaatgagaattaaaccctaatattagccccaaggcagccaccgtaggaagttaattcacatctctcctctgcatgtagaagggttggtgatatatgtatgtatcctcttcagagaatgaggaaatagtcttttgaatcattttttttttctgtgcttcagatgaggaaaccttgttgagaaaggctgtagactagcactatccaatataactttctgcagtgatgaaatgttctgtaatctgtagtgttcacatgtgtctagttgtgattcaggaactgaatttttagatctatttaattttaattttgtaatt

SEQ ID NO: 554474 - DNA, 639 bp, Homo sapiens
tgtggcatttaagctatatatctgtaaatatttggacttaaaaaccactaaatataagattgtaatttcaattgtttttctctttatgggatttactttttattccaacaataatatgatggccatctgtatttttatttatcaagtactcaccacgattaactcctgtgttcagaaattaatatattgatgaagagaatgtgtagcttaattttttatgtttaggcttgtcatgaagttttatctctacatattgcatatgaactctccacacttaggatctatgacacaagaggagccctaagaattatggagttcaattcctaataagaactacaacacaactagctgcactaagtctggatgaaatgatttcaataatatgaatayaggatagccattctgattggataaaagaactgggcgaccagcttctttacataactcaggatatttggtacaattctggaaatatacttgattatcagtgcaaattttttgattggtgactggaatgacattgagttatgtacattaaccagtttacatcttctagaagatacacagaaagtagttcttgaaataatttattgacatggccaatatatatattcttgacaaggtcttatatttcaggaa

SEQ ID NO: 554475 - DNA, 1796 bp, Homo sapiens
tgaataaattatatattatatagaatatatgatatattacacagctatatcattacattgtgttgtataatacataaatatattattatacatatctatatatttaagtgacacttatatcatgcacatggcatattacagaatggaatccaatgtggcaataagaatggatggaccatgctcatgagcacctgggtgaatcttacagcatggacatagcatggtgttggaggtgagtcagacacagaagggacactgtgatccagagacagaatcagaaaccagccacactaagctcggtggccacactctgccaccctgagtgtcttcaggctcattctcaggaggagttaaactgcaggaatgggccagggcctgcttgttctcctcccaagtctctggttctatttggctttttcagctctgtgcatccattaccttggtgaaaataaacattagtttaaaaaaaaaaactaagtaaatcaactcaggcagtgcaggatgcccaaggagcatttgarcagagctgtctatgtgtcaggcagccccagggaagacccagggaaagcagccctcgtgggtagggctggggcagaggacaccctcccaggcacccacgctgcaggggctgtgggtgctgccactgcccttatgtgggtcccgtcctttaaacctcattttcagagctcaaatgagggagcctggcaagacgtacctagagatgcacgtgtcagccaaggggccactctgggaactcagtctcctgggaggcttgaggacatgaagtttatgttttcacagaaaaaggagaatcaagctcttccccaacagacacaggcacacatatgcaagcacacatacccacagacatgcacacacacacgcatacatgaagaggcatgtcgacacacgtgtatgcatacatgtgagcaaacatggacgcaggcccacatgtgtgcgtgctcatacacacatgcacaaactcagacacacagcacatgcaggcacatacacatgcccatgtgcacacacgctggctgcaccatgcatgtactctaaggggcaacgtggtggtgaggtattgcagtgaccacggcagagcaaagaggagggagagaaactggtgacccaggtcctgagcagggcagggtgctgtgtggcactgcccttccctctaagacatcatcctttctggttcaccgaggggacaatggaggcccctcaaagtgacctcaggccttagctcaaccccaacagctaagaggactggagaccaacacagcactttctcatctttcttcccctgcacgctgtctaaccagcctctgtccccacgacaccagctcctgcatgccaatgcccacccctgtggtccaccagagcaaggagaggcagccagggaaggaaggtggtaggtgacaaggacaggcagctgcctggcgttggcaggcaagacggggacaggagccaccctgccccacccacctgcctttcattaccaggtaaacatctgcctcacttgacaccccacttcaacctcagcagctgtgaggcaccaagaaccttagaaagccagggccctgccaacaaaaagggcttgtcattacagagcccgtccctctgctggtgacctgcagacaccgggtggtccctgcaccttccccgctcgctcagggaagccctcgcccccatgcccatcaccccactgcacacactgaggctcaggctccccaaaaggcatgcgagggagcaccccagttggtggaacggagcctaaaagagtatccacccggtca

SEQ ID NO: 554476 - DNA, 684 bp, Homo sapiens
ggagtagctgggattacaggcgtgcatcaccacgcctggctaattttttgtatttttagtagagatgggtttcaccatgttggccaggcaggtctcgaactcctgacctcacgatctgcctgccttggcctcccaaagtgctgggattacaggcatgagacaccgcgcctggcccattttgaagattttaatactctacttggagagaccttgtatttcctaaaactataaaacaaaactgtcaaattatgataaattttttaatgcaagcatcaartgttgttgttttagtaatggtaataaacgatatcaacattttttctagtaacagcaataatttttctaaaggggaaaactttaatttataatggcttttgctagccaaatcatggctagaagtatttggggtctgatattttaagtaaattgattgtatctcaaaattaatcctgtccaccattttatgtgacggccaattttccttaattacaggaaagtatcaagtctcgtcaatgaggtttaaaaaggtatgaaagaacataagtcaaataaaatggtgactttagatattatttcatttgttgtctgcctgttgggtccttcattcagctaagagacaaacatttattaaatgtgttttgattcttgctctcaataatcttaaaattcaaagatcagatacaa

SEQ ID NO: 554477 - DNA, 563 bp, Homo sapiens
atgccaatggttgtaactgcttccttttcaccctgatggtgaaggaaggatccccaccccaatgctatagaaaggttgaacactgaacgcctgacactggacagataagatctaggtgagtttgtcagtcacaccaactctcagaaaggtgagaaggacaccacatgctgggaagagccacayagggttcgactagggagcagagtggaaaaggaggggttgtggcgagcagctgtattatccagagtacagtgaccactgtttgctgtgggaggatgtgaggggtttggtgataattccaagagctggcagggaagcaaatcttactacttaggaataagcaggaattgtgcctggcccccctgacaaggaggactgtctgctaagttacctcacctgtggaagcagagtggggatggaaatgaggttaggtcatttgaggccctattggcttcagatgtcaagagaaccaaaaatactagtccttaatttcaggtcacagttaccataatttaaaatatattaaggatgtacaaaagcaattcaattgttcactaatgatg

SEQ ID NO: 554478 - DNA, 913 bp, Homo sapiens
ctgctgtccccctccttctgcttggatggaaatgatccttttgtccagtgttttcatgtcgtatgcactgcctgcctcttagtcacttaggagctgtctcagttatcagatcaaaattcaatatcatctatagggtttggtactatccacagtttcgggcatccactggggacctggatctgttttccctgtggataagggaggagtgcttggcctatacaggataattcatcacaactaatgtgtgtttatttcaagtatggaatactgctttttacttaaaaaatgtctrttcatgaaaactggactctactcagtggcttacacctgtaatcccagcactttgtggggccaaggtaggcggattgcctgagttcaggagttggccaccagcctgggcaacacggtgaaaccctgtctctactaaaatgcaaaaaattagcccggcatggtggcatgcgcctgtagtcctagctacctgggaggctgaggcaggggaactgtttgaacccaggaggtggaagttgcagtgagctgagatcgtgccactgcactccagcatggagacagagtgagactctgtctcaaaaaaacaaaaaacaaacaaaaaagtcaatgtcattaaaatgtggagggatggaaatgctcaatgtaagtttcagcaaagaaaatgtattagcagacacacagagagaaacagagacagagagatagagacagaacaaatgtggcaaagtcttcatctttggtgaaaatgagtagaagttacatagttgtttattgtactagttttctggattgattattttctcaatgaataatttggggaaagggcaatgtgatttgccacatcaatagaaaaaaagagaaaattttatttcaatgaatgcagataacatttaatgaaatacag

SEQ ID NO: 554479 - DNA, 1140 bp, Homo sapiens
cacacagctgagacttagaagagggagagataaaggaggggaacactcaccaatgagtctggagaagcaggcgagcaccacatcataaaaggcctttcacatcatgccaaggactgaatcctctctgcacttaggcatcaggtattgactgaggaggctgccaacccatcagactccctaatccttaatagctctgtgcctggaattactgcctacctctaatagagaagtgcacaggttgtcattcctcaagtgtactttcatcagaacaggtagagtttgatccaaaataacacttagaacttagggcatcaatcatattgtttattttaaaaatttaatatttactggtaaaatcttattttataaaataaaaatgctgacttgttaagatttctttttaccacccagtcatcaacttgaagacatctaatgactaccaagcaaactgaactgagaaagtgccataagatgttggaatactgaaagcacttcaaggatcacttttgggctggcactctaaaaatcccctttctccttttgcccaggcatgaagcatttcaaccagatatgcataactgcagcaaagctgacctgtacattgcaagaaaaagatatccatggcatctgaaatgtctgtgttctttctcagcaggaatggccaacttatggtgagcagagtagttctttttcagtgtaatgacgtaagatcaccagagtttacaggaagaaaagaatgggagaaagggttaagtgttatagaactaagggtgccaatgatgacaggaaaggaaccaaaacagcaaaggaaagaatgctgcaggtagctgaactccaatcccccatgagacttaaagccaacaggcatggcccacgtgggtgtaatggtcaggactggctcagagaccagccaaataaaacatcaagatacaaaagtagatcttcctattccagtgaaaggggtctctctgtcaggcaagcgtcacactgattaacctgtactcccaaatcatgccctctaactaygtttttgaggaacattcagtgtccctaaggtcaataaagagtctgtctcctttaaagctactactttttgatatttggagtaaaaatagatttactaaaacttggctaaagtca

SEQ ID NO: 554480 - DNA, 1395 bp, Homo sapiens
ttcttaattaagtatacaacgttgcaatctcaatgtatatatggtctcttgttactttcaatattaatatgcttgtgtaggtcaacaacttaaatatttccaaatagaaatgaagagaaagaagcaaaaattaactaaaataattttacagttattttttcaagtcattaataatcagtttgcataaactatggcaacaatgagaaaaatctagtttaatcaattttgaaaattagagtctctctcgtttctttgtttcgttttgtttttacaataaacttttttctcaaacttgtttgccatgttaaaataactggtgatttggagttcattttgtcgtgaaaatcattgcaccgagaagaaagagtgtctggcttgtcagagtataaataatgcagtaatctggaactgccccccacccctttgcgtctaagatgaaagttgttgaatagaaataaaatcaatgactttgaattcaaactaatggcttcagaaatctttgcaaaatgacctcttttagtgatccaaagggtcttatgaattttcatgggaataatatctagccagtaattcctaaatttgataacaaattatcttacattttagttcctttctcacctactatcacttttgttgaaagatgaccctaaaattaacctaaaaataatctgtcctgcatctcagtgacgtgtatgtgtaccctcacctcatgctcaagatttttctttctctctggacttccttattttctcaaactaacaaactatccttgttgtcattctgacttaagaggtttcctttatgcctttttctcatcttctccaaaaccagtaatgagaaactcatagttatttttccttgtcattgatacctcattttaattcccactgttatcatcttggtactagaactcattgcttcacagcaagacgattttaataatgtctcagctgatctttcttgatcttgtttctggcctctccaatattttctgtacgccactgcttgctttattcagttcatctttctactcaaaatccatccagatttcctcataattaatagaatagctttcagattcctttcgattttctttaagattttccacactcagactccaatctactaatctaacatacggtttggctctgtatccccacccaaatcgcatcttgaattgtaattcccacaggtcaagggagggaggtggttggatttgggggacaatttctcccaagctgttctagtgatagtgagcaagtctcaggagatctggttgcttgataagtgtggggctcttccctctttttgctctctcttctttctcaccygctgccatgtaacatgtgcctgcttccccttctgccatgactgtaagtttcctaagacctcccc

SEQ ID NO: 554481 - DNA, 534 bp, Homo sapiens
acctcctccttttgcagggcgtggacctgcaagctcccctgaacagagtcagtaggaagcccagtggcacccaggcgaagtgagagaatcagctactcaaaatgggaccaggaccgtggagaggtggcatgtccttcagaaggggcagggagggctgacagggagagttgcagagggacacagagagatagaaaaaaagggttatccttgtgtggtttaagggtcaagttcattacatgaggcccagccaccggctgtgagacttggcttcacaatgactccacccagcatgggtgcccataatgcagtttcatgtgtttctcccttaaccrcagagcatggttgaagatgaaacctgtggggttttcaaaaaggccagctctggttttcaacaaagagacttttaataaagccgtaaactgggtgaatcatagtcctcattggcttctcttttcttctcctatgtaattttaatcctcttgtttgtttctgagccgatttcatcatttttatctacttgtctaaactaaccca

SEQ ID NO: 554482 - DNA, 1251 bp, Homo sapiens
aaacatattccctactctccctacacatctccactattcacaaccctcaatcccttcctgaggtgctgagcacagtgagtgcaccatccaaccagaagcaacagctgtggaaagagcctttggaggggctggcatcaatcaaagtccaggcataaacctcaacaacacaggacagcatatctaggctgtaggacacccagattgctgaatctccttggtgactattgaataaatgtccatcaagaagaggaaggggagattatcaccccctagaggatagaccagcagtcactgtttaataccaaaatgaccccctgctccatgtggtcctggccaatggcaccaaaaggtcttaacaggccttgcattatcccttggtcctgtgattctaaaccaagagacccttgatctctgtccaactagaaaacaagaaattcataatatgccaagaatacgactgtctacttcattatttgacattaggagagacagaagattcaattctatgcctgtcttcaacttggcaaacacccattatttgcttatgcttacaacttttcacaaaatcagccccatgtgctggcctgagccctgaccaggggatggtaggtgtattccagtgcacccagctcaggggagggctgaccctcacccacctcctgattgtgttgttgaccatcccatccctaaggtggtactgattaagagcataaactcgggagccagacagcccgggtgagtccccagctgtgccacttatagctgtgtgaccttgcatgatgcctctgtactcgctctgtaaagtagaaaagagagaatacgtttccctagaatcattgtgaggggcaaatgaaatattatatgtgaacttagaacggcactgacttgagtcaggggtctataaatgagggctgtgtctaatataattattaatattgctcctgataatgtttgggaaaggcagcctccttttccaatactttcttaaacccacccagctctcacaaggacaaaagagactaaggaggcaggacccagggtggttctggaggtcaaagctgtgcattagaaggcaaggagccctggattagatgctatcagacctaggaacaagtccccctctgcttagatgagccacaggatctcygtagatctcagcttccacatctgctgtgcactgaattatgttcccccaaaattcatatgttgaagccccaacccccaatgggatggtatttggagacagggcct

SEQ ID NO: 554483 - DNA, 649 bp, Homo sapiens
agccatagctgggaagactgtaacactgggtgtactcaaatggctggggtttggaatcacccggagacaggtctggtgcctaggccaggatcagcagcagytgtagagcagaatgtctgtgtggccggggcttcctcacatcgtggtagcctcagagcagtgcgacttcctacttggtgggcagaactgcagaggagagtgttctggaggacagagcagagctgtgtggccttttgtgaaacagccttggaaatatgtagtttcatttctgccatatttttttggtcaaaggagtcacaggctcagattcaaagtgtgggaacatagacccccgattctcaatggcaggggtgtcacaaaatgtgtgaccctgttttaaaaccaccacaggccccctctccttagtattccactggccctttatcctggaaacctcaggaaatggtttttcctgattttcttctttaattctcctctcccatcccttcctcaatccagttcaaggataagggcctagaactccacctgtgtcctattccctcttgaatccacaggtcgagcaggaaagtgaaggatgaggctggcatgtgtagaagtgccagtggagggcgctgtggctgactagaaggcctctacgttttaaaggaca

SEQ ID NO: 554484 - DNA, 530 bp, Homo sapiens
ctttgctggcctgtatgacacagcccctggtactcctgccccgaggggccagccacaccagcccaaggccaaggtcaagagccttcatgtccctaataacgggtcaaccgcaccactccagttggggcattcagcctacagtgtgctgggcacccccaggccccacttcaggtcctgttggccaagtctctggcttggtgtctgcctgtgagacctgctgtccrcatgcagagtcacctccaaggatagcagatccagggctgcagttctgtggattttcccaacagtttcactttgttctcatcccagcagcctctatctgctgcccaatggtcctcacccagcagccatgaaatccttccctaacctttcccatcaagaccctagaaccaaggcatgaaaaacacattgacttggggtccagtttcacaagtgcccattcagaactggctctcggatccatgaggggtgctcccagtggccaaagctggagcaatctgaggagcaaaataaatgaaggagctggggat

SEQ ID NO: 554485 - DNA, 543 bp, Homo sapiens
agcccttgaggtgagctttttcatgtcaatttgacagaagagcctaaggtcagagaggtggagagaaggaggtggtgggagaaggctggggttgctggggagctccacggaaaagactgggaaggatggtgcttgggatggttctttctctgccagcacacacaggtgaccctgcctcccttccacttgctgacaagaatctggccttcatctcaggctggagctggggagrtgggggcgcctcctaaatcccaggtccctcctcagtagaaagagccctggactggaggcaggaggcctgtgttccaatcctgactggctgtgtgacctgggggagggggactggggcaaggggtcacttgctgtgtctgagccccctagattagaggataagccagatgaccctaagggtacatcctgctcgcatgggctgggctgtggtttctagtctagatcaagacaagcttttgggacattgcaatcctgggctacggtgacctgtgagtttgcccaataccatggcacagacctctcccacagaca

SEQ ID NO: 554486 - DNA, 543 bp, Homo sapiens
agcccttgaggtgagctttttcatgtcaatttgacagaagagcctaaggtcagagaggtggagagaaggaggtggtgggagaaggctggggttgctggggagctccacggaaaagactgggaaggatggtgcttgggatggttctttctctgccagcacacacaggtgaccctgcctcccttccacttgctgacaagaatctggccttcatctcaggctggagctggggaggtgggggcgcctcctaaatcccaggtccctcctcagtagaaagagccctggactggaggcaggaggcctgtgttccaatcctgactggctgtgtgacctgggggagggggactggggcaaggggtcacttgctgtgtctgagccccctagattagaggataagccagatgaccctaagggtacatcctgctcgcatgggctgggctgtggttyctagtctagatcaagacaagcttttgggacattgcaatcctgggctacggtgacctgtgagtttgcccaataccatggcacagacctctcccacagaca

SEQ ID NO: 554487 - DNA, 666 bp, Homo sapiens
tgccacgtgtgcaataaagaagcatgcaacatggtgctagccaggtagagaagccatctacataataaaagagtagggtggggcagccagattcttcgcacgctgtgcaaacagcacacctgatccaaactatctctctatgtaaatatgccctatgtaaatcagataccttctcctcaagctcatctataaaaactcctgcacttcgccatggaccggaagcccctctctctctacaggagaatttctctctttcttttgcctcttaaacctccaagcttaacctcacattttgtgtgtctgcgtccttgatttccttggtgtgaggcaakgaacctcaggtattaccccagacaagcgaagctgcttcactttcattgacggatgcaggtagtttgggctctgggacacaggggctagccacagatcttgcctgaaacaatttgtggtgttttaagaggtgatttcatatttctaacattttcctatgtttcttaattggaatttatctaaaggaagaactatgtcttctcccctctatttatttgctcaatcatttatttatgaaagtatagattcaggaatatttatttaccttattctatgggttatgacacaatgctatcattattgattttgttgctcaaattgcttcacttttggcca

SEQ ID NO: 554488 - DNA, 653 bp, Homo sapiens
gaaaagaaatgttactttacaatgaggagatctagctgtcagcattttaaacagacaagcaaacagcatcattagtgagaggtgaacccagctggacttctgggtcgggtggggacttggagaacttttctgtctagctagagggttgtaaatgcaccaatsagcactctgggtctagctaaaggattgtaaatgcaccaatcagcactctgtacaaacgcaccaattagtgctctgtgtctagctaaaggattgtaaacgcaccaatcagcactctgtaaaaatgcaccaatcaacgccctgtgtctagctaaaggattgtaaatgcaccaatcagcactctgtaacaccaatcagcaggatgtgggcggggccaaacaagggaataaaatgtcagattattttgtaaagttgaataggcacatactctaaatctcagcaattctactcctagttctatacttcataaaattgttccaaaatcattggagaagtattgagcttagtagaaaatgaaaaacagaaagacaataacaaaatacttttgcaggagaatgaatgaatacatttgaaatattcacacaatacaataatatgcagcagagaaagttgatgaactagaactttacatatgacatggatgaatattagaa

SEQ ID NO: 554489 - DNA, 576 bp, Homo sapiens
attatgccttaaaagctataattccctctacttcattttaatgatcttattggaggatgtggagatacattcttgtgttcaatcttccatctttaacaggaagacctgagttgaaactgttttactggggcttgttaggttggtaaatactacagatgtctcatagacctggaaagatataaagaattgctatgtagaccagagagcctccaggttgcctcagattagtatgagaaagacctctttattgatgaaaattctttccacgacctcttggaatatctctgcactcatatttataaaggtattaaatggttgggttgcttatgcaaaaatatttgtgaatttgttcatttgcatgcaatcgaatgactcagacaggcacacatatagccacaatgtaggttaagcctctcaggaacatagcaaaatatggaataactgatgatgcatgagcattagcaaccagaatggacagtggctgragcagggtccaagaggccttctatgctagaccatctcaggagggactaagaggtggcagggtaaggaaaggaggacactttgaggacttag

SEQ ID NO: 554490 - DNA, 1541 bp, Homo sapiens
tgcaaatcattgctttgtactttatggctcaaggataacatgcttgtagctccctgcacacatcattcagtttcacacctctgcacttctgctctgttactgcctctgcctaaaatgtccttcactrtgctaggtgccctcatcacctgcccaacacctatgcaacctttaacacatggttcaaggaaagtttacttgtgactcctcctaccaaattaagctaggtgcctctcctctcagttcccaaagcatttattgcataataaatgttcattacataaataatgttcatatacataaatgaatatgtattcattatatattgacattatttgcttctgtttcactcttcctaattattacttgtaaatgctgtaacctgcttagtcttcatgtctcaggaagttaaccgacagtacttgacatacaaaatacaaagaacaaatgtttactgatcaggactgagctaaatctctatagtggctctggttttacaagagttaacatttgggtcagatgaaggttggattatcataaccacctatctcagattgtagaagacagaagtttatattcgataggtacaatacagttattaggactgtggttccaaacaagtttttctagccatggtacatttagatagggttatggaatccctaacttctttcaatatgaataaaacttcaaaatcagattcagtggagagacaggtggttgttttaactgacttcctatacatagtataattttaccatgaagtaatataactcagacataggttactggaaacatacacaagctacaaaagaacaagattacacaaatagcctttaattcattggaaatagatagcttcattttccttggtttatactctcttcttaacaatcttccatatttacatacctaggctatacattttgcaagattacttaaaattaatgagaaaaacttaaattgtttcaatcaatataatcaaattgttttaatcaaagtgaaactttcttactgctggagactcaactgtgatacattccatatgctgttctagaggggaaaatgttcttttcttctactgacacctggactttcttatactcttgtaatttctagtgcttagcacagtatctgaaccatggtaagattcttgcatttttaatgatttatcttaataatctatttttgttattatggttcctagtcccaatatcaatttcttactatttttattatgaaattatttatcaagtgcaaagtactttctaaatataatataatactcgaaataccatcataagacagcagtcacagattatgctgatttaaaagttgtaagcatagaaacatcattgataatttcaaaaggcttgccaattattcataacactgtatattattgaagtaatctacatagaaaaattatcagttacagaaatgaatacactaatcacaaatgaactataaaaaaactttcattcacctaaggcctttttgtgattgtgttcatttctggaatgccctcccaaaaattaactcca

SEQ ID NO: 554491 - DNA, 1541 bp, Homo sapiens
tgcaaatcattgctttgtactttatggctcaaggataacatgcttgtagctccctgcacacatcattcagtttcacacctctgcacttctgctctgttactgcctctgcctaaaatgtccttcactgtgctaggtgccctcatcacctgcccaacacctatgcaacctttaacacatggttcaaggaaagtttacttgtgactcctcctaccaaattaagctaggtgcctctcctctcagttcccaaagcatttattgcataataaatgttcattacataaataatgttcatatacataaatgaayatgtattcattatatattgacattatttgcttctgtttcactcttcctaattattacttgtaaatgctgtaacctgcttagtcttcatgtctcaggaagttaaccgacagtacttgacatacaaaatacaaagaacaaatgtttactgatcaggactgagctaaatctctatagtggctctggttttacaagagttaacatttgggtcagatgaaggttggattatcataaccacctatctcagattgtagaagacagaagtttatattcgataggtacaatacagttattaggactgtggttccaaacaagtttttctagccatggtacatttagatagggttatggaatccctaacttctttcaatatgaataaaacttcaaaatcagattcagtggagagacaggtggttgttttaactgacttcctatacatagtataattttaccatgaagtaatataactcagacataggttactggaaacatacacaagctacaaaagaacaagattacacaaatagcctttaattcattggaaatagatagcttcattttccttggtttatactctcttcttaacaatcttccatatttacatacctaggctatacattttgcaagattacttaaaattaatgagaaaaacttaaattgtttcaatcaatataatcaaattgttttaatcaaagtgaaactttcttactgctggagactcaactgtgatacattccatatgctgttctagaggggaaaatgttcttttcttctactgacacctggactttcttatactcttgtaatttctagtgcttagcacagtatctgaaccatggtaagattcttgcatttttaatgatttatcttaataatctatttttgttattatggttcctagtcccaatatcaatttcttactatttttattatgaaattatttatcaagtgcaaagtactttctaaatataatataatactcgaaataccatcataagacagcagtcacagattatgctgatttaaaagttgtaagcatagaaacatcattgataatttcaaaaggcttgccaattattcataacactgtatattattgaagtaatctacatagaaaaattatcagttacagaaatgaatacactaatcacaaatgaactataaaaaaactttcattcacctaaggcctttttgtgattgtgttcatttctggaatgccctcccaaaaattaactcca

SEQ ID NO: 554492 - DNA, 525 bp, Homo sapiens
tatctttttagggccactatccaactcattacagaggtcattttgttgttgttgtttttgtttgtttgtttatttaagatgtgatggacttaagctaggctttttgtttttgttgtgttttttgtttttgkttttttgagacagagtctcgctgtgttgcccatgcggaagtgcagtggcatgatctcagctcattgcaacatccgcctcccaagttcaagcgattctcctgcctcagcctcccaagtagctgggactacaggcacccaccaccacccccagctaatttttgtatttttagtagagacggggtttcaccatgttggccaggatggtctcaatctcctgacctcgtgatccgcccacctcggcctcccagagtgctgggattacaggcgtgagccactgcgcccagccttaagctaggttttatgtgagaaaggggataattggcagatcaagacctctcaggaagcatgagccaacaaggtcagtagagaaagacattctagcaggggaggtatc

SEQ ID NO: 554493 - DNA, 525 bp, Homo sapiens
tatctttttagggccactatccaactcattacagaggtcattttgttgttgttgtttttgtttgtttgtttatttaagatgtgatggacttaagctaggctttttgtttttgttgtgttttttgtttttgtttttttgagacagagtctcgctgtgttgcccatgcggaagtgcagtggcatgatctcagctcattgcaacatccgcctcccaagttcaagcgattctcytgcctcagcctcccaagtagctgggactacaggcacccaccaccacccccagctaatttttgtatttttagtagagacggggtttcaccatgttggccaggatggtctcaatctcctgacctcgtgatccgcccacctcggcctcccagagtgctgggattacaggcgtgagccactgcgcccagccttaagctaggttttatgtgagaaaggggataattggcagatcaagacctctcaggaagcatgagccaacaaggtcagtagagaaagacattctagcaggggaggtatc

SEQ ID NO: 554494 - DNA, 1114 bp, Homo sapiens
gacttttctgaacatactggagaggatgcgggtgagataatcttgttccaaatatgtatacagttatggatcaaagctaagtctttcaaatgcaacaatatggattcagggttcccatggagatgttctctgatttttcttttgcattccaataattagtttatattgaatccaaaccttaccaggatttacgactttttaaataaattatgctcacagaaacctataccttctcattagcaaggttttgaattctgctttatattagattcatggtatctgtaatccatttattttctatcaagaatatttatactgtttccattgtatttcctattagagctttagtggttttctaaattcagcatgagcatgtgtgccaaggacatgctttttattcagaaaatgcctaaaaaggcagacgaacagacatctatgaaaaaaaatctaaaaacatctcacaatttcaccatatgtcaagggcattaaagtgagaaatacagtagaggaagaaaatccatttgatgatacaaagaatatgtaatggaagactgagtttgactaatacagtgccaggatyttgaggtgtccaggaagaatttgagataatttattaaacagtaaaacttttgttctgagaaaatttctacattagagatacatatagatcagtattaaaatcaataaatacatagaatatgtttctcttctcttattcagatatcgacatataacagaagaaatatcaatttgatatctaagaaatatctaatatattttttctaattaagaacaaataaatgaaaaaaacaagtgaaacctttaatttgcatataaataagggaattaacaccagcatctaaggttatgtcaatctgtagaagattaattctttctcaccagaatttgtttccatgacatattcaagccatttatcaggcccagatattccactttccagtataagccttcaaagtacaaaaacatgaactgtaccaccccacttacgttgcatggatgttctcttgcttacttttattcaagtcccttcctaaacttgttgagcagtatttccacatacttactgatcataacaatcacgaaaaatagttgt

SEQ ID NO: 554495 - DNA, 1114 bp, Homo sapiens
gacttttctgaacatactggagaggatgcgggtgagataatcttgttccaaatatgtatacagttatggatcaaagctaagtctttcaaatgcaacaatatggattcagggttcccatggagatgttctctgatttttcttttgcattccaataattagtttatattgaatccaaaccttaccaggatttacgactttttaaataaattatgctcacagaaacctataccttctcattagcaaggttttgaattctgctttatattagattcatggtatctgtaatccatttattttctatcaagaatatttatactgtttccattgtatttcctattagagctttagtggttttctaaattcagcatgagcatgtgtgccaaggacatgctttttattcagaaaatgcctaaaaaggcagacgaacagacatctatgaaaaaaaatctaaaaacatctcacaatttcaccatatgtcaagggcattaaagtgagaaatacagtagaggaagaaaatccatttgatgatacaaagaatatgtaatggaagactgagtttgactaatacagtgccaggattttgaggtgtccaggaagaatttgagataatttattaaacagtaaaacttttgttctgagaaaatttctacattagagatacatatagatcagtattaaaatcaataaatacatagaatatgtttctcttctctwattcagatatcgacatataacagaagaaatatcaatttgatatctaagaaatatctaatatattttttctaattaagaacaaataaatgaaaaaaacaagtgaaacctttaatttgcatataaataagggaattaacaccagcatctaaggttatgtcaatctgtagaagattaattctttctcaccagaatttgtttccatgacatattcaagccatttatcaggcccagatattccactttccagtataagccttcaaagtacaaaaacatgaactgtaccaccccacttacgttgcatggatgttctcttgcttacttttattcaagtcccttcctaaacttgttgagcagtatttccacatacttactgatcataacaatcacgaaaaatagttgt

SEQ ID NO: 554496 - DNA, 1114 bp, Homo sapiens
gacttttctgaacatactggagaggatgcgggtgagataatcttgttccaaatatgtatacagttatggatcaaagctaagtctttcaaatgcaacaatatggattcagggttcccatggagatgttctctgatttttcttttgcattccaataattagtttatattgaatccaaaccttaccaggatttacgactttttaaataaattatgctcacagaaacctataccttctcattagcaaggttttgaattctgctttatattagattcatggtatctgtaatccatttattttctatcaagaatatttatactgtttccattgtatttcctattagagctttagtggttttctaaattcagcatgagcatgtgtgccaaggacatgctttttattcagaaaatgcctaaaaaggcagacgaacagacatctatgaaaaaaaatctaaaaacatctcacaatttcaccatatgtcaagggcattaaagtgagaaatacagtagaggaagaaaatccatttgatgatacaaagaatatgtaatggaagactgagtttgactaatacagtgccaggattttgaggtgtccaggaagaatttgagataatttattaaacagtaaaacttttgttctgagaaaatttctacattagagatacatatagatcagtattaaaatcaataaatacatagaatatgtttctcttctcttattcagatatcgacatataacagaagaaatatcaatttgatatctaagaaatatctaatatattttttctaattaagaacaaataaatgaaaaaaacaagtgaaacctttaatttgcatataaataagggaattaacaccagcatctaaggttatgtcaatctgtagaagattaattctttctcaccagaatttgtttccatgacatattcaagccatttatcaggcccagatattccactttccagtataagccttcaaagtacaaaaacatgaactgtaccaycccacttacgttgcatggatgttctcttgcttacttttattcaagtcccttcctaaacttgttgagcagtatttccacatacttactgatcataacaatcacgaaaaatagttgt

SEQ ID NO: 554497 - DNA, 1723 bp, Homo sapiens
tcgatagatagatagaagatagacagacagacagacagataacatacatacatacatacatacatataatttttgggctgcaaaatattatgttctttcttaagaggtagcatggaattaatattttcttaaacaaatttacaatgtgcatccccagtcttcaacactctctgagattttcatctttcaggtatagccaacaacatgttaacgtccttattttccattgttccatttacttttctatttctggtactgtaatgatgaaatatatatggaattttagccagaaagccctgttaaatatttttcttaggtttaagaaagcacaaacttatcttaataagtcatgaacaagacgcctaagacaattttggtaacatgtcccagtggccactgttttgttcaagtattctgtgggtttgtagatcattgccttctggggaaattccataattgttcacttttagctttcctgaataatcagtctgagcagattctaggctattgttgataattctgaaatttccgtcctccattccctctaaggatgggtatgtattcatgctatgaatttgccagcaccttgcatttaaaacccaacaggttttatgaatcttgtgccattttagaaaaatgatatttttattatgttttctcacctttttttcttataacaatagaatatgcatcaattgtacaatggcctccagtaggtcccttctcctttcaagggtaccctattgcgatgttacaattataatctcatttctaaattaaccccttctctaccacttataagaacaaagttggacaggctatttatttatcttcattttgatttggacatgattcctgaacatattttactaaattctatctttttatatacttagttagagatataaagttactgttttatttttagtgatccaaagcataatattaaaatcaaaactatacaccttcagaattatctaaacaacttttaaaatagtgtatatctagtgtatatcttttcttccaatattaaataatgcataacatttgttgagcatttattatgcatcaatcttcaaaacatgtttcataagttaactctcccaataattttaagaggttcaactttttcgaagactctttttaaatcaacaattgtgactataatttttctaattgagcttggtagcacaatgggacaaactaaaaagtatcacttcttaaaacatttggcaaatacagaatggattgtaacaggcatacaatgtctgtgagatataatcacatgacaattagaaaggaagttacacaagygaaaaataagagaaaaggaaaaacaaatctagggaataacctttcacttgtatgttgtcgaaacaaaattaattacatgaatttaataatacagatatttggtatctttcattaaatatgttagctaactaaaggttaacctgctccacaaagaaatacaacaatatcttcacctaaagaaacaaaaatacttagtttatatatttgttatttgattaatgtactgtttttcttattagcagtattccttaaaaaattctaaatgtaagttattgtgcacattggaaaaatcagcccgtctaagtaaggggaaaaaaataagagctgtgcgccctagaaaactggctgtatctgctgccctataagacatctgtaacatgtatagcatccttgtcagtgcaaaaggtca

SEQ ID NO: 554498 - DNA, 1723 bp, Homo sapiens
tcgatagatagatagaagatagacagacagacagacagataacatacatacatacatacatacatataatttttgggctgcaaaatattatgttctttcttaagaggtagcatggaattaatattttcttaaacaaatttacaatgtgcatccccagtcttcaacactctctgagattttcatctttcaggtatagccaacaacatgttaacgtccttattttccattgttccatttacttttctatttctggtactgtaatgatgaaatatatatggaattttagccagaaagccctgttaaatatttttcttaggtttaagaaagcacaaacttatcttaataagtcatgaacaagacgcctaagacaattttggtaacatgtcccagtggccactgttttgttcaagtattctgtgggtttgtagatcattgccttctggggaaattccataattgttcacttttagctttcctgaataatcagtctgagcagattctaggctattgttgataattctgaaatttccgtcctccattccctctaaggatgggtatgtattcatgctatgaatttgccagcaccttgcatttaaaacccaacaggttttatgaatcttgtgccattttagaaaaatgatatttttattatgttttctcacctttttttcttataacaatagaatatgcatcaattgtacaatggcctccagtaggtcccttctcctttcaagggtaccctattgcgatgttacaattataatctcatttctaaattaaccccttctctaccacttataagaacaaagttggacaggctatttatttatcttcattttgatttggacatgattcctgaacatattttactaaattctatctttttatatacttagttagagatataaagttactgttttatttttagtgatccaaagcataatattaaaatcaaaactatacaccttcagaattatctaaacaacttttaaaatagtgtatatctagtgtatatcttttcttccaatattaaataatgcataacatttgttgagcatttattatgcatcaatcttcaaaacatgtttcataagttaactctcccaataattttaagaggttcaactttttcgaagactctttttaaatcaacaattgtgactataatttttctaattgagcttggtagcacaatgggacaaactaaaaagtatcacttcttaaaacatttggcaaatacagaatggattgtaacaggcatacaatgtctgtgagatataatcacatgacaattagaaaggaagttacacaagcgaaaaataagagaaaaggaaaaacaaatctagggaataacctttcacttgtatgttgtcgaaacaaaattaattacatgaatttaatwatacagatatttggtatctttcattaaatatgttagctaactaaaggttaacctgctccacaaagaaatacaacaatatcttcacctaaagaaacaaaaatacttagtttatatatttgttatttgattaatgtactgtttttcttattagcagtattccttaaaaaattctaaatgtaagttattgtgcacattggaaaaatcagcccgtctaagtaaggggaaaaaaataagagctgtgcgccctagaaaactggctgtatctgctgccctataagacatctgtaacatgtatagcatccttgtcagtgcaaaaggtca

SEQ ID NO: 554499 - DNA, 643 bp, Homo sapiens
tcccttcagttctgtactgcccatctccaccacctaaaggtataaatctatgggttgtcrtctttgtaccttacatgtcggttctgacatttggatgcatattagaatcaactggagggttttaagaaacactgatgtctagattccacccccagggactctaactcactgattttggctgagggtagttagtcattgagattttaaagagtttttcagataattctaacaggcagcagagtttgacagccattgctataaacagtgtttctcaaactttaatgtacttatgagtcatttagggaatcttgttaaaatgcagattttttattaaatttaaaatgcaaaataaaaattcagattcgtaatacatttaaaagttaaaatgcaggcctaggagtctgcatttctggccaactcccagatgatgtcagtgctgctggtccaaggaccacactttgagtaataaggctagatacatctgttctcacttagccttgtagaacagtctataaaatttgtaatggtgtgtcaggtgggatcttttaatggaataagctagagggaaggagggaggaatatagtcatatggacttgcacttccactgtcaaaagaacacattcaacagttggaatttgctat

SEQ ID NO: 554500 - DNA, 627 bp, Homo sapiens
tatatatatatatayacatatatatgcctaatacatagtacagtcacactataatcgccatttaaaacaaacattcaggccaggcgcggtagctcacgcctgtaatcctaacattttgggatgccaaggcgggtggatcactttaggtcaggagtttgagaccagcctgaccaacatggtgaaaccctatcactgctgaaaacacaaaattaccaggggtggtgccatacacctgaaatcccagtacttgggaggctgaggcaggacaatcacttgaattcaggagatggacgatgcagtgagccgagatcgcaccactgcactccagctggggcaacaagagcaaaacttcgtctcaaaaaaaaccataaaaaaacaaaaaataaaacattcatagaatgtgtgtgcatactcaaccctatttactgatggaatgaacactaaaaacattttaggtggccaggtatggtggctcatgcctctactcccaataccgggaagctgaggcaggaggatcgctgcagcccagcagttcaagaccagcctgagaaacacagtgaaaccccatgtctacaaaactttttaaacaattagccaggcatggcaatacatgcctgtagtcacagc

SEQ ID NO: 554501 - DNA, 757 bp, Homo sapiens
aacccatcataactcttttgtccatgcttttatgaatgtaccgttagaaatttcaagaatgggccgggcactgtgactcacgcttgtaatcctagcactttgggagggagaggagggtggatcacaaggtcaggagttcgagaccagcctgacaaatatggtgaaacaccatctctactaaaaatacaaaaattagctgggcatggtggcgggcgcctgtagtcccagctactcgggaggctgaggcaggagaattgcttgaacctgggaggtagaggttgcagtgagccgagatygcaactctgcactcaagcgtggctgacagagtgagacttggtctcaaaaaaaaaaaaagaaatttcaagaatgctgacaacactcaagtatcagtagtctttcctggcaacagtttcatatgtacaatattctaatttactaactaagactgcaatactgaccatataaaccatgatggccaattgcaccaatccacataaatctattccaccaaagagagaccatattgaaggtgagctgtattaaaaataaaaacagaagggaaaaaataactttccgctcttcctcctaggaaaatattcaaagactttttcatgtgagaagcctttcagtttatatcatttgtaataactcctttcatttattccatcacaatccatgaaaaactgtaggatgattaaatgaaaaaaaaaaaaggtctttccacttggtattggtactattgattcacagtgtcctt

SEQ ID NO: 554502 - DNA, 528 bp, Homo sapiens
tttctggatactcttttcaataattctcccagggttgcyagagagaggcagtagtggttcagtggtagggttctcgcctcacacgcgggagacccgggttcaattcccggtcaaagcaaggggtttttttgctcttcactatggctctttacccttctgccctgcagaattacactgcataacctaatagtgcatttaagggcttggccaccacaagctaaactgacaacaacgctgaccaaagtagcagcaaaagaaattcaggagactaacccgggacccacgcagttgttggactcaacaaaccgctaagcaaagtggcaagcacgtagtgtttctggtgagtcactgcagttttgatattggtacctgttactttcatctgttctctgggcggattcctgcaaacccaagaaccatcagtttcctgattcgtgtgctggaccttgggcttaccgctgagccactacggagaggaacaagaaatgaagctcccggaaggagagaagctgcgggcggggcaatcac

SEQ ID NO: 554503 - DNA, 528 bp, Homo sapiens
tttctggatactcttttcaataattctcccagggttgccagagagaggcastagtggttcagtggtagggttctcgcctcacacgcgggagacccgggttcaattcccggtcaaagcaaggggtttttttgctcttcactatggctctttacccttctgccctgcagaattacactgcataacctaatagtgcatttaagggcttggccaccacaagctaaactgacaacaacgctgaccaaagtagcagcaaaagaaattcaggagactaacccgggacccacgcagttgttggactcaacaaaccgctaagcaaagtggcaagcacgtagtgtttctggtgagtcactgcagttttgatattggtacctgttactttcatctgttctctgggcggattcctgcaaacccaagaaccatcagtttcctgattcgtgtgctggaccttgggcttaccgctgagccactacggagaggaacaagaaatgaagctcccggaaggagagaagctgcgggcggggcaatcac

SEQ ID NO: 554504 - DNA, 528 bp, Homo sapiens
tttctggatactcttttcaataattctcccagggttgccagagagaggcagtrgtggttcagtggtagggttctcgcctcacacgcgggagacccgggttcaattcccggtcaaagcaaggggtttttttgctcttcactatggctctttacccttctgccctgcagaattacactgcataacctaatagtgcatttaagggcttggccaccacaagctaaactgacaacaacgctgaccaaagtagcagcaaaagaaattcaggagactaacccgggacccacgcagttgttggactcaacaaaccgctaagcaaagtggcaagcacgtagtgtttctggtgagtcactgcagttttgatattggtacctgttactttcatctgttctctgggcggattcctgcaaacccaagaaccatcagtttcctgattcgtgtgctggaccttgggcttaccgctgagccactacggagaggaacaagaaatgaagctcccggaaggagagaagctgcgggcggggcaatcac

SEQ ID NO: 554505 - DNA, 528 bp, Homo sapiens
tttctggatactcttttcaataattctcccagggttgccagagagaggcagtagtggttcagtggkagggttctcgcctcacacgcgggagacccgggttcaattcccggtcaaagcaaggggtttttttgctcttcactatggctctttacccttctgccctgcagaattacactgcataacctaatagtgcatttaagggcttggccaccacaagctaaactgacaacaacgctgaccaaagtagcagcaaaagaaattcaggagactaacccgggacccacgcagttgttggactcaacaaaccgctaagcaaagtggcaagcacgtagtgtttctggtgagtcactgcagttttgatattggtacctgttactttcatctgttctctgggcggattcctgcaaacccaagaaccatcagtttcctgattcgtgtgctggaccttgggcttaccgctgagccactacggagaggaacaagaaatgaagctcccggaaggagagaagctgcgggcggggcaatcac

SEQ ID NO: 554506 - DNA, 684 bp, Homo sapiens
ctttcattgaaagctcatttattgactgtatggctgtggatcagtttcaggtctcttaactcagtctgtttatctatttgtccctcctgatgccttgtctgtaatagcttatagtaagccttgaagtcagatagtacaagtccttgttcttttgcacacattgcaataactgggtctggatttagtcccgttagtctgagtgggactaatgccactataaaagggaccccagggagctctctctgccccctgaggatacaatgagaaggtggcagtctacaaccagaaaaaagtcyctcatcataaccctaccatgttggcaccttgatctcggacttccaacctccagaactgtgagaaataaatttctgtcgtgaattagccacccagtttatggtatatagttatggaagcccgaactaagacagagatggaatcccatggagggtctctaatttgctgagctggtcatcaggtgggatgttgcaagttagaaacaagaagagctgacattttgtgcatatgaaagaagatagtggacaggcccattgtcgtcggctttgtccgccttggcgaactggagacggaagctagattcaccttcgacagccacgggaggaccgggaggacctccagaggaggttaggtcgacctcatggtaactttagatcctgaaaactcaca

SEQ ID NO: 554507 - DNA, 876 bp, Homo sapiens
cttgttattgctgaattcctgaattcacaatgcaggttttcaatgtgctactatctcctcatgtctgactgggagtgtgcagtaattgtggtacttactccaatacctagtaaggagtagagttggaagattggagaattatacatcactggctctctgagactcttaaatctcaygtgaacagcctgggttttaaacttaagtctagccagccactctatctcataaagacctcttcagattcaaaagcctattctattatttcatccacagaaagtgaagatccatattctttctctaaaagaatctcagatccttggattttattttttgtttgttttaagtttgttagttaatttgtttgttttgagatggagtctcactctgtctcccaggctggagtgcagtggcacgatctcagctcactgtaacttctgcctcctgggttcaagcgattctcctgcctcagcctcctgagtagatgggattacagtcatgtaccaccatgcccagataatttttgcatttttagtagagacggcattgtgccatcttggctagactagcctcaaactcctgacctacagtgatctgcccaccctggcctccccaagtgctgggattacaggcttgagccaccacgccaggcctcagagcctttgttttagaggctcaggctcacggaacacagtcacctccttctagattggaattctttaaagatcagcgtaccttgaaaatagcaaaaacaaaaagaaacaaacgacaaacaaaaaaatcagcaatgactctagaatagccttaaggagtttaaagaccttgtgtattgctagagacttagattattagtggaagaaatgttcaataaaaattggt

SEQ ID NO: 554508 - DNA, 1391 bp, Homo sapiens
tccctgactcgtaaaggagagttaacccccacccatgttttcagagccccttctattacatctccgtctcagctgtgtcatcagtttcccacaggtgtgttcgacatgcacccatgagatgcaggtgggcccaggttctgccttctctgtcacatgacaggcagatagcacagtgtctgctgtagggttggcactctcatgatttcctgcaaaaccttggtcagcacattgcctgtgctagtcccacacaaaattggctcaggtccccaaggacttttcagcttacttgaagggacartggaattaatctacaaattacaaaaggttttggttatctcttgctgtgcggtgaacctctcagggttctgcaggttgactgggctcagtgggcggttcttctgcaggtcttgctcagagtatctcatgtggctgcaatcataaggtgcctggtgctggatttatctgcaggctggacttggatgctggcatgagggagcctcagtggtcactctttgtggtccttccagtagaagatccgactgtgtatgtggtggttcagaacttctgaaagtagcatcttaagaaggtgggagaaggcacaagacctctcagtggtgaggcctgaacttggtcccgtgtcattctgccaggttcctctggttcccaggactcacaggtccagcccagattcaatgtgggaggggtcacagcaggaggcatgtaccttggagccctctttggaaacaagctgctgcccagtgtgatgagcagaatctttggagggtgcatagactgtgctgggaaaagagaggctcaggattgggacagggaacatttctggaagatcatgaaactagagcagattttttaaaataaataaaatgtagccaagtaaagaaaatggaatgtttgacaaggcaagacaaacgcctcctaatacacttggaatagaagaataatccatcaacatgaaaagttatgtcattttaaagcccagccagcaacattttatggttgaaatcctagaaatgccccctttctgtgggtaacttgcctgggagcctgctacaccacgatcctgggggttttgtcctggaggttccagctgaggaaacaggacagaaaaaggaaagcagcaaacatttgagaagagaggaggaaacatcgttattttcagattgagattgcctacctagaaaacccaagagagtcaactgaaaagctgttagaataatcacagagtagaggtggctagtcacaaaatgaatgttcaaagatggatcatgttattatacagcaatggtagttagaaatcataatcgggaaagtcttcctctcagagctacagctgcaaacgtttacctaaaaattaatgtgacaagagctgcata

SEQ ID NO: 554509 - DNA, 1391 bp, Homo sapiens
tccctgactcgtaaaggagagttaacccccacccatgttttcagagccccttctattacatctccgtctcagctgtgtcatcagtttcccacaggtgtgttcgacatgcacccatgagatgcaggtgggcccaggttctgccttctctgtcacatgacaggcagatagcacagtgtctgctgtagggttggcactctcatgatttcctgcaaaaccttggtcagcacattgcctgtgctagtcccacacaaaattggctcaggtccccaaggacttttcagcttacttgaagggacaawggaattaatctacaaattacaaaaggttttggttatctcttgctgtgcggtgaacctctcagggttctgcaggttgactgggctcagtgggcggttcttctgcaggtcttgctcagagtatctcatgtggctgcaatcataaggtgcctggtgctggatttatctgcaggctggacttggatgctggcatgagggagcctcagtggtcactctttgtggtccttccagtagaagatccgactgtgtatgtggtggttcagaacttctgaaagtagcatcttaagaaggtgggagaaggcacaagacctctcagtggtgaggcctgaacttggtcccgtgtcattctgccaggttcctctggttcccaggactcacaggtccagcccagattcaatgtgggaggggtcacagcaggaggcatgtaccttggagccctctttggaaacaagctgctgcccagtgtgatgagcagaatctttggagggtgcatagactgtgctgggaaaagagaggctcaggattgggacagggaacatttctggaagatcatgaaactagagcagattttttaaaataaataaaatgtagccaagtaaagaaaatggaatgtttgacaaggcaagacaaacgcctcctaatacacttggaatagaagaataatccatcaacatgaaaagttatgtcattttaaagcccagccagcaacattttatggttgaaatcctagaaatgccccctttctgtgggtaacttgcctgggagcctgctacaccacgatcctgggggttttgtcctggaggttccagctgaggaaacaggacagaaaaaggaaagcagcaaacatttgagaagagaggaggaaacatcgttattttcagattgagattgcctacctagaaaacccaagagagtcaactgaaaagctgttagaataatcacagagtagaggtggctagtcacaaaatgaatgttcaaagatggatcatgttattatacagcaatggtagttagaaatcataatcgggaaagtcttcctctcagagctacagctgcaaacgtttacctaaaaattaatgtgacaagagctgcata

SEQ ID NO: 554510 - DNA, 1244 bp, Homo sapiens
tttcgtcatgttgcccaggctggtctcaaactcctgaactcaaccgatccgcccgtcttggcctcccagcatgctgggattacaggcatgagccacggcgcctggcctagcataaatccttaaaagcatttaatgagaaaataatttggggtctaaatacacattyttccccccagacaaacgagataccgaaacagatgtaacaaccaaatataaccttaaaacctaaaaatctggagaagtgagtcaagttcagctcattaagctgacacctattaaagcgccataagaaaaacagcctgaaacaccatcaaaacagataagaaaatcattgtttataatagttatcgaaggtcgaggtttttttggtttaattttgcatttacttaaaactctgtgtttgatgccaacagggttcaagttgcacaggaaggtgcttcggctaaacacggatagtcttccttgatctccactgtctgctgtgtgggttccgccagcaaacctcccagcgagtggtcaccttcctatggagtcattaaacctctgaatgtcagctggtgggattagccagcagcttccacacctgagcccccgtggcagggacagaggcatttggatcaagatcactaatgaatacagaattcatatgccgcttgtcagggctcctgagctcagagtcgcacagatgcaacctaaataagacggaggacagaacaatcgttgacaaagattaaaaagttttggcagttgggaaaaaaagagcacctcattattcaaatatgatagtcttgcttattttttttatttttgttcaagttattcatgattcacctcaaatggacaaatgccattcaccaatatttaaagacttcttggtctcattactaaatctgaagagggctgtgctgtctgtacatcagctatatggagaaaacagctctcctgtaaaacagctctcttgtaaataatatttgaaaattttaagggaatataacaatcacaagctatttagggtggagggcagtttaaaaatgaaaaaaaaaatctagaattaaaagaaaaaaatgaccttccacagccaagtgattttattacatttactaacatctctatctctgacttccttaaacttttctgttcctgggttccctccaatcacagagctgccaaagagctttacacaccttgtctgacacttgcttggctttctgccgtcttcacaagacctcatcagagaaaagaaa

SEQ ID NO: 554511 - DNA, 514 bp, Homo sapiens
taggtttttttttctttttttaagagataggatcttgctrtgttgcccaggctgatctccaattcctggcttcaagcaatcctcctgtctcagcctcctgtgcagctgggactataggtatatgccactgctcccagcttgacttaatggaatgtgtttttattcacccattggaaaagcctttgctacatattaatacaaacttctcattaataaaccctccttttttttttttttgagacggagtctcgctctgtcgctcaggtacgatctcgactcactgtaacctcctccgcctggggtcaagcaattctcccgtctcagcctcctgagtacctgggattacaggtgcacgccaccatgcccagccactaataaatccttctttaagtaagaaaataatataacatgagcataactttgcatgaattttaatgtcctggaggcttgttgctttgtataaagtgcaggtcagtaaaaattaaaatgaggtaatgtggtataatacgattaa

SEQ ID NO: 554512 - DNA, 514 bp, Homo sapiens
taggtttttttttctttttttaagagataggatcttgctgtgttgcccaggctgatctccaattcctggcttcaagcaatcctcctgtctcagcctcctgtgcagctgggactataggtatatgccactgctcccagcttgacttaatggaatgtgtttttattcacccattggaaaagcctttgctacatattaatacaaacttctyattaataaaccctccttttttttttttttgagacggagtctcgctctgtcgctcaggtacgatctcgactcactgtaacctcctccgcctggggtcaagcaattctcccgtctcagcctcctgagtacctgggattacaggtgcacgccaccatgcccagccactaataaatccttctttaagtaagaaaataatataacatgagcataactttgcatgaattttaatgtcctggaggcttgttgctttgtataaagtgcaggtcagtaaaaattaaaatgaggtaatgtggtataatacgattaa

SEQ ID NO: 554513 - DNA, 514 bp, Homo sapiens
taggtttttttttctttttttaagagataggatcttgctgtgttgcccaggctgatctccaattcctggcttcaagcaatcctcctgtctcagcctcctgtgcagctgggactataggtatatgccactgctcccagcttgacttaatggaatgtgtttttattcacccattggaaaagcctttgctacatattaatacaaacttctcattaataaaccctccttttttttttttttgagacggagtctcgctctgtygctcaggtacgatctcgactcactgtaacctcctccgcctggggtcaagcaattctcccgtctcagcctcctgagtacctgggattacaggtgcacgccaccatgcccagccactaataaatccttctttaagtaagaaaataatataacatgagcataactttgcatgaattttaatgtcctggaggcttgttgctttgtataaagtgcaggtcagtaaaaattaaaatgaggtaatgtggtataatacgattaa

SEQ ID NO: 554514 - DNA, 514 bp, Homo sapiens
taggtttttttttctttttttaagagataggatcttgctgtgttgcccaggctgatctccaattcctggcttcaagcaatcctcctgtctcagcctcctgtgcagctgggactataggtatatgccactgctcccagcttgacttaatggaatgtgtttttattcacccattggaaaagcctttgctacatattaatacaaacttctcattaataaaccctccttttttttttttttgagacggagtctcgctctgtcgctcaggtacgatctcgactcactgtaacctcctccgccyggggtcaagcaattctcccgtctcagcctcctgagtacctgggattacaggtgcacgccaccatgcccagccactaataaatccttctttaagtaagaaaataatataacatgagcataactttgcatgaattttaatgtcctggaggcttgttgctttgtataaagtgcaggtcagtaaaaattaaaatgaggtaatgtggtataatacgattaa

SEQ ID NO: 554515 - DNA, 1532 bp, Homo sapiens
cctccctttgtgaatattcatagatcctcccataatctgttgaatatgtatgcttagctacgcctctcagcataaattcatgttccctttgccccttcttggaagtgcttgtttttcagttatggccagaggctctgcttcctgcctacaggtagtgggaccctctttagaaatagtcctcctttctaaatttatagatttgtggctgggtgtgctggcacacacctgtaatccyggtgctttgggaggccgaggtgagagaatcgcttgaggccaggagtttgagaccagcctgggaaacatagcgagacccataaataaaataaaataattagccgagtatggtggcatgtgcctgtagtcccagctactagggaggctgaggtggaacgatcacttgagcccagaagcttgaggctgcagtgagctatgattgtgccactgcactccagcctgggtgacagagcgaggccctgtctctaaaaataataatactaaataccatatttttatataaatatatttaattaaatataaatatatttgtgactttttcagttcaatagaagtaaaccaaaagatgacttttgccaggtgccgtggctcatgcctgttaacccagcactttaggaggctgaggcgggtggatcacttgagatcaggagtttgagaccagcctggccaacatggtgaaaccccatttctactaaaaatacaaaacttagccctgtattgtggtacatgtctgtaatcccagctactcaggaggttgaggcgggagaatcgcttgaacctgggaggcagaggttgcagtgagctgagatcacacaactgcactccagcctgggtgacagagctaggcttcaactcaaaaaaaaaaaaaaagaagaagaagaagtaaaccaaacgcagctgctagaatattggcacatttgcttctaacaaaacattcatgcaaagtactctggtcaaactggggcttcactaatcctataaaaacaggtttcatgactgtttttgtagcttgctaatcaatgtctgcatgtgtgggcagagtttagcctgcaacttggtttccctgcagttacaggctctagtagaggctaggggagagaaggcccttaactcccccacctctgatcaggctgtggatgctcaagttggtaggtcagtttgtaagagttcccaagcagcccggccctctagggctgcctgtgcaagcactttaaagccctgcccaggcactactgcattttttgctgctaacagcaattactgaatctacttgaaaggcattcaatccttccctgctccattgctccttttttgttttttcaattccctcactgtccttatagtcaggcttgataccttctctaagacttggttgcctcctccattatgtggagtgccttctccattcagtgctcccgctgcaatttccaatactatttctatcgctttagtctgatggctgattgtcctcaacaattccatgattgaatccaaaatgcacgcttcgtgacattttc

SEQ ID NO: 554516 - DNA, 565 bp, Homo sapiens
tgttcttgctgcagtgtgttgggatcaggtataaaaaatcttactcgaaaatgcagggtacaggggaaacctcctacaacatttttcaaaaacaaattaaattttccctttgacaaagtcaatgtatgtaagttgcttctcttccataagtgatgcattttttcactcaaccatagctttttccattataaaagggctaatttcaaacatggagtacataagttagttgtttcagaaatctccaagtcttcaaaaagtaaaacatttatgcaacatcagcacagactgagttatcatctacttcctagcacacgtttatcttagggctgtgtttaaacattgcactccgtcatctgtattaggaatttaaaaaatccttaaatcggcattattatgcaaaatatacaaagaaataatagcctgcgtttgtgtagccatttataagtttcaagcattttcatgtacattcctgcatttcaacaccaccatgactatgagtgggctacgctgctactggtagccccmttttacagataagccaattagaggtgacttgccttaggtc

SEQ ID NO: 554517 - DNA, 2225 bp, Homo sapiens
tacttccctccaccgacaaatattttgctaaattaaaaggatcactggaagtattatgacccccctcgtcacaggtggtcagaaccaccacagttttgtgaatgaatcagagaaggcaacatttcatcaacgaaaactcatttaggtttcaaaaggcaggatgtagtacagaatgcattattctgactgtcttctggaatagaaaaattggaaaggatgaaagaaggaagttagctccagctccactgttaccttggcaaccgtggcccaatcacaggggcagaaattaattttgtgccgtaacataacgtggcagaggagtggggagcgtggagtggggagagaatgacggctgggtttaaatgctcagaaggctagtggggagggttacaagtcagccgtctgggtgttaaatctacacgtaccaaataaccaaytgtacttttttcactgaaatgttagtattatgtagagacagccacgactccctgtctttaataaagaacaaacactgcagtaatcatgcccaacgctcccgctgatcattcttagttatttaggacttttatttctctcttctgggaaacaggaaagaatatcttccactgaagagacaaggaatgatggtggttataaaaaatacattctgatcaggtgaactggtaacttgtcagctttacgctagtaaccagtctcttccctgcagttagaacgtgaagaccctgtttggggcagagacaagccaccccatggagtgtccctgataaaactatttattagggaaatgctatggacgcctcggcagggagagtagggaggtgcaggggatgggtaggggttcaggtgtctcagagctccacagccctgcacagtgttaaaccacagatcagagcaggagcttttagagacctgaaaggaaggcttattgcataaaaacttgctgcacatccagaggtccaaaattcacccggcacttaaaaaaccaatcacagagaagtcggccagctgacaagacagataagtggaaaaatacgaacacgcatctcagtctcaaaacctgaattccagtaaagcttaggcggcaggtcacaggcagaactgtgccatgtgtggaagtgcagaggcttcctcgtggacaattccccagccagaacggtcaaggggctggtccttctttcacgttgtggtctgcctcgtccacaggtctgggctagcagcactcagaaggttaagagcacacaaagtgagtggggaatgtctctcaggagtcactgcttgcctccacctctgctgttcctgggagtaggtgtgtcatttcagccagggtggtccacctcctgcccgctcagggcaccaggaggaaacagctttcctttcttccaaagggtgaggtggagcattagtgacacatcctgctcgtcatttctttctggaaagcaaggggaaaaggatggttaggagaaactataagcagagcaacgatttggtgaaggatcctgaaaatgctcttggaatctcgagagcctgtaaatgaaagcttgcaagcatggtccatgaataaggcttagcatgagggtatgttccatctgtttgttctgcagaattttttttttccattaaggcactgtttaaaaatttgactcatgtatcaaaattcaggttgcttgcttgctttttctgagaaattgcaagatttggagcttctgaacaactggagttgaagaatggctgtcctcttcagcagaagaatttgctctccagtttgccccagtccttgccactcccacctgacttcccagcaggagccatgtagcacttatgaactgatacagtaattggatttggactgctagttttcttcgagtagggaaagatttaagtttcaatcaaagatggaaaaataaaggataagtgggtataagtcaagaaaagcaggaaggaggacatttttaaaaatagaaatgaataatacaccaaagtgtctgacatgcgtcacctgcctggctcttgtgggtatttatagatcccgaatagccatcctttctctacccctggggctccgcacaggttgagtcccatgcctatggtccgctgctaccacatcctgcgcctgcccctcttcatttgtcaaattgccactcatttttccacctcaggtaaggtgacttttacctgctgggagaccttcccgcactcctgccccactcgctgtggaggtagccact

SEQ ID NO: 554518 - DNA, 2225 bp, Homo sapiens
tacttccctccaccgacaaatattttgctaaattaaaaggatcactggaagtattatgacccccctcgtcacaggtggtcagaaccaccacagttttgtgaatgaatcagagaaggcaacatttcatcaacgaaaactcatttaggtttcaaaaggcaggatgtagtacagaatgcattattctgactgtcttctggaatagaaaaattggaaaggatgaaagaaggaagttagctccagctccactgttaccttggcaaccgtggcccaatcacaggggcagaaattaattttgtgccgtaacataacgtggcagaggagtggggagcgtggagtggggagagaatgacggctgggtttaaatgctcagaaggctagtggggagggttacaagtcagccgtctgggtgttaaatctacacgtaccaaataaccaattgtacttttttcactgaaatgttagtattatgtagagacagccacgactccctgtctttaataaagaacaaacactgcagtaatcatgcccaacgctcccgctgatcattcttagttatttaggacttttatttctctcttctgggaaacaggaaagaatatcttccacygaagagacaaggaatgatggtggttataaaaaatacattctgatcaggtgaactggtaacttgtcagctttacgctagtaaccagtctcttccctgcagttagaacgtgaagaccctgtttggggcagagacaagccaccccatggagtgtccctgataaaactatttattagggaaatgctatggacgcctcggcagggagagtagggaggtgcaggggatgggtaggggttcaggtgtctcagagctccacagccctgcacagtgttaaaccacagatcagagcaggagcttttagagacctgaaaggaaggcttattgcataaaaacttgctgcacatccagaggtccaaaattcacccggcacttaaaaaaccaatcacagagaagtcggccagctgacaagacagataagtggaaaaatacgaacacgcatctcagtctcaaaacctgaattccagtaaagcttaggcggcaggtcacaggcagaactgtgccatgtgtggaagtgcagaggcttcctcgtggacaattccccagccagaacggtcaaggggctggtccttctttcacgttgtggtctgcctcgtccacaggtctgggctagcagcactcagaaggttaagagcacacaaagtgagtggggaatgtctctcaggagtcactgcttgcctccacctctgctgttcctgggagtaggtgtgtcatttcagccagggtggtccacctcctgcccgctcagggcaccaggaggaaacagctttcctttcttccaaagggtgaggtggagcattagtgacacatcctgctcgtcatttctttctggaaagcaaggggaaaaggatggttaggagaaactataagcagagcaacgatttggtgaaggatcctgaaaatgctcttggaatctcgagagcctgtaaatgaaagcttgcaagcatggtccatgaataaggcttagcatgagggtatgttccatctgtttgttctgcagaattttttttttccattaaggcactgtttaaaaatttgactcatgtatcaaaattcaggttgcttgcttgctttttctgagaaattgcaagatttggagcttctgaacaactggagttgaagaatggctgtcctcttcagcagaagaatttgctctccagtttgccccagtccttgccactcccacctgacttcccagcaggagccatgtagcacttatgaactgatacagtaattggatttggactgctagttttcttcgagtagggaaagatttaagtttcaatcaaagatggaaaaataaaggataagtgggtataagtcaagaaaagcaggaaggaggacatttttaaaaatagaaatgaataatacaccaaagtgtctgacatgcgtcacctgcctggctcttgtgggtatttatagatcccgaatagccatcctttctctacccctggggctccgcacaggttgagtcccatgcctatggtccgctgctaccacatcctgcgcctgcccctcttcatttgtcaaattgccactcatttttccacctcaggtaaggtgacttttacctgctgggagaccttcccgcactcctgccccactcgctgtggaggtagccact

SEQ ID NO: 554519 - DNA, 627 bp, Homo sapiens
atatccatttgtggaaaataataacgtggggattattcttaaaaaggcttctggaagtggcttcttcaattaaatatattcaaaactgattcccgcttactacgcaaatcaaagaggaattgaaaatgtgtgtgattcccactaaataattttccttttgtatgacttgatgttactatctttgtggagtggctgaggaatgtctccttcttgcctttgtcttcaaaggctctgccaatgtgaagtacaggagagagaggcaagaccagggcccactagcggaaccatctcagccttattccccagaggaaaacacattctttttcactttcctgagctgccttatctgataaaaatgattcttacatttccsagcaatgccttctgattgtaatgtagcttatgccactggtttgcctatttctcaaatataaacatacacacacatacacacatttggccttagcctttctaatttcactctcatcaggacagattgcacacctgtaaacattctcagatcaactccagtaatcaatccacattcatgtaacccctgtagaattaaagatcactggagaccttcaagatcgacttcccatttaaaccataagaaaacaagacccc

SEQ ID NO: 554520 - DNA, 627 bp, Homo sapiens
atatccatttgtggaaaataataacgtggggattattcttaaaaaggcttctggaagtggcttcttcaattaaatatattcaaaactgattcccgcttactacgcaaatcaaagaggaattgaaaatgtgtgtgattcccactaaataattttccttttgtatgacttgatgttactatctttgtggagtggctgaggaatgtctccttcttgcctttgtcttcaaaggctctgccaatgtgaagtacaggagagagaggcaagaccagggcccactagcggaaccatctcagccttattccccagaggaaaacacattctttttcactttcctgagctgccttatctgataaaaatgattcttacatttccgagcaatgccttctgattgtaatgtagcttatgccactggtttgcctayttctcaaatataaacatacacacacatacacacatttggccttagcctttctaatttcactctcatcaggacagattgcacacctgtaaacattctcagatcaactccagtaatcaatccacattcatgtaacccctgtagaattaaagatcactggagaccttcaagatcgacttcccatttaaaccataagaaaacaagacccc

SEQ ID NO: 554521 - DNA, 627 bp, Homo sapiens
atatccatttgtggaaaataataacgtggggattattcttaaaaaggcttctggaagtggcttcttcaattaaatatattcaaaactgattcccgcttactacgcaaatcaaagaggaattgaaaatgtgtgtgattcccactaaataattttccttttgtatgacttgatgttactatctttgtggagtggctgaggaatgtctccttcttgcctttgtcttcaaaggctctgccaatgtgaagtacaggagagagaggcaagaccagggcccactagcggaaccatctcagccttattccccagaggaaaacacattctttttcactttcctgagctgccttatctgataaaaatgattcttacatttccgagcaatgccttctgattgtaatgtagcttatgccactggtttgcctatttctcaaatataaacatacacacacatacacacatttggccttagcctttctaatttcactctcatcaggacagattgcacacctgtaaacattctcagatcaactccagtaatcaatccacattcatgtaacccctgyagaattaaagatcactggagaccttcaagatcgacttcccatttaaaccataagaaaacaagacccc

SEQ ID NO: 554522 - DNA, 669 bp, Homo sapiens
tttttatttacctacatagtgttccagagtagagaaaacttaattttctcatgtgttctacccaaagctagaaccwccaatccatttctgcagtagaaaaagtaactagaataacagcagaaagttgtagctttaattaaaagataataaaatgtttaaatctgcctttgttaccttctaggaaagaaacactggattttccagagcctgttcatttttccctaatattactaaccagaaaaatactactacaggaaaggaaaagaacaaatatcttcccacattataggaagaaagttacaataatgaggaagttctctaacacagaacctgactatctgaccatatttattgtgtaaataggactacggttataatatttctattcccataaatacaaaaaaaaaaagaaaaaaaaatccctaagataccttttcaataatcttaagaagagaattccatttcaagtccacctgaaaaaagaaaaagagttagaaacaatctgctagaacaactttttgtttgagatggggttttgtatgttgcccaggctagtctagaactcatgggctcaagccaatgtctcacctcagcctcctgagtagctgggactacatgcatgcgccaacatgcccagctaaaacttttaaaaagtaaatgaagtaccca

SEQ ID NO: 554523 - DNA, 1139 bp, Homo sapiens
ccgcctcagctggcgacctaccggaaaaaaaaaaaaaaagcatgcggcgcatgcgcgtccaaggccgcggaccggaagctggggctcgcctgttgggagccgcgtccgccggtgttggtgtctgcacttggaaggacgtagggaatgcgttgtccctgctaggtacttttcagtcgcagagttctcttcttcttctttctttcttccttttttttttttttgagacggagtctcgctgtgtctctcaagctggagtgcagtggcgcgatctcggctcactgcagcctccgcctcctgggttcaagcgattctcctgcctcagcctcccgagtagctgggattacaggcgcccaccaccatgcccagataatttttgtatttttcagtagaaatggggtttcaccatgttggccaggctggtctcgaactcctgacctcaggtgatccaccggcctcggcctcccacagtgctgggattacaggcctgagccaccgtgcccggccggagtttttctacttaatacctctccatgccaaccccgttgtcatttcccagcggccgcctctataacgggcacttttcagggacaaagaattggtccgttaatgttcctcaaattcgaacgcgcctaggaatagttcggggatcctgttgaagtgcagatcaggattccgtaggtaggggtggggttccaaattctacatttctagtatcttcccacacgatggtgatcctccttgtccctgaatcatggaggagggcaattagggagatgtgagcctggatgcatggtggccttggctatcttaggtgttcttgcccaytaaccaagctgggaggaaccgtgtgaatgcatatctatccctgttaataaaagggtagtttgaaggagatgctgacaggagaataattagaaatgtttttcttcccaatccaactatatgcaatacactttataatattcattttagaaatgtcatagataagatttgtaaacattgacatttagcaatactaaatatcactgctaggtctcccctccactttttttttttaaacaaaaatacgacagtatgtattgtaggtcttcataaactacgtcttctgcatagtgtttcatgagcgtttttcaatgtca

SEQ ID NO: 554524 - DNA, 1260 bp, Homo sapiens
tttcaagttttattaaaatatatttaaaattctgtggctagatgaatatttattacacctggaatattaatttaaaataggttacatttatgacctaataaagacttgtatatgtgttaagtgtggcctttaaggtacataaagggctcactaaaattattgtgcttcatatgtttaaatattcttaataaacttctcatgagagatacttcaatgtacaatcagtaggacactaggttgagcatcacaaggcttgagttctagccctgatcggctggtaatgagccacgtgaaattgaataactcatttaacctcagcagatgtatttgctcaactgcagaataagtaaggttcactaaagatctcttacacatttagacatgattgtgattctatgaaaacataactgtgatagaaatgaggcagcttcagaagaaaccatgcaaaaatggtcactggtctttgccataaatacaaaggccacagcatttcactcagatatctgatggaagcttgggaaacatttaactctgattaggcatctttcagagcaaaacacagcttgggctgatatttgtcctctaaggaaaactcaaaggctcaaagtgtagaatattgttttttttaattgcctaacatttcatttgtagccttagggccatggagcactgaccttgcattagaagcccctccaggaccttctcaagatcaatggtttgatctccaccatcattcactgctggaaattaaaccagactcctgaggaccaagccaccatcagctgtagcctcagggagatgggaatgtgggagcaggcccactttaagcaagctgctgaataaatatagacttgaaaaatggaagaaacacatgaagcctgtttctgttttctaagaaagatgtgtttctttcagtggtaatgtatattctaactttaatctggtaagtacacctgtaatcastacaaaccttgtgaatatcaacagctaaaatttaaaatttatttattgtacttgctcctgcagtttaatttaataaaatatgaggtctagaggaaggtactttgttcctaagaatctcaacatgcattattagattggtttcctaacatatagagtgtgaaagtgaattcgctcatgccaagtgggagataagaacaatggctaataactctactctaaattttgacacagtttattgtgaaagagggctttttaatccaggtgtttcactctgcacagtcaatttaaataaggagc

SEQ ID NO: 554525 - DNA, 680 bp, Homo sapiens
tttgcctttttccttccttatcaggatctacttaacaacattctgacagttcgaccacggagtgagtactgagcatcctaagaggagttccggggcattctttccaacacgkataccaccccctcgtgcctgctcatatctgactgtctactcttacattgctccctcaaggcgttgggacccagaaatcttttgggagatgaggtagaggtcattctctgtagctacttgctgctgaaaaggggcatcgagggtcttcagggttcttcctcctttcttgctgtcacggtgaggaggtttttgatgactgaacaactgctgaacatattatgtcccaaatcaccaaaagggaaaaaatgaactcaccagaaaaatctattatcagttgtctgttcttgcatgctacgatgcgcattaagactcaaatctaaactgatgccagatgcagaccatgcaaaataaaagtttcctgaattcaaaactttccgcacttctgaaatgcgatcctcatctgaagaatcgattcgcagtgatataaactcagtggaagtaactcggaaaacttcagattcttgaatttttccaacagacatacatccagtgactaggaccagataatgtaacatagtatcacctgcaaaacccaaagattttactggatgaaaaatcccaacattttc

SEQ ID NO: 554526 - DNA, 546 bp, Homo sapiens
ttttcttcttttctgcattttactagaaaaaatctcaaacatacagaaaatttgaaagaattgtagagtgaacacccacatcataaactggacaaaaaacattgtgctgtatttgsgtggctgcatagacataatttcttcatgccaaggaataactgtgatgaggggagatcgagggctcctagcagccgagagagggaggcatttgaggataagaagttaaggcagcaatccctggagtgccaccagtgagcggccatatgtctgctactcctgatcctacagtccttgtatttggggggtggggcagggggtagggcagttatcaaacaagtcaacaataaataaataacatgaaaataaaaagggctaactggaacacatggacttcctactaatgatgcctcattgagggttagagcaaatggctggctctcttgcgaggaagctgagacctgagaaatgtgcctttcatagacaaggtagggccagacaggtctagaacctttttatatccagagcctggagcaggaccctcaggacagc

SEQ ID NO: 554527 - DNA, 1325 bp, Homo sapiens
acaaaaaccccacaaaactcaaggccttaaattgtaaatatgagatgccaggcattattcccaaaatctataaggaagcacaccaaccaccatgttaacattgtctattagtggtaggcctattggagatttattatcttatttatgctacttcatgttttccttccttttttgttttgcaacaactctgtattagtctgttctcacactgttataaagaactgcctgaaactgggtaatttataaaggaaaaagtcttaattgattcacagttcagcatggctgaggcctcaggaacttacaatcatggccgaaggggaagcaaacatgtccttctttacatggcagcaggagagagaagtgcagagcaaagtggaaggaaaagccccgtataaaaccatcagatctcgtgagaactcactyattatcatgaaaacagcatggaagaaccgcctccatgatccaatcacttcccacaaagtccctcctgcaacatgtggggattacaatttggattacaattcaagatgagatttgggtggggacacagccaaaccatatcaaactctatgtactttaatatttaaggaaaattacataaactttatctgaaaattccctggattcttctcctcaaggtcatgctgtacatatgcaggatcctcctgcctacatctccaaatggataatggattgaagcaaaatgtttgtcccaccaaacattgatgtgtaacccttttagtaacaattcatagaccaggtaaacatgtgtggagcagcccagatcagctggagggagcattattctcatcagagtgtggaacaatgcctacccatctgtcagctggttatggtgaagacagtataaatggaagcactgtcagaaactaaaggcttatgtaagtgatgctgttcttatgtctcctcttcctctctatcccacatatgatgaattattttattatgatgatgctgtagttgttattttctatttgaaatgaaaagacatgattacagatgagaaagagtgtattttgttatccttgatgcacttgaaatggtttcctcttttttttttcctgttttcttcttcttccttctctcttcactctttcattcttgcctctctccattttataggtatgattgatcttgaaataatgatgataacagaatgatagcccatatagtccttgggtcacttctgtctctatttctctttcttccctcctctttttttcttggtccttttgctagatgggttgcgagcatggctccctgcccctctcagtgggtttatcttcattttccatgagctcccacct

SEQ ID NO: 554528 - DNA, 1218 bp, Homo sapiens
gataaagaaaggtcatcctcaatttcaatttactttatatattctttgagaggtaaccgtgtcttatctccccccaaaattccttttaaaaggaaatttccaaagatgctctattctgtgaataaagcattgtgccacagccgagaggatccagcaatgaacatgagattgcccttgattcataaggtctacaagctagtaaggatagagaacactttaaaataaaaaaaaatagtttttggtatatttatattgtgtatttggtataattgagttttctacattctcatatatgtatttcatattttgaagaatatgcagaaaataatcaagcttccaaataaacatttttttttaagaactgcacaagtgagaatttaggagaayagaagatcagagggctgcacgggctaaactagacaatgagcccatgcaagtaagttaagaggagaagcgggtaagtatgcacctgctttgtctaggtgaccagcaagcatttagcaatagtcttttcaaaacaacagctccttatattgtcaaatctcaagaagtaatatttatggttaaaaaaatctcagacccaacagaaaatccatgagggagatggttttggaaacgcagaattttcagctatgatatccttttataaacaagcagatactttccccaaatataattcaatgcctcagtctacctcctgctgaaaccactaacaccaccactaaagctcgactatatgggaaaatttaggtgtcactttcaaaatatgtcctagcataaaggcaattaaaaaatgtaaagcaccaaagatgcaagagagacataaatgaataaaatatctggcacgaaagttttcaaaagcttgggaatctgattcaaaaaaaaataaaatcagccaagcagtgttagtaagttagccaatcaggtttcaagaaggcagaaagacaaaatcaacatcaccagcatttgacaccgctactgggggaaaaaagggggatggagttcgtttatggcctttttaaaaatgccattacttggacaagagtcataacagagaagcactgcttatttcagttctgttaactgtaaatatcagagccaacacccagaaaaagttcaccattagccaattggttttgcctggccaattggagatggtaataggcctgctatggatgacattctttctgatataagttgtttcttgctttttctccc

SEQ ID NO: 554529 - DNA, 1218 bp, Homo sapiens
gataaagaaaggtcatcctcaatttcaatttactttatatattctttgagaggtaaccgtgtcttatctccccccaaaattccttttaaaaggaaatttccaaagatgctctattctgtgaataaagcattgtgccacagccgagaggatccagcaatgaacatgagattgcccttgattcataaggtctacaagctagtaaggatagagaacactttaaaataaaaaaaaatagtttttggtatatttatattgtgtatttggtataattgagttttctacattctcatatatgtatttcatattttgaagaatatgcagaaaataatcaagcttccaaataaacatttttttttaagaactgcacaagtgagaatttaggagaacagaagatcagagggctgcacrggctaaactagacaatgagcccatgcaagtaagttaagaggagaagcgggtaagtatgcacctgctttgtctaggtgaccagcaagcatttagcaatagtcttttcaaaacaacagctccttatattgtcaaatctcaagaagtaatatttatggttaaaaaaatctcagacccaacagaaaatccatgagggagatggttttggaaacgcagaattttcagctatgatatccttttataaacaagcagatactttccccaaatataattcaatgcctcagtctacctcctgctgaaaccactaacaccaccactaaagctcgactatatgggaaaatttaggtgtcactttcaaaatatgtcctagcataaaggcaattaaaaaatgtaaagcaccaaagatgcaagagagacataaatgaataaaatatctggcacgaaagttttcaaaagcttgggaatctgattcaaaaaaaaataaaatcagccaagcagtgttagtaagttagccaatcaggtttcaagaaggcagaaagacaaaatcaacatcaccagcatttgacaccgctactgggggaaaaaagggggatggagttcgtttatggcctttttaaaaatgccattacttggacaagagtcataacagagaagcactgcttatttcagttctgttaactgtaaatatcagagccaacacccagaaaaagttcaccattagccaattggttttgcctggccaattggagatggtaataggcctgctatggatgacattctttctgatataagttgtttcttgctttttctccc

SEQ ID NO: 554530 - DNA, 1218 bp, Homo sapiens
gataaagaaaggtcatcctcaatttcaatttactttatatattctttgagaggtaaccgtgtcttatctccccccaaaattccttttaaaaggaaatttccaaagatgctctattctgtgaataaagcattgtgccacagccgagaggatccagcaatgaacatgagattgcccttgattcataaggtctacaagctagtaaggatagagaacactttaaaataaaaaaaaatagtttttggtatatttatattgtgtatttggtataattgagttttctacattctcatatatgtatttcatattttgaagaatatgcagaaaataatcaagcttccaaataaacatttttttttaagaactgcacaagtgagaatttaggagaacagaagatcagagggctgcacgggctaaactagacaatgagcccatgcaagtaagttaagaggagaagcgggtaagtatgcacctgctttgtctaggwgaccagcaagcatttagcaatagtcttttcaaaacaacagctccttatattgtcaaatctcaagaagtaatatttatggttaaaaaaatctcagacccaacagaaaatccatgagggagatggttttggaaacgcagaattttcagctatgatatccttttataaacaagcagatactttccccaaatataattcaatgcctcagtctacctcctgctgaaaccactaacaccaccactaaagctcgactatatgggaaaatttaggtgtcactttcaaaatatgtcctagcataaaggcaattaaaaaatgtaaagcaccaaagatgcaagagagacataaatgaataaaatatctggcacgaaagttttcaaaagcttgggaatctgattcaaaaaaaaataaaatcagccaagcagtgttagtaagttagccaatcaggtttcaagaaggcagaaagacaaaatcaacatcaccagcatttgacaccgctactgggggaaaaaagggggatggagttcgtttatggcctttttaaaaatgccattacttggacaagagtcataacagagaagcactgcttatttcagttctgttaactgtaaatatcagagccaacacccagaaaaagttcaccattagccaattggttttgcctggccaattggagatggtaataggcctgctatggatgacattctttctgatataagttgtttcttgctttttctccc

SEQ ID NO: 554531 - DNA, 1218 bp, Homo sapiens
gataaagaaaggtcatcctcaatttcaatttactttatatattctttgagaggtaaccgtgtcttatctccccccaaaattccttttaaaaggaaatttccaaagatgctctattctgtgaataaagcattgtgccacagccgagaggatccagcaatgaacatgagattgcccttgattcataaggtctacaagctagtaaggatagagaacactttaaaataaaaaaaaatagtttttggtatatttatattgtgtatttggtataattgagttttctacattctcatatatgtatttcatattttgaagaatatgcagaaaataatcaagcttccaaataaacatttttttttaagaactgcacaagtgagaatttaggagaacagaagatcagagggctgcacgggctaaactagacaatgagcccatgcaagtaagttaagaggagaagcgggtaagtatgcacctgctttgtctaggtgaccagcaagcatttagcaatagtcttttcaaaacaacagctccttatattgtcaaatctcaagaagtaatatttatggttaaaaaaatctcagacccaacagaaaatccatgagggagatggttttggaaacgcagaattttcagctatgatatccttttataaacaagcagatactttccccaaatataattcaatgcctcagtctacctcctgctgaaaccactaacaccaccactaaagctcgactatatgggaaaatttaggkgtcactttcaaaatatgtcctagcataaaggcaattaaaaaatgtaaagcaccaaagatgcaagagagacataaatgaataaaatatctggcacgaaagttttcaaaagcttgggaatctgattcaaaaaaaaataaaatcagccaagcagtgttagtaagttagccaatcaggtttcaagaaggcagaaagacaaaatcaacatcaccagcatttgacaccgctactgggggaaaaaagggggatggagttcgtttatggcctttttaaaaatgccattacttggacaagagtcataacagagaagcactgcttatttcagttctgttaactgtaaatatcagagccaacacccagaaaaagttcaccattagccaattggttttgcctggccaattggagatggtaataggcctgctatggatgacattctttctgatataagttgtttcttgctttttctccc

SEQ ID NO: 554532 - DNA, 1218 bp, Homo sapiens
gataaagaaaggtcatcctcaatttcaatttactttatatattctttgagaggtaaccgtgtcttatctccccccaaaattccttttaaaaggaaatttccaaagatgctctattctgtgaataaagcattgtgccacagccgagaggatccagcaatgaacatgagattgcccttgattcataaggtctacaagctagtaaggatagagaacactttaaaataaaaaaaaatagtttttggtatatttatattgtgtatttggtataattgagttttctacattctcatatatgtatttcatattttgaagaatatgcagaaaataatcaagcttccaaataaacatttttttttaagaactgcacaagtgagaatttaggagaacagaagatcagagggctgcacgggctaaactagacaatgagcccatgcaagtaagttaagaggagaagcgggtaagtatgcacctgctttgtctaggtgaccagcaagcatttagcaatagtcttttcaaaacaacagctccttatattgtcaaatctcaagaagtaatatttatggttaaaaaaatctcagacccaacagaaaatccatgagggagatggttttggaaacgcagaattttcagctatgatatccttttataaacaagcagatactttccccaaatataattcaatgcctcagtctacctcctgctgaaaccactaacaccaccactaaagctcgactatatgggaaaatttaggtgtcactttcaaaatatgtcctagcataaaggcaattaaaaaatgtaaagcaccaaagatgcaagagagacataaatgaataaaatatctggcacgaaagttttcaaaagcttgggaatctgattcaaaaaaaaataaaatcagccaagcagtgttagtaagttagccaatcaggtttcaagaaggcagaaagacaaaatcaacatcaccagcatttgacaccgctactgggggaaaaaagggggatggagttcgtttatggcctttttaaaaatgccattacttggacaagagtcataacagagaagcactgcttatttcagttctgtkaactgtaaatatcagagccaacacccagaaaaagttcaccattagccaattggttttgcctggccaattggagatggtaataggcctgctatggatgacattctttctgatataagttgtttcttgctttttctccc

SEQ ID NO: 554533 - DNA, 543 bp, Homo sapiens
ctaaaaaagggaaagggagtagaaaaaaatggtctttaaaaaaaaaaagaggtccaaaacctaagcatccactgtatacctctcttgcagcttcctggagcctcattcaaacacaataaacattcagttgacttgttatgagactctaggactaaataaccaatgttgttccattaaaagatagtagcagtacatgagccatgtcttattatttttgtaattattataaatttttaaataaactgagagcaaccctttttgcaaaagattggttgatggcctcctgyttattctgggaatctgttctcctgatttctggtgggatgattttagatcttgctggaaaggaataggaaaacatcctacttcccacttcaagcacttttaggatatatttatttatgatccttattctttccataaatgttcaacatagattgaatgatttttcttattttaggaattttcttagcataagcatttgctaaggaccaccccaaatttggatgttattatggaacagtagagattatcttagtcaag

SEQ ID NO: 554534 - DNA, 657 bp, Homo sapiens
gacctcccccgtgctctctctgagccactgtaaaaaaactgattcttcagtgcatgggaagttcctgtggccctgccggttctcggacccggccttgacccgaagggcactgatgttctgctcaagtgcagaagggctggattttgcagggtcaggaaatacatttgtgcagtgactacaagatccccctgacatcttggtttgtgggaaatgcagattttcttttttctgtaacttaaatttggctctcaaggccccgtttctgctggtggtgggatacactggtattaatcttgccaagtcaaggtcaactccagctatttgttatttaaagcataatccctttgaagtaactctttagacaattcatcgttctcagatcaattccaggagcttcccctccgtgtctgcccactcyggtcaccccctttcttggcactggtgatggcactcctccagaaaaatgccacccttgttctggcaggatctgacttccaatccagcccacagcctatgaccccttgtccctcagctcagggacccatggctggcattgtcaacacctccctgccaggcacctggaaatactcactctttgcccatatcccattgggctagggccatctaagaccccattgagggctgggtgcatggttc

SEQ ID NO: 554535 - DNA, 1213 bp, Homo sapiens
caaaaggagatgggagcctacttttcaaaccaaatctgggataatttgagcaaagagaataaggatcataattaataataaaattctgaagaaaagagagacttaatagtccacagtgctgattgagaggaaaaggaagagaagcatattactcatttaattggcagataaaactgaatgtatttgtcatgtacaacacgttttgaagtacctacacattatgaaattactaaatctagctaattaacatatgtattacctcacactgttaccatttgttacatttttaactgatgacgtatctctcatttattggactgataacgtatctattcctcattcactggattctacccagaaacagcacactttcaccctttcatggtacagctgccatgctcttcacaatgttattattctagactattacagtacaagctagcagtgacctatttatcttttaggatcatgaacaatatatatcacttcatttctagaaactgatcttcaaaaactataacctactgcaggacaggtgaggccagggaggcggacacctctgcctccaggaggctactctgtgcctcaagaaccaaagaacgaggggagttcgaccactgcctgtacagagcccgaatgccctccctgctgctgttctaatgcatgtcccatctgcaatgttagaaaacaagcttcagcttgatacagtggaacttggcagatggcacagtttgcttgttacagaactaagtatgaaaataaattcatttagtagtgctccttggagaaatgtggttcagaagtcaaataattttaaaagacctctttcccatgtaagacacccatgaaacaatgctctggtcataattagtctctaamctttcaaaatgcctgcttcagtgacctcacctgctattgaacacgatgcctgcagatggtgtgaggtggccaaagggtggaggactggcagcgggggctgcagcggctgctgtgaccagccactcacttgctgaaggatcagggagagacactgtgtctctctgggtctcggcttcttaacctgtgaaacccaggggttggggaaaagctcgccaagcccccctcctgctttggcatcctgtgagtctttattgtcctgggctagctgggacccctaggacactgggtggctccttccaccccacatgatcattctgctcaacaagaacttgca

SEQ ID NO: 554536 - DNA, 677 bp, Homo sapiens
atagcctggttctggtttccacaggcctgggatgccccgtccagagtttgactttcagtctgcacgtaatccaggctttgtattcccacttcccgtatcccctcactcctttttcacacaccctttttatctatgatgctactggggtcatgggttaagaagtcctgtcgtctaagcagcaagggtgcatcaaagcaggattttctccattgattccaaggtgtgattcagaaatggtaaaaactccgaacactaggatgagcactggggatgggttcatgttttttttttatgaaataattcagaacttattaagaattcccttggcaaaccaaattaaatattaaacaactatttgttaatatgttactattggattctatcttagaaaagtgtaattatgtgtaactgaactttttgttttcttgtggttgaaccctgaattaccatgccttctggtttccgtgtttttcctggggaatagrtcatatttcttacttccaaagcccagaaataaaagcctcacacatccatccgtagtcccaaaggcttttctgcctagtacccagagagtaacagcagtgcttcaaactatttgtggacaagaagtcctaaaacatcagacacactgtggaaagcaatttcatttcattaatacaattcataattaactgcat

SEQ ID NO: 554537 - DNA, 562 bp, Homo sapiens
ctctctcgtattgccttgatcttgcaaccaccttttccaatgagccacagtgactagcagggaccaccagcatcagggtgaccagggggtccactggcagctgtgctagtggtcacagagctactgatatcctcttccaatcttgctttgaagatggcgctagtgggtccagccaagatgataattctctcagaacaactcccttctgagatgctgatacatgcaccactctcctcatgcatcttaactgattctcctctttctgatgatactgccaacytcctttccatgcataagtagccaggtggtgagaatgacatttaatccaatttcaatcataccagtgtccatatcaagcagggctatggggagctggacttggagtggtcaagtctttggccagtggggatgaaaaccaagaactccaggcaggaggcaactcagggaaaaaggagagcaggcagggtggggcaggggtggaacaacaggggtgggcagaaaggcaacgagaaggaggagaaaaggtggtggaggaagagaaagaagggagagacctcagggc

SEQ ID NO: 554538 - DNA, 1089 bp, Homo sapiens
agtagacacagggtttcaccatgttggccaggctggtctcgaactcctgatctcaggtgatccatctgctttggcctcccaaagtgctgagattacaggcgtgagccatggcgcccagccaggagttaartttaatgcagggttacatgagaaacgacagcaagctattaaggtacagccaaaatcaagctggaatctaaggtcaagaattaacaaaacagataaacacgatgctgttgtcttctttcagtaaagttcagttactgtaataatttgaatatattgatcatagaatacaaatatgtttgttccatgtgcactggcaaatgtacatattataaaaataaaatgttttcattatttaacaaatatatataccattatcaggaattggttccatgtcccatgggctaagtttttcaatttcagtattatcccacctgttaaaaaacaacaaatctctggttagcctttcataaaaacaaaatgtggataataggtatccattataaaaatacaaaatgtgaaaattaacctcactgcagcagtacaattttaaatattaacagtaaatttttttaagaaggatatattattaaaataacaggtttaagaacaaaaccagaaatcctatgtggcctgcacccaaagtgaacaataactgaaagacaaggcatgaagcccttgaattccactacagccacagtcaatggtttttatcccattgccaatgaagaggcgtcaaaggtttctttgaagaagattaatgatatagtatctgcttctgaactaggacactgacaatacgaggtaaaggaaatattaggtggctacagaaatagttccaggaaagcaagcagaacctgaaccaaggggagtactggtgaataggaaacaaagagtaggtgcatgtctgagagacatttcgggtcagcctgacatgacttaatgacagataaaaaccatgtttttttaaaaaccagaaatgtattatttatacagcaacctgccacactgaattactgggaaatgattagttttcatctgtatacaaacctaacaatataacactggaaatgactatcagga

SEQ ID NO: 554539 - DNA, 681 bp, Homo sapiens
tcaagttcaagggaaggagaagatcaatgtcccagctcaaagacagtcaggcagagaaagaattccttcttactcagcctttgattctattcataccttcaatggattggatgaggcctactcacactagggagggttatctacttgactcagtctactaattcagttgttaatctcatccagaaacaccctcacaccgacacctaaaatatcatcctttattgtttggataagtggagtattggaacaatggctaaaatgagaatagagaagaaaaatttaattaaatatctggtcaccatgtggcccagtcaaaatgacacattaaaattaaccatcactctgcacttgtcacaggcctcagctcatcttctggttacttctccttgctcrctaaaggttataacattcatgtcattcttactagctagggaactatagagaaaatatttttgtgtttctcgagttagaattttctgggcaaattttattaaaatttctttaaaagaatatgacttgaaagctgaagaatgattagatactgacagactttccagagagatttatcctcctgaaggcatgtgtttacatttcaagggggatgagacctgggaccatggacatattcctgggatccaaatctggagacactagtcttctcttccttttagaaacatttat

SEQ ID NO: 554540 - DNA, 653 bp, Homo sapiens
cacttgtaccattaaaactaatgaaagaaaaaaattaactaattaatttaaaaaccacactggggagtccctgcatgctaagtaggtagaacaaatcaatcataaatgactgccattttgtctacatkctgtataaaaaaggtgaaactgctccttttcttctcctttaaaaaaaaaaaaaaacaactttggtatttgtgctcaagactactatgggaaggacccagttataaacatgcatttcacgccaatatttcttcttcagaataagtgctaagcaagtcaagacatgcaatgatttcttttggcctcctataaaacaaatgagccctttttgttttgtatttgttttagagacaggatctctctgtcacccaggctggtgtgcaagatcatagctcactgcaacctcaaactcctgggctcaagtgatcctcccacctcagccgtctgcccaagtagctaagactacagtcatgtgtcagcatgcctgcctaatttaaaaaaaaaatttttttttttttagaaacagagtttcaatatgttgcccaggctggtctttaacttatggcctcaagtgatccttccacctcggcctcccaaagctctgggatttcaggcatgaacaactacacccagccaatgatccattt

SEQ ID NO: 554541 - DNA, 653 bp, Homo sapiens
cacttgtaccattaaaactaatgaaagaaaaaaattaactaattaatttaaaaaccacactggggagtccctgcatgctaagtaggtagaacaaatcaatcataaatgactgccattttgtctacattctgtataaaaaaggtgaaactgctccttttcttctcctttaaaaaaaaaaaaaaacaactttggtatttgtgctcaagactactatgggaaggacccagttataaacatgcatttcacgccaatatttcttcttcagaataagtgctaagcaagtcaagacatgcaatgatttcttttggcctcctataaaacaaatgagccctttttgttttgtatttgttttagagacaggatctctctgtcacccaggctggtgtgcaagatcatagctcactgcaacctcaaactcctgggctcaagtgatcctcccacctcagccgtctgcccaagtagctaagactacagtcatgtgtcagcatgcctgcctaatttaaaaaaaaawtttttttttttttagaaacagagtttcaatatgttgcccaggctggtctttaacttatggcctcaagtgatccttccacctcggcctcccaaagctctgggatttcaggcatgaacaactacacccagccaatgatccattt

SEQ ID NO: 554542 - DNA, 731 bp, Homo sapiens
ggctcaggtgatcctcccaccacagccccccaggcagctgggattacaagtacgtaccatcacacctggctaagtttttgtatttttcatagagccagggcctcactatgttgtccagtayggtctcgaactcctggactcaagcaatcctctcacctcagcctcacaaattgctgggattacaagcgtgagccactgtgcccagcttttttcttttcttttttttcttttttttttttggacagagtctcattctgttgctcaggctgagtgcattggtgtaatcatggctcactgtagccttgacctccgggctcaagtgaccctcctgcctcagccttctgagtagatgggattacaggtgtgtgccaccatgcctggctttttaaattattcttattatttgtataggtcttgaactcctgggctcaagcaatctacccacctcagcctcccaaagtgctgggattacaggtgtgaaccaccatgcccagccctcattctcatttattctgagaacgtgagaaattgtccaggaagccctcccttcctactcattaggtgaggtcacattctgccacctgccagacccactcagctctgtgcgcagtgccacgccaggcccactggagctgcccaagactgtggtcagcctctctgctcccatggaagcaactggagagaagagtgagaaatatgagtcaaaaagttgtgtggcgacgtggggtggg

SEQ ID NO: 554543 - DNA, 2585 bp, Homo sapiens
gatgcacagtattgcttttctcaaactaactgcccctggcgttctagttaatacttccgttcaaaataaaaaaccttaaaagccttttaagctgacatttaaaataatttgggaaacaatgctaaggcttaatctcttttacatcaaacctcctgtgagatatgattgtataaattctcccatcccccaatttctcctcatttaaggcagacccgctgagaagcaatgcagagggtagaatcagtctccttaagaaaacaaatgagatgatgtgcattttacatttctgcactgaggaggttttaaccaacatcaacaacagcaaactcaacaaaatggattctgccaaatcatgagcacactgagtcaatagcaaattttttaaaactcctatgtgccaaagttttaatctttgtcaagcaatgcatttttaggaaggtaaagaacagatacttctatagccctcagtggaaaataatttctacttaatgtgactactgcacttactgcagactctacaagaaatgggtgtgaaacaagaggagaaattttgaaattgagaaaaatgtgttttcccaaaattaaccataaatgactttaattatcatagatttgtttgaagaaggaaatgaaagagcaggagaaaaaaagcctgatgataaaaacaaaatctcccttacctcttcatggtaaatatttagctttttatacaaattttttaaagaaaaacaaacagaaattcatgctttctaaacttaaaagcagtggaagaaatcacaagtggaaataactttaaaaattgactacataagaatagaaaacttacatgcatcaaggacagatagaaataatttggcacaaatttgacaaaaagttaatgccactactgtgtgaaaagctcatgcaagttgatacaaacaacaaccaaaatcccctcccctcaaaaactggacaaagggtacatttggatgatcagtgatggagaaatcaaagtgaagaaacattttttaaaagttcataacttccagtctggtgactatagttaacaatactgtattgtatacttgaaatttggtaagaaagtagattttaaatgttctcaccaaaaaaaaattgataacatgaggtgattaatatgttaattagtttgtggtcattatttcacaatgtacaaatctatcaaaacatcatgttatatactttaaatatataagatgtttatcaattttacctcaataaagctggagaaaagttcaacttcactagccaacaaatattgctaattaaagtaaaatgctatgtttcacctattaaattgacaaagattaaaaaatgatagtactaattttaatgaatatacagtgagttggaaactcttaaacattgctagcaagagtataaattagtttaggacgggtgcagtggctcacacctgtaatcccagcactttgggaggctgaggtgggcagatcacttgaggccaggagtttgagaccagcatggccaacatggtgaaaccccatctctatcaaaaaatacaaaaattagcagccgtggtggtgggcacctgtaatcccagctaccatggagactgaggcaggagaatcacttgaaccagcgaggtggaggttgcagtgagccaagatcacaccactgcactccagcctgggtgacagagcgagattctgtctcaaaaaaaaaaaaaggcgggggggggggggtataaattagtttaacctttctgaaatcatttcaactacaagcaagaagaatttttaaaacatccataatcttkaacccagtacatttatttcagggtgctttctcaaggaaacaatcaaataacttcacaaagatttgggtagaaaaatatttattgtattttttatataatagtgaaaagctgtaacatctaaattataacaataaataaacaatgatgaatcatatgatccaaaattgttaccagaaaaaatacagggtttgttcatggggtaagtaacaaacgactctccacaagaatgcaggttttgatctataggagttttattacttgtcacaggtaaggagagcactgaaaggattctccaaagcagcatctcgctgagggaaagggaggagagggttttatggagcaatgaagagggtagagggtacatcattgcacatagtggaggggtcccaggggcatggactcagtcagtcatcctgccagcacatagggcacatgttatgataataaagctgcatctcctcctggggtggagactttggcatggtaatgaggaaagttcattctggttcatctataagttgcctgggtctgtcaggacctagctccagcccactaggttaccacattccacacagggttagggaaaaaacaggctgcaaggcaggaggctgtaaaacaggctgattgctcgagttgattaaattcctatagtccctggagaccctccctgtctgcttacataatcattaaaaacagtgtttttcaggaataattgatgacaatggaaaatgctgtcctagtaggatacaaaactgcatgtataatatgaccacattttggttaaaataca

SEQ ID NO: 554544 - DNA, 642 bp, Homo sapiens
cagtgtaatgccaagtaagattttcagacaagaaaaatgcccccttaatacttctttgggacaaggctggtttaactaaatattaaactattttaaatagcatttattctctgaaaaaatagcttcatataattgtggaaagtcttttaaaggatccttttagctagtaccaaataaatataacattgactaaccattcgaattttagaaaatctctcatatgttaaagacttacaactgccatattaacttcactgaactggaagtttaatataagattcaaatacaaactgcacaatcctggscaagttatttctgagattgtatcttatctgtatgatgtagatgataatattttgccttctaggattgttaggattaagtaaaatatatatacacccagctagacaataagcatttcattaacatatactcattttattcattgtctcgtaacttgaaagtgaatttcagttcataggtctgctctgagccctgtcctttgtataacttaaactttgttgtaactttaaaggaggattccaaactcttaaatttttattattcattttatagtttttctgtgatttttaaaaaaattaatactttgttaaatagtttacgtcagaacggtgcaaggca

SEQ ID NO: 554545 - DNA, 748 bp, Homo sapiens
aaccctcaggcaagctgtcctggccagagacagggtggaggcagccagatatacaagggagaacagtcctttttcaaatcctttgttcccaagcaaattggaaggaaggagggacctggaagagagaggtgggtaggagaggagagcaacctcttttgctctttgtaccaaggcttcctggctacagcctggcccgtgggagggtgggggagggaggggaatttgtcattcgaatggatgtgaaataaatagatacttgaaatgggccttggctgtttcagttactgaaagtgagtggaatgttataaaatctgccccaaatgtcattcagtgatgggaaagggcatagttgaagggagtgaataagaacaamaaaaaagtcacatttgaattcctactgaattcaaacacctcaatgaactggctgcctgtgtcctacagggtctgttcctgagggcagagctgtatccaggccagttagaggcaaagccaggagggctggggatattgcagcagcacatacatgaccgaggccagggctcaggtccttgggctgcagcgccagaaaagatgaagatgctgggaaggggaagtgtgggggttcagtgtggagcaaatgcgtgaggcacatcctggtgggaaacagtgggagaatagaacagccaggtgaactgatctctgggctcagaccaaggctgtgcacctgaatttctgctgaagatccagaaatcagcccccaaaggaatct

SEQ ID NO: 554546 - DNA, 528 bp, Homo sapiens
tgaagaatgtgggtggtagtggcgggggagggatgtataatttasataagggcagtggttaaagatggactctctagggcagtgacatttaaactgagacccaaaatatgagaagagagtgatcacagggatcaacatatgcaaaatgccccagggtcaggggtataaaggggaggcttggtacttgaaggaactgatagaaaaactgggcgctagattgtagtagaagatgggggatgtagcctaacgtcaggaactacaccctgtgagacttcgtaggtccagtgtgggcactgaatgctcacaccagccctgtcagttctgcgattctgaaaaaggctttgctcttccctgtttgagctttagaaagctgtttgagctgtttgctcttccctgtttgagcttagggtcagaaatctggattcatccacctgcacgtgggccggaacctcaggtaaccacacagaagctgccccccaacctttctcccactcccgaactcttccctaccttgacctatacccacac

SEQ ID NO: 554547 - DNA, 1735 bp, Homo sapiens
tacctgcttacttataaaactagtccaagcaggatttgacattttctgtatttttcctttttatctgattgcttaatttagaatcttgtgcttctcaagccagcatgcaggaagtagcatagtttagggagaaaatggcaggaacaggaaaggactggagatcagtccttcactctggccagtttcaatgctggtgctcttttatcagcagcccgaatggagctcagaggtgacggatgtactagatcccaggggaaagcttacaaaaggcactctggaagaaccacggacactggtagagttcatcttatggaaactgagttggtcacaaggcatgtctcacctacatgtgcgtgcactggagcaaaatgccttcacctttatgttattcatcagacacttgggtgcttaactcatattttcaaaagctccaccgtttaaggccccatgtttacaggtatcataaaaattaaaccagctgtgcttgcattttagcaatgactgtgtgtacatcactatctaacaagagatcatctagcctgggatttccgtatcttccttacctcctgtttttacaatctaggtaacagaactttcgatgggagagcttctgatgcactctacggtttcctggttgaatccatttctgtctctaggaaaagctagaaaggaccttgagctcacagtatttggttagtattccattcagaagaatgcagactgaacagaggctgggattacggaagaacttcactagccgcaccagtccagctcactcctgagctccaggagtcagaattgctataatggttggggacttaacagggccagcccccaactatttgaaactccggcatcgctctgcatcctcattatcttgttctcccttctgctgcttggctcaggccaagtgttacaggaacagatccctgcggctattttgaaacctgctatctttttctttttctttttctgagacgaggttttgctcttgttgcccaggctggagtgcaatggtgtgatctctgctcactgcaacctccacctcccaggttcaagctattcccctgcctaagcctcctgagtagctgggattacaggtgctcgccaccacgcccggctgatttttgtatttttagtagagatggggtttcaccatgctggccagactggtctcgaactcctgacctcaggtgatccacctgcctcagcctcctggagtgctgggattacaggcattagccaccgkgcctggccagaaacctgctatcttaatagtctgctgtatttcaaatgttttaattctgagagttgggagaacaagtgacagtatattgtcactgagatgaacacagtgtcctcagctttcaataaaacaaagagtttaaaaaagccaagatcaacttctaatagtagcttttaaataagcaggtgcttctgcatagttcaaatatgagcgaaagggaagtaccatttattcactcatgttggcagagtgaggtcttagagactcatacgtttgaagagtgttactctgttaagacgttcagctctagtttaaccttggaagagtttgcataaaataaagactttctttctcttttcctttctttagtttttaagagagccgtcatactggtttataaagaaaactgcaaactgaaaaagaaattggtaaggcaaaaattcattttaatttaagctaccttttcatagctgtatcttcctattaacg

SEQ ID NO: 554548 - DNA, 1104 bp, Homo sapiens
tgtgtatacattgaatggaaatgtttgttttccatatcccgctttacgtctctaaagacaaatgattaaagaatcatttcaagggcattttttgttttgctcatcccctccaacctgcttgtattaagcagcctcacttcctgccttttaacttacatttctgtccacctatcatccactcttctttgttgacctttgcgtgtacagtgttgcttcaaaaaccttcaaaggaaaggtcaaagtgaaatgtcacaagggaagcaggcctgatggccagtggccaaggaggcaccaatgcccaggtctgaggctgcctgtggcatgcatgacactgccccaaaacgcaggtggtgagggtgcagcggccgcctgtgggtcccaagcgcgactccaagtgcgacacgctgtctaggccatctggtcccacaccaagtcacatctgtgcccagagaagcccagtggaccagtgcgggccccccagccctcagggcagagccaggacgcttcacacaagagtcactcattggattttctactccacgcacasgctgtcaataatggcaggcgccacctaaaggggcaggtgccagtgtaatttaacaggggagaaaaagtacagaggccacccaggaggatgctggaaagacagagggtggggagtgggaagaaacactcaggacccgcggcaccagggcgtgggactagaacgaaaagcaagaagaccatgtgaggggcaggggaggaaggactggccggatgccatcagttatcatcaatatgaagggaatgagcccaaggtaactctgaaatcctaaacttggatttggaagcactgaatctgagctgagggtggccctcagtaaggcactgtggccctaccactctggttcccccagtcgttctctgccctagtttgtaatctacaaagtgatcagaagctcataaaacatgggcacgagcactacagttgaccagcactgggcggggaaggtgatcctgggaaacctgcatgggactgtgcacaccaaccacaccaaccagaagcagccaacacacacaaccgcaagggccaactcaacatggtaatcaacatctaaagctgca

SEQ ID NO: 554549 - DNA, 1104 bp, Homo sapiens
tgtgtatacattgaatggaaatgtttgttttccatatcccgctttacgtctctaaagacaaatgattaaagaatcatttcaagggcattttttgttttgctcatcccctccaacctgcttgtattaagcagcctcacttcctgccttttaacttacatttctgtccacctatcatccactcttctttgttgacctttgcgtgtacagtgttgcttcaaaaaccttcaaaggaaaggtcaaagtgaaatgtcacaagggaagcaggcctgatggccagtggccaaggaggcaccaatgcccaggtctgaggctgcctgtggcatgcatgacactgccccaaaacgcaggtggtgagggtgcagcggccgcctgtgggtcccaagcgcgactccaagtgcgacacgctgtctaggccatctggtcccacaccaagtcacatctgtgcccagagaagcccagtggaccagtgcgggccccccagccctcagggcagagccaggacgcttcacacaagagtcactcattggattttctactccacgcacacgctgtcaataatggcaggcgccacctaaaggggcaggtgccagtgtaatttaacaggggagaaaaagtacagaggccacccaggaggatgctggaaagacagagggtggggagtgggaagaaacactcaggacccgcggcaccagggcgtgggactagaacgaaaagcaagaagaccatgtgaggggcaggggaggaaggactggccggatgccatcagttatcatcaatatgaagggaatgagcccaaggtaactctgaaatcctaaacttggatttggaagcactgaatctgagctgagggtggccctcagtaaggcactgtggccctaccactctggttcccccagtcgttctctgccctagtttgtaatctacaaagtgatcagaagctcataaaacatgggcacgagcactacagttgaccagcactgggcggggaaggtgatcctgggaaacctgcatgggactgtgcacaccaaccacaccaaccagaagcagccaacacacacaacygcaagggccaactcaacatggtaatcaacatctaaagctgca

SEQ ID NO: 554550 - DNA, 536 bp, Homo sapiens
tgaaccaattgactacgattggtctgattaaattcctcacatatcagaaaaagaaaagaaaaaaaacaaaaaacaaagtacaagactgatggccactaaggaaaatcctgtacttccacagaattagatgttgttaggagaattcaaataccaagtgaggaaaatgtcattgttatcttgacmcatttactgcagagatgtattggtctgcagcatagagtacataaaactcaaattaattaacagggagatgaacatttattatgttattttaagggatgtagtgtgacatctctattttgaagaaacgcatttggttgcatgaagttaattataaagattaagaaaaacaactcaaggcacaaaacacataatcttttctttctgattagattatcctgtctgaatgtcaagatcactttagattaatcagataacattgtaattgtcagtttcctaatgatctgagtttggcatttgagtcatctttggtatattagaataatttgaaaattattgttgttcatattttacca

SEQ ID NO: 554551 - DNA, 1029 bp, Homo sapiens
ttttcctaaaaagtcttttcatttaacatttaagagagaaatctaatgttatatgacttatcttttgtacataattatgacagaaagttacaggaagtatttttaaaaactaatgtgttgagtctcaataacataagttttaaaaataatttaacagccttagttaccctaagtctgcttttcaacaataaccaaaaaaaaatcttccatgcagtgtgcccttgctcccatttcatatgcatgattgattttaaaggctgctttgcagaagaactccagaatccagctgctaagacttatattacattgttttcaaacataagaaaaaactcactgatccttaacatacctctgaaaaaactatacttctccatctaaccaatggagaaactaagggataagaaataaagtactgcaacataacaaattgaaaccaaaattaaaattagggttttgttgttgttgttgttgttgttgtttgtttgtttgttttgagacggagtctcgctctgcygccagactggagtgcagtggcacaatcctggcttactgcaatctctgacttcctggttcaagcgattctctgtggtttcctctatcagtgtgtcatcttaggtcattttacctctgttagtttaatcagctttttaactgcttactgtattaagatgttttgattatatcattattttgaattgctccctcttaaaatgaatatttttaacctccgctttttgtttcacttttaacagcaggagttcttcccccttaaaattaatatagttctcccttaaaaatatatatagttcattgagagaaacatctgtgtttaatcacatggttgtttatcagactaatttggctttcatgtcacaagtgatatccttatttgcaagtttttaagtagtccttgttgctggtatggtgatgataagaaataaaaagaaattttcccatctgcatagttttagcagatgccattataattttagtttaaatacaatataaattttgaatttataccatgca

SEQ ID NO: 554552 - DNA, 555 bp, Homo sapiens
taaaggccccaggaatttgtgagtstgtttcttaaataagaaatttaaattcaagcaactatcaattattcatgtcaataatacaccaagttagcacaaattacactcatacctcatttgaacctataacatcaatcagaccctttatcaaaactgaagtccccaaatccagagaagaacatactaaaattggcagagaaaaacaaggagttctgaaggctgcatcatcatgattacgagcctgggaataattaatgcattgttttacaaagatgaatatttacactgcaggtaacaggtatataggaattcgaggttagataatcattttctatatttacttggctttcattaaagaataaacaggtatttagacaattgccatgaatttagtttattctcagaggtatttaaacattttcccttttattctaccaaagataccaggctaaagaacaaacatacttgtgtcagtcaagtgcctatcaggaaacactgggctgttttataatagataacctgagaagaatttattcgaggggcttgaatttattg

SEQ ID NO: 554553 - DNA, 555 bp, Homo sapiens
taaaggccccaggaatttgtgagtctktttcttaaataagaaatttaaattcaagcaactatcaattattcatgtcaataatacaccaagttagcacaaattacactcatacctcatttgaacctataacatcaatcagaccctttatcaaaactgaagtccccaaatccagagaagaacatactaaaattggcagagaaaaacaaggagttctgaaggctgcatcatcatgattacgagcctgggaataattaatgcattgttttacaaagatgaatatttacactgcaggtaacaggtatataggaattcgaggttagataatcattttctatatttacttggctttcattaaagaataaacaggtatttagacaattgccatgaatttagtttattctcagaggtatttaaacattttcccttttattctaccaaagataccaggctaaagaacaaacatacttgtgtcagtcaagtgcctatcaggaaacactgggctgttttataatagataacctgagaagaatttattcgaggggcttgaatttattg

SEQ ID NO: 554554 - DNA, 555 bp, Homo sapiens
taaaggccccaggaatttgtgagtctgtytcttaaataagaaatttaaattcaagcaactatcaattattcatgtcaataatacaccaagttagcacaaattacactcatacctcatttgaacctataacatcaatcagaccctttatcaaaactgaagtccccaaatccagagaagaacatactaaaattggcagagaaaaacaaggagttctgaaggctgcatcatcatgattacgagcctgggaataattaatgcattgttttacaaagatgaatatttacactgcaggtaacaggtatataggaattcgaggttagataatcattttctatatttacttggctttcattaaagaataaacaggtatttagacaattgccatgaatttagtttattctcagaggtatttaaacattttcccttttattctaccaaagataccaggctaaagaacaaacatacttgtgtcagtcaagtgcctatcaggaaacactgggctgttttataatagataacctgagaagaatttattcgaggggcttgaatttattg

SEQ ID NO: 554555 - DNA, 767 bp, Homo sapiens
taacaaaaacattcatagcaggatgtcttttacacttgatcttagccaaaagaccaagaagcgatgcaagatgccttttaatggagagagtcttcttactaatcctatgtgtatatcctgattttcttcaatatgtactttttaaattttaagttccagggtacatgctcacgatgtgcaggtttgttacataggtaaacgsgtgccatggtggtttcctgcacctattaacccatcacctaggtcttcaatattttttaaaaactcatttccagtgtgtgtttaatagtaatttaacaagaaaaataagatctcagatgctttatcaagctcagcttcttctatggaacagaaaaacttagcaatattggggttgaatccttgtgaagagctatacataccaaactctatcctaaccccatatgcttattacaaattataattccaaattttatcaccaaatcaaactcagagtaatagaaaagaaatatttaacacaaactaataattaaaacacaaatttcacctattgttcaggatatctttttgagaaaggtttttgttaaagaaaatttcagatacaaacataaagaaaattaaacaatcaatccccatattcccagctctcaataatgagccactcatagcaatctttcaacttacttttaatccatattttgaatccacaatagttatgatacctacaaaggaaaaaacattttaatcactttttaaaaagaatgcttattaatacttgtgcaaccata

SEQ ID NO: 554556 - DNA, 767 bp, Homo sapiens
taacaaaaacattcatagcaggatgtcttttacacttgatcttagccaaaagaccaagaagcgatgcaagatgccttttaatggagagagtcttcttactaatcctatgtgtatatcctgattttcttcaatatgtactttttaaattttaagttccagggtacatgctcacgatgtgcaggtttgttacataggtaaacgggtgccatggtggtttcctgcacctattaacccatcacctaggtcttcaatattttttaaaaactcatttccagtgtgtgtttaatagtaatttaacaagaaaaataagatctcagatgctttatcaagctcagcttcttctatggaacagaaaaacttascaatattggggttgaatccttgtgaagagctatacataccaaactctatcctaaccccatatgcttattacaaattataattccaaattttatcaccaaatcaaactcagagtaatagaaaagaaatatttaacacaaactaataattaaaacacaaatttcacctattgttcaggatatctttttgagaaaggtttttgttaaagaaaatttcagatacaaacataaagaaaattaaacaatcaatccccatattcccagctctcaataatgagccactcatagcaatctttcaacttacttttaatccatattttgaatccacaatagttatgatacctacaaaggaaaaaacattttaatcactttttaaaaagaatgcttattaatacttgtgcaaccata

SEQ ID NO: 554557 - DNA, 1061 bp, Homo sapiens
gggtatgaggccttgccccactgttaactcatggtgtgaaccaatcaccctgggcctcgatttcctcatctgtaaaataggaatgaaaatgccaagtaacaccaggccgaaggccatggaatggagctgcagtgtccagacctcagcggggagggtggtcactatgacaaaggacaggctgcctctggggctggacccaaaccagtgccccacaggttcctttcccttgggtgaggtgcagagaagagagactccacggaaaccrctgtattgggctgtccctcccacagaacgcttgagatgagagagcctgaggaagcttctagtccaagctcttcctcccatatccagagtattcactcatttgaaattggggaattagctaggggagcatttctaggagcaaatttactcgctactcccctcacccttttgttttgttttgtttttgagacagagtcttgctctgttgctcaggctggagtgcagtggcccaatctcggctcactgcaacctccacctcctgggttcaagcattctcccacctcagcttcctgagtagctgggattacaggcgcgtgccaccatgcctggctaatttttgtacttttagtagagatagggtttcaccaggctggtctcgacctcctgacctcaggtgatctgctcacctcggcctcccagagtgctgggattacaggcatgagccagcgtgcctggccaccctactccctttttattcacggaacagataaacctctccagtcacccaggcccctcaccctgaggtccacccttcatgaccttctctgtccccctattaagccaggtgccctggccagccctcttctcccaggggacagcagtgcctggggcagcagggtctggagccagtacctcggtctgcccagcagaaaggtcaagccaactgggagccgctgctctctttaaaggctctccaaggagtttctgccacctcccaggctccctggcagaccaaaggttgatggtgagggccagggtcgggccagggccggtactcaggactgacctgcctgtgg

SEQ ID NO: 554558 - DNA, 1061 bp, Homo sapiens
gggtatgaggccttgccccactgttaactcatggtgtgaaccaatcaccctgggcctcgatttcctcatctgtaaaataggaatgaaaatgccaagtaacaccaggccgaaggccatggaatggagctgcagtgtccagacctcagcggggagggtggtcactatgacaaaggacaggctgcctctggggctggacccaaaccagtgccccacaggttcctttcccttgggtgaggtgcagagaagagagactccacggaaaccgctgtattgggctgtccctcccacagaacgcttgagatgagagagcctgaggaagcttctagtccaagctcttcctcccatatccagagtattcactcatttgaaattggggaattagctaggggagcatttctaggagcaaatttactcgctactcccctcacccttttgttttgttttgtttttgagacagagtcttgctctgttgctcaggctggagtgcastggcccaatctcggctcactgcaacctccacctcctgggttcaagcattctcccacctcagcttcctgagtagctgggattacaggcgcgtgccaccatgcctggctaatttttgtacttttagtagagatagggtttcaccaggctggtctcgacctcctgacctcaggtgatctgctcacctcggcctcccagagtgctgggattacaggcatgagccagcgtgcctggccaccctactccctttttattcacggaacagataaacctctccagtcacccaggcccctcaccctgaggtccacccttcatgaccttctctgtccccctattaagccaggtgccctggccagccctcttctcccaggggacagcagtgcctggggcagcagggtctggagccagtacctcggtctgcccagcagaaaggtcaagccaactgggagccgctgctctctttaaaggctctccaaggagtttctgccacctcccaggctccctggcagaccaaaggttgatggtgagggccagggtcgggccagggccggtactcaggactgacctgcctgtgg

SEQ ID NO: 554559 - DNA, 1250 bp, Homo sapiens
attttcaaaaacagtgccgaggtaaattgatgctggaaaagatatgtttttcaacaaatagttctaaaaaacaactagttgtctctatgtaataaaaatggatcaccaggaaatgtggagaaacagatctaagagagataatgactgtgccacgtatttgtatttttatcctaaaatcgactcctgaattaagaaacatcagctccacctttaatcggaggaaactgaagttcaaaccatgaccacacagctaggaaacgttgaaaacaggattcaagcccggatatctctgaatctaagggttgccccaatgtgggaaaggaatggcactgtgcagagatgagtgagaagacagtgctcccaagtgactcaggaagctgagttcgcgcctggcccttggcctctctctatgtccccagggcccagctcagtcccagctacctggcagaaagagatgagggatgttgatttcacgttttggttttatgatgttgagtttggaggtggtacaggtacagtgtcctgaggccatggaactatgatagcctgctgtctcctaaagggaactgggatcgagttccaatggtctgtaagctcaggaggtggttcagaatcagaggaggttgcccactgctgctggggagtggagtctggtgggagagggacatggggacaactgtagagggctcagcatccagcccaccattcctgcccggaggatcctcaacatagagcactcgggggcagggcacagcagctsctcagaggggacgtgtttggcttggagctggtattccagaggtggggcagaggtgctaatgagacacatccttcccagttacatcccaggatgctgggtagggcccttccgcaaggacagtgcaagggtttgctcccttgttggtctctggttggccgcgttaatagtctggtgtagcctagtataaatcctacaaggttttcagcatctgtcgaccttgtccccaggttttccttttgcttctctacttgagctccctaacaattgcttttgacagcccatgcttcctattccttatctccagacacgcctcacttccaaagaattcccagccttccaaaaatctctggatttcctgaacactccaaggatgaattcaccggcccaaagtcttctctcaaccctgagtttctttttccttttttactttctgaggatttctagtaatttgagtcggcagtgtcactttccccattttttcttctggagt

SEQ ID NO: 554560 - DNA, 523 bp, Homo sapiens
aaacagatgaggggctgggtttggccagtagaccacactgtcctgactccttctggacctgaatcatttctatttctaagaaagatagaaagaaaagagaagagaggcaggtatggcaatgttaaggtttgttcaacctgagaggtgggtgtctgcaatattattttctatgcttttctgttctactttagaatattttagaattttcaaaaacttaaagaaaagaaggggaagggctggaaataaccccccagtgatcccagagcttattggtgggtgctggattaaaggtgatttttattttcttctgttctgtaatagatatttactgctttttgtaatcttaggagttgggtttttttgtttttttttttcgagacagggtcttactctgttgcccagggcggagtgcagtggtgcgatcataggtcatcacaacctggaastccttggcccaggcaatcctccaccctcaaccttttaaacagttaacaccacaggcctgtgccaccacaacaaaaaa

SEQ ID NO: 554561 - DNA, 611 bp, Homo sapiens
cccatctatcaagtgagaaactaacaatacctatgtcctaggaatactataatgattaaatgggataatgcatgacaaatgcttagcacgatacctgccacttagggagtgccctctcattgttagctactactgggcatttattaaagcaacttttaccaacttcctacatttttttctaacgttatgcagaagaggatttcacattttccacytccccacactaacaaacagaaggaaaatgccacctggaaaaatatgtgctgatgccaagaaatagagctgcataatagtgtttaatgatgcccagtataaaataccagactgtgggttatgtaaactctgctaacttattagcaggagtggcagataaaagatcaaggatgattgattcttgtctgggacaaggaaaaagccaagattttcaagtccaaccatgtcaaactatgacgattatatgggtgaacctaatttccaaagtagtaggcagtgagcaggaaggagaagaagggctggcatgagcggagaggcaagtgctcccagccttctcaccgtgggaacatgcgattcatccctgatgaaccttttcccacacagataatcaccctctt

SEQ ID NO: 554562 - DNA, 611 bp, Homo sapiens
cccatctatcaagtgagaaactaacaatacctatgtcctaggaatactataatgattaaatgggataatgcatgacaaatgcttagcacgatacctgccacttagggagtgccctctcattgttagctactactgggcatttattaaagcaacttttaccaacttcctacatttttttctaacgttatgcagaagaggatttcacattttccacttccccacactaacaaacagaaggaaaatgccacctggaaaaatatgtgctgatgccaagaaatagagctgcataatagtgtttaatgatgcccagtataaaataccagactgtgggttatgtaaactctgctaacttattagcaggagtggcagataaaagatcaaggatgattgattcttgtctgggacaaggaaaaagccaagattttcaagtccaaccatgtcaaactatgacgattatatgggtgaacctaatttccaaagtagtaggcagtgagcaggaaggagaagaagggctggcrtgagcggagaggcaagtgctcccagccttctcaccgtgggaacatgcgattcatccctgatgaaccttttcccacacagataatcaccctctt

SEQ ID NO: 554563 - DNA, 706 bp, Homo sapiens
ggatttcaccatgttgcctaggctggtctcaaactcctgacctcaagtgatctgcccacctcggcctcccaaagtgctgggattataggtgtgagctttttttcctggccacaacttagcattaatcacttgactgacatagtgaattaattatgattacctccttgaaagaaaattatttacataaattatttgggatttttcttcaygatatggagatttttaatataaagaatcccattttacagaacaagtgagtttgactatttaaaggaaaagcaaagttctctcaggaatctatttattatttaaatctttcttgcagttaaactaccagatttcataattttgcatccagtatagtagtttgtaaagggtagatggttaatgtaactatgtttattgcattaatgttatagtcccctcaaattttgtgtattataaattgatcacaatcatttttctgatcaaaatgagccaaattttaaaaaatatatacattatggctgcatgaattactaatatatagtgataggatgcagagtaagagttaattgatattgagatgtgagattagctggggaattttaggatgataggtatgttttattatttgattgtagaagaaattgcatgggtatttacattcatcaaaactcatcaaactgtaccttaaaatgtgctcatttattgtgtaaattatacc

SEQ ID NO: 554564 - DNA, 706 bp, Homo sapiens
ggatttcaccatgttgcctaggctggtctcaaactcctgacctcaagtgatctgcccacctcggcctcccaaagtgctgggattataggtgtgagctttttttcctggccacaacttagcattaatcacttgactgacatagtgaattaattatgattacctccttgaaagaaaattatttacataaattatttgggatttttcttcatgatatggagatttttaatataaagaatcccattttacagaacaagtgagtttgactatttaaaggaaaagcaaagttctctcaggaatctatttattatttaaatctttcttgcagttaaactaccagatttcataattttgcatccagtatagtagtttgtaaagrgtagatggttaatgtaactatgtttattgcattaatgttatagtcccctcaaattttgtgtattataaattgatcacaatcatttttctgatcaaaatgagccaaattttaaaaaatatatacattatggctgcatgaattactaatatatagtgataggatgcagagtaagagttaattgatattgagatgtgagattagctggggaattttaggatgataggtatgttttattatttgattgtagaagaaattgcatgggtatttacattcatcaaaactcatcaaactgtaccttaaaatgtgctcatttattgtgtaaattatacc

SEQ ID NO: 554565 - DNA, 706 bp, Homo sapiens
ggatttcaccatgttgcctaggctggtctcaaactcctgacctcaagtgatctgcccacctcggcctcccaaagtgctgggattataggtgtgagctttttttcctggccacaacttagcattaatcacttgactgacatagtgaattaattatgattacctccttgaaagaaaattatttacataaattatttgggatttttcttcatgatatggagatttttaatataaagaatcccattttacagaacaagtgagtttgactatttaaaggaaaagcaaagttctctcaggaatctatttattatttaaatctttcttgcagttaaactaccagatttcataattttgcatccagtatagtagtttgtaaagggtagatggttaatgtaactatgtttattgcattaatgttatagtcccctcaaattttgtgtattataaattgatcacaatcatttttctgatcaaaatgagccaaattttaaaaaatatatacattatggctgcatgaatyactaatatatagtgataggatgcagagtaagagttaattgatattgagatgtgagattagctggggaattttaggatgataggtatgttttattatttgattgtagaagaaattgcatgggtatttacattcatcaaaactcatcaaactgtaccttaaaatgtgctcatttattgtgtaaattatacc

SEQ ID NO: 554566 - DNA, 578 bp, Homo sapiens
ctgaaataaaacaaactaattaagtaatgcaatcatgaaaagacatggaagaaacttcaatgcatattagtaagtgaaagaagcctacatgaaaaggctcatatgtatgacaccaactatatgacattctcagaaaggcaaatctatgaaaatagtaaaagaatctgtgattgtcagggaatagtgaggaggaaggaagcagaacacagaggattttcagggcagtgaaaagaatgtttatgatactccagttgtgaatacatgtcattatacatttggacaattcatcaattayattctctgtattttccgttcacttttgctgtgaacctaaaactggtctaaaaatgtttattatgaaataaaacaaattcagaaaaatatactatataaaagtaatttttgaatattgagcaaatacacacagtatttataaaaataagaaaggcataaaaatcatgcaacaacaaataccctatttcctaccaagcagtctaaaaatattttaattattttaaatacattatggattccttacctattcaatttcctctctctttgtgtttcatcgtagcttt

SEQ ID NO: 554567 - DNA, 918 bp, Homo sapiens
gaggttgtggtgagccaagatggcaccttcctgggcaacaagtcaaaactccatctaaaaaataaataaataaataaataaaataagctaacaaaaaccagaaaaagacagatttttattcatctacatatgcaagagttcacagaaaattgtgactcaaaaatgtggttagcactgggggcttatatacaatccttttttttttttttttttgagatggagtctcactctgtcacccaggctggagtgcagtggcgtgatctcggctcactgcaagctctgcctcttgggatcacgtcattctcctgcctcagcctcccgagtagctgggactacaggtgtctgccaccacacctggctaattttttgtatttttggtagagacagggtttcaccatgttagccaggatgatctcgatctcctgacctcgtgatccaccggcctcggcctcccaaagtgctgggattacaggcatgagccaccgcgcccagcctttacaatcttaataggggaaggggaagggaagaaggggcacgtatgggaaaacaagtgacttttaggaaagatacatgggcccttaggagaaaagattgatcattttgtgacaatgttttatcccagtgcaaacttctagtgtccactgacaggtgtcactgtcctctggttgtgaaactcctacggaggggatttatggcagctgaagtcttttggggaggttctacttttagagagacaaaggaagttcagaataaaagacttcacacagtgcatccatttgggcttaaggtgggtctttcaatgagggacagtaacaggggaggyttagttagaattgagtaatgatcatgatgcagtagtttaggattggtggaaacaaaaagaggaggaattttaggcaaaggggttaaacagtctca

SEQ ID NO: 554568 - DNA, 554 bp, Homo sapiens
gttattttggttatcttcttaggaggctgcatctgaatttgcagcctctgttctagtaaatttggaaaatatggaaaggtagacaggagaaaagaaatctcatcttttcagtttttttccttgtatgcattagatgatttgtaacatcctattacactctcaaatgattgattctcattatctgcactaacgactatttctgaatttgtgacgccacagctgaacctgcaggttatagttttcagataagcatttacaaataatttttaaggaatgtccttttgtttccctgggaaattttttttttttttttttttttgagacrgagtctcaccctggagtgcagtggtgcgatctcagctcactgcaacctctgcataccgggttcaagcaattctcctgcctcagcctcccgagtaattgggattacagacatgaaccaccatgtccagctaattttgcatttttagtagagacagggtttcgccatattggccaggctggtctcaagctcctgacctcaagtgatccacctgccttggctccccaaagtg

SEQ ID NO: 554569 - DNA, 712 bp, Homo sapiens
agatgatcaaagagctctactaaagaaggtggaagttcattccttaaaaatatgttgaaaagaatgtcctagtcacttttctgagatcctgtctaaatatagccagattcctacagcttgaaagttttatcatgacatacacacaccaaacacacacawccctctccttcttcctgtcaatctcttactctctcatttgttttaaaccacacacacacacatacaaacaaatgcccagtgtaaccatatagaattgctaatatttaacaatttttacctacaaaaatggcaattttttatggtttaactgaatatatatatacatatagtatagcaaattagcatatattatataataatatgtatatgtgtgtaaattaacatgtattatataataaaacatattgatgtgtgtgtgtgtatttttccctcagagagttaggccatacttgtttctatgaaaaccaaactttgcccaaagggcataattcagctgctatgactagtttcattcttctttccacccaatacacattcatacacataaatagaaaaaactctaaagtctttattatgactttcattcagagctatgtcaaagataggtttcttttttcttctgagtagtatatttttatttatagttaataatgtgggaattaaagttaataaaaattaggagaaaactatgttaagtgaaataagtaaggca

SEQ ID NO: 554570 - DNA, 712 bp, Homo sapiens
agatgatcaaagagctctactaaagaaggtggaagttcattccttaaaaatatgttgaaaagaatgtcctagtcacttttctgagatcctgtctaaatatagccagattcctacagcttgaaagttttatcatgacatacacacaccaaacacacacatccctctccttcttcctgtcaatctcttactctctcatttgttttaaaccacacacacacacatacaaacaaatgcccagtgtaaccatayagaattgctaatatttaacaatttttacctacaaaaatggcaattttttatggtttaactgaatatatatatacatatagtatagcaaattagcatatattatataataatatgtatatgtgtgtaaattaacatgtattatataataaaacatattgatgtgtgtgtgtgtatttttccctcagagagttaggccatacttgtttctatgaaaaccaaactttgcccaaagggcataattcagctgctatgactagtttcattcttctttccacccaatacacattcatacacataaatagaaaaaactctaaagtctttattatgactttcattcagagctatgtcaaagataggtttcttttttcttctgagtagtatatttttatttatagttaataatgtgggaattaaagttaataaaaattaggagaaaactatgttaagtgaaataagtaaggca

SEQ ID NO: 554571 - DNA, 712 bp, Homo sapiens
agatgatcaaagagctctactaaagaaggtggaagttcattccttaaaaatatgttgaaaagaatgtcctagtcacttttctgagatcctgtctaaatatagccagattcctacagcttgaaagttttatcatgacatacacacaccaaacacacacatccctctccttcttcctgtcaatctcttactctctcatttgttttaaaccacacacacacacatacaaacaaatgcccagtgtaaccatatagaattgctaatatttaacaatttttacctacaaaaatggcaattttttatggtttaactgaatatatatatacatatagtatagsaaattagcatatattatataataatatgtatatgtgtgtaaattaacatgtattatataataaaacatattgatgtgtgtgtgtgtatttttccctcagagagttaggccatacttgtttctatgaaaaccaaactttgcccaaagggcataattcagctgctatgactagtttcattcttctttccacccaatacacattcatacacataaatagaaaaaactctaaagtctttattatgactttcattcagagctatgtcaaagataggtttcttttttcttctgagtagtatatttttatttatagttaataatgtgggaattaaagttaataaaaattaggagaaaactatgttaagtgaaataagtaaggca

SEQ ID NO: 554572 - DNA, 712 bp, Homo sapiens
agatgatcaaagagctctactaaagaaggtggaagttcattccttaaaaatatgttgaaaagaatgtcctagtcacttttctgagatcctgtctaaatatagccagattcctacagcttgaaagttttatcatgacatacacacaccaaacacacacatccctctccttcttcctgtcaatctcttactctctcatttgttttaaaccacacacacacacatacaaacaaatgcccagtgtaaccatatagaattgctaatatttaacaatttttacctacaaaaatggcaattttttatggtttaactgaatatatatatacatatagtatagcaaattagcatatattatataataatatgtatatgtgtgtaaattaacatgtattatataayaaaacatattgatgtgtgtgtgtgtatttttccctcagagagttaggccatacttgtttctatgaaaaccaaactttgcccaaagggcataattcagctgctatgactagtttcattcttctttccacccaatacacattcatacacataaatagaaaaaactctaaagtctttattatgactttcattcagagctatgtcaaagataggtttcttttttcttctgagtagtatatttttatttatagttaataatgtgggaattaaagttaataaaaattaggagaaaactatgttaagtgaaataagtaaggca

SEQ ID NO: 554573 - DNA, 1734 bp, Homo sapiens
attttctggtgattccaagagcagatgagattaggggttcctgccatgagtgttttaaaagaattctgaattattaagtgggtccttttccccatcataatgttttgaaaaatgcctccctcactgcctccttcatcagtcactttttaaggaacacttcctctggacgcttcataactatatcatatacacccctattaaatgacctttttacagctgaaattttgcatttcattatatgattttttttaaaataaatattttcctctcccaatagtttctaagcttctgagaccgaggaagtacttgtttttgctaattaatatattttagagtgccmggcacatttgtaatttgttgaataaatatgaataaatgaacaataatacatgagcaagtgaataaatgagtgcatgaatgaatggtcttctcaagtcatatggttttgaggagttaaatagctttaacttctccctgaaaaaagaaatgaggcagtccttggttttgctgagagacgtaaaggctatattcccagcacataagtcacaacagagaacccaggcttctagagaacagggaagcaagatggtaacatccacatccacactgatgaggatgactggcagaaatgcccatgcacgagcaatagcagtgtgctgtctgtaccagggagaaaatgtgcctaatatttgaataggatttttagagattcatgttcgtcagggatcaggtgtatttttctcagttgatgagtccccagggttctggaattcccgggattgcactagcagagacttagccaaagactgcatttgcttccttactacactgactgcttatacaaaggtatatactatatcagtttcatttattgagttgcacttcagagcagtaatttccaaattagggtcaagaaagagtgaaagtgaataaaacagataggagaggtgagacagatgagactccaggacctttgcttcaaagtagtcacagtctcatctgttttatattttgaacttttatagtttggtgtgtatcacttccaacaaaatgtatgctccatgagagcataaattgttgtctgttttgttcagtgctattttaccaacacattaaacagtatctggtgcattaaaaacattaaatacagtttttattgaactaataatcagggctttatttaagaaaagatttcgctatttcttaatgttaagtgttcttaataaaagtacttttcagaaaatgtggattaccacttcttgaagcatttgtcttcatcattttcatccaccaatttttacagtaaaaatcttttgctgaactcttgttcagcaatctgtactgaattcttgttcagtacagcaaaatacataaacaaaattcatgtatcctctctgtgtttagaataccaatgtcccttgcttttagttccatctgtttaaattgctaaagaaaatcatctcctcctgtaaggtctaagatattgtcttcttaaacgtgagttttgacatttcctactaacttttagagttgaataacgttggtgatttgctttctgatatttgtttgagtgcctacataaaataatttcatctgaatacaacaatatgcttcttgtgctaacgtgagtaaggcgagcattttaagaaggcttctatttaataaaatacatatggaacaccaatttcacttaatctccaattcaattttattgccttcacagaatgctgctag

SEQ ID NO: 554574 - DNA, 1734 bp, Homo sapiens
attttctggtgattccaagagcagatgagattaggggttcctgccatgagtgttttaaaagaattctgaattattaagtgggtccttttccccatcataatgttttgaaaaatgcctccctcactgcctccttcatcagtcactttttaaggaacacttcctctggacgcttcataactatatcatatacacccctattaaatgacctttttacagctgaaattttgcatttcattatatgattttttttaaaataaatattttcctctcccaatagtttctaagcttctgagaccgaggaagtacttgtttttgctaattaatatattttagagtgccaggcacatttgtaatttgttgaataaatatgaataaatgaacaataatacatgagcaagtgaataaatgagtgcatgaatgaatggtcttctcaagtcatatggttttgaggagttaaatagctttaacttctccctgaaaaaagaaatgaggcagtccttggttttgctgagagacgtaaaggctatattcccagcacataagtcacaacagagaacccaggcttctagagaacagggaagcaagatggtaacatccacatccacactgatgaggatgactggcagaaatgcccatgcacgagcaatagcagtgtgctgtctgtaccagggagaaaakgtgcctaatatttgaataggatttttagagattcatgttcgtcagggatcaggtgtatttttctcagttgatgagtccccagggttctggaattcccgggattgcactagcagagacttagccaaagactgcatttgcttccttactacactgactgcttatacaaaggtatatactatatcagtttcatttattgagttgcacttcagagcagtaatttccaaattagggtcaagaaagagtgaaagtgaataaaacagataggagaggtgagacagatgagactccaggacctttgcttcaaagtagtcacagtctcatctgttttatattttgaacttttatagtttggtgtgtatcacttccaacaaaatgtatgctccatgagagcataaattgttgtctgttttgttcagtgctattttaccaacacattaaacagtatctggtgcattaaaaacattaaatacagtttttattgaactaataatcagggctttatttaagaaaagatttcgctatttcttaatgttaagtgttcttaataaaagtacttttcagaaaatgtggattaccacttcttgaagcatttgtcttcatcattttcatccaccaatttttacagtaaaaatcttttgctgaactcttgttcagcaatctgtactgaattcttgttcagtacagcaaaatacataaacaaaattcatgtatcctctctgtgtttagaataccaatgtcccttgcttttagttccatctgtttaaattgctaaagaaaatcatctcctcctgtaaggtctaagatattgtcttcttaaacgtgagttttgacatttcctactaacttttagagttgaataacgttggtgatttgctttctgatatttgtttgagtgcctacataaaataatttcatctgaatacaacaatatgcttcttgtgctaacgtgagtaaggcgagcattttaagaaggcttctatttaataaaatacatatggaacaccaatttcacttaatctccaattcaattttattgccttcacagaatgctgctag

SEQ ID NO: 554575 - DNA, 1734 bp, Homo sapiens
attttctggtgattccaagagcagatgagattaggggttcctgccatgagtgttttaaaagaattctgaattattaagtgggtccttttccccatcataatgttttgaaaaatgcctccctcactgcctccttcatcagtcactttttaaggaacacttcctctggacgcttcataactatatcatatacacccctattaaatgacctttttacagctgaaattttgcatttcattatatgattttttttaaaataaatattttcctctcccaatagtttctaagcttctgagaccgaggaagtacttgtttttgctaattaatatattttagagtgccaggcacatttgtaatttgttgaataaatatgaataaatgaacaataatacatgagcaagtgaataaatgagtgcatgaatgaatggtcttctcaagtcatatggttttgaggagttaaatagctttaacttctccctgaaaaaagaaatgaggcagtccttggttttgctgagagacgtaaaggctatattcccagcacataagtcacaacagagaacccaggcttctagagaacagggaagcaagatggtaacatccacatccacactgatgaggatgactggcagaaatgcccatgcacgagcaatagcagtgtgctgtctgtaccagggagaaaatgtgcctaatatttgaataggatttttagagattcatgttcgtcagggatcaggtgtatttttctcagttgatgagtccccagggttctggaattcccgggattgcactagcagagacttagccaaagactgcatttgcttccttactacactgactgcttatacaaaggtatatactatatcagtttcatttattgagttgcacttcagagcagtaatttccaaattagggtcaagaaagagtgaaagtgaataaaacagataggagaggtgagacagatgagactccaggacctttgcttcaaagtagtcacagtctcatctgttttatattttgaacttttatagtttggtgtgtatcacttccaacaaaatgtatgctccatgagagcataaattgttgtctgttttgttcagtgctattttaccaacacattaaacagtatctggtgcattaaaaacattaaatacagtttttattgaactaataatcagggctttatttaagaaaagatttcgctatttcttaatgttaagtgttcttaataaaagtacttttcagaaaatgtggattaccacttcttgaagcatttgtcttcatcattttcatccaccaatttttacagtaaaaatcttttgctgaactcttgttcagcaatctgtactgaattcttgttcagtacagcaaaatacataaacaaaattcatgtaycctctctgtgtttagaataccaatgtcccttgcttttagttccatctgtttaaattgctaaagaaaatcatctcctcctgtaaggtctaagatattgtcttcttaaacgtgagttttgacatttcctactaacttttagagttgaataacgttggtgatttgctttctgatatttgtttgagtgcctacataaaataatttcatctgaatacaacaatatgcttcttgtgctaacgtgagtaaggcgagcattttaagaaggcttctatttaataaaatacatatggaacaccaatttcacttaatctccaattcaattttattgccttcacagaatgctgctag

SEQ ID NO: 554576 - DNA, 568 bp, Homo sapiens
ggttcctagaaggagatatgcaaaagtaaaagcaggttgtacctgcccctggaatatatcctggagaaacacgagaccatacaatggtatgcaatcaccattccagtcatgtaaagcaaaatatacactgatgctcttattccctttggcaaggtgcctgggtatcataaggaatagacagagtcacataagcaggttgatctgggcatgctaacccatgatccagcatctcacaaagtagccagtgcaaccatctcattgttatccaggaggtgatgacttcagatttgggttttcccattcagtcagctcgttcttcttcccccaccagcagcaccaacctcatccaattttcctgagatttgcaggggctctccccacacagtttacacacctatcccttagagccagcacacaggcatgtaccacggaccragggctgctccatctttcctcacaatacagcaagccaacacatcatacctcctacattctatacttatgatttcatgattttctgctcatcctcactccctcatttctataattctctgtcgcaaatgcatgt

SEQ ID NO: 554577 - DNA, 626 bp, Homo sapiens
ttctttttctggtggggagcagaaagcgtaaaggtgaatgttcattcctataaattaggggcgactggtataaactttaagatccctgttaaatgcagaaaacattcaatctctagaccatctgtagcaaatttacagcaaacactwctgcatccctggaaacagttttatgccacaaaccaggaatttctccaaagttacaattacgtgatgcaaaacaggtaattttcaccccaatctcgtgttttcattccaggtcttagttaatgctgtcttgatggttgctgtttgatgaatcagctttcctgttaactagaggtgcagggccatcatctaatgaaaacactctgtattttattactccctgggctgcagttctgcatattaaaatagaatttcaatcttactgtctagaaacaaaatcaaacgtagcatctgtggtttgaacagaactgagaaaaatgctgctcatttaatcttaacgatatttttcatgctagacagtataaaaaaagaggccctggatatatttttaaattgcctataaattagaaataaattggtagaaatcagcacaatagttcagagcacgggttagctcattttacctacaaatttgctgaaag

SEQ ID NO: 554578 - DNA, 626 bp, Homo sapiens
ttctttttctggtggggagcagaaagcgtaaaggtgaatgttcattcctataaattaggggcgactggtataaactttaagatccctgttaaatgcagaaaacattcaatctctagaccatctgtagcaaatttacagcaaacacttmtgcatccctggaaacagttttatgccacaaaccaggaatttctccaaagttacaattacgtgatgcaaaacaggtaattttcaccccaatctcgtgttttcattccaggtcttagttaatgctgtcttgatggttgctgtttgatgaatcagctttcctgttaactagaggtgcagggccatcatctaatgaaaacactctgtattttattactccctgggctgcagttctgcatattaaaatagaatttcaatcttactgtctagaaacaaaatcaaacgtagcatctgtggtttgaacagaactgagaaaaatgctgctcatttaatcttaacgatatttttcatgctagacagtataaaaaaagaggccctggatatatttttaaattgcctataaattagaaataaattggtagaaatcagcacaatagttcagagcacgggttagctcattttacctacaaatttgctgaaag

SEQ ID NO: 554579 - DNA, 558 bp, Homo sapiens
aaaattccagtctgtttgttcactgtgggtgctaataaaagcagctcttgagccatttcaaacagacgatgaggcagattcagatgaggaagaggaagacgagtgtaaaaatcgaacttcagattctgaatgtgaggaacaggaaacggaggaaatttaaagaaaggatatgttttactagcccatcagctccacctgctgaattaagtgaaaggccacttcctctctcctcttaatgggcaagaagatgaattggctacaaaacttactgctccygtagttgaaacattaaaacctggagcaattggtggtgctacacaaaattctattcaaaaggctagagccgagagagaccttgaagcatggtaattccccgtaactataagatgctcttttaagatgctctgctccccagtttctacccagcttaccccccctgcaatacaatcttcaagccttggctccttgcccagggccttagaactgataacctagtactttaacagctggaactgggtctacaacaacataatagatcaggatgaaaacaaattcagt

SEQ ID NO: 554580 - DNA, 636 bp, Homo sapiens
aagcctgaaacctttagaaacaagagacatccttgagacacaacctcaggggacactccctgctgaccgtctctttcaatttggcagagggaaactgccttgtgtcttgtatttctccgtcttgagcatagctttgctgacttagcacaaatttcccataaaaagctggcctctagggagcagagactgaacttggaaacttttatcccaaaaggagaatttgttgtaaagttatgagtggctgaaatatgaggggctggaactgttgggagcggggttgaatggcagtggttttacagctcctgagattctatttcctcccgtgaatggtcaactagtcccccatgagccacccttccccatgacccttggcaaaaagcattattaccctgtttgcccactgaaaaagaagattaggactgttaccaacaaagctacttcccatggtaaaaagagcctcttggatcaagttttctctctatggtcactgaaaatgacaattcatttcttctccrccagccaaatgctatctccagatgcacacatgtgtatcccattgaagtcagagaggcccaaaacacatttgaggtctcttcttggtggcaagaaagtggagctataaagacaagctccaga

SEQ ID NO: 554581 - DNA, 682 bp, Homo sapiens
ttttttttttttttaaccttcaaaaacctctaaaaagtagtcagttttcaattatctactgctggtgatgtgktttataggcaacaacatagctatgtcccagaaagctctctccctgtgacccaaagcacatccaaagtcccctctcctcattgcacagcttttacagactcacaagatcttagagatgccctagaacctgacatttgtctaatctatttttcccagtctgacaatgaagctggagctatctgtgtggagccagaagttcaaccaatacctctgggccatgcttttccccaccactctagaatgtttaaagtcagtggaaaggggagtgttggggggagccagaatctaaagccaagccttcacatgtataatgtattccaaatgtaaacatttcttagttattacccatattcctgctcccttctataaggcacagggcagaagactatgcgagtgtgtatgcattcctacttaaaaggcaaatctcagtaatcctgttttttctcactatctcagttacccattcccacggtcatgcaccaagaactggctttcaattttttccaactgtgacccagagggaaatatttacatcccaacgcagttcacaaatacacagtaaacacacccagttttaatgaaaacaacatttttaaatgactatgtgatc

SEQ ID NO: 554582 - DNA, 682 bp, Homo sapiens
ttttttttttttttaaccttcaaaaacctctaaaaagtagtcagttttcaattatctactgctggtgatgtggtttataggcaacaacatagctatgtcccagaaagctctctccctgtgacccaaagcacatccaaagtcccctctcctcattgcacagcttttacagactcacaagatcttagagatgccctagaacctgacatttgtctaatctatttttcccagtctgacaatgaagctggagctatctgtgtggagccagaagttcaaccaatacctctgggccatgcttttccccaccactctagaatgtttaaagtcagtggaaaggggagtgttggggggagccagaatctmaagccaagccttcacatgtataatgtattccaaatgtaaacatttcttagttattacccatattcctgctcccttctataaggcacagggcagaagactatgcgagtgtgtatgcattcctacttaaaaggcaaatctcagtaatcctgttttttctcactatctcagttacccattcccacggtcatgcaccaagaactggctttcaattttttccaactgtgacccagagggaaatatttacatcccaacgcagttcacaaatacacagtaaacacacccagttttaatgaaaacaacatttttaaatgactatgtgatc

SEQ ID NO: 554583 - DNA, 1590 bp, Homo sapiens
tggagaataacggcatttttttcaaagccagggctatgcttggatgcaacagaaacgtggccggtcagccagccctggagctgtccaggtgttagatgctcacctgtgtgacaggctgaggagggattcaagcactagagggccgcttctaacccagagagtctgcacttttgttctcactatcacagttatgtacattctaatgtgctgtcacagcctcatctgtttcctggagaatgtgacaagcactgttttatgaagaaagtaaacaaaagaatcccagccaaggtggtatcgcaaattaaattcacattttgaggtctcctcctccttgctgtaataaacacacagcaatgatagctgaaatacaaaaatagaaaatttaaagacatagcattactcaaaaataaaattctcaggggggaaaaaaccacaacatggtaagtggagatgaggctgcaggcttgatgggctctgagtgcaatacagacagaggtgcctggcattgagaattctctggggtaacagagactcatagcacgcccaagtaaaggcgggggccagagccacaatcaatgcaaaagagaactatagtcaagctcactatttgaagcaaagggttggagcagagcaggtagagaagggcttcctctgctctagaggaaagctgggatgaagttctaccaactgctacctgctgcctcagcccacaggaagctgcacgctctggatggcaggacaaggtggaaaactgtgacagatggaatgcaaacatggccagttattcaccccttcctatacccatagcctttggaatgactttgactctcctaccatcaaaaggtgagttggcacccatgaccaccagctgatgcctataattccaacaccttgggaggccaaggtgagaggatcacttgaagtcatgagttcgagaccagcctgggcaacataatgagacccaatctctataaacatttttaaaatttagccaggcatggtggtacacacctgtagtcccagctaatcaggaggctgaggcacaagaatcgcgtgagcccagtagattgcggttacagtgagccrtgattgtaccactgcactccagccttggtgacggagcaagacactgtctcaggggaagaaaaaaaaaaaaagggtggagtctactttctaccttttgaatctgggctggccttgtgacttgatgtggccaaaagaatatgataaaagcgagaggaagcctgttccaggcataggcctcaagagttaccagaaaaagacagtttctaaggagtcaataactggatggacagcagacatctcttcagtaacaagagacccaaaagacaaattctgcagggaagtaactgcatgcctggaattctgaactctgctaaagcagtattcaaaagtgagaggaaaacagagacattttaagacatccaaatattaagagcgttgaccatccttggcactcaccatatgcgctaagtacaacttgagaatgaactcagccagaagaaaagggaactcagaagaaggaatagggcacaaaaaacagtggcgagcaaaagcattaggaaaatg

SEQ ID NO: 554584 - DNA, 669 bp, Homo sapiens
acacattagtgtttgtggattttcttgcctcaatatatagaaaggaatccacgaggtgactcctagcttttcagttcaaatattcttaaggtctcattgagtgatgagatatcacacattgcctaacaaactgacagacactaaaattatcattctgacatttcaggaatttgtagggataagaagaggagtagagggacaggtttaggccacatacgaaagggatcagaatggcatcaacttactctataactaccctaaaagaagaagagaatagaaaattacctataaaatgtataggaaatggcttatcatctcgaattctatttccagtcaaataataaaaagtgtaagtataggatagacattctcagacatgtaagttctcaggagcactgtattccctatggaccattttttcaggttttgggaagacatgttccaccaaaatgacagtaaaaaaaaagagagagagagaaagagagagagagaatgagagagagagagtagatcttacaaacaaagtacacaatgcagaaaaaagtgaaaagaattmccaagatgctgttgaacaaaagctgtgcagaaagccaagcgtgcacccaatcccaatccagactggagaaaaacaatgagcattcccagagatcattctgcagggctaaaaaa

SEQ ID NO: 554585 - DNA, 669 bp, Homo sapiens
acacattagtgtttgtggattttcttgcctcaatatatagaaaggaatccacgaggtgactcctagcttttcagttcaaatattcttaaggtctcattgagtgatgagatatcacacattgcctaacaaactgacagacactaaaattatcattctgacatttcaggaatttgtagggataagaagaggagtagagggacaggtttaggccacatacgaaagggatcagaatggcatcaacttactctataactaccctaaaagaagaagagaatagaaaattacctataaaatgtataggaaatggcttatcatctcgaattctatttccagtcaaataataaaaagtgtaagtataggatagacattctcagacatgtaagttctcaggagcactgtattccctatggaccattttttcaggttttgggaagacatgttccaccaaaatgacagtaaaaaaaaagagagagagagaaagagagagagagaatgagagagagagagtagatcttacaaacaaagtacacaatgcagaaaaaagtgaaaagaattcccaagatgctgttgaacaaaagctgtgcagaargccaagcgtgcacccaatcccaatccagactggagaaaaacaatgagcattcccagagatcattctgcagggctaaaaaa

SEQ ID NO: 554586 - DNA, 587 bp, Homo sapiens
aattttccttgatttaaaaaaaatagatgtttgatcttgcattatgtgattagaatctgcccttatttcttggaggatacttatttatcatgcttattttaaatgtttccgtgctatagtgatgcttctccacctggtataggttgtatgattttgttgtctctctctgatgtaatttgtaggtctcagatagattttagagatagatcttaggtaggtgatcttagctaggtcattgtttttctctgaggtcacattccttagaggtgccctagcagcttctttggggagagggaccataatccaggtcttaacattttccccrcctggagcagaaaggagggtattctatgccagggtgaagagctccctcacctgtaggaatatcctctctatgaacccttgccttcatggaaacaccctttccctccacgctgtttgagttgagtagaagaaatttccatggctgtccagtttgctgcatctgttgataaatgctgctccatgcagcagggtttaacagttgtagctgccactgcttttttttatgccttgctaggatgacagagtaggtaacaatgcatgca

SEQ ID NO: 554587 - DNA, 1306 bp, Homo sapiens
tgacaatatgtcacttccatttgagaaattaaatagtaaatgatgtttattactccctagattttaatgtaaagtttaatagttcagtttagttttatacatattttgtcctaagcagtttacagatcaatatttttaaaagtttctactttttattaatttcattaaagtccttttgataaagttagacttcctggaacccttatgtttggcaatgaatttccagattgattcaggtttataaggacaaatacacgtgacactacagaagtgtgagggagtaggacttagatgctttttctagggcctcagttgatcagaagtggacagcagctgttccatcaaaaactcaaacggggttgtggggatttgcaacctcaacctctttcccagagcatattaggaggacacagataaaaggagtcaataaacgcattggcaaattacaacgtgaaaagtcaccactgtggggtattatttgctatgtagctaatccctctggggactctctgagacagcccatggaacgtgtctcagaatcttcctgtccactgattgctatcctgcatttgttggatgtcacctccagggacattgtcccctcttcctgccacacacatgtaattctgggttgtttttgcatgtgtccaatcttctatacaaaactcttccctgggaagagtgacaaggcagactcttgagatggaaatctgtcaaccttactagaactttctgttgaactcaggaacactggggaacactgaggcatcaataycatatgctttgacatagttttaatactctttccattttaggttttttttttttgtcttaaatctgaatgcagtcatgttcttcaagttttatcctatagaaagaactgccttcctatgaagccacagggattaaagacataaagctgcagatttcattgcggtagaaaaccctactttcctgcctgttggcagaacacttattaggagtttgcagaagcaaagtgcaattattctccatgatgccaggacctacattgttcattaacgtagaacaaaactcagatatattattaagtgtcccagattattcatttgtgagcagactaccaattgtctttccaaatgaattttctttgttctcagtacttttgatcatattcaaaatctcaaagcttttaaaattttcaaaatgggctctcaaaatagaaaatgtgatctagtgaagctgactgtacttacagtttgttatgagccgaacgctgcgtccctctaaaactcctaagttgaaaccctagccactaatatgatgg

SEQ ID NO: 554588 - DNA, 1306 bp, Homo sapiens
tgacaatatgtcacttccatttgagaaattaaatagtaaatgatgtttattactccctagattttaatgtaaagtttaatagttcagtttagttttatacatattttgtcctaagcagtttacagatcaatatttttaaaagtttctactttttattaatttcattaaagtccttttgataaagttagacttcctggaacccttatgtttggcaatgaatttccagattgattcaggtttataaggacaaatacacgtgacactacagaagtgtgagggagtaggacttagatgctttttctagggcctcagttgatcagaagtggacagcagctgttccatcaaaaactcaaacggggttgtggggatttgcaacctcaacctctttcccagagcatattaggaggacacagataaaaggagtcaataaacgcattggcaaattacaacgtgaaaagtcaccactgtggggtattatttgctatgtagctaatccctctggggactctctgagacagcccatggaacgtgtctcagaatcttcctgtccactgattgctatcctgcatttgttggatgtcacctccagggacattgtcccctcttcctgccacacacatgtaattctgggttgtttttgcatgtgtccaatcttctatacaaaactcttccctgggaagagtgacaaggcagactcttgagatggaaatctgtcaaccttactagaactttctgttgaactcaggaacactggggaacactgaggcatcaataccatatgctttgacatagttttaatactctttccattttaggttttttttttttgtcttaaatctgaatgcagtcatgttcttcaagttttatcctatagaaagaactgccttcctatgaarccacagggattaaagacataaagctgcagatttcattgcggtagaaaaccctactttcctgcctgttggcagaacacttattaggagtttgcagaagcaaagtgcaattattctccatgatgccaggacctacattgttcattaacgtagaacaaaactcagatatattattaagtgtcccagattattcatttgtgagcagactaccaattgtctttccaaatgaattttctttgttctcagtacttttgatcatattcaaaatctcaaagcttttaaaattttcaaaatgggctctcaaaatagaaaatgtgatctagtgaagctgactgtacttacagtttgttatgagccgaacgctgcgtccctctaaaactcctaagttgaaaccctagccactaatatgatgg

SEQ ID NO: 554589 - DNA, 1306 bp, Homo sapiens
tgacaatatgtcacttccatttgagaaattaaatagtaaatgatgtttattactccctagattttaatgtaaagtttaatagttcagtttagttttatacatattttgtcctaagcagtttacagatcaatatttttaaaagtttctactttttattaatttcattaaagtccttttgataaagttagacttcctggaacccttatgtttggcaatgaatttccagattgattcaggtttataaggacaaatacacgtgacactacagaagtgtgagggagtaggacttagatgctttttctagggcctcagttgatcagaagtggacagcagctgttccatcaaaaactcaaacggggttgtggggatttgcaacctcaacctctttcccagagcatattaggaggacacagataaaaggagtcaataaacgcattggcaaattacaacgtgaaaagtcaccactgtggggtattatttgctatgtagctaatccctctggggactctctgagacagcccatggaacgtgtctcagaatcttcctgtccactgattgctatcctgcatttgttggatgtcacctccagggacattgtcccctcttcctgccacacacatgtaattctgggttgtttttgcatgtgtccaatcttctatacaaaactcttccctgggaagagtgacaaggcagactcttgagatggaaatctgtcaaccttactagaactttctgttgaactcaggaacactggggaacactgaggcatcaataccatatgctttgacatagttttaatactctttccattttaggttttttttttttgtcttaaatctgaatgcagtcatgttcttcaagttttatcctatagaaagaactgccttcctatgaagccacagggattaaagacataaagctgcagatttcattgcggtagaaaaccctactttcctgcctgttggcagaacacttattaggagtttgcagaagcaaagtgcaattattctccatgatgccaggacctacattrttcattaacgtagaacaaaactcagatatattattaagtgtcccagattattcatttgtgagcagactaccaattgtctttccaaatgaattttctttgttctcagtacttttgatcatattcaaaatctcaaagcttttaaaattttcaaaatgggctctcaaaatagaaaatgtgatctagtgaagctgactgtacttacagtttgttatgagccgaacgctgcgtccctctaaaactcctaagttgaaaccctagccactaatatgatgg

SEQ ID NO: 554590 - DNA, 1306 bp, Homo sapiens
tgacaatatgtcacttccatttgagaaattaaatagtaaatgatgtttattactccctagattttaatgtaaagtttaatagttcagtttagttttatacatattttgtcctaagcagtttacagatcaatatttttaaaagtttctactttttattaatttcattaaagtccttttgataaagttagacttcctggaacccttatgtttggcaatgaatttccagattgattcaggtttataaggacaaatacacgtgacactacagaagtgtgagggagtaggacttagatgctttttctagggcctcagttgatcagaagtggacagcagctgttccatcaaaaactcaaacggggttgtggggatttgcaacctcaacctctttcccagagcatattaggaggacacagataaaaggagtcaataaacgcattggcaaattacaacgtgaaaagtcaccactgtggggtattatttgctatgtagctaatccctctggggactctctgagacagcccatggaacgtgtctcagaatcttcctgtccactgattgctatcctgcatttgttggatgtcacctccagggacattgtcccctcttcctgccacacacatgtaattctgggttgtttttgcatgtgtccaatcttctatacaaaactcttccctgggaagagtgacaaggcagactcttgagatggaaatctgtcaaccttactagaactttctgttgaactcaggaacactggggaacactgaggcatcaataccatatgctttgacatagttttaatactctttccattttaggttttttttttttgtcttaaatctgaatgcagtcatgttcttcaagttttatcctatagaaagaactgccttcctatgaagccacagggattaaagacataaagctgcagatttcattgcggtagaaaaccctactttcctgcctgttggcagaacacttattaggagtttgcagaagcaaagtgcaattattctccatgatgccaggacctacattgttcattaacgtagaacaaaactcagatatattattaagtgtcccagattattcatttgtgagcagactaccaattgtctttccaaatgaattttctttgttctcagtacttttgatcatattcaaaatctcaaagcttttaaaattttcaaaatgggctctcaaaatagaaaatgtgatctagtgaagctgactgtacttacagtttgttatgagccgaacgctgygtccctctaaaactcctaagttgaaaccctagccactaatatgatgg

SEQ ID NO: 554591 - DNA, 1437 bp, Homo sapiens
tttagtagagacagggtttcaccatattggtcaggctggtctcaaactcctgacctcaggtgatcagcccccctcagcctcccaaagtgttgggattacaggagtgagccactgcacctggccactttcaaatttttgatgatccatttacaggcagtgtgtaagaattttaccgaatgtctctgaatatgagtttttctcatacataaaatagaaatagcaattcatatctcttaatgttattttgaattaaaagaaaaaatataatcaccatttatgctgaacacaaagtaagggctcaaaactaatttcttttccccagtcatttctagacagttaatatcatagatcaaaaaatttaaatcagattgaaaatgagtattggaaatacgggacaaatatttaatcttagaacaaatatgacaaagtttctcctagccagagatatctatgtgatgatcatttacacacacacatacacacacacacacacacacacacacacacacatatcaaaactgaaaactctccggactatatatggtttctcattgtaaaagcaagtagacatattcattttcagaatttatattcagaatgtaaaatttcaatgtgttttgcctgagttattatgcaggttttgagaaaatctcatttatgactatatgtttcaagaatcgatgggctccagggccgacaatgccctagcggaaatcattacctgccagggatgaaacagcactgcatctacattttcctcatatcccactgtatttctaaaagcagcacttagcatagggcattggctgcacacgcagcatcatagatggtcttaatgaaatcagatgcaatccagtcaaagcaacgcaaaggcacaggacccaagaaagcatttcgtgggcatcctcctagggtttcacagccagaatcagaaaggaagcaatccaaggaaaaaagccacagtttattatggaaaatgtgttctgggtgtatggaagggctaactgtctgaacaaaatgctggaagccaggcatctcactgttctgctttgaaaaagtgagagtcccatggaatggattaagtatgaaacttcccccatgtgtgataaagtcccactgggaggtggtaacacacgctttccacgttttcaaagtgttccatcccagaacgtcaggaggattagggggtctgtgtcaccacagacagcagtcacatttgttgatggatcttcagtcttggccaatgttatcctgcctgctgatggcagaacaccctccaagacagtttctttgtaaagcctgaatagatgccttccctggccacttctctcagttcctagaaaaaatgcccacctttttttttttttttttttgagacggagtctagctgtgtcgcccaggctggagtgcagwggtgcaatctcggctcacagcaac

SEQ ID NO: 554592 - DNA, 533 bp, Homo sapiens
accttaagaaggttacataaagttgccattactaggagtagtagcagaatttattatggattaatcatatcgtcgggaaaatgtactgaagcactacttcctgtggtattttttttacaaaatgataacatagtttattgcctataggttgattatgacctaaaattatatttttgcattttattgtgccattatatattttaaaatgtgaggttcacatggttgcatttgctctgtgaataaaaatgtctaaaatcataagatgaacttttagattttgcgatatgaaaatttctaacttagctagcttgtgatggtacctaaaaatttaagaaagcccttaaaatagaacctctgtgactgcatgagcactttgtatgactcatatcacattttaactccttaagcaagccaatgaggtaaaacatrtaattgtccccatttttgcaaaattcacaaaggccttcactgctttgagaaaaggttacacagataattactgacaaaaatgggttagaatgcaggtcctgaga

SEQ ID NO: 554593 - DNA, 547 bp, Homo sapiens
tgctcattaagtcccatgtttggaacttaatgaattaattaagggtaacacaagacatagtggaaaacaagtgagatgacagagatcttacctttatggaacttacaaacacatgaatttgccttttcattttgggaggtctgtggaccctatcccttccccaaccatcagggataagtatatgagtctcatctcagctcaaaaccttgctctgtggttcacgcctgtaatcccagcactttgggaggccgaggtgggcacatcacaaggtcaggagatcgagaccatcctggctaacgtggtgaaaccacrtttctactaaaaaaaaaatacaaaaaactagccggacatggtggcatgtgcctgtagtcccagctactcgggaggctgaggcaggagaatcgcttgaacctgggaggcagaagttgcagtgagccaagatcgtgccactgcactccagtctgggcaacagagtgagacttcgtctcaaaaaaaaaacaaaaaacaaaaaacaaaaaaaaccttgctgtgtttgctgcactctcat

SEQ ID NO: 554594 - DNA, 547 bp, Homo sapiens
tgctcattaagtcccatgtttggaacttaatgaattaattaagggtaacacaagacatagtggaaaacaagtgagatgacagagatcttacctttatggaacttacaaacacatgaatttgccttttcattttgggaggtctgtggaccctatcccttccccaaccatcagggataagtatatgagtctcatctcagctcaaaaccttgctctgtggttcacgcctgtaatcccagcactttgggaggccgaggtgggcacatcacaaggtcaggagatcgagaccatcctggctaacgtggtgaaaccacgtttctactaaaaaaaaaatasaaaaaactagccggacatggtggcatgtgcctgtagtcccagctactcgggaggctgaggcaggagaatcgcttgaacctgggaggcagaagttgcagtgagccaagatcgtgccactgcactccagtctgggcaacagagtgagacttcgtctcaaaaaaaaaacaaaaaacaaaaaacaaaaaaaaccttgctgtgtttgctgcactctcat

SEQ ID NO: 554595 - DNA, 547 bp, Homo sapiens
tgctcattaagtcccatgtttggaacttaatgaattaattaagggtaacacaagacatagtggaaaacaagtgagatgacagagatcttacctttatggaacttacaaacacatgaatttgccttttcattttgggaggtctgtggaccctatcccttccccaaccatcagggataagtatatgagtctcatctcagctcaaaaccttgctctgtggttcacgcctgtaatcccagcactttgggaggccgaggtgggcacatcacaaggtcaggagatcgagaccatcctggctaacgtggtgaaaccacgtttctactaaaaaaaaaatacaaaaaactagccggacatggtggcatgtgcctgtagtcccagctactcgggargctgaggcaggagaatcgcttgaacctgggaggcagaagttgcagtgagccaagatcgtgccactgcactccagtctgggcaacagagtgagacttcgtctcaaaaaaaaaacaaaaaacaaaaaacaaaaaaaaccttgctgtgtttgctgcactctcat

SEQ ID NO: 554596 - DNA, 383 bp, Homo sapiens
gtcatctcccttgcagagggtcagtgcatcccttccagagttcccagtggcagaaatcaccttgggggtcttccccctttccccttcccccgagacctttgtccatgtgaactgctgccgagaacaggtccgtcctcagcccatcacaccattcagcggacaagaggagtcagtccctctctgttccctgctggtcccgccacatatctgcagrgtctcacctgtggcccctggtccccagtactctcatttgtaaagtggggtgtggggctacacaggggcttataggctcagatgctcacagcaggcagcgcaggtgtggggagtgggtctccactcaaggagtcagccgcccatcagatcaaaccatccctactgtgcag

SEQ ID NO: 554597 - DNA, 2797 bp, Homo sapiens
gccccgtgaatagatgaaagtaacaggtaccaatatcaaaactgcagtgactcaccggaaacacttcgtgcttgccactttgctaagctgtttgagtccaacaattgcatgggtcctgggttagtgtcctgaatgtctcttgccgctactctcgtgagtaatgttgtcactttaccttgtggtggccaagcccctacatgcactattaggttatgcagtataattttgcagcgtaaaagacgggtaaagggccataatgaagtgaaaaagtccctgctgcattggccgggaattgaacccgggactccggcctgggaggcgagaatgctaccaccgaaccaccaatgcctccccgtagccacggcctggaggatatgagaaaagagtatccacaaagacttagaaacttccaaccgcctttttcaagtgtcgactaaaagctaacaaagacatccaaaccaaatgtttttataggaaacttttactagacaaagttataaatatcaaaatagctcatttggtggatcaaactcttaactctgaaaaaggtctttctacctgcattataaacccctataataaaacatcagaaattcattcatgtttcttttttctaatcttaaatcttccattgtcaatctcaaactgctgccttagaggttctgagaaggtaacctaactggtagtttaggtaaataaagttcaaatccagggaggaaataagaagcagaagcagaattagaagaaagatgaaataaaaggacagaatcaatgtacagataatgaagaaacaaaggttggtccactaagttagtcttttgtcgctggtttttttggcaaaagagtaatgatcggtctcgtaatcattataatactattatttgtctgcttgaagatgtataaagcatttgaaggaaatgtgatgtgaaaagattaagaacccttgccgtcaatgtttccttgtttgggagaatcccatttcctaagttaatatgctttgatgtgttagctatgaaaggagtagactagtttaaggaaatattgacggtcaaaatattaacatattagtcttttgatgaagttcaaatagtagagagatttctttcctcaattttcaacggagacattcaactgaagagacaaatccagagttttccccacttgttgggtctgggagtcattatgactttttcaaagacaggagctgtgacatggaatcatgcttcttctctagctgagaagccaagctaggtccaggctgcgtcataaacttgagcccaccaaggaaatcacccttcacattgacctcgcagagctttggctgttctctgttctttgcccaacacccaagacacacaccagctctggccaacaaaccttaacatatgatctatatccaccagagctatatttattcccaaatctccttctaaaatacaaacctgtactttctactctcaacttctaaatttacaaaggcctcatatgtatctcagagtcacagatgctaaaacttaaccggttttctgaggattatttggggaaggggtatgcattcaaaatcttttgtatgtagataattcgtgtggtttcagattattgactctacgagttccagatgcagatttagaaccttttaaaaaaatattttgtttttgtctcgcaaatcagccagatctgcaacttatcagagtraagcgaagccaagcgggacacttaggaaatgcgctaagatgtcatccactttcagtgtcagcctgtgaaaattcaggcgacagaagagaatgaagagaatcttaaggaatttctggaagcaaagctaatattaagcaggcctcttgctggcagaccagtggaaactgtagcctggtcaacaatctgtctagattgaggaggtctaaagtgtagccacaggttcaactacttttctgtttgtttcccaacctcgattaaactcactaaatttagggacaagaagaaaaaccaaaaaaccatgtttccctccagtctcgagccaagggtctttcacatgtgaggcaaacatgataaccactatactacagaaactgcacatacactggaaaaggcaaaacataatcatgaaaatctgaggtcagccatttctattatcgtttccaaagtaagaaatccaactgcattttgaaattcgactgaaaaaagcccaataagcaccagccatcaagaagactatggctcccaataggcccaggcttagcgttctgcacctacccccaacacgaagaccacggggacccacacccgggcttcgggatcccgcatcctcccccgggtatccagttccagaactaagcgccgtgtgcgggatccttccggctgacactcttggctcccagaagctgcagaagccggcgggatggggcacatgtcagagctctctttggagggtccagcggtggggtaccaaggtggagctccagttacagcatgtacttccccaggcacagggcaccgtcctcaacagctggcatcattgcacctgcagcatctgccccttcccagagcctctctcttacgcttttcacatcactggagaagcagcttgcaggaccacaccgtatttcactcttacggtgcaaagccagaaggtgcccaaaggagaagcacctactcccgtggtaagaaggtgggcacaggtgcagctgcgactcaccaagagccaggctgccagccacacagccagggacaccgcaatgggggaaggggcagcaaggatgtgtcaaagatattcctttccaaatgacttggttgaaagaaa

SEQ ID NO: 554598 - DNA, 1554 bp, Homo sapiens
ctgaaacattaaggtctcttccagatgtgatgttcccaaaagtctaagattccaattctaaaaagtctccacctattattaatctgtatcattattattattattattgagacggagtcttgctctgttgcccaggctgcagtgcagtggcacgatcttggctcactgcaacctctgcctcctgggttcaagcgattctcctgcctcagcctcctgagtagctgggactacaggcgcgtgccaccacacccagctaattttttgtagagatagggtttcaccgtgttagccaggatggtcttgatctccggacctcaggtgatccacccgcctcggcttccccaactgctgggattataggcgtgagccactgcgcccggctagccccatgttataaatggggcaactgaggtatgggaggttgggcagcttgtccaaggtccccagctaggagaagtgggactggatttaacccagaagcaggctccagtgcctgtgacttaacccaggactggatgcaggaggctgcgagcctggcctgccccacatgctctccagaccaccccacacacagcttggcctacctgtgctagctgctcctgcagccaactgagctcatggtgcagtgtggggagctgttgctccagcgcctcctgggcctgctccgccactcatagggagccctccaggccctgccgtgccacctcctgctccaaccacagctcctccagccactcctgctctgccggcgccactgtggcctcctgctccgcctgccgctgccggccctgcagcatggccttttcttcctccagctgtgggccggaaaggagtggggcctcatgagcagggcgtccctcccaggaccaggacgcctcctccacccacccaccagccacgatagcccaggggaggctcccagggaatgagggacagtgcccttgggtgtgtgggacactggggagggggagatgaggagggcccatggagcgtcggtgctttgactcctagagaggacagacagacagacggagatagacagagaaccagagacagaaagggaggcaggggccaagacaggtgcagggccgggcccagggtgcctcactgagtggggaggacgggtgggcaaggtaggtgggcccgcaggtgcacagtgtacctgggtgacaaggcagttcagatccaacttgtcctgagcaaggctctcgttgagggcgctcagcttggacagggagtcctgcagggaggcctcctctgccctcagcttggtcacggagagctcgagctccatgcggccagcctcagcctgcagggtcaggccccaagagatgaggaagggcagaaaggtcgggaggaggtgaggagagacaagaagagacccagagagatggaccctcggagacaggggaggggagacaaggaggggatacggygtgagatggaaaaaaaaatcaccgcagaaagcctgctgcttatggagccatttaaaagccatgcaccgcaaagctgtgcaaaaatagctcaagctgcagggcagggccagagttcaga

SEQ ID NO: 554599 - DNA, 543 bp, Homo sapiens
agacagggtcttgctctgtcacccaggctagagtgcagtggcatgcagaggccagctcactgcagcctcaacctcctaggctcaagtgatcctcccacatcagcctccctaacagctgggactacaggtgcacaccaccatgcccaggtaatttctgtattttattgtagagatggggtctggccatgttgctcaggctggtcttgaactcctggactcaagcaatctacccaccttggcctcccaaagtgctgsgattacaggtgtgaaccactgtgcctggccctctaagtttctgctaaaatgtacttgtaacttttacactgactacactcaaaagtattaaacttgtaaagaaaaggccctggaggagtttgttctttacaaggtcagtcagaagctacaaggggccaggctggggccaaggtgagggcaggtacatgcaggggcagatgctgggtgtggagtaggtgccaggtgctagctgggcatgaatgtgcacccgctccctgacctctgctccctgactctcacaaggaacta

SEQ ID NO: 554600 - DNA, 652 bp, Homo sapiens
tgactgatttgcggtcaggtttttggttccttttgcttcagtgcagaagtagggctgaagacccacatgaagattgagraaggagatggatgtgtagagtctacatttaaattgatataagagcactaacagaggtatatgaaagatgttatgggagcaatgagaaagaagtgcttaatttgaaggtggtagtcagagaagatgggaaattttacagagaagttgacatttgtgcttaatcttggaaaaaaatagaaattttcagaattatacatgtgcacacacacacatacaaaccatccaaaacaataacatcatgaaggcagagaagcataaaagaatgtgtatggcccccagtatttagtgtggtcggatcattaagaattagggtgaatgtgggaagtggtgggaaatgaacctggaagggtaatcataggtcagattctagacttggatggtttgctacagaattttgattttgtcttgtgtagccaatgaaaagccattattggattttagggatgtgaaatgaccagatttgtctttcaggagtgtcataagtgcaggagtttcttaattgcagtagagtaaaaaataaattggaggaaagctaggtcgaaagcaaggagaccccttagtgcagaggtggtct

SEQ ID NO: 554601 - DNA, 1565 bp, Homo sapiens
tggagccccggccctcctggcagagctcacactctggcagggtccgaggagctttttggcgacccggccactcatccatccaggttcaagttaacttcggtgaagattcattgtcattctgtgtctcatttgcaagctgaagatcatgctgctgtctttgcctctagtcataacgcactccgagctgggygcggtggctcacgccagaaatcccagcacttcgggaggccaaggcaggtggatcacttgaggtcaggagttcgagaccagcttggccaacaccgtgaaacctcatctctactaaaaatacaaaaattagccaggcatggtggtgtgcacctgtaatcccagctactcgggaggctgagacaggagaactgcttgaacccaggaggtggaggttgcagtgagccgagatcacaccattgtactccagcctgggcaacaagagtgaaactccgactcaaaaaaaaaaaaaaaaaaaaaaaagaaaagaaaaaaaaaaagcactcccgtagagagaacccagcgggttctgccactgtcccgagtcacgctgagaatgcgagggtgtaggtgtcagccctgggggacgctggccctgacacaggctggcttccaaggagtcttgtccatgaggattcaaggtggcagacattgatttcatattctaaggaaaagacagtgcagctcctttgggaagctcggcctcctggcccgctatgcctcagcctggccccagacacagccaacagggctgacgtcctcgggaagacgctgtgacctcagacaggcctcgggtttcacctgaatcccaggggctgggacctacccttgtttagtttccacgcggaagccaatttgggacgtttgtgacccagacgaaccctttcagtggttttgtcctttctttggagaagggactaggacgaagaaggctggactcatggggcggcccagggcacagctgggccctcgtgtttctccgtgcgttttccagaaagcctccagccctgcctcaatcatgggttggctctgtcgctattccgagtttcaccgttgtcatatttgagcagaacttttgccccgaccagggatgagaacgtcgtctgccagtctcctctgcagccggagtggccacaggcaggcagagggggaaggcagagtcctccagccaggaagagcgccaggccaggcagcctctgctgtgtaaatcgacaggcttaaggctgctcattatgtggtttcacctgaagagcgacctgccgtagccaccgccagcaagcgtgtatggaggccggtgcctggcgagcgtcggggaagctgctgagtccctcacttcccccagtcaatcccggcagccttgcgcaaagcttggttaattcaaaaactgtctttgtctgcattaaaacacctttatccctggtattaatttcctggccagaacaaattaccaaaaatttggtggcttcaaaccgcagaaatgtgtgctctctcagttccgaaggccagaaatccaaaatctgggtgtcacaggaccgggccccctcccaaggctctaggga

SEQ ID NO: 554602 - DNA, 655 bp, Homo sapiens
atcattattgagcacattagaaggagatttggggctatctgcttaatcatctgctgtaaagaagaaaaatttaaaccttctgatctgtaaattaaaagtctctcaaatcatyctataagtgtaattcccctctgtgttcctaatgtgtcaattacttctgttaatttttcagtgaaacaatggcccttatcccatactccttataacattctttgacatgttcatggacctcaatcttgttcgtttcagcccatattactgcctccagctttctccatgggataaacagtctggctttttctactcaataacaaaaaataaaaatcaattttttgaggggaaaaaggaagtgactcctttttaaaaaataaaatggattttttatataaagggacagtatgatagtaatgcatgacacaggtcacctttagttcacatgtcttattgtaggaagacctcatttaatcatctgaactaaagataaacactttaacgactcactttttgaacactttagtgtctgcagaaagaagctcaatctacaatataattaaatttgttaaaaatttctcagccttgaattcatcatcttacagtggggattcataatattgactttatggggttgtgaagatagtttttatgtatttttttt

SEQ ID NO: 554603 - DNA, 684 bp, Homo sapiens
tataacagataaatattctttactatgaaacctttcttttgcaaatgcacattgatgaaatggaaatggaaaatgataagagaaaaatatatttaaatgacagccaaattaatacagctttgggctcagtacaagtatacaaagcttaagtgacagaggcatttttagactactcaaaaattgccggaggtttattaaggtagtgtgcaaacatcctttgtgtcccctttaatactgtaaaacagtatagcttcccatrtgatcaggataattttacaaaaatacattttgcttaaatggcttatcttttcttctgaatgaaatacaaacatctccttctggctagtatttacgattctcaacattatgtcccccatcttactgtgatagatttttctcactacacacctatatgcacaccttgtaataacccctgctttttcttgagctattatacacttgctcatgctttgtcctccacatctgcctgtctgttaaagttgtatccatagaaataaaaaaagtggttgtttgggacaaaagtatgtgtggtaagaattgactgggaagaggtacaagataatgttctggggtgacagaaatgttctgtcttcaaatgagattaaattacctgaatgcttacattttatctaactcaatggcacatgtgagatctgtacaaat

SEQ ID NO: 554604 - DNA, 539 bp, Homo sapiens
cacagttgtagctactttcaccaacaatctgtctctcttgatgctcaaaaccactctgtgagcttgagcaggtttcattattattatttatccattttaagatgggcaaatggagatttttaagagattaagagactaacctgagaatatcacacatttagtcagtgaggaaaaaaaatgggattttttttattccaagcactatttttattacactatagtaatgtttcattcattttttataataatagataatagaaaattattcttgcatttctgtttaataaaatatattcttaaagcagtgcttctccaatagaactgggtgtcaaaatcacctgagtcagtgagtctgggtagttcatgatccactctttgagaaacattgcctttaaatattaatatattcatattctaatatttgaaaatgaatgaatacattagattatattccctaggctcagaaaaattctttagaatggagataaaatagagaaaaggcaaacaggactgaatggkaaggaaaggctgttaaaaaa

SEQ ID NO: 554605 - DNA, 608 bp, Homo sapiens
tagtcacttctatagttccagaatcccctccttacccttgcattggactgccctcagaggagaagtcactggctttcccacattcttctgaagttgattgaccaagcatgggaaatccagaaatttgcgccatgaaatattcctacagttatgtgttgtgttctctctagtttctatcatgctaaatggccctttaatacatctttgttttctcctagacaaaaactctcttaaagaagtagtgcctataatttttactcagtactgtgcttcatgcatacaatagactcaacaagttatttattaaattgaatttaaaaatcagcatcataaactcattagctctaatttgagtttttaacataacctggttcattgatggctttctctttaaagtttctattttagagaatttgtattttttcaagcctgaaagctttaaaaataggaggctgaagaattctattgttagccaaagtgattgctgtgttttaatttcaaggtaaaaatgtacattgcttcatctgtagcctgagtgtagattttatgtttggctctttcagataaatttaccttataaaagrtcacctaagatagcagagaaaagc

SEQ ID NO: 554606 - DNA, 650 bp, Homo sapiens
tgatctggtcagattaatatttattatatgttatagtaagcaatatttaattatgataaaataataatgattataacagaygaaatgtagtgagcacatactatttgttaagcactattggtaattttacatatttcacttatccttatcacaattttatgataatatggggagttttattatcataattttattacagagaaatattaattatatatagattatattatctcccaaatcaaattagtaatgaattagaaagcattcaaacccagatcagctgacactatataaaccactcttttcttcctatactagattttcaaaaatttgccctatcagtgggttgtctaaacaatattgcattgtcaaaaactttgaacccattacccttttacatcacaatggtaaaatatctttggcagccgtcagcataaatcagatagaattatatataaggaaatttattatctcacaacactggaagtccaacgataagcttcaaggttgaattaattctaaagaatttattttggtttacttctctatgatttttcctctatcctcaggctagtagtcagagaaatgtctcatacttctgaacaagattcaaaaacggattaacaaaaagtatatagcatctcttcctg

SEQ ID NO: 554607 - DNA, 650 bp, Homo sapiens
tgatctggtcagattaatatttattatatgttatagtaagcaatatttaattatgataaaataataatgattataacagatgaaatgtagtgagcacatactatttgttaagcactattggtaattttacatatttcacttatccttatcacaattttatgataatatggggagttttattatcataattttattacagagaaatattaattatatatagattatattatctcccaaatcaaattagtaatgaattagaaagcattcaaacccagatcagctgacactatataaaccactcttttcttcctatactagattttcaaaaatttgccctatcagtgggttgtctaaacaatattgcattgtcaaaaactttgaacccattacccttttacatcacaatggtaaaatatctttggcagccgtcagcataaatcagatagaattawatataaggaaatttattatctcacaacactggaagtccaacgataagcttcaaggttgaattaattctaaagaatttattttggtttacttctctatgatttttcctctatcctcaggctagtagtcagagaaatgtctcatacttctgaacaagattcaaaaacggattaacaaaaagtatatagcatctcttcctg

SEQ ID NO: 554608 - DNA, 593 bp, Homo sapiens
agcgctgaacagatgacccgtaagtggtataagctgtcatttaccctgcgagttgggacacagccctggggcagccggggatgcttgctctgtctcagagtgggggtcagtgaccacgacatgcacaggtgcctcagctggtctccttccccagggatggagacacagactgagtccccagtgcctgcactatcatgtggcccctctagctctgtgtggccagaggacagaaatcttatgctgtcaacttaagccgtgtgaarcactctttatccccaatggcctctgtgaacagacacaccctgcatgtgtcactaaaccagccttggcagaaaaccagcgtttccccattcgcctcccagttaccattgtctggggctctcgcttaaaatgcccactcccaggcactgaccccggtgattcatggggcatctctgagcctcgggcccctcatctttgaaatgggatgacaagcctgttgggaggctgttgtgagccccaaattcaatgcctcccccatcccgatgagctgtgtgactgcttcactgcaggtgccagccggctcctcagatgagaggagcacggggggatcc

SEQ ID NO: 554609 - DNA, 889 bp, Homo sapiens
tgtgaaaaataacacccgcaagaggcctaaacagggcgatcggaaccaagaaaacttaaggaagtatttgcacgttttgatgtgtttatttatttgggatgcgcggaggctctgaatggagaaagtcgtcgatgcctgcactggtcttggcctgttctttatgttccgcgcggtgacagctttaagatgaaggaggaacataaagggtttcatcacaggaaatagaactattgctttattcaaacatttaaaaaataaatacaataaatcagggatttttcccctttccgagtattaaatacagatgtactgtatgcatatgaaatttttgattaaaatgtctttcaccagtctgtctctttaattaaataaagcctgtttggtattaatcaaggcacaaagaatttataccccaaatccagattaattaaaagcctgggagcttgatgaacaggcagtataaagacaaaaataaatcaatccaaacatgatatttatgaatatggacggtttgtgagcaaaatataaataatttagacagaataatatacatcagttataggataggattattttacattctagaatgagttcaaatgtaaatttgaacccacattttggattaaggtttctgtttctaacatttattgttcattactgagtgatgatagctcttagtcgttaatctctcacaaatcctgaagcttttaagtacctgctcaactgtgccaggaaaggagtctaatgtggcattttctctcttttgtgcrgagtttggtttaattttgcttcaaattactaatatatcccccaatggagcagtcttagtgccttagcaagggtcatgaggcccaattatacagaaattaaaaaagatatgtctgactcg

SEQ ID NO: 554610 - DNA, 1517 bp, Homo sapiens
taagggtggatcttctttagcccatctactgattcakatgcttatattttctagaaacacccttacagacacactgagaaataatgttttactagctatctgggcatcttttagccccatcaacttgacacataaaattaaccatcacaagcaccattgtacttacagagcttatcaatctcagatctcacaaattcaagtgttcactcaatttatctgtgttttatctctcacctttctctacggaattcagtttgcaaatgtactgtcttctgtgtgtacttcattctgtattctgagattctttttgactcttggctaactctcactctcatgatctcagtttcacttacagctttagataaaaggcagtgtcctttttctaacattggacccatagagtcctatctacttgctctggctagttttagctaccctgtctggatttttttttctcaaataggtaaattcaaacaaaggaaatatgagatttaatgaagaattattgtataaatagatttgtgttttaatgaaactaaccccatcccacctaactccattcgagccttctcctgcttgggcagcaatttagataatagactgaaggggcaaatttgtagttaagaataactgcagtgatagtaaagatgtactatgggggtgggagtggttcagaattgaaattttttttaggatatagaattgacaagtcttggttaaactgatctgtttaatcagtgtttctcaacctctgcactgttgacattttggcccagattattcctgttgtgagaggcttacttatgtattgcaggatgtttaacagcatgcctgttctccatccactagatgctagtagcgaccctcagttgtaagaaagaaaaatgtaattgagcaccgctaaatgtcccctgggggaaaaacacctccagttgagaactactgtgttaaataaatggcatatgctttgtattgcaaactgttacagggttagcaataattatttctatgataataagtttaaaaaatagatattattaataataataaaatgtttttatgcctgagcattgcaaggttggcttaacacttgaaaattaattagtgtaattcactacattaacagaaattggcatattttcaaatggttgatgacaattcgcaaactctcttctgaatgtgtcatacaacatgttgttcttctgttttattttctcatcaagttttcagcgtcccctacatatcaggaatgttgattttgttaactttttcctgccatatagattgcaagtgtctttcctagactcttactacattttgtttgttacacaaaatattgtgttattaaatgtacctatatttcttttgtgaattcaggaattccttttttatttaaaagggccttgtccttccaaatgttttataaaaattatcctatatgttctgaaattttattttgtttcacagttggatctttattgcagttggattttatttttgtatttgatatatgatag

SEQ ID NO: 554611 - DNA, 1517 bp, Homo sapiens
taagggtggatcttctttagcccatctactgattcagatgcttatattttctagaaacacccttacagacacactgagaaataatgttttactagctatctgggcatcttttagccccatcaacttgacacataaaattaaccatcacaagcaccattgtacttacagagcttatcaatctcagatctcacaaattcaagtgttcactcaatttatctgtgttttatctctcacctttctctayggaattcagtttgcaaatgtactgtcttctgtgtgtacttcattctgtattctgagattctttttgactcttggctaactctcactctcatgatctcagtttcacttacagctttagataaaaggcagtgtcctttttctaacattggacccatagagtcctatctacttgctctggctagttttagctaccctgtctggatttttttttctcaaataggtaaattcaaacaaaggaaatatgagatttaatgaagaattattgtataaatagatttgtgttttaatgaaactaaccccatcccacctaactccattcgagccttctcctgcttgggcagcaatttagataatagactgaaggggcaaatttgtagttaagaataactgcagtgatagtaaagatgtactatgggggtgggagtggttcagaattgaaattttttttaggatatagaattgacaagtcttggttaaactgatctgtttaatcagtgtttctcaacctctgcactgttgacattttggcccagattattcctgttgtgagaggcttacttatgtattgcaggatgtttaacagcatgcctgttctccatccactagatgctagtagcgaccctcagttgtaagaaagaaaaatgtaattgagcaccgctaaatgtcccctgggggaaaaacacctccagttgagaactactgtgttaaataaatggcatatgctttgtattgcaaactgttacagggttagcaataattatttctatgataataagtttaaaaaatagatattattaataataataaaatgtttttatgcctgagcattgcaaggttggcttaacacttgaaaattaattagtgtaattcactacattaacagaaattggcatattttcaaatggttgatgacaattcgcaaactctcttctgaatgtgtcatacaacatgttgttcttctgttttattttctcatcaagttttcagcgtcccctacatatcaggaatgttgattttgttaactttttcctgccatatagattgcaagtgtctttcctagactcttactacattttgtttgttacacaaaatattgtgttattaaatgtacctatatttcttttgtgaattcaggaattccttttttatttaaaagggccttgtccttccaaatgttttataaaaattatcctatatgttctgaaattttattttgtttcacagttggatctttattgcagttggattttatttttgtatttgatatatgatag

SEQ ID NO: 554612 - DNA, 983 bp, Homo sapiens
tgggcagtcatactaagaaattggtaaaaatgtaagtgaatttcacagggaatgccagaaagatgaagtgcaatactcacagaattattcgatgagttttaagacgacccagttcatgtaagcaagtgttgcctgttcctctaaagaacatgcctaagagatttatgggattagggcttctgagggaaggtacaaggaagaaaagacacatttaaaaaggaagctgccacctacattaaacatttttctgccaacagtgtttgtttaatctgtagctaaccatgaggaaactaatagggaaaaaatcattctataaaaaacaaaaaaaggctggaaatcctactagattaaaagagcctgaagagatatgacaattcaatggaaggtataattcttgattgaatctggattgacaaaacaaataaataacagccctaaaggacaatgttggaacattggagaacattgaatatgatctgtatgttaggtaacattataaaattaatgttagatgtcccaaatgtgaccattctaatgtggatatttagacattccttatttctaaggtatacttgttgaaatatttagatgtaaagtgtcattgtgcctgccaataattctcaaatatatcattaaaaacaacaaaaatatacatacagaaagaaaaaacagcagtgtagaaaaatgctaraaattgctcaacccagaagaaaagtaatgagtttttaatgtgctattcttttaacaccttgtagtgttcacatttagcaatattaaatgtgagaaaattcactggttaatttggagaaatttttttttgtccatttattgcatttaaaaaaataaagctttaaggagagcagaagttgagtcccaggtgggaggtgatctgatgaaataataactccaggctgcagttctcccatgcagaagagaaagatggaaaaagatgggtatgaatcttggaattcataattccatac

SEQ ID NO: 554613 - DNA, 983 bp, Homo sapiens
tgggcagtcatactaagaaattggtaaaaatgtaagtgaatttcacagggaatgccagaaagatgaagtgcaatactcacagaattattcgatgagttttaagacgacccagttcatgtaagcaagtgttgcctgttcctctaaagaacatgcctaagagatttatgggattagggcttctgagggaaggtacaaggaagaaaagacacatttaaaaaggaagctgccacctacattaaacatttttctgccaacagtgtttgtttaatctgtagctaaccatgaggaaactaatagggaaaaaatcattctataaaaaacaaaaaaaggctggaaatcctactagattaaaagagcctgaagagatatgacaattcaatggaaggtataattcttgattgaatctggattgacaaaacaaataaataacagccctaaaggacaatgttggaacattggagaacattgaatatgatctgtatgttaggtaacattataaaattaatgttagatgtcccaaatgtgaccattctaatgtggatatttagacattccttatttctaaggtatacttgttgaaatatttagatgtaaagtgtcattgtgcctgccaataattctcaaatatatcattaaaaacaacaaaaatatacatacagaaagaaaaaacagcagtgtagaaaaatgctagaaattgctcaacccagaagaaaagtaatgagtttttaatgtgctattcttttaacaccttgtagtgttcacatttagcaatattaaatgtgagaaaattcactggttaatttggagaaatttttttttgtccatttattgcatttaaaaaaataaagctttaaggagagcagaagttgagtcccaggtgggaggtgatctgatgaaataataactccaggctgcagttctcccatgcagaagrgaaagatggaaaaagatgggtatgaatcttggaattcataattccatac

SEQ ID NO: 554614 - DNA, 983 bp, Homo sapiens
tgggcagtcatactaagaaattggtaaaaatgtaagtgaatttcacagggaatgccagaaagatgaagtgcaatactcacagaattattcgatgagttttaagacgacccagttcatgtaagcaagtgttgcctgttcctctaaagaacatgcctaagagatttatgggattagggcttctgagggaaggtacaaggaagaaaagacacatttaaaaaggaagctgccacctacattaaacatttttctgccaacagtgtttgtttaatctgtagctaaccatgaggaaactaatagggaaaaaatcattctataaaaaacaaaaaaaggctggaaatcctactagattaaaagagcctgaagagatatgacaattcaatggaaggtataattcttgattgaatctggattgacaaaacaaataaataacagccctaaaggacaatgttggaacattggagaacattgaatatgatctgtatgttaggtaacattataaaattaatgttagatgtcccaaatgtgaccattctaatgtggatatttagacattccttatttctaaggtatacttgttgaaatatttagatgtaaagtgtcattgtgcctgccaataattctcaaatatatcattaaaaacaacaaaaatatacatacagaaagaaaaaacagcagtgtagaaaaatgctagaaattgctcaacccagaagaaaagtaatgagtttttaatgtgctattcttttaacaccttgtagtgttcacatttagcaatattaaatgtgagaaaattcactggttaatttggagaaatttttttttgtccatttattgcatttaaaaaaataaagctttaaggagagcagaagttgagtcccaggtgggaggtgatctgatgaaataataactccaggctgcagttctcccatgcagaagagaaagatggaaaaagatgggtrtgaatcttggaattcataattccatac

SEQ ID NO: 554615 - DNA, 527 bp, Homo sapiens
tgtgataggcattgtgtttactaaaaattcattactccatttgttcatgaccaacattcaacagggttaacccaaaagcatttctgcatttaatttgcttccaaaaagagtcttattttattattttaagagttcttaatgttatttatttttatttccatttattaaattacattactcaaaattaagtaaagtttttctttctatctgggcaaattctgtgtgctggcccagttgcaratgtactgatagtcgccattggtacatagttttttacttaatggaagtcctcacagttattttcttgtcaaaattttcaataatatggtaacaatttctatgtgtaattcaaagtaataaaatggcatttttatatgtgttccataatccagatattttacatatgattttcaattggtgacattatgtatttcagattctgatccaaactctattgccttgctaacaattaatatggcactgaatcaaagcctttctgaagttaagacctaaggcatctttggttt

SEQ ID NO: 554616 - DNA, 625 bp, Homo sapiens
aggagggaaggaccccgaatgtcccgtgtttgttcattttcaatcatccacactgtcatgtgtgagtttgggtggttttgtatacagaataagctgtacacacattctaggaaataattttgaatgactaaagttgcaatttaccaaaccttgttttcctcttgaattttaatgtttccttttcaaatctgtgattccatttataagaatagaataacaaaaatcagtcactgtgtttgagaacgtcattgattaatatttggtctcatttataaacgtagccttcaaacatttaacatttaaatgctttcaaatactttaaactgcatttctaaatttgatattctggactttgttttcaagtacttcaactgtccaacacttctgctttcccaagtaagtacttataagtctaataaatcacatttctacaaatcttaaactcttaaatgttccagtgggtacatgttagcttagtaagatttctgctttaaaatggcacatttaagcaatggtttgattccattttaarttacgattaacaagtttgaccaacatgttgttcttatagaccgaagcctcctaaacataaggctcttaaagtatgtaaattgttaaatataaa

SEQ ID NO: 554617 - DNA, 1369 bp, Homo sapiens
aacaccatcctgcatcaactgctagccttctcttcccattttctggtagcattggaagccacatgctccagatggtgtagtcacaagatgaaagctgtttaggtccctgagcttggaggatagtcacccaagagagccacataacccatatgggactgtactgtgaaagagcaaaaaaaaaaaaaccaaaaaaccttgatatgtgaagccactgagatttttgtggttacagtggctagcattaataatcattaataattctaattaatatgcctcttgatacttgtaagagatttttagtctgggggagggaggagaagcaacagagaggataaaatgagatagaagggttgtgatgcttgagagacggggattgggggtgagcataccatgttcagagtcagtctacttctaagagaacgtcgccttaccgttcaacaagcagctgtgtttattgtccgtcctactggcatattgtgagcactttcttttcacagtagtcagtaggtccccccagatgactggctgtgacactcatctgtatttcaaaactctgtctggggccaggcgtggtggctcacatctataatctcagcactttgggaggctgaggcaggaggatcacttgagctcatgagttcgggatcagcctgggcaacatagtgagacctcatctctctctctgtataaaaactttggctggttactgtccaacataaataagttggactcctctctctcttacttcctccctccccaaatacggaaggttcctggtcttttgtgaatcaaagaacatgaaggtggatccctgaatattcaatacagaaggatggaaggaaaacatcattggtgtccttggaaaaaggtatacaaaactagctcataagcaaggagagtgtgaaaaggcatagccctcttataaaaatagctaacatggccaggcgcggtggctcatgcctgtaatcccagcactttgggakgctgacgtgggtggatcacctgaagtcaggagttcgagaccagcctagttaacatggtgaaaccccgtttctactaaaaatacaaaaattagctgggtgtggtagcatgcacctgtagtcccagctactcaggaggccaagcaggagaattgcttgaacctggaaggtggaggttgcagtgacccaagatcgcaccactgcactccagcctgggcaacagagcaagactccctctcaaaaaaaaaaaaaaaaaaaaaaagccaacatgtaatggtgtttattatgtaactggcactgtgccaaaagctagacacatatcgtctcatttaatcatcactacagctatataagttatttgttttatttaataaaagaataaacttttt

SEQ ID NO: 554618 - DNA, 505 bp, Homo sapiens
tgttgtgtgttttaatcacaattttcaaaaagaaaagaaatattcataagaaacttgaatattcttctagttttgcaaattatccttattgtttagcctcttaattgtatatcttacaaaaatctagatttagaatacaaaattattatgtgtattttatcatataaactcatttgagatgttaaatgatttagaaacactataaaattatagacagtttgtattcactttttcaaagttagttaaaacagtgttgatgtttctctgaatattgtcatgtttcataaaaacgttaatcttcagtaatttacatttattagaataatagtgtaaaacatgttatttacgatcattaaaagttrgagtgttctaaccaattattactatttattgttgttattattattattagtttgagacaggatctcactttgtcatcccagctcaagtgcagtggcacaatctgcttactgcaatctctgcctcctgggcgcaagtgatctgc

SEQ ID NO: 554619 - DNA, 631 bp, Homo sapiens
taagtctcgcaagggaggattaagagcaggagccaagatgatgtcacaggacaagcatgggcrctggagccagagagatgggcgccaattccagctttaccgcttcctgtgtggcttcgaccgattacttaacctctctgagcttcagctactacatctgcagaaagaagggaataaacagaaccatctctaaagttcttctagcactggcactctggattcttagccagggacttctgtacctctgatgggcataacttcttaaacttctaactatccattccagaaagactataatccagtgggctatcctgtttccttttacccactgggtctctgcagtaagcagggcaaatatgagatgggattaaatggatgctgactaacatggccccccacgttgggggactcaccggaaatcttcctgaagccctcagaggccccagcccccgactgcctctcctccttccctccttttctccttccctcacaacactaattgggagggactgcattcaattcctgcccattctcggtgagcatccctggctcccatgcacacgcaggtggggaggggagagccagcactgtccagagcctcccaagcccacggagccaatgggctccaagc

SEQ ID NO: 554620 - DNA, 643 bp, Homo sapiens
atgtgactgtgcaattcttcccatgaggagaatagatctctttttccacctcttgcatccgggctgtcttgtgaatagcttcagctgatagaatgtggtggaagtgattggcagcaagttcggagcctgggcgtcaagagcccttacacacttctgttctctattctgctcttccatcttcatcatgagaacatgccaggctggcctgctggcatatatgacatggggagcagagcmaagtcaaccaagttgtcccaactgaggccccagatacatcaaagaacccagccaagatcaacaaagtctcctggtcaatccataactcaactgacgcaggaatagtcaactcagatcagcagaactgcccagccaactcataggttcatgagaaataataaatggttgttgttttaagccactacattctgggcatagtttgttatacggcactagctaactgacatagaagattaagtaaaaagattatttttaagtaagtgaagataatagggactgggaataatggaagccacatttcactacttcaaaaaaattgtttagggttggtcatctggacgtattacatataacctgaatgagccagcatttatttactttctcaaaaataaattatatcacattg

SEQ ID NO: 554621 - DNA, 645 bp, Homo sapiens
gtcttcttgtcatcctgaccctactctcctctctaaaggcagacactccagtcagcctgctaagtatcacacagagatattcggtgctcatacttagagaatacatgtatatcctctgcccttccatttttacgtctgtgatactctcacattcatctacattgcttgtttgttttaaatratatgttttgcaggtcattcctttatcagcttttataggcttgttcattctttttaatggaaacgccatattttcaatttataacatatcatttatttaatcagttatgtgtgcatgtgtgtttgtgtgcgtgggtgtgtgtaaaagatcattgatcacagagataactcaaaaaagaattaggaaaatacataaaaaatttttgttacagctaatgttagttacttcagtgagtactacctactaaagaaagcatgaaaaggacagcaagttacatttgttcaagttcatgtgtttattgtaggttacatttgcagatttgagtcatttctcttctttaacttgtgcgataaattacttactattgcactgagcaataaatactgggatgattaatatgttatttctcatattgatattgaacattgatgtctagaactcagttccaattgattatatcttaa

SEQ ID NO: 554622 - DNA, 2213 bp, Homo sapiens
attcatttctctcttagtaaagttataaaaataaattaaagcaggaaatgcctttgaaaaccaaataaatcaaaagaaatttacagaaacattggtttggaaggcaactggaaaactgtaaattgttttaatcatatggtagcagaaacatgaggtagtaatattttgttacctgatatcataaattatgcagtaaataaaatatgtaagtctcattgacataatacataaatcaatgacataatgcattgttccaaaatgcatacattaacattaatgtgtgacttgctatggtgcacatcctaacacctcaaaagcttttaaatctattgtatgaatgatccatttttcaaaattataagatcaactgcaaattgtactaaaaatttcattatttaaatggctggcaaactattataagaatagcactaatagatgttccaagttactttgcaagtttatttagtatttacactaatatttactcatatgtggctaaatttagacactttctaattttagtgattcagtttaaagagtaaacaaagactttcacaatccgaactgtattattattattttagtttgtgtactgtttttagtgtgtgggtaggtgtgcctaaaggtatttttacctcaatgaatttaatctcctttaagctaggatccatgattttcatttctttttcttacatattattttgcacaggttcttgcgcctagtaaacacagaataaatgctattgaattgttcaaagttaaaataaaatttgcctatagtgacatgattttattttctaagaaaacattaattatatagagcaatgattatggaagtttcataaatgcatataaatgttgctgtcataagaccatgaaagactattgtttgtgtcaatgacttctgcaacagaattttctctgaatcatgtcttaatccacatcaaaagacatggtgctaatgtttccataagagatgtatttggtcctaaattataaactaagataatctaatacattgatgaacatattaggggacagtgtggtccagattgtcccctgtgaccttgacagtgacatcagttcctctgcccttggtgagggagcagttatcttccaggaccatcttgtcaagctgtttcctcatttctagaataacaactggttcagcaacagcaaatatctgatcatcacagcatttcacatagcttccaactagaaaacagaggtccctgttctccactctaagtatgggaggaatagtgagtgttctcattatgtgaagatttatgtcatgattttattgccatttactgaaactgtcacatctcatacggatttccacatcagataacagctattaaaattgacaccattactgtataaaaaagaaacaaacagtaaacaaacaagaacagaaaaaagatatatacatgaaaaatgagccaaaaaagggaaatatttacattgctattctttttataagttgaagatctcttttctgacatattcttcagggaaaataaatcagagattacttttgaaaaggatccctaaagtttgacaatttaaataacagctatgtttccctgcccagtgaaatccatacagttttgttggatccttttccacaaccaaagacattgcattttcagtgtatcatcctagaagtaacggactatgtgcaagaagcctcttcacattattcttctctagtttccttctgtcgatctgtgaaagatgatttaaaaatttttatcttgcttaattttccatctactttctgactgcccattttaaaaatttttaccttttgatgtgtttgccaagacagatttctaagctactttttagttttaatttacttcttgatctaatctcactaattcctgcttaaataagcttgctagattcttaataagctttttttcttaaataaaaatgtccatgtaaaataaaacacacttaccaagacacttgtttcactctttatatctttcactatgttggtgtatgtgttatgtgtatacatgtgtgtatagttcacagtgcctaagatgagttcacacacacacacacacacacacacacacacacaagaccacacagcagtgaagtctatacccagacaaagcaggcttatgttgaccttccactaacacagtttaaatgcttttcccttcttaaatgcttcaattaatkaaattagctgt

SEQ ID NO: 554623 - DNA, 508 bp, Homo sapiens
caattttatgtcatatatggcaggtaaagtgatattataaacatacagtgtttttgttttgttttgttttgttttggatggaatttcattcttgttgcccaggccaaagtgcaatgsagtgatctcagctcgctgcaacctctgcctcctgaattcaagtgattcacctgtctcagcttcccaagtggctgggattacaggtgtgtaccactacgtctggctcattttgtattttaagtagagatgaggtttcactggtcagactggtcttgaactcttgacctcaaatgatccacccacattgctctcccaaagtgctgggattacaggtgtgagccaccacacctggcctaactgtacactttttgtaaataaactactcatatccatgttggtatgctaggtaaaataacctattactaaatataagccataacccagagataagtaaccaagttaaaaaagtaaaacacatacgtttgaaaaagacaaaaaatacattttgata

SEQ ID NO: 554624 - DNA, 796 bp, Homo sapiens
agggtgggaggagggagaggagcagaaaagataactattggatactgggcctaatacctggatgatgaaataacaggtacaacaaacccctgtgacacatatttaactgtataacaaaccctcccgtgtaccccctaacctaaaataaaagttaaaaaaaaagaaacacagctttttattttttttctttttaatcccataaaggtcatgggccatttgccacctgaacagtcagtaacacatgagtggaaagaaactgaacacccagggacaccagagaccgttcactgtagaggaaggaggcaggtataactcataaggtgawcttcctccagtcccagagttgttcccctctccttaaatgtgggtcccatggaattcagactaggaagtaaagcaaatgagaaaggcctacaggggagcagttcaaatgtgtggaaaaggatagagcagccccaatgaggaaggaaggctggacaagcaatggatttgtagggaagacaatgtgcacccatcggagctctgattccttcattttcactaccctcccctgcccactaacataaaaaaagtattgatggcaagtgttgggccataagacatttccttgctttataatctggatttggggggttacatttcagagataatgaaaatctcctcctttagttaacttttaatttcataattgtaactttgtttttacagatttgtgaacatgtaaaacaaagaaaacagcatgggagtaatttataatcaacaaatatgtgttcactgagtgacactcacatggcat

SEQ ID NO: 554625 - DNA, 230 bp, Homo sapiens
catcacatgaaaagcataggcaaccactgggctatcttaggctcagcagaaaatccttaatgatgtagttttactctcatattctgaacagaaactaagtgawatctggaacttttactaaaagcttgcagatttatgtagactaggcatgcagcccactggcccaagtattttctcattcactagttaggtacatggttctagcatattatctattcctccaaatgtag

SEQ ID NO: 554626 - DNA, 494 bp, Homo sapiens
gggcatatgctcattgatttagcccctagaggaattattttccttttgaattaaaataaatagtatagtaacagctgtcttacattgttgtatctggaaaaagaagagttctatgtaaattgaaatagtgcccctgttgacaaaaatatgctgtatttgttcagataagtttataattaaaatttagtttcacttactacattcttgcctagtatctcctccacaccacaaaccatggcaatgtaagagtgtatttatgatggaagttcattttataaagcaaagtactccaaggtaatttagagacataggaaatgaagtaaagacctgtgacaattgtccaygtgatttacattaaaaataactctatgaattccttttaaaaaaacaagaaaaaaagattatttttactgggaattaaatattcatcacctcctgttgcccatatgtttttgcttattgctatagatatagaaatacacacacacacatac

SEQ ID NO: 554627 - DNA, 559 bp, Homo sapiens
gagataattggtgaagaccaatcctcttactgaactaagcaaaattattcagaaattgatcatttagctttgattctaccttccatgaatattgcacttttctctctaagatgtgacagttaccttgttaacatatattctttttctgttctaacaacagaatttagcatttttctcagtaacttatttctggatttaacttatttctattcttaaaatttcttggttttattttgcatttgtcttggttttgtgccctgcttttcatctttggaaagccgctttagattcaagcttattgtagattcccccaaactatcctataggatccccttgctgtctcctactgttcttaagcacaatagttatgcagaaatgtttcataaaaattatttcagaacatttcaacactcttgacacatgctttagagttacctatgaaaattgtagggtcacattcacctttttcagctttcrtaagaatagtcgagagtatgtctttgagtctgctatgcaactctgtccttctcaattctaaatagacacaaccactttaatt

SEQ ID NO: 554628 - DNA, 1147 bp, Homo sapiens
caacatattagcaaataggattcagcaacatgtaaaaagaattatatagcattacaaagttgtgtctgttcctggaatccsaagttgatttgttatttgaaaatcattccgtgtaactcaccaagctaaagaagaaacatcacatgattgtgtcaattgatacagagaaaagcatttgacaatatttgaaatatattccctattgaactgagaatagaggggatcttttcaacttgataaatagcatctacataaaaaatgtactattcactttgtatgtaatggtaagactaaatgatttgcccccaaggtcagaaataaggcaaagatattgattctcatcagactgaactgcggtggtatgatcacacctcactgtaatctgaactcctgggctcaatccatcctcctgcctcagccttccaagtatctaggactaaaggcttgcacaactatgtccagtcaaatttttacttgtatttttttatttttgtagagatagggatctcactatattgcccagactgatcttgaactcctggccttacatgattctcctgccttggcctcccaaagtgctggaattacaggaatgagccattgttcctggcctcatcagtcttacttatcatgatttgggaagtttttgccagtgccataaagaaaaagaaaacaaaattgtttctacttatagataacattaattgtccacatagaaaatctcaatgaattaaaaatatgcccccaaaacttcatagaagtaatgtgagttcagcaagttcacaggatgcaagataagcacacagaaatgaaatgcatttctgtattctaacggtaaatacataagtagcaacattagatgtacaataacatgcacaattgctcaataaaaataaaatgcacaggtatcaatttaaaacttctattctgaaaacatcctttaagcaatggtgcttaaagaagtcagagattttaataaatggagagctacatgatgtatagattgaaatacttaaaatagtaaaaatataaatttccccaaattctatggacaaatttatatacagatttaatttgtactaccagaaagatttgtgtgtgtgtgtgtgtgtgtgtgtgtgtgtgtgtgtagagatagaaaatatta

SEQ ID NO: 554629 - DNA, 1057 bp, Homo sapiens
aatccatatcaaaattccaatgtcatttttcacagaaacagaaaaaacaatcttaaaattggtatggaaccagaaaagatcccaactagctagaggaatcttgagaaaaagaacaaagctgaaggcatcacacgtcccaattgtaaaacatattataaagctattgtaatcaaaactgtgtggtaccggcataaaaacacacatgaaccaatggaacaggatagaaagcccagaaataaactcaagtaattatggtcaatwgatctttgacagaggtgtaacaactctactttgaaaacatatttcatttttcaatgactgagaccaacaatttaaatactaacttgttaataatttttgtctgtttttattattttccctgaatttattttttaaacatattaatatgttgctacaattcaccaatagtacttggatttttatttttttctttaacaaaattttctatcagaaaaaaagatttttagaacattataaactatcaatatatattccaactatgaaacatttcttgctctgttagttttgttctaggatttataattggtgaacttgatttaagatcaaagagtaaaagaaaaatcatgtaaacccctccaagagcaatatcatatccagactaacctgttgttttggttccttcacaaacttttaaaagaatcatatgcaccaaacaccggatactctcactcataggtgggaattgaacaatgagaacacatggacacaggaaggggaacatcacactctggggactgttgtggggtggggggagtggggagggatagctttaggagatatacttaatgctaaatgatgagttaatgggtgcaacacaccagcatggcacatgtatacatatgtaactaacctgcacattgtgcacatgtaccctaaaacttaaagtataataataataaaattaaattaaaaaaaagaatcatatgcacgatgtggtttggaatgaaaaatggtgtaaatgtgcatttcaggggaaattctgctgcagacttatttgtccctgctcaattatttt

SEQ ID NO: 554630 - DNA, 1057 bp, Homo sapiens
aatccatatcaaaattccaatgtcatttttcacagaaacagaaaaaacaatcttaaaattggtatggaaccagaaaagatcccaactagctagaggaatcttgagaaaaagaacaaagctgaaggcatcacacgtcccaattgtaaaacatattataaagctattgtaatcaaaactgtgtggtaccggcataaaaacacacatgaaccaatggaacaggatagaaagcccagaaataaactcaagtaattatggtcaatagatctttgacagaggtgtaacaactctactttgaaaacatatttcatttttcaatgactgagaccaacaatttaaatactaacttgttaataatttttgtctgtttttattattttccctgaatttattttttaaacatattaatatgttgctacaattcaccaatagtacttggatttttatttttttctttaacaaaattttctatcagaaaaaaagatttttagaacattataaactatcaatatatattccaactatgaaacatttcttgctctgttagttttgttctaggatttataattggtgaacttgatttaagatcaaagagtaaaagaaaaatcatgtaaacccctccaagagcaatatcatatccagactaacctgttgttttggttccttcacaaacttttaaaagaatcatatgcaccaaacaccggatactctcactcataggtgggaattgaacaatgagaacacatggacacaggaaggggaacatcacactctggggactgttgtggggtggggggagtggggagggatagctttaggagatatacttaatgctaaatgaygagttaatgggtgcaacacaccagcatggcacatgtatacatatgtaactaacctgcacattgtgcacatgtaccctaaaacttaaagtataataataataaaattaaattaaaaaaaagaatcatatgcacgatgtggtttggaatgaaaaatggtgtaaatgtgcatttcaggggaaattctgctgcagacttatttgtccctgctcaattatttt

SEQ ID NO: 554631 - DNA, 1057 bp, Homo sapiens
aatccatatcaaaattccaatgtcatttttcacagaaacagaaaaaacaatcttaaaattggtatggaaccagaaaagatcccaactagctagaggaatcttgagaaaaagaacaaagctgaaggcatcacacgtcccaattgtaaaacatattataaagctattgtaatcaaaactgtgtggtaccggcataaaaacacacatgaaccaatggaacaggatagaaagcccagaaataaactcaagtaattatggtcaatagatctttgacagaggtgtaacaactctactttgaaaacatatttcatttttcaatgactgagaccaacaatttaaatactaacttgttaataatttttgtctgtttttattattttccctgaatttattttttaaacatattaatatgttgctacaattcaccaatagtacttggatttttatttttttctttaacaaaattttctatcagaaaaaaagatttttagaacattataaactatcaatatatattccaactatgaaacatttcttgctctgttagttttgttctaggatttataattggtgaacttgatttaagatcaaagagtaaaagaaaaatcatgtaaacccctccaagagcaatatcatatccagactaacctgttgttttggttccttcacaaacttttaaaagaatcatatgcaccaaacaccggatactctcactcataggtgggaattgaacaatgagaacacatggacacaggaaggggaacatcacactctggggactgttgtggggtggggggagtggggagggatagctttaggagatatacttaatgctaaatgatgagttaatggstgcaacacaccagcatggcacatgtatacatatgtaactaacctgcacattgtgcacatgtaccctaaaacttaaagtataataataataaaattaaattaaaaaaaagaatcatatgcacgatgtggtttggaatgaaaaatggtgtaaatgtgcatttcaggggaaattctgctgcagacttatttgtccctgctcaattatttt

SEQ ID NO: 554632 - DNA, 575 bp, Homo sapiens
tgagcggccagagctgacggcacttctgaggggctgaatcagagtcagtcccaggagagggaagaggatgaaaggaatcaggagggcttgtttgtgctttaagcctgtccacaagaaccaggagatgggctcctgggatttcacaattcgaggtccgtctggtgcctcctgcatcctctgcacttgcacattgtgtgacatatgaaagtcggaagtgacctgaagacacgtgcaccacaagggatgctgtggagacgccctacagggactctgatgtggggggcatttccgatttctggggcctggcttttagatgaaggcagcagaaagttacctaaagacagcaatggagaggtctttagtgatccactgctgtgtaataaaccaccccgaacttaatggcttgtaacagcaagcatatattccctgccatgtttccgcaggttgactaggctcagctgggcagttcttggctggtctcacttggggtctcttgggaggttgcaggcagaatgcgcctgggctggagtcctctggtcrctctcccagggtcccagaacagctgcctgtctacg

SEQ ID NO: 554633 - DNA, 1103 bp, Homo sapiens
aatttgatgccctaaactagatgttccataatcttgcaattactttttttaattaaacctgttaatttatgactatttcattagctaccataagcattttctaagtgaaagtctagttcacctgtcaaatatagatagggaagtataaatgaaatgaactatgaggtgactagctgaggaaaggtatacaatatgaaaagcattaaaagggaatgagacagaaacacaaaagatttaatgtaggccagggtcagaatttgaactgttgaaagaaggcaactttgaagaaatttttaagggataaaattgatcacaatttcttgaacaatggatactttttatagaactgaaaaccaaagaactcccagcttccactaagaggactacacaaatctgggggcataygctaggaaaataaatgggatagagaaaaattacgaaggcactagaaatggaacgtctgggacagtaaagaggtccatattaaaaagtaagttgaaggccgagtgcggtggctcatgcctgtaatcccagcactttgggaggccgaggcgggtggatcacgaggtcaggagatagagaccaacctggctaacacggtgaaaacctgtctctactaaaaatacaaaaaaattagcagggcctggtggcacacacctgtagtcccagctactcggcaggttgaggcaggcgaatcacttgaacccgggaggcagaggttgcagtgagctgagattgctccactgcactccagcctgggaaacagagctagattctgtctccaaagacaaaaaaaaaaaaaaagtaagttgaaaatatttggaatgcaggaaatccaagttcatggcctttgcttaatatttcctgcattaactgtagagtatcctcctaacaaaatggaagaaaatggaagagaggagttgtctcgtgcaaaatccacacttatttcaaaatgtttgtatactggaaatagaaggatcaatggaaaagtaaaaattgaagtagctaaacatattagtaaaggtcaagaaaaaccaagaactgaaatattgttacatatttccacacagtatgaaaaaatacgtatgtttcagttattccca

SEQ ID NO: 554634 - DNA, 1103 bp, Homo sapiens
aatttgatgccctaaactagatgttccataatcttgcaattactttttttaattaaacctgttaatttatgactatttcattagctaccataagcattttctaagtgaaagtctagttcacctgtcaaatatagatagggaagtataaatgaaatgaactatgaggtgactagctgaggaaaggtatacaatatgaaaagcattaaaagggaatgagacagaaacacaaaagatttaatgtaggccagggtcagaatttgaactgttgaaagaaggcaactttgaagaaatttttaagggataaaattgatcacaatttcttgaacaatggatactttttatagaactgaaaaccaaagaactcccagcttccactaagaggactacacaaatctgggggcatacgctaggaaaataaatgggatagagaaaaattacgaaggcactagaaatggaacgtctgggacagtaaagaggtccatattaaaaagtaagttgaaggccgagtgcggtggctcatgcctgtaatcccagcactttgggaggccgaggcgggtggatcacgaggtcaggagatagagaccaacctggctaacacggtgaaaacctgtctctactaaaaatacaaaaaaattagcagggcctggtggcacacacctgtagtcccagctactcggcaggttgaggcaggcgaatcacttgaacccgggaggcagaggttgcagtgagctgagattgctccactgcactccagcctgggaaacagagctagattctgtctccaaagamaaaaaaaaaaaaaaagtaagttgaaaatatttggaatgcaggaaatccaagttcatggcctttgcttaatatttcctgcattaactgtagagtatcctcctaacaaaatggaagaaaatggaagagaggagttgtctcgtgcaaaatccacacttatttcaaaatgtttgtatactggaaatagaaggatcaatggaaaagtaaaaattgaagtagctaaacatattagtaaaggtcaagaaaaaccaagaactgaaatattgttacatatttccacacagtatgaaaaaatacgtatgtttcagttattccca

SEQ ID NO: 554635 - DNA, 539 bp, Homo sapiens
taacctttcaatgccctgtgtagcttgagccctgagggcggtgccgagctgacagcctggaacattgaccaacgcgctgcaactgacgtgtaaatcaccctccgactaggggtcccgaatctggaaaaggaaatgtcatctttggactttgcccatcatgtgtttatgcacgaacagtcctttcaagtgcctctctccacctttgcagacaagtggcataatgcaggtagagatcacatttttggagtttattcctaagactggctgttagtttttataaacattccttttatctgaaatttaaccataatttttttttcttaaaatgccatatcttcctatatttagagggcaggatgccragtccatatctactcaatatatcaaatattttcagtaagccaggaattagagcttccttttgtaatcaacaaaactcctggtaacttcatctttactaacagcctcatcctttcctgccatttctttgtttgtttgtttaataatttggtagtactgctgttgccttgcttcctggc

SEQ ID NO: 554636 - DNA, 1840 bp, Homo sapiens
  misc_feature 353, 383, 471: n = A,T,C or G
aacgaagtctgggttcgatggaaacccagacttcacaatacggagcttctcacaccgagaacatgtccgcccggctttcgattgatcattccccgttaggtggccgagccctgcggtgccattcgaactttggcaaccatgcacagtgatcgatatttataattacctttttccttcaccatggcacccgggtcctccgatgagcaggactgaagaaggaacgaggaataaactctgggagtggaagcgcgcctcggcagacagatccgaagggcgctggggcagccaggagaagccccggcatccgcttgtgaggtccggggctgtggtctcgagtcccgctccgcctcggngggccccgctcccatgcccgccccgctatngccccgtgctcttctccgcccgcccgccgagctgcaaccgcgcccagctcggggactctgccctgcggctgaaaccactcgctacagntgctgctgtaacaaatgcaaaattcyactgtcctaatctctggtcactgacaccaccttgtattcctcgcaccgaggacgggctatgaaaagctcccgaacgctggccccctcccacagtctgataaatgattgccaggaagaggaggaccgagcaccagctagagacggttccaataagtaaaactagtcaatggttagcttattggctccctgttacagtcgctttcaatttttactacggcttctttcaggcaaactggataaataaaattggccttaatgtaaaacaaaaacagaataatgatgctaatggcaatttcaagttcactttcttatgaaaaatgaataatgacatttggtttgcacggctgctccccgctataatttacctgaatggggctgggggaaggtagagactgagagacagccggggaagaggatctttcaggattctattccttatccaggatccaattcaggatcaaagttaaaatctgatttatccatgtaggggggattttgacttcccccttctccctctgtttcatcggagtttttagacaagccccttggatgtgcatataccagggaggaactccagtcacaattaagggacaaacagcctcatctagttcggtccaccaccaggatcagcctaagcctgaccccacagcagcaactcctcaggaggcttttgatttctgacccacagggtcacgggctgtcctgtgacctgtcctgctgtcctgtgagctgaggacttctggttcacaaagccaacacccacctgactccagcctctgtctcccaaatccagcttaccgggtcccgaccgcatgccatatacatccaccatgtgtgagaaatgggatgagcaagagacaaaaagacagacattaccatggcagggagagcagcagatggctaacacatctttcagaaccagaatgcacagccagtattagacggtatttactgcaaatattgtaacatgttgagtctaagagagccaggggaaccgaaaggaatgaagtcaatcaacctgcctcctctttgactcagagggtgtgtatggctgaaataaactacatttggtgggtctggggagaagcgggaaaaatgcccatttcttcacattcatcttgggcaggtcttcattgctggttttctgatgtgtaacagtagcacagctcaggcagctgtgacattcctacatctgtgactcagggctttactattaatagcttgggtgtctcaggctgtaagtaagagctaagtcccctccagcccctgggttgtcttttctatgacaacatacttcgcccacaccactccccgcacccatggcagccccataaggtcatgtt

SEQ ID NO: 554637 - DNA, 1185 bp, Homo sapiens
atctgcacatatcacaacagctgtcaccaaataacatcttgcacatcaataaaacaccaagaacatttacatttttaatttttaatttttttttttttaggagatggattctcactacattgcctaggctagagtgcaatggctattcacaggtgtggacactgtacactatagcctcatactccttgtgactcaagtggtactcacaccttagcctcctgagtagctgggactacaggtgccaaacacattttttaaatggagcttagaatatcctatataccatctcctttcactcaaaaaaagagaaaaaaaaaagaaaatacaaaaacaaaaaaccctctttgtagactacaagaaaagtattcaagattcactaatttattaaatatgcattgactaaatttttaataaaagtaattctttagataattccatgggtataaaacttacaaaggcattaaaataatagaccacaatcaatatttttcaatcggtagcagatatcatagatatgccttagtatagataccatgattcatctacttaaaagaatcataaataaactaacacatgtgtccttttataagtaccatactatacaagctaattgtccaactaagagcaacattatactgtttcataatgtaaatgattcattggtggttattccacattttaactataaaacataaacatgaataatcaatgctagttaattcagtggcactagtacctatgtctcatgtttgttgcatattggtgatttcacaagctagattgtctgtttaattcctaatcacactaattacttgaaagagtaatccaggaaatgtgacttattcaatttcaaagaacagcctagaaattagtagatagggcacctcagtaatgttatatagtcatgttcattgataaaattggaaggacttcatagtatttgtattaatctatcagagaaaatcacaaattcttaatatatttctccaaacattatttgaaatttcttctaatggacttaagtcatgtttgctctcaaccaggggtctgcaaaytacaacacaagggctaaatccagatggctgcctgtctttataaataaaattttattggaacacagccacatcaacacagccacacctatgcattcacatatggtctacagatgcctttgtacaacatcag

SEQ ID NO: 554638 - DNA, 1185 bp, Homo sapiens
atctgcacatatcacaacagctgtcaccaaataacatcttgcacatcaataaaacaccaagaacatttacatttttaatttttaatttttttttttttaggagatggattctcactacattgcctaggctagagtgcaatggctattcacaggtgtggacactgtacactatagcctcatactccttgtgactcaagtggtactcacaccttagcctcctgagtagctgggactacaggtgccaaacacattttttaaatggagcttagaatatcctatataccatctcctttcactcaaaaaaagagaaaaaaaaaagaaaatacaaaaacaaaaaaccctctttgtagactacaagaaaagtattcaagattcactaatttattaaatatgcattgactaaatttttaataaaagtaattctttagataattccatgggtataaaacttacaaaggcattaaaataatagaccacaatcaatatttttcaatcggtagcagatatcatagatatgccttagtatagataccatgattcatctacttaaaagaatcataaataaactaacacatgtgtccttttataagtaccatactatacaagctaattgtccaactaagagcaacattatactgtttcataatgtaaatgattcattggtggttattccacattttaactataaaacataaacatgaataatcaatgctagttaattcagtggcactagtacctatgtctcatgtttgttgcatattggtgatttcacaagctagattgtctgtttaattcctaatcacactaattacttgaaagagtaatccaggaaatgtgacttattcaatttcaaagaacagcctagaaattagtagatagggcacctcagtaatgttatatagtcatgttcattgataaaattggaaggacttcatagtatttgtattaatctatcagagaaaatcacaaattcttaatatatttctccaaacattatttgaaatttcttctaatggacttaagtcatgtttgctctcaaccaggggtctgcaaactacaacacaagggctaaatccagatggctgcctgtctttataaataaaattttattggaacacagccayatcaacacagccacacctatgcattcacatatggtctacagatgcctttgtacaacatcag

SEQ ID NO: 554639 - DNA, 541 bp, Homo sapiens
aggttaccgggaggccagtgactgcattcaggcagtgggttggagcaaatccagggcacagtcccaggcctccctcgtggaggccaaggcttgggagcacgtttctgatcaataagacctagggcctccaatgggacaggccaccaggaggtggtgagtgctcagtccctggtgggggccagtgggcgtgctgccagggcctcctgccatgaccgggggctggaccctcgactcaggtagcccagctcaggagtggagaggccagaccaggccagagaaggagagggagtcctggtataaacaaccgtggggggaccaagatgttttcttgtctcccaggcgacggcagtgtttactgcctagcgaggggrggggcatggcccacacatttgcctccctgacttgtagccaaatttttccaggaaggggtggcccaggatgagccccaaacactcctgctctgcaccccaatcatcttccctcaactttgccccaacatgtgccctaaacctccctgacatcgcccccatccttcagtccc

SEQ ID NO: 554640 - DNA, 559 bp, Homo sapiens
gacttccacattcactcttacttagacataagcttttggcttttttttttttcttttcagagaaaaacaaaacaggcaaacaaaaaatctgactctgcagtttatacagaagaattactttttgtccratacataattatcctgcaatatacagatatgtcactaaggttgctttagcattttatattttttcaataaacaagttaacatttttatttctaaatgttagagaggagactgaaaacaagctgctgcgaaaggtacttttgaaattatgtgttctgacaaggatcagagctaaagagatagctaacagttattagcgttcaaatcctcaatgatgtcccaggtggtaaaacaatacatgacccaattcatccacccatccctttgatcaatgcaatggaaggtttagcagcagtattcactggagatgacctcatgtagacgagatgtgcttggttcatcccttctgtagctccatgttactgaacatttattgaccttaagaatcttatctatataacttcatataatgctgtcaataatcccctaaggc

SEQ ID NO: 554641 - DNA, 559 bp, Homo sapiens
gacttccacattcactcttacttagacataagcttttggcttttttttttttcttttcagagaaaaacaaaacaggcaaacaaaaaatctgactctgcagtttatacagaagaattactttttgtccaatacataattatcctgcaatatacagatatgtcactaaggttgctttagcattttatattttttcaataaacaagttaacatttttatttctaaatgttagagaggagactgaaaacaagctgctgcgaaaggtacttttgaaattatgtgttctgacaaggatcagagctaaagagatagctaacagttattagcgttcaaatcctcaatgatgtcccaggtggtaaaacaatacatgacccaattcatccacccatccctttgatcaatgcaatggaaggtttagcagcagtrttcactggagatgacctcatgtagacgagatgtgcttggttcatcccttctgtagctccatgttactgaacatttattgaccttaagaatcttatctatataacttcatataatgctgtcaataatcccctaaggc

SEQ ID NO: 554642 - DNA, 538 bp, Homo sapiens
ctattataacagcagaaagtggactatgacataattgtttwcatacaactgtgagatagaaggctttctagaaagctttgggtataactttccaaactgagtttccattgtaaaactttaccttcatatattaatttaaaacaattacaagtagcaaagataattggggcaaaatcctgaaaagcataaattgtgtaatatattgagaaaaaaatagacctcttataacaatagtgtgtaaaacataaagtccacctttataaataggtactaatttaaaaagttcaggaattgttcatgaaaatacattccatgtattaagtctatattgtctaatatatcctagctatatctttctttagtatttaagaaatagccatggccattttcaaatgaacattttactctataaaaacattcatctacagtttatgctatgtcacaattatcatgaaaatagattagcaaaaatttccttttctaacagtaactgaaaggaaactgaatgagctgacttaacatttaaactacatgaatt

SEQ ID NO: 554643 - DNA, 538 bp, Homo sapiens
ctattataacagcagaaagtggactatgacataattgtttacatacaactgtgagatagaaggctttctagaaagctttgggtataactttccaaactgagtttccattgtaaaactttaccttcatatattaatttaaaacaattacaagtagcaaagataattggggcaaaatcctgaaaagcataaattgtgtaatatattgagaaaaaaatagacctcttayaacaatagtgtgtaaaacataaagtccacctttataaataggtactaatttaaaaagttcaggaattgttcatgaaaatacattccatgtattaagtctatattgtctaatatatcctagctatatctttctttagtatttaagaaatagccatggccattttcaaatgaacattttactctataaaaacattcatctacagtttatgctatgtcacaattatcatgaaaatagattagcaaaaatttccttttctaacagtaactgaaaggaaactgaatgagctgacttaacatttaaactacatgaatt

SEQ ID NO: 554644 - DNA, 538 bp, Homo sapiens
ctattataacagcagaaagtggactatgacataattgtttacatacaactgtgagatagaaggctttctagaaagctttgggtataactttccaaactgagtttccattgtaaaactttaccttcatatattaatttaaaacaattacaagtagcaaagataattggggcaaaatcctgaaaagcataaattgtgtaatatattgagaaaaaaatagacctcttataacaatagtgtgtaaaacataaagyccacctttataaataggtactaatttaaaaagttcaggaattgttcatgaaaatacattccatgtattaagtctatattgtctaatatatcctagctatatctttctttagtatttaagaaatagccatggccattttcaaatgaacattttactctataaaaacattcatctacagtttatgctatgtcacaattatcatgaaaatagattagcaaaaatttccttttctaacagtaactgaaaggaaactgaatgagctgacttaacatttaaactacatgaatt

SEQ ID NO: 554645 - DNA, 538 bp, Homo sapiens
ctattataacagcagaaagtggactatgacataattgtttacatacaactgtgagatagaaggctttctagaaagctttgggtataactttccaaactgagtttccattgtaaaactttaccttcatatattaatttaaaacaattacaagtagcaaagataattggggcaaaatcctgaaaagcataaattgtgtaatatattgagaaaaaaatagacctcttataacaatagtgtgtaaaacataaagtccacctttataaataggtactaatttaaaaagttcaggaattgttcatgaaaatacattccatgtattaagtctatattrtctaatatatcctagctatatctttctttagtatttaagaaatagccatggccattttcaaatgaacattttactctataaaaacattcatctacagtttatgctatgtcacaattatcatgaaaatagattagcaaaaatttccttttctaacagtaactgaaaggaaactgaatgagctgacttaacatttaaactacatgaatt

SEQ ID NO: 554646 - DNA, 278 bp, Homo sapiens
gtcacatcctaggactccaaaaaagagaagggctttctacctatgctacaattctaactgaaaagaccatcagatttctagtcctaaattatctaatgccctaaatccacattaataccatttaaatgcagacataatatgttaacatagatacrctaagaacttgtattgttttcaaaaaggtgatcctttatgattgcttaaaaaaaagccactaattctttatttctagattccttatcaaatatgttagcagcagtttataaccactaaaatta

SEQ ID NO: 554647 - DNA, 278 bp, Homo sapiens
gtcacatcctaggactccaaaaaagagaagggctttctacctatgctacaattctaactgaaaagaccatcagatttctagtcctaaattatctaatgccctaaatccacattaataccatttaaatgcagacataatatgttaacatagatacaytaagaacttgtattgttttcaaaaaggtgatcctttatgattgcttaaaaaaaagccactaattctttatttctagattccttatcaaatatgttagcagcagtttataaccactaaaatta

SEQ ID NO: 554648 - DNA, 614 bp, Homo sapiens
cagcctgaccaacatggagaaaacccatctctactaaaaatacaaaattagccaggcatggtggcgcatgcctgtaatcccagctcctcaggagactgaggcaggagaatcacttgaacctgggaggcagaggctgcggtgagccaagatcgcgccattgcaatccagcctgtgcaacaagagcgaaattccatctcaaaaacaaacaaacaaacaaaaaatccaggaagctttaggtagctttaaaatgatatcttatcaaaatggctatcaaatcatgtcaagtaagtggtttttaatgatatattgaattcaraggaagaaatctttccagtatcttgattggaatggccagcaaagcatagatggaaggataagtgttgacatttattgagttcttacaacttatgtgaattaactcattgattcttcccagtaaccttctgatgtaagtgctgttaatgatctctggttggcagggaagaaaactgaagcagaggaaactttgtgcatggtggaaatgggcttctaattcaagcattcagtttccagagcccttgctcctaaccattttaatctgaggccagagctcagggagaattgacatctttcaa

SEQ ID NO: 554649 - DNA, 358 bp, Homo sapiens
ataaatgtatgcagcacatcaaaatatctaactacagaaaattaagtttggcaactctagagagaccataagaatatgtactttaaatgtattttctgctgtgaatacatagatacagattcatacttactcccggtgtctattgatattatgcatatttacaggagagttaaataaagatgtcggttctttcagggtatagaactggaaattacaagaatgaattatttgtttgcagccaaagcactatagtctaaatagcagaacttcttacttatacatgattattaaaccagtgctaacactattattaatagtgatatgcaataatattkcatttgatctttgcaaaaatcct

SEQ ID NO: 554650 - DNA, 686 bp, Homo sapiens
caagyctggttcccaactccactctgggtgctgggacagccatgggccacagtggctgctgtgacaggtgcgagtgggaccttcaagaatctcccctgtgagaagcagctcacaatgtggctacatttggctggagtggagacaggaaaatgcatccacatcatgatccactagagggtccggttcttagggaaccggaccaccagctacagctaatgtgttaggatgagtacatcccatgagatatttgggatgtacttatcttaaacattacttgttattgatctagttagatcaccaccaggtacacagtaggcccttgttcaaggtgagctcaccatcttcctgatccagacctcatcctgacaacccagaatgctttgggttctagagtgtgccagagggctctagaaggttctagaagtttcccgagggcccagctctgcacagagaatgaatttgggcttctttgagcactgacctttgtctgtgactgcaggcctgactgtgggtggagcagctcagatccaaatgtggaaatcgtgcctgtcacctggcagctaatttggcgcccatggagttgctggcctttgttcagtctcctcttcccaactggagcaggagcttgtgagggaatgggctggaaattggagggaaatgagggggagtgaacttagaaactccca

SEQ ID NO: 554651 - DNA, 686 bp, Homo sapiens
caagcctggttcccaactccactctgggtgctgggacagccatgggccacagtggctgctgtgacaggtgcgagtgggaccttcaagaatctcccctgtgagaagcagctcacaatgtggctacatttggctggagtggagacaggaaaatgcatccacatcatgatccactagagggtccggttcttagggaaccggaccaccagctacagctaatgtgttaggatgagtacatcccatgagatatttgggatgtacttatcttaaacattacttgttattgatctagttagatcaccaccaggtacacagtaggcccttgttcaaggtgagctcaccatcttcctgatccagacctcatcctgacaacccagaatgctttgggttctagagtgtgccagagggctctagaaggttctagaagtttcccgagggcccagctctgcacagagaatgaatttgggcttctttgagcactgacctttrtctgtgactgcaggcctgactgtgggtggagcagctcagatccaaatgtggaaatcgtgcctgtcacctggcagctaatttggcgcccatggagttgctggcctttgttcagtctcctcttcccaactggagcaggagcttgtgagggaatgggctggaaattggagggaaatgagggggagtgaacttagaaactccca

SEQ ID NO: 554652 - DNA, 686 bp, Homo sapiens
caagcctggttcccaactccactctgggtgctgggacagccatgggccacagtggctgctgtgacaggtgcgagtgggaccttcaagaatctcccctgtgagaagcagctcacaatgtggctacatttggctggagtggagacaggaaaatgcatccacatcatgatccactagagggtccggttcttagggaaccggaccaccagctacagctaatgtgttaggatgagtacatcccatgagatatttgggatgtacttatcttaaacattacttgttattgatctagttagatcaccaccaggtacacagtaggcccttgttcaaggtgagctcaccatcttcctgatccagacctcatcctgacaacccagaatgctttgggttctagagtgtgccagagggctctagaaggttctagaagtttcccgagggcccagctctgcacagagaatgaatttgggcttctttgagcactgacctttgtctgtgactgcaggcctgactgtgggtggagcagctcagatccaaatgtggaaatcgtgcctgtcacctggcagctaatttggcgcccrtggagttgctggcctttgttcagtctcctcttcccaactggagcaggagcttgtgagggaatgggctggaaattggagggaaatgagggggagtgaacttagaaactccca

SEQ ID NO: 554653 - DNA, 646 bp, Homo sapiens
tggagaggggggatattaatactaggccctgaggtgccatgttcagtcagggttaagcttgcctggcaaaatacaagatgctcagctaaatgtgaattttggagaagcagggacattgcttctccgaaattcacatttaactgggtrccctgtatttttatttgctaaatctggcaagcccagcctggacagggcgcaggagcagagggccttggtctgtgtcccggatggttctctctgggaccgtgaagctgctggagggggagttgagagagagtggggctgagcagagaggaggggagaggcaggtgctggcgcccagcgtggccaggctgaggcccagtgtttggcactgggggcagtactgggaggaggtaggttgggggtgcctggcctgccctgcagggccttactcactctgggtgggctctgaccctgctgtagatcacagaggagcccccctgtggtctggctgatgaaaggaatagaggacatcgagtgaaggttggtatggggccttaggaaacattcagccacgcttgtgcctcttgcacgggcacccgcctgcagaggctgctgggctgggagcgggattcccttccagctcaagggaccacttgagcctcagcggcttccgagggcttca

SEQ ID NO: 554654 - DNA, 843 bp, Homo sapiens
cgccgctgcactccagcctggacaacagagcgagagtctgtctcgaaaaaaaaagaaatttatacaacttagccagaagaataaaaaacaacctcttaacagttttttcaaataaaaaaagtgagtttgaagagaagggaataaaggggactttcaktttaatgtgttttttattttttgagtcagggtctcactttgttgcccacatggaagcgcagtggtgtgatttcagctcactgcaaacttggcctcccaggctcaaacaatcctcccacctcagcctccctagtagctgggaatacaggtgtacatcaccacaactggttaatttttgtatttttgtagagagagggttttaccatgttgctcacactggtcttgagcttctgggctcaaacaattcacctgccttgggctcccaaagtgctgggattgagccactaggccaaccaagttttttgtttggttttgtttttgagatggagtctcactctgttgcccaggctagagtgcaatggcacgatcttggctcactgcaccatttgcctcctgggttcaagtgattctcctgcctcagcctcgtgggtagctgggattataggcacccgccaccgagaccagctaatttttgtattttttagcagagatggggttccaccatgtcagctaggctggcctcaaattcctgacctcatgatccacccacctcggcctcacaaagtgctgagattacaggcatgagtcactgctcccggcgaccagccaagacttttactttataaagatatttatgatgttttcttttctttttacagtacgcattgcatttataattggagatac

SEQ ID NO: 554655 - DNA, 3211 bp, Homo sapiens
gggggcgggaacgacacaccaccgttcggcctcgggcacctgagggacaacccggagcgctccaggagcaccgcaagggcccaggcggagccgacgctcgcgcaaaccccccccgagagggcagcacgacgggccggcgggacggcacccccaccgccgcggaggggggccgcccgcaagtcgacaaccactggaggcgacagcgagggctgtctgccgcgtcagaggaccccgccggcccgcacccgcgaagcagaaggcggcgggcgggacggcgaggtcgggccggggtccgcaccccacgccttcccacacgcaccgccggcgggcggggagaggagagacgaggggacccccgcggggcggagcgagaaggacggtcccgttcgccacgaacgtccgcccctcgcccgtcgcggctcggacccggcccgggagagcacgacgtcaccacatcgatcacgaagagccccccgggagcggaggccggccggccggccagcgagccgatcggctccggccaaccccccactccggggaaggggcggcggacaaccccgcggagacgagaacgcctgacacgcacggcacggagccagcggggtggggttgtcgcggccgccccgggcgcccgcagcggagagcgcacgggggcacggtggccctcgccgccttccccgccgcccccgggtgggtcagagacccggacccgggccggcaccgggagtcgggacgctcggacgcgcgagagaacagcaggcccgcgggccccggcaggcggctcaagcaggagcgcggccggctagccgggtcaccggtaggccagagccccgcgcgcatccggaggcccaacctctccagcgacaggtcgccagaggacagcgtgtcagcaataacccggcggcccaaaatgccgactcggagcgaaagatatacctcccccggggccgggaggtcgcgtcaccgaccacgccgccggcccaggcgacgcgcgacacggacacctgtccccaaaaacgccaccatcgcagccacacacggagcgcccggggccctctggtcaaccccaggacacacgcgggagcagcgccgggccggggacgccctcccggccgcccgtgccacacgcagggggccggcccgtgtctccagagcgggagccggaagcattttcggccggcccctcctacgaccgggacacacgagggaccgaaggccggccaggcgcgacctctcgggccgcacgcgcgctcagggagcgctctccgactccgcacggggactcgccagaaaggatcgcggcagagggaccgcggcccggcccggggaccgctccccggcacccgggggacgggggcgggacggtccccggctccccacggggactcggaaacgaattcggccgccgcctcagacggccaggatgagcgcggacccgcgaccgggccgggaagggcgtccccagcctcccgcgccacgcgcggcgggtccccgcgggtcgcggctcgggcctcgggagctacggcgcgctggtcgaccggcccgggcagccccacgcccgccgcgggcccagaagcgcagcgacagcctctcccccacataaacctgcacgccagagctgtgactcacaagcgacgcgccacagctctggcgccaccgggccagccgggctgacgaccgcgggctttccggagctctgcctagctcacagcggggacggtcccctccctcggcagctgccaccgcagctccggaagccgagagcacgatctcaaagcggccgccagatggagcccgacaaccgccgcggacgtcagcgagacagatccggctggcagggcggcccgtggaccgcgaaagcgaaaccgtgagtcgagaagctcttcccgaggccgaaaacgcagcccctctgccccaaccccacacaaacggtgcccaaaacgcgtctctgcctcgaccgcgacagagtcagaagacaacccacggcgcgtgggtgtttggagatgcctctcggaagcagggagggagggagggagggagggagggagggagggagaaagaacacacaaggactcggtcgcgggtcgctgcagacacacggagaggcagaatgcgtaggctcttccggaatccacgcagagacagacggggggaggggagtggggaaaagagacagatggcgaaagggaaggagggagggaagggagcagggagggagggagggagggagggaggaagaaaatggagaaaagagagacaatttagaaaacgtagatacacaaagtaaacttctgaaacactccattttttaaaagacagacggaaaggaaagaaacacgaaaaagagagaaagaatgaggaaagaaacgaaggaaagaagggaaaaagaaacagagaggaaagaaaaaagaaggaaacacagggaacgaaagagaaataaagcacgaaggaaaaaaggacagaaagagagaaagaaggaaaggaagagaggaagaaaaacctaaagaaggagagaaaggaagaaaggaaggaagaaaaacacgaaggagaggaagaaagaaaacagagataactacgtacgctcgttcatttacacacataaatacgacgcttttcatacgtaaaataaacgtctttatcgacgatcccttctttatagagcgatgtgtatttatttgtataacacaracacctacatctatcatacagaagtctatttccatacaaccgatacgtatttaccatacgcaagagtattcaacgcagagatacacgttgtcgttgtttgcatataagcgtacagaaacgtttacattaatacatataagtaaacgcgtggaaacgaaagaaataaaaaagcgaaatgagtcaacaggccgggcacggtggctcacgcccgtcatcccagcacttcgagaggccgaggtgggcgcatcacaggaggtcgggagttggagaccagcctgagcaacatggagagacacggcgtgcctactaaaaacacaaacatcagccaagccaggcgtgggggtgcctccctgtcatccccgctaatcgggaggctgaggcaggagaagcgctcgaacccgggaggcggaaggtgcggtgagccaagatcgcgccattgcactctagccgtggaaacaagagtgaaactctgtctcaaaaggacgaaacagaaagaaagaaagaaagaaagaaagaaagaaag

SEQ ID NO: 554656 - DNA, 1437 bp, Homo sapiens
attgtttgatttttcaaaacatcactcccaccttcacatcccacccccaacccctactaggacccaacagataacaaacatgcaggcatcagattactaaggggaaagaccctaggcctaaagcacacttaccgctctagctgctaatgtgacaagaattccagttaagaaggtaaaatagtatccagggtagacaccatgccacaaagcagacaggatgaaggttagcaccgtggggtaccatggaacccgctgatagcacacactgtgaagagaggaaggaacaagacacaggtgaaacataccagaaacttctaagtacagctgctgtttcttggataagaccatgcagaaagcatttggttgttactgatgagatgcctccctaaccgtcttcggggacttgcagtgcaatccaagcagcctggactaccctggtttccttaagcattaccagataggcaattcacagttcagccttttgaggggatgttatacatttttaacctccatagactaaatgatctggacccatcacactrtatctgttacaggtctgagtgatcactttccacccaacaggagttcctgccttacagacgcttactccaccaatggcctcatctactgggggtgcttaagtaagtgccattggcattaacaatttcggaatcagggtctttagaaatgaatatccttatttagtaaaaattaatttacctttcccaccaggctcctgtgccatctaacctaatcagcaccatcaccctgttcatcccttttggcaatgactccatcacaaaatcaatgtgtcagttatgtgacctcttcaggtctcacagtgtccatcagacttcaatccatgaatctgccttaaagagtgatactgtgacaatctagcaaatgtcagcaaataccctgagggtttttggcattctgattgtttatttaaaaaaagtgacagggaattcccccccaaaactcagtctatgaattgccaacggcactctaaggaagccaccacctggtttactaaatgagaggtcaaataaataaaaattaataaaaatatataataaaaaataaataaataataataaaaaaataaaaaataaaattgaaattcaaacagtgaacaccaacccagcactgtatgggtggtcaacagtaaccgatttaaacacaaactaagcactatggtgctctcttcataggaagaaaaagaatgcagttggagagatgaacacaggactgagaccccatttggacacaggatgactcagcacactgggagtactcagtgtatagaaatggaagtttatgctaaaatcatttgcaaaatttattaatagcaataatgttgaggccaaaatttcaagatgactatgttcagatcaattatcagaaaatactgcatgagtttactttggaggaatt

SEQ ID NO: 554657 - DNA, 1312 bp, Homo sapiens
  misc_feature 350, 351, 352, 353, 354, 355, 356, 357, 358, 359, 360, 361,362, 363, 364, 365, 366, 367, 368, 369, 370, 371, 372, 373,374, 375, 376, 377, 378, 379, 380, 381, 382, 383, 384, 385,386, 387, 388, 389, 390, 391, 392, 393, 394, 395, 396: n = A,T,C or G
  misc_feature 397, 398, 399, 400, 401, 402, 403, 404, 405, 406, 407, 408,409, 410, 411, 412, 413, 414, 415, 416, 417, 418, 419, 420,421, 422, 423, 424, 425, 426, 427, 428, 429, 430, 431, 432,433, 434, 435, 436, 437, 438, 439, 440, 441, 442, 443: n = A,T,C or G
  misc_feature 444, 445, 446, 447, 448, 449: n = A,T,C or G
agagacgtcggggagttcagcttcccttgggccctacttggctcaggctggggtcgcagatccaggcatttccagaggcactggcttctgaagcaggcgagggtgaacgcagggtgaaggccattcggccgcccttctggcttcagagtcacgcaatgcacgcgtttctaacgtgcaacaacacgattagtcgactcagcctctccggttttctgaagctttgtagtctgcacagttgtcccgcagaaagcaaatggcaactcctagggtttagtgattgcttaatctatatagagatgaaagcaagcgattgaggttgtctctgtggtgcaatcggttagcgcgttcgnnnnnnnnnnnnnnnnnnnnnnnnnnnnnnnnnnnnnnnnnnnnnnnnnnnnnnnnnnnnnnnnnnnnnnnnnnnnnnnnnnnnnnnnnnnnnnnnnnnnstttccctcaatctgttgcctccaggtgttaacacagaattaagcatccacaattgctgaaagttacctggggcatggtgggttttgatcttcttccccttcttttcttccccttctccttcttttcttcgttgatcttcttccccttcttttcttccccttccccttcttttcaatttctgcaataaattcagacatggacagacacattaagctgattcccctacacacataacaatccactgtctaaccctcacacagggacctcaggctcctcagcataagaataggagactgtgagagatatatttcaggaggcctgaaggctggtcatgatagaaattcctcggtttttctcccagaaactgtgggtaaaatgtccctattctagtagatcgttatcccaatatcatttgtcccgagtttgtgcaaacagttatgccatatttttccaatcaatttaaagcaaataccctcaaatgatttctaggagaaaaactgcaatatttagccctgtctcatcaaatactcagattgttcatggttgtgaggactttagacactgaaattagagtgaaaaaggaaatctacaaacccttgagtcaaaatcatagttctctgaatttgtcacatctgcccaggtccaatgtcatgagagtagaatcagagtgccacaggcatggcctgagactaggaagagagccatgctcactgacccatcccatgtctgggcttccagttagaactagagtttcattcaacctacatgtgcctataggtcctcactgcagcaatgacatctctcagctcagtaatggccacttggagcaggaatatgatctttatatggaagactcagtgga

SEQ ID NO: 554658 - DNA, 644 bp, Homo sapiens
tgagttatatgtacgaagagcctggaacaatgcccatcccataggaaacactatgtaagcattagttgtcactgatattgttgctcttctgatctaggaaggttgaaaatagaggcacaggtgagctactacttacaggctaagactggaatcagatcaactctttcactcctatccctgaagctagtcctgcaactggggctgcatatgagggcttggggagagatcctataaccctggaatctgggatatccaagtccttcctctgctctagctcttgggttggtggtccctccaagacccatagactcgaagtcacttctttttccctcagcagggttggggtggggctggtaatgggagaattactttcttggtctrataactccctttagtagagagttagtcctgggagtgtgagttgggggaggttgggtagagcagaggagattaaatatcctttatgtaccagcccacacacacttgacctcaccagagggttgggaagacagagattcaaagaggggaagtgatctgacaaagtcctaaagctagaacttggcagagttggcatgtgaactctgatctgcttgatggcaaacttaaagcccttccattgctgcatgctttttgaagggagaaat

SEQ ID NO: 554659 - DNA, 644 bp, Homo sapiens
tgagttatatgtacgaagagcctggaacaatgcccatcccataggaaacactatgtaagcattagttgtcactgatattgttgctcttctgatctaggaaggttgaaaatagaggcacaggtgagctactacttacaggctaagactggaatcagatcaactctttcactcctatccctgaagctagtcctgcaactggggctgcatatgagggcttggggagagatcctataaccctggaatctgggatatccaagtccttcctctgctctagctcttgggttggtggtccctccaagacccatagactcgaagtcacttctttttccctcagcagggttggggtggggctggtaatgggagaattactttcttggtctgataactccctttagtagagagttagtcctgggagtgtgagttgggggaggttgggtagagcagaggagattaaatatcctttatgtaccagcccacacacacttgacctcaccagagggttgggaagacagagattcaaagaggggaagtgatctgacaaagtcctaaagctagaacttggcagagttggcatstgaactctgatctgcttgatggcaaacttaaagcccttccattgctgcatgctttttgaagggagaaat

SEQ ID NO: 554660 - DNA, 3049 bp, Homo sapiens
gatcacatttgatgggacaacagccctgacaagtgggtttcttatccctatttccaaaagagttcattgaagttctgagagcttaatccccgctttaggttacacagtagtagctggatttcctggcatcagaaccctcacctacgctgcctctgagcatggcttctgtgccccagtctcaatttccatgactgtttcaagtcctcctgttcccccgcatttgtagtcattcttggtgactgggaacgaagggctagagcgtgagctgaaactgagacagggagtggcaggcaggcagtggggacagaaacttttctcaaatccacccatgtgaagaagatggacagaagggtggtctttctggagagaggcttccaagccactttcccaagaaagacagctgatcttgggataaatggcagggacctgattgggtaggggatgggtggtcacattgttttgtgggctgtagactttatttcccttcctttgggaagagaagaggaagaggacagctcaggtgtgggtttgagccctggattaagactgcccattgtccactaaaatctcttctttccttgctgcacgagggtggagggacacccagctggacactccatttcccagctgctcttattgccaggtgtagacacaggggaatgtgaggtgagcatgtcctcaaagcctgacggattgggtaaattctcctttgtgttctctctttcatgagctgggcagatgtgcctgagacaggtttgaccaggcaactgaaaagacatccctaagagaagacaaagcaaaggtatgaaaggaacacacgtccctgactgactaggaggaacagagctgcctgctatctggaacaacttcctcccagactaagtgagaaataaacttctgttttctatatgctactgtgtttgggggcctttgtgttatagaagttttgctgtcatcctttccaattcaccttctcacaccagatatttcaaattaaraagattatatcaggccaggtgccatggctcatgcctgtaatcccagcactgtgtggggctgaggcaggtggatcacttgaggccaggagttcgagaccagtctggccaacatggtaaaaccccatctctactaaaaaatacaaaaattagctggacacagtggcacactcctgtaatcccagctacttgggaggctgagacaggagaattgcttgaacccaggaggcggaggttgcagtgacccgagatcatgccactgtgcaccagtctgggctacaaaatgagattctgtctcaaaataaaaaactgattacatcagatcacggaataactataataatatttattgggccagatagtatgcaaaggactctatgcacattatttagtgtaatctatgtgacaatcctctgagatatgtgttactattccaatttaaacaagaggaaacaggttcaaggaaggtaagttatgtgctgagggacacacaagagggggtggagctggatttcaagcccactgggtgtacagaactgagcctcttcaccatgggggcaaatccctcctgaggacagggctggaaaggccatggagatcatcttgtgcttggacaagcctctcaccagtcaccacagggccctgactcccattcctaccttcaagaagctcagcaggctactactcgtgttcatgttgggtcactacatacggttttatttgaaggaaggaccccagagttaaactcatttgaaaacccctgataaattcagtcccctccctctttttacaggtgaggcccggagagaagatatgacttgcttaaggtcacacacttagtttctctgtcaatctttctaaatctaggacgagttctcttcccactgtatcaggctgcctcaacaaacagggaagtacaaaaatagccaaatccaggaaggagggcaagtggtctgtgtctcctccaattatttcatgggacagccaagcctattttcttgatttcccttgtgcccctcctgtcggatatctgctttgggacccatctcttttgggcttgcagagagaacgggctgcaccagctctctaccctctgcatcacccagatggtcaaacatgcaaagggaaaggagagctggggccagagtcaaggcaggcaaagagactcctcaaccccctccagtctttccacatttatatttttggaatttcaggctccctcctcccccgggacctttcctagtagcccaccagggagaagaagagggaaaactgtcataaatttctcctatttatacaagatgacagagtttcttgtgccagaaaaaacacagaaagggagctgtcaggggagaagggacccagccctatatcttctggggtcaatttatctttctgaatcatggcttgggggctaccctaacattgcctgtatgaaatgcaggctttgacttggggcagccaggccagacagcccctgagctttgtttctgatcacagttttcctgcttcatctcaacttccccctaccccttacgctgtctttttaaaaaacaaccttcttgaggtataattcatgtgtcatacaattcaccatttgaaatgtacaattcaatggttttagtatattcacaggtatgccaaaccatcaccatagttaattttagaacattttcatcacctcaaaaagagatcttgtaacctttagctatcacctccctatccccccatattccttcttgcccttaacaatactaatgtactttcagtctctgtagatttccctattccggactttcatatgaatggcatcatataataagagacctactgtgactagcttctttcattgagcatagtgttttcaaggttcatccatgttgtggcatttatcagtacttcattccttttcaaggctgactaatattccattgtatggatatatcacactttgtttatccgttcatctattggtgaacatttgggttttttccaccttttggatattatgattctctctttcctcttattgtctagacatcttggatagtatc

SEQ ID NO: 554661 - DNA, 3049 bp, Homo sapiens
gatcacatttgatgggacaacagccctgacaagtgggtttcttatccctatttccaaaagagttcattgaagttctgagagcttaatccccgctttaggttacacagtagtagctggatttcctggcatcagaaccctcacctacgctgcctctgagcatggcttctgtgccccagtctcaatttccatgactgtttcaagtcctcctgttcccccgcatttgtagtcattcttggtgactgggaacgaagggctagagcgtgagctgaaactgagacagggagtggcaggcaggcagtggggacagaaacttttctcaaatccacccatgtgaagaagatggacagaagggtggtctttctggagagaggcttccaagccactttcccaagaaagacagctgatcttgggataaatggcagggacctgattgggtaggggatgggtggtcacattgttttgtgggctgtagactttatttcccttcctttgggaagagaagaggaagaggacagctcaggtgtgggtttgagccctggattaagactgcccattgtccactaaaatctcttctttccttgctgcacgagggtggagggacacccagctggacactccatttcccagctgctcttattgccaggtgtagacacaggggaatgtgaggtgagcatgtcctcaaagcctgacggattgggtaaattctcctttgtgttctctctttcatgagctgggcagatgtgcctgagacaggtttgaccaggcaactgaaaagacatccctaagagaagacaaagcaaaggtatgaaaggaacacacgtccctgactgactaggaggaacagagctgcctgctatctggaacaacttcctcccagactaagtgagaaataaacttctgttttctatatgctactgtgtttgggggcctttgtgttatagaagttttgctgtcatcctttccaattcaccttctcacaccagatatttcaaattaagaagattatatcaggccaggtgcsatggctcatgcctgtaatcccagcactgtgtggggctgaggcaggtggatcacttgaggccaggagttcgagaccagtctggccaacatggtaaaaccccatctctactaaaaaatacaaaaattagctggacacagtggcacactcctgtaatcccagctacttgggaggctgagacaggagaattgcttgaacccaggaggcggaggttgcagtgacccgagatcatgccactgtgcaccagtctgggctacaaaatgagattctgtctcaaaataaaaaactgattacatcagatcacggaataactataataatatttattgggccagatagtatgcaaaggactctatgcacattatttagtgtaatctatgtgacaatcctctgagatatgtgttactattccaatttaaacaagaggaaacaggttcaaggaaggtaagttatgtgctgagggacacacaagagggggtggagctggatttcaagcccactgggtgtacagaactgagcctcttcaccatgggggcaaatccctcctgaggacagggctggaaaggccatggagatcatcttgtgcttggacaagcctctcaccagtcaccacagggccctgactcccattcctaccttcaagaagctcagcaggctactactcgtgttcatgttgggtcactacatacggttttatttgaaggaaggaccccagagttaaactcatttgaaaacccctgataaattcagtcccctccctctttttacaggtgaggcccggagagaagatatgacttgcttaaggtcacacacttagtttctctgtcaatctttctaaatctaggacgagttctcttcccactgtatcaggctgcctcaacaaacagggaagtacaaaaatagccaaatccaggaaggagggcaagtggtctgtgtctcctccaattatttcatgggacagccaagcctattttcttgatttcccttgtgcccctcctgtcggatatctgctttgggacccatctcttttgggcttgcagagagaacgggctgcaccagctctctaccctctgcatcacccagatggtcaaacatgcaaagggaaaggagagctggggccagagtcaaggcaggcaaagagactcctcaaccccctccagtctttccacatttatatttttggaatttcaggctccctcctcccccgggacctttcctagtagcccaccagggagaagaagagggaaaactgtcataaatttctcctatttatacaagatgacagagtttcttgtgccagaaaaaacacagaaagggagctgtcaggggagaagggacccagccctatatcttctggggtcaatttatctttctgaatcatggcttgggggctaccctaacattgcctgtatgaaatgcaggctttgacttggggcagccaggccagacagcccctgagctttgtttctgatcacagttttcctgcttcatctcaacttccccctaccccttacgctgtctttttaaaaaacaaccttcttgaggtataattcatgtgtcatacaattcaccatttgaaatgtacaattcaatggttttagtatattcacaggtatgccaaaccatcaccatagttaattttagaacattttcatcacctcaaaaagagatcttgtaacctttagctatcacctccctatccccccatattccttcttgcccttaacaatactaatgtactttcagtctctgtagatttccctattccggactttcatatgaatggcatcatataataagagacctactgtgactagcttctttcattgagcatagtgttttcaaggttcatccatgttgtggcatttatcagtacttcattccttttcaaggctgactaatattccattgtatggatatatcacactttgtttatccgttcatctattggtgaacatttgggttttttccaccttttggatattatgattctctctttcctcttattgtctagacatcttggatagtatc

SEQ ID NO: 554662 - DNA, 1508 bp, Homo sapiens
cctgtttccttaagccttcataatacttagaagcccttaggccaaaacaaatactttctattgccacatagagacctttatgaaaggtgaatacacagcaatcagcctggaattcacacctaatcagttctgtattagaggaataaaaataatcccacagtaaagaaaaatgggtgtaaaggcagagagtggaaagaagagtatatacattcattttatacattatgatccttatttcattctaaggtctaagggaataaaaatggagaaactaccttttaagatatcaatattttatatttgttttatcctttaagatcctctcacttcaaaatcatctttggagaacaacttcttaaacttggctcctttacccttctaatgaggcagtaagtctccctgcaattatttttaagggttttactgcyaattaggaaaggaaatcgacagcccataaaaaaatgcatgaataaagtaacaaaagttccagaatcttaaagatgccttgtaagtcccttctcctattctatagttactctatgtggtcttttaaagattggtgtcttctacttacctcctaggcattcatctaggtctatgccatctattattctttctcacttacattgatcagttcttctctcttcttaacttaattctgtcaccctgcaagaatcctactgtgtaaatgtatgttagactccagatctgaacaaggtaaaaattgcacttccatctcttctctagctcctggggacataaatcaggatcatcacttttctttacatattatgtgataaagagaaactttgtctggcttggagacgtagagtggtaagtcttggtccagttaaaacagcctctaacttatatgttggttatccttagaattacattttcttccagagttttcaaaatttaaggcctgcagctgccaaattatttccacttctacgttcaataggaaaaacccattcaacatgtctaaagtttaactccttatttatttattattattattcttagttatgtataccagtaacccagtaactcagttgcccaagctagaaacctgatattcatcctggaggtcctgcaaatctctaactcctctgtcttcccttatttataaccatagtcaatccatccctggccctattcagccacctcttaaataactcccaactttaccctcctctttcagtctctactctcttcccttcctgagttcaactttggcaaaatcctatttgacacctttccctaaaagaatccacagtaatatacagacaaagggcagaatcaagtcttatcaataggaacaattttgtgaagcagtttttataatgtaaatgtcaagtattttatctaaggtacgtaaggctggagccatagtatttcaatgtacacatcattaaaacaaaataatatgaatattagttaaaataattcagaattgtaatgtttaagaacaaaaataatacagaagctaacatttattgagcaat

SEQ ID NO: 554663 - DNA, 1508 bp, Homo sapiens
cctgtttccttaagccttcataatacttagaagcccttaggccaaaacaaatactttctattgccacatagagacctttatgaaaggtgaatacacagcaatcagcctggaattcacacctaatcagttctgtattagaggaataaaaataatcccacagtaaagaaaaatgggtgtaaaggcagagagtggaaagaagagtatatacattcattttatacattatgatccttatttcattctaaggtctaagggaataaaaatggagaaactaccttttaagatatcaatattttatatttgttttatcctttaagatcctctcacttcaaaatcatctttggagaacaacttcttaaacttggctcctttacccttctaatgaggcagtaagtctccctgcaattatttttaagggttttactgctaattaggaaaggaaatcgacagcccataaaaaaatgcatgaataaagtaayaaaagttccagaatcttaaagatgccttgtaagtcccttctcctattctatagttactctatgtggtcttttaaagattggtgtcttctacttacctcctaggcattcatctaggtctatgccatctattattctttctcacttacattgatcagttcttctctcttcttaacttaattctgtcaccctgcaagaatcctactgtgtaaatgtatgttagactccagatctgaacaaggtaaaaattgcacttccatctcttctctagctcctggggacataaatcaggatcatcacttttctttacatattatgtgataaagagaaactttgtctggcttggagacgtagagtggtaagtcttggtccagttaaaacagcctctaacttatatgttggttatccttagaattacattttcttccagagttttcaaaatttaaggcctgcagctgccaaattatttccacttctacgttcaataggaaaaacccattcaacatgtctaaagtttaactccttatttatttattattattattcttagttatgtataccagtaacccagtaactcagttgcccaagctagaaacctgatattcatcctggaggtcctgcaaatctctaactcctctgtcttcccttatttataaccatagtcaatccatccctggccctattcagccacctcttaaataactcccaactttaccctcctctttcagtctctactctcttcccttcctgagttcaactttggcaaaatcctatttgacacctttccctaaaagaatccacagtaatatacagacaaagggcagaatcaagtcttatcaataggaacaattttgtgaagcagtttttataatgtaaatgtcaagtattttatctaaggtacgtaaggctggagccatagtatttcaatgtacacatcattaaaacaaaataatatgaatattagttaaaataattcagaattgtaatgtttaagaacaaaaataatacagaagctaacatttattgagcaat

SEQ ID NO: 554664 - DNA, 318 bp, Homo sapiens
tcctttaatggtaataatactgttcttcattgatgaattatttcttagaaatattgcccatacatttattaaagttacagtcaaatgtaaccagcttaaaagttcattttgtaagtgtctgttatgatcagtcagatgttgtagttgttgtttaatactcagaggccacttttctttgattccyggaccttggtggacagaacatatttaattctcaaatactgacaattctgacatttgttttcacaacaatttaaccttattatgagaagtcttattttctgcattgctttatttcatttatcacaatttttcttc

SEQ ID NO: 554665 - DNA, 535 bp, Homo sapiens
agatgatggtgctcctgttctataattccagaccctatagttatgaaaggacaaagggtaatgtgttgtttctcgctacttcctgctggggggcrggggagactttcttggtgttggattgattgcaggagcaacacggtctgtagatgtttctgggtagttgtctacgaaatggccatgattctgttggttaaaaatttttggaaaagattaattaagctgggtaaaaacattagttctttttagcagtgtttcttattaggcctgattggttgagacagaagtaacattttttttcttaatgacagtcagaggcgcatgtttggaaagatccatgtttttttttttattgttagtaactgttattcctgttatgaggataataattaagcaaaatcttacagtaactgagattatctatcagatattccatcctgagggtactacagtatatagtcctaccgcaaatagtagagtgagtgaagcatttctcacgagggtagcatagtaaataatttccattaaaaaaagttgt

SEQ ID NO: 554666 - DNA, 534 bp, Homo sapiens
atatattatatataaataaatatatataatttatatattatataaaaattatatgatatctaaatatattatatgtaatataattacatataatatattacataatatatgtaatgtataatatataattacgtaatatatgtaatgtataatatatagttacatatataattaaatgtaatagatatagtacacaatatataatatatgcaatatatattacatttcataaaatatataatacatataatcgattatgaatcgattatatgtattataaaatatatgatacacataatcgattatgtgtattataaaatatatgatacacataatcgattatrtgtattataaaatatatgatacatataatcgattatatgtattataaaatatatgatacatgtaatcgattatatgtattataaaatatgtaatacatgtaatcgattatatgtattacatattacatatataatagatgtattacataatatataatagatttgctaatgtagcaaatgcaatatgaaa

SEQ ID NO: 554667 - DNA, 1601 bp, Homo sapiens
tgaagaattataataattaatgtttctaagagtagagagaaacaagtctcacactctgctggtagcaatgcaattagtacgtccttccagaggccagtttctgaaggcttaaaactatgtatatgatcgggtgcagcagctcacacctgtaatcccagcactttggaaggccaaggcaggtggattgcttaaggccaggagttctagaccagccctagcaacatggcaaaaccccatctctacaaaaactacagaaatcagcttgtggtattcacctgtaatcccagctacttgaaaggctgaggtgggagaattgcttgagcttgggaggtcgaggctgcagtgagctgtaatcccaccactgtaytccagcctgggtgacagagtaagacctcatctctaaaacaaaactatgtgtgctttgacccaattgtcccacttttggggatttattccacacaggttactgaggataaaatgaaggtatgtgcagacattcagttacaccagcgaatgcatgctcagtacactctgagccaccgggcaggaggagcacagagctccagtgtggcctgtgtttgctcagcatgtaaaggcacaatggctggattgttgaccatggtcatagccgtagggcctgttctctgtgtggtccatgtcattcattaacaattccaccctcttgtatccaagctaccccgaggaaagaaatctggtttccagccctacaaagggctagaaaagtggtgctacatccacattcacgtggaatctgctttttgaaacttgagaattcctgggcatgttaaagtatttcttccggatcatgcctgcatgctctatggcagctggaaatgaaatgaaaacagcttccatccagctgccaattccctctgtgaatgtgtcgccatgcatagtaaacataatacattcagaagaaaggaaaaatggtctcctaagacatgtaactcttccagaaggatcattaccaaaagtaactatttccagaagcaagtgatgtcattgttttgttttgtttcgattcgccacactggctagagcctgtgattggatgtgtgaaagtgaagcatttctctatggcgttccttatgctgaaatctaggaaaaatgaatcaggcagactgggaaatcatagggaattccttcatggaatgtaaacagcagaaattcacatttcagttacccagaaggcagggccaggttcctgggtaatcctagagtctggggcaactgcgccttctgaagtctcccatgcacactgcccgctgcctgatacctgatccctccctacatcaccatcttcctctccccagggaataagggcatttaagaaaatgctgtttaaaaaaatttttcttaaagaaagaaagtgctctttaattttgacaactgaagattcagaaagaatttgcatagttttttacatgaacccacctgtgaggttaggtcccttttgcaagtacagttagccaatttctctactgcatccttaataaagctttgtccagaaccttcctaaaaatcatttaaaagtgtgtgattttgcctgggtatgagtaaataaatatagtattgacttg

SEQ ID NO: 554668 - DNA, 1263 bp, Homo sapiens
gagggttgctcttaaaatatgataaaggcaatacaagagaaatagtgtgttttaaccactgctgtatttatcatagtatcttgttaataagctactttgattctactttatggagatttttcctttagttactcttgaagatatcatctaaaccaagaaagatattcattcttctctttctccttaaggtctatcttttcacaagatcctacttcatctttcctattttggaataaaacatgcagctctgttttatgtgagccagaaataatttactgaacaggaaactgtagttargaagtaaaaatcacagtgaaaaattttaacttttaatgggacaaagaggcttgaatcttttacggatgagagatgcttgtcacgggcctaagagatggggtttatttaagtctagtcagcagttttgattcttaaatttgaatagttcaaaagtcaaattagagtaggatcctgataactgagttgattccttgttaacagtaataaaaggtaaatattatcaataaatataaaatatctaccagttacttgggaagttaatatagtacttttggagtatattttatacagaaccaaatgcatataattagctaatgtgcttttgggtgtctatattttgtaataatactatctgaaaagttgttacagataaacatttattatttttctgaaagtcaaagggatattttgtatgcccggcttagcagcagttgtctatttgaaatgaaaataaaagagcattaatgccaatcagctttcttactagaaatattcctgtacttgatgtttttccacaaactcttaacacatcacagatattcttaaactacttgtataaattataccagaataaaatgggcatcattctcttttttgtttacatcgaatgtttgtttctccagagcacatccgtattgtggagaaacaatggtgactgtttttaattgcaaaaactacccagattctttcttggagagcctccttgttttccactgggtttagacataggttctctttcactctttatcctacatttttagaccatcataatgtatttatattttatacacccactggccaacaagagaatctatatatatgttcactaaaaagcaggtttatacaattagtttactcattccttcttcctagtaaggttcttctttacttgagtccagttcctgactccagaataaaaatgaaattatcaatgtctcttgtacattagtctgtgatttttttgca

SEQ ID NO: 554669 - DNA, 1637 bp, Homo sapiens
tggtcatttctactttatcctaattaagtggtctgagatttgaaaaaaaagtaatagacttacaatatttttatgacttattttttaaataaatatgtcagtaaaaacttccctggggaaaaaaaattcttgaggagaaaagagtgtttggggttttttttttcagttgtatggcactgcttgcaaatgaaaggattcgttgtgtgcctcacatgcccaaaaaggacagcacgagcattctaacttaaggactggtttaaatatgacctaatgaactaaatatatttctgtctggtattcttaggttactttacttctaaggttgtttgaatgcatttatccagctctcctatcaaatacatgccaggttaaccctgtgaaggttttcctgtatgattctgagaatttctttataagaacagggtcttgatagtgaaggttctttccccaaagtgcaaggccttctattttgattcaatatcaacataatgctttttttttttttgaaagtgacttaagtactaaagattatcctcaatagtaattctacttagacatattttggttgaagaaatttaaagagtttattttttgtaggagcactgtgctgtgatcatgaaatttttgcaaaactaacagaaaatgataaacagttaagaacttccagctagaacaataggctgtttcctttttttaagtcagtttgtcatccttgctgattgacagtctccaattgttttcagaattattagtctcacagtatttcagaattacgctgtataaaaaagtacattaaatttaaacttaataaaataagtttcgcaagctcagtcaagacagggaagtgagaatatgattattcttccaaatttactatttccaccagcggtctcagttcagcatctgagaatatgttaggggaaactcagcaagtcagttccttttgtttttctggcctctgacttacttggatgggaaatagccaaaaaaaaaaaaaatgctgaatatctcagatataggtaatgggtcttcaccagaacataaaaatagacccttattagccatatcagtaatgtgctgtgtgggggattttttttttctttcaattcctctggcaacaaaccacacactgggatctgacactgtagagtgctttctcttctctttttttgggggggggagggggtgtggttgcatatttaaactctcacgcatttatgtamtgaggactgcagtgtaggactttcctgcagaataccatttgatcctattaagaattgtccaaatgttggagcatttgattgaaaaatccttcttagccattttaaaggtaagttgtatgatttttctttaaataaaaaagattaagggatttttcccatcacccagatgacgggaggtgacactactgtataaatactcctaagaagttatataggaggacaggaaaaaaggtagtaactgttttcttagtcactaggctttatctaaaaatcaggtttgcattattttcaagttatcaaccttcctatattttatgcttaaaccatacccaatggcatttcatgtcgtatgtataagttaatatttaaagtgatttataatccaatttggattattataaaactttcatttta

SEQ ID NO: 554670 - DNA, 520 bp, Homo sapiens
tgggagagaactcctggtcagtccttcacactgccagcaagactatttcttggtgaggaaagacgattgatgatttactttattttgctgccartgcagtaaatctcatcacatgtaaatgagtgagagtccccagtgattaatcgtccccatgacaaattgtcttcatccggttcccaagctcatcttcatttcagcaatcttgtcatctgcaataaacatattccatttcgccttgcaattgttgattaagaatgttaaacatctgttaaaataaaccaaatctgtgagccattctttattgttaggatgaacaatgaattcatttcccttatccaagtggtgcctattatttttcctccttgaaaaaaaaacacaatccaaccatgaattggaaaacactgaccagtccaagtcagctaatatctacagagcaggacaaacattcaaggccacttcccattttattaaaaattgaccaaaaataaataaaacctaccacctattttattaagtgtat

SEQ ID NO: 554671 - DNA, 992 bp, Homo sapiens
tgagtgctcagtcttgcaggtcttgccagtggctgtccaagtttctacgaatataattgtctgcaaaagacacagcagggtttggcctcaggcctcctcatttactagatggtcaatttaaggcagattatttaacttctctaaacatcttagtttcttcatttcagaaaatgagacagttccatgtatggtgttaataagaatcataaataaaatatgtgtaatatctaacacagtacctggcccatttatatatttaaaaaatggtagttgtaatttgtggttatatatatatcattcattcttcctaatgaaataagtagtgtcatgcaaaccacagagttatgagttaatttttaagacgcagaattatcatttatatttatctgaattatgtctcaatgaaaaagcatttccagytctcttatatatcatacgttaaatatcccagtataacagggatacgcagaacaaagatgtatatacttatacatccagatacatagaggcaacagtcaagaaaaaactgcatgcacatatctatatgtatatgatttatttaacctgtaaatctttctttaagcatatgtcaggattattataattttatacttcattgaaaattatttcaatgtgctacatctaaatgtccaccaggaaattgagttctacttatgagatatagcttgaattgtccatgcctctccaattttaatgctaccacctcattaaatttttactacctcttgcttagaataataaatctcctcattggtctttcacatctaccgttgattcactctattcattcttcacacatcacttagaataatttttttaatggagattggattaaatcatgtcccccaatccacttcttaaaacctgctaaagtctttttaattgacataggataccaggaagtgggagcaagaaggaaaaaagtgaagttgattaatgggtgcaaacatacagtttaatggaagaaaaag

SEQ ID NO: 554672 - DNA, 582 bp, Homo sapiens
gtgcagtggcacgatcacagcttactgcagcctccaattcctggccacaagtgatcctccagtctcagcctcctcagcatgtaccatcatgcctggctaatttttattttattttatttttgagatagggtcttgctctgtgtctcaggctggagtgcagtggtgtgatcttggctcactgcarccttgaccttcccggctcgagtgatcctcccacctcagcctcccaagtagctgggactagaggcatgcaccactatgccaagctgatttttgtattattattttttttagaggtgggggtctcactatgttgcccaggctggtcttgagctcctgggctcaaacagtccacctgcctcagcctcccaaagtgctgggactacaggcatgagccactgtgccccacctcacgttttatttttagttttttgtagagacggggttttgttgctcagtctggtctggaactcctggccagcctcaagcaatcctcccacctcagcctcccaaagcactgggaatacaggcataaaccactgcttatggtcaaaaataacactttcatgtataattttctca

SEQ ID NO: 554673 - DNA, 411 bp, Homo sapiens
  misc_feature 2, 3, 4, 5, 6, 7, 8, 9, 10, 11, 12, 13, 14, 15, 16, 17, 18,19, 20, 21, 22, 23, 24, 25, 26, 27, 28, 29, 30, 31, 32,33, 34, 35, 36, 37, 38, 39, 40, 41, 42, 43, 44, 45, 46,47, 48, 49, 50, 51, 52, 53, 54, 55, 56, 57, 58, 59, 60,61: n = A,T,C or G
  misc_feature 62, 63, 64, 65, 66, 67, 68, 69, 70, 71, 72, 73, 74, 75, 76,77, 78, 79, 80, 81, 82, 83, 84, 85, 86, 87, 88, 89, 90,91, 92, 93, 94, 95, 96, 97, 98, 99, 100, 101: n = A,T,C or G
cnnnnnnnnnnnnnnnnnnnnnnnnnnnnnnnnnnnnnnnnnnnnnnnnnnnnnnnnnnnnnnnnnnnnnnnnnnnnnnnnnnnnnnnnnnnnnnnnnnnntacaatcaggtcatttatgattctgtccatgtagctctaatgcaaaaaaggataccatagtcaaataggaaagcagagcaaaacaaagttaagcaggtttctgtcctgtaagacagcccagagmttttgatatgttaaggtgagttgttaatttcaaaaacagagatgtgtgaggaagcttttatcaaaaaagcacccacagggtgcttttatatatgagcacttactgatatcttgcagaaaactatgttccactgaacacaatataaaatatttccttaccatgtactgtgggcgaaggacttcttgt

SEQ ID NO: 554674 - DNA, 665 bp, Homo sapiens
taaaaataaaaattaaaaaaaataataagtgggtacattgctatcatttatgtaaaactgatgaacacccaaagcaatggactggattgtgaatacagagatgggtagttaaagtataaatcactaataggaatgatatacactaactccaggagtgtaggtacctctgagaagggacggtaaaaggaaggatgtgggactctagttgtatctgtaacatttcttttcttaaaaataaaacctctgggctgggcgtggtggctcacgcctgtaatcccagcactttgggaggccaagatgggaggattgcttgaggccaggagttcragactagcccgggcaacatagtgagacccccatctctccaaaaaaacctaaaaagtagccagggatggtggtacatacctgtagtcccagctactagggaagctgaggcgggaggatcacttgagccaggaggtgaaggctgcagtgagccatgatcaagccactgcactccagcctgggtgacagagtgagaccctgtctcaaaaaaataaaagaataaaacctctcaaagatggcaaaaatgttcatatctgtttatgctggtggcgggtacatgggtatcactatattctatacttaactgtaggaaatatttcctaatttcaaatggaaaaaaa

SEQ ID NO: 554675 - DNA, 665 bp, Homo sapiens
taaaaataaaaattaaaaaaaataataagtgggtacattgctatcatttatgtaaaactgatgaacacccaaagcaatggactggattgtgaatacagagatgggtagttaaagtataaatcactaataggaatgatatacactaactccaggagtgtaggtacctctgagaagggacggtaaaaggaaggatgtgggactctagttgtatctgtaacatttcttttcttaaaaataaaacctctgggctgggcgtggtggctcacgcctgtaatcccagcactttgggaggccaagatgggaggattgcttgaggccaggagttcgagactagcccgggcaacatagtgagacccccatctctmcaaaaaaacctaaaaagtagccagggatggtggtacatacctgtagtcccagctactagggaagctgaggcgggaggatcacttgagccaggaggtgaaggctgcagtgagccatgatcaagccactgcactccagcctgggtgacagagtgagaccctgtctcaaaaaaataaaagaataaaacctctcaaagatggcaaaaatgttcatatctgtttatgctggtggcgggtacatgggtatcactatattctatacttaactgtaggaaatatttcctaatttcaaatggaaaaaaa

SEQ ID NO: 554676 - DNA, 623 bp, Homo sapiens
ccttcccatacaggtctgcctcagtacacaggctaaatttcctcttccttccttgtctttccctgcctctctttctctctaaaaactgctagtttttaattgactttggaggagagaaaggagattggaggtggagaggctagaatcacacactgattctagcacacactacattgcagcattgagctgtcttttytatgtgactatttcctatctccccactgaattagaggctctttgaaggcaggaacaatatctcgtgcttcttggtatccgtgcagggctagcatgataactttcactcagtattgtgttcagcctgaattgtcaagagcagcgcgagggggtgcccaggtgtgctcatttgctttttctcagtggacactgtccctactagttggcctcaagaaatgatttgaactaatacacttggctcagggatctgtcatgactgatcttcaggaggtagtgaagaaggaggtaaatgatttaggaaggatcctggctattatttgccttgaacccactgggtgaggctagatgggtgaggtgggaagaaagatggagaagaatgggaagataccagctctgtctttgaagaatgtataatctagacttgtgca

SEQ ID NO: 554677 - DNA, 519 bp, Homo sapiens
  misc_feature 418, 419, 420, 421, 422, 423, 424, 425, 426, 427, 428, 429,430, 431, 432, 433, 434, 435, 436, 437, 438, 439, 440, 441,442, 443, 444, 445, 446, 447, 448, 449, 450, 451, 452, 453,454, 455, 456, 457, 458, 459, 460, 461, 462, 463, 464: n = A,T,C or G
  misc_feature 465, 466, 467, 468, 469, 470, 471, 472, 473, 474, 475, 476,477, 478, 479, 480, 481, 482, 483, 484, 485, 486, 487, 488,489, 490, 491, 492, 493, 494, 495, 496, 497, 498, 499, 500,501, 502, 503, 504, 505, 506, 507, 508, 509, 510, 511: n = A,T,C or G
  misc_feature 512, 513, 514, 515, 516, 517: n = A,T,C or G
gctacctcagtacacatatgtacacaacagtcaatctctctctctctctctctctctctctctctcwcacacacacacacacacatgagagagagagagagagagagagagagacagagacagagagagagagatgtagaagcaagctccatttggttgtagctcctaggagggatgcaaaatgcagccaaatttgcatagtatgccagacaagccctccggcccctgaaacttcacacctgtctcctgccagtacccaaagagccatctgctttccctgaaaagccagacacaaggccccatctttatggctttggtagaggatgagaaaacctggcatggggaggcttaattgctcaaaaataactccatggtacataacatacagttacatgaagatccgaagaaaaagcttggnnnnnnnnnnnnnnnnnnnnnnnnnnnnnnnnnnnnnnnnnnnnnnnnnnnnnnnnnnnnnnnnnnnnnnnnnnnnnnnnnnnnnnnnnnnnnnnnnnnnct

SEQ ID NO: 554678 - DNA, 630 bp, Homo sapiens
gctactgtcatcatcatcattattctcgccgtggcctccacacctccagcttgggccgtgtccatgcatatcagtatgagtcaactcttttacccttcatgtgtgcccatgttgagaaagaggtcaggaaagggcatttgcatgttttaaaacaggccctttgatcattcgtagaaacgcctatagtcaatagggaacctcagagggaaattggggtcctgttttgtgccctccaggcctctgctaacattgaccccttcatcaaagagatcgtggtaaaccaactgcaaaccaaatgaaactggtttctgagatgagaagtgattcagagtgtatagcagctcattaaaaaaaaaaaaaggcatttgctaatgagtgcggcaaatgcctgtaaatgagacagacctgctccattatgacggtctcagagttgtgcaaacctaattttgcagcagcaaggagagaataaaaacgtctagagctggtcatcccccgctcagagacaggataatcttgggaaacattttacggtgtatcgcttgaagaaaagtgcattagtctttcctggaaaaacatttggttgaccttgraaataaaagcattcatgagaagtatgagcagaagttttca

SEQ ID NO: 554679 - DNA, 993 bp, Homo sapiens
ttatctatttgtccatccatttatatcttagacggccagaacaaaaaaaaaaatatgtttgtgtgttttaagtttgacatttctcaaaataaatggagctcattttaactggtaaatgtggtattcaagaaacaccttagattttgaagaattggttcacatggaaaaaataccactattttggtggttcatttttccttcagagagcagttctaatgctaactctttttcttcacaatgccccattttcaaaccgtgtagtttaaaaaagtgaatttaggtcaagggctattttgaaaatcaaacagggtcactaattctcccacagaattataactagttgtgtagtgaaccagttttcataaatgttgactggatggcatatatgtctttattcaggtattataatgttaatgcttcttttagttgtaggttatgtttatttcaaaaagatagcattacttcacctgctgacttgatgttgttctttttttaaaagaatgcatttcctttgaactatagagtaatttgtgttcaaaagaggcttggctacataaatcagaaattcagactcaaatttccgtaacaaacttcagtaactgttcagtttactgaaaagttaaatggaaaacaatttacttacaaaaatgtgatgaatattacattgaaagaaccatgacctactgggacatatacaaaggtgaagctaatatatartaatttccatacatgccaaatgatgcattttaaaaagaggaaaatatcaacttttttaccaccagatttaaaagctaaaattgtttacaataaattcctgtgaagatacatgttcccaaatattaatgtcaaattcagtcttcatcaaatatgaacatagatgtgcaattttttttcaaacaatggcaatgtttcaactcgccatcactaaataggttatttcattgttttggaagtagggtggatttattctactcagttttcacgttcttattg

SEQ ID NO: 554680 - DNA, 543 bp, Homo sapiens
caagcagatgaggaaattataggctacctgatattgattgcccactcaacaataactgtttattaaggggccagtccccagggcactggacacacagcaatgagcaaaatagacaaagctcttttttactcctgagcttacattctagtgagaggagacagaaaatgagcaaacaaataaataaatrttatctcatattgtgataagtactgtgaagaaaagtaaggtgggctaaagctacacgatggtgagggaagggtgctgggggcaggggtttctaataaggtgacgattgagcgaggcctgtatgaaatgaggggggaagccacacaagggtgcacatgcctttgctcttcaactagaatttatgccccttgagggcagagacatatagtaaatttttttggcctccctttccctcctcttagggccttgcacacaatagaggctttaaaatcttttaattgctttgaaagcaacttcactggtatcctatacaatcattaacatctctttctagctcataaggcataaatacaacga

SEQ ID NO: 554681 - DNA, 649 bp, Homo sapiens
ttgggacccaaaccaggtttgctgcagaatttggagacatgtccagtaaaggttgtwgaaaattaagaatgatggtatggatgatgagggtgagatgctccttaaattactgtaagagatcaaggctgtcacctagactctcatcaataaagtgttgacttcataatagaagatgaatcacattcttggagactgtaaggagtccatgagtaggggctgtttgtggccaagaataatgcaaattaaaaatgagagtagaaattcttccaggcttcccctgtatgaaagagagaggggtgcttactttatctcactacaattttgttcatggaaagagacctttttgtggcagagtaactctgctagattctgccacatgcagaatagatgatcacacaaggcctcctgtgttcctttgcactggtgttctgcctctctgcaatgactgaaagcaacactttactgattactttggctttctaactacctttgtcctaggaaagaggtgtcttggatgaagaatttgagtactttgaatactgaaaagacatttcctctgctgcagatttataacctggcatcattctaatgtacagattagtcttcgacggggtgggtctgtgtattagtccctctgatcagaactgga

SEQ ID NO: 554682 - DNA, 649 bp, Homo sapiens
ttgggacccaaaccaggtttgctgcagaatttggagacatgtccagtaaaggttgttgaaaattaagaatgatggtatggatgatgagggtgagatgctccttaaattactgtaagagatcaaggctgtcacctagactctcatcaataaagtgttgacttcataatagaagatgaatcacattcttggagactgtaaggagtccatgagtaggggctgtttgtggccaagaataatgcaaattaaaaatgagagtagaaattcttccaggcttcccctgtatgaaagagagaggggtgcttactttatctcactacaattttgttcatggaaagagacctttttgtggcagagtaactctgctagattctgccacatgcagaatagatgatcacacaaggcctcctgtgttcctttgcactggtgttctgcctctcygcaatgactgaaagcaacactttactgattactttggctttctaactacctttgtcctaggaaagaggtgtcttggatgaagaatttgagtactttgaatactgaaaagacatttcctctgctgcagatttataacctggcatcattctaatgtacagattagtcttcgacggggtgggtctgtgtattagtccctctgatcagaactgga

SEQ ID NO: 554683 - DNA, 325 bp, Homo sapiens
tctcacttaaatgtcattgtcacccggatgttcacatgagataggcaaaagtagttcacggcaagggaaaccacttcagccaataaatatctgtgatgtgtaatgccacgttacctttcgaaagaaagaggtttttttttacatgttgaggattttatttgttttgttttttwtgtattatatcccttagtcatatacatttgaaaaatggctgtacatattacaaatgtcatataattaattttaaatggaaaacaataaaacttctacataaatcatcattgacattaatttaaacatggtcaatgcatcatttgaattctag

SEQ ID NO: 554684 - DNA, 549 bp, Homo sapiens
ctgtcgtggggtgggggaagtggggagggatagcattaggaattatacctaatgtaaatgacgagttagtggatgcagcacaccaacatggcacatgtatacatatgtaacaaacctgcacgttgtgcacaggtaccctagaacttaaagtataattaaaaaaaaaawtttttttaagtataaacccaaaacaacagtcttaaaatacagtgactcaaaatacatgccccaatgagtaggtactcccaaatctggctaatcactggaatgacctaagaaccctttttttcagtcctgatagactctatctccagggctagaggcctaggcatctgcattttaaagttccccacatgagtcttacggccaggcaagtttaggaaccccagcttaatgtatctgttgtcacgtttatttaaaaaagaacaagatcagctgggcgtgatggctcacacctgtgatcccagcactttgggaggccgaggtggacggatcacctgaggtcaggagttcaagaccagcctggccaacgtggtgaaaccctgtctc

SEQ ID NO: 554685 - DNA, 524 bp, Homo sapiens
ttgattagatatattttaaaataagtgacatatcgtcctaattctctaaagcagaccctatcagttacttccaaatgattttggaggactttccattgtaccacattgactgttcaattagatgcttaaccactgaattagagggtttattttttytttataaactttagcccagggaacaaatacttttaaggtcaaaatcatcgtggctataatcattttgaagcttcagtagtttctgtgtttgtatataggaaagacccaaaacagttaaaatattgactcttcttgttgtcaccattagagaaagttgtccttccatgtatatgagagtgtgggttaagtgcttcatttttaatgagtatgtcaatccttctttcaatttgatttttgaagtttttagttttgccgttaatgggaacatggagggcctgcaattgatatacatacaggcaatataactaccatttgtattcctaatcaaatctccctaaatgcttgttttatgtgaaaaaaattaatat

SEQ ID NO: 554686 - DNA, 569 bp, Homo sapiens
gcgtatttgtttgctttaaaaatggcacaaatatatttcaaagaagagctttgtgacattacgattcacaaaacagccccatarctatgatctgggtatttaaataatacaagaattttcatcagaagtatctgcctttatcaaagctagatatattggtgggttttcctaattttttatttctttactgtctacattccaaatggaatggttattttgtcctcaaattctgatgttttttatttcttttaattaaggtcaaaataacaattgcattctttactcatcaaattctttacttttctccttttgaaagcattcacatgcaattttattcatttaatgaatgcattgcatttagcacaatgagccttcaaaaccatgccaagataattgtagtacccactttctgaaacttggtccttagtcactttctaaatctgtattatgataacagttaccatattaactttttaattatataatctgtgaaatatttacataaatatataatttatctccttttattgtatacatgattgctgctgtatttttacttcaggtttatg

SEQ ID NO: 554687 - DNA, 569 bp, Homo sapiens
gcgtatttgtttgctttaaaaatggcacaaatatatttcaaagaagagctttgtgacattacgattcacaaaacagccccatagctatgatctgggtatttaaataatacaagaattttcatcagaagtatctgcctttatcaaagctagatatattggtgggttttcctaattttttatttctttactgtctacattccaaatggaatggttattttgtcmtcaaattctgatgttttttatttcttttaattaaggtcaaaataacaattgcattctttactcatcaaattctttacttttctccttttgaaagcattcacatgcaattttattcatttaatgaatgcattgcatttagcacaatgagccttcaaaaccatgccaagataattgtagtacccactttctgaaacttggtccttagtcactttctaaatctgtattatgataacagttaccatattaactttttaattatataatctgtgaaatatttacataaatatataatttatctccttttattgtatacatgattgctgctgtatttttacttcaggtttatg

SEQ ID NO: 554688 - DNA, 552 bp, Homo sapiens
atgatgtgatagagagctaaagaataaactaaagagaactaaagggatttattttaaagagtttgttgaaagaaacaagctaatacttgggaaacactgtcatataacacatgcctagctacaaattctgctataagtggatgactcaggaagttacagatggcgcacacactgatactgcacacaacattccaaaaggacttgctaattcagcttcccagcagtcctaatagactcactgtggagayggctttcagttgatacgtctgggatttaccctacagagcaactgctgatagaacaggttgctatgtgattgtgttctgttgtgtccaaatgtaactactaagggtactgaatatcctgctttccttttttcttcttgtatggcaagcagcaaatattgcttctcatcgtgttcatgtgaccaaatttattttctttttagatagtgtttactgaggaataaattgcatgcagtgaaattcacccttttaagtgtatagtttgaagaattctgacaaatatgtacaattgtatacccaccaaccc

SEQ ID NO: 554689 - DNA, 458 bp, Homo sapiens
tcctgctctggaattctgctccagcattttcgttccttggtcccagaaatttttcttagaaccgttcagctttccagcccaaaaagaaaggaaatggccatctccttctgccttaaaaccacattttactgaggccttgaagacaaaattccactaggaggggcatctcacattccctttagggtcaggatgagcccacacsctggctcatccccagttcagaagggagagagctcgagggaagatccccaggcctcaaagcccttggggattttggctttcacaacagttctgttttccttctccaatcccaggctctccaactgcaggacccctgcccaaatccctgcttgggtagggtaagcccaggcagctgctctctgatgggtccaactgcagccctagctccagggctcagagcagccccctctgctgctctacaggcttagaaaaattgt

SEQ ID NO: 554690 - DNA, 458 bp, Homo sapiens
tcctgctctggaattctgctccagcattttcgttccttggtcccagaaatttttcttagaaccgttcagctttccagcccaaaaagaaaggaaatggccatctccttctgccttaaaaccacattttactgaggccttgaagacaaaattccactaggaggggcatctcacattccctttagggtcaggatgagcccacacgctggctcatccccagttcagaagggagagagctcgagggaagatccccaggcytcaaagcccttggggattttggctttcacaacagttctgttttccttctccaatcccaggctctccaactgcaggacccctgcccaaatccctgcttgggtagggtaagcccaggcagctgctctctgatgggtccaactgcagccctagctccagggctcagagcagccccctctgctgctctacaggcttagaaaaattgt

SEQ ID NO: 554691 - DNA, 690 bp, Homo sapiens
gtatgacacacaagatggagtatggttatatgaaaagtgaacaatatatacaaaatcttaaaatacaaacaatttaatgtgtgaattatctacttaattttcagtgaccacagagatgaatgaaacgataacagaagacaatatatgattacaaggtagcaatataaattatattcacaagtactgaaaaggataaattacattcacaaatgctgaagggattggaataaagacacattcaacatgggtatcaaggaagatttcctggagcaagactcttttgctgctgtttttttgtttttgaggcctatagtttcttaacaggggttccaaaggtatgaaaaagttaatatttctacaagaaatgatcaattgattccctcttaacaaagacagctgtattaaattatttaytcccatggagtcatatttgcaaactcactgtagtatattatgatttaaggaattaggtgggtctattttggatctccagagtatttgtaacggaattatacacacggaaaaagcttcattatcaagttgtatgataatgatatgctagtatatgaggtgagtagataataaatatgaaaggaaaaaagataatatataataaaagaaaaattcaaactttcctgattttatatgcacagtctaactgaaaatattttgtttttattttctaatttg

SEQ ID NO: 554692 - DNA, 660 bp, Homo sapiens
tattctgaaagcttgacatttgcagattagcagataaaacatgttaagtgtttaaaaagttaaataaaaatacaatctaaattaggttatggatatgataaagcaagtagaatatggattattgttagtttatgtgtatcttagtccattcataattgaccttgtattatttgtactctccgggctttgatcatcacaaaaggaaatatttcaaatatttgttttccaagttgtgattctactctgtgaactactacccattaaaacaaatcctataggctttcaggtggagaaaaagaaaataaaagtgctctatactagactgtatctaagtgctttgcaaatttaaatacaggtttgcttttagatctcagccacaatgctatacagaatcttggtatacttaaaaacaagctcaaaaaaaaaaatacccmaaacaaaacacaaacccctcaacaaaatactagccaccagcacctaacagcctatacgaagaaatatataccatgaccatgtgagatttatcccaggaatgcaaagttggcacaacccatgaatatcaatcaatgtaatacaccatattcatagaataaaggagaaaaaacccacatgattatctcaataaatgcagaaaaagcatttgccaaaatctgacaccct

SEQ ID NO: 554693 - DNA, 548 bp, Homo sapiens
gagtggccactttgtcacaacaccatgggcaccatcaatcaccaggctcaggagaagctgtggcatccttctaggacctgaaccaccatgatttattgattttacaggagtggcaactaaggctgttcctctttcttataactcaaaatcaagattggagataagaggatacaaggccaaagagaatgttcataaaacttgtttctaagtgatatttggaaattgtgagatagggtgcttatctttccttagataaggtctatctatgtggttgaactaacaaagctaaccagggcacgatcctcacttagagtgaagtagagaactccactaagtttggaatttctttttagcttagtttgaattgtatgggattttgtgctgtaactgaagayagttgaatgccccactaccagagattagtatctgaagcatatctttaaactgattcgaggtgacagagcatgaccttggtggtagaaaattcagcaggaggtgggaatcaacctaaaaatttgatgtcaatttttatttaagacttgatcaaa

SEQ ID NO: 554694 - DNA, 642 bp, Homo sapiens
ccagaacaaacagggtccttcccacctccaagtctttgctcaagccgctcttcaggtgtgggatgagcacagcaagagaatttatcatggcctgaggtcctgcagggttcttaggtcaaaaaagggtggttcccagcccctggccccaagcagggaatcagcctcacctcccaagctcatattaggtgatgcctggctctctctcagaccagctgccattcacttcccatctgtgagcctccatttcttcatctgtaaaatgggctgtagcatcgaccctcctcctacttggcaaggactaagtgcaggtgacattcccracaggagtgggggcccagtgcacaccattccctcgtccccttccctgatcctcaaatccgtcatgaggatctcagcaaagtaggagaggagcctttggaagaacatttgttccgaagcgtctcattcctcagcctcaagagcacccagcacgcacctgcgaatctctggttttccaggattctttatttctggaagaccaatgtacctttccccactgggccgggcaaatgtgacactgaccctggcgggacagcctggcaggtcctgagtgcatgggcctctctgggcacaccggcctatctccaagacctgagaaaggcc

SEQ ID NO: 554695 - DNA, 642 bp, Homo sapiens
ccagaacaaacagggtccttcccacctccaagtctttgctcaagccgctcttcaggtgtgggatgagcacagcaagagaatttatcatggcctgaggtcctgcagggttcttaggtcaaaaaagggtggttcccagcccctggccccaagcagggaatcagcctcacctcccaagctcatattaggtgatgcctggctctctctcagaccagctgccattcacttcccatctgtgagcctccatttcttcatctgtaaaatgggctgtagcatcgaccctcctcctacttggcaaggactaagtgcaggtgacattcccaacaggagtgggggcccagtgcacrccattccctcgtccccttccctgatcctcaaatccgtcatgaggatctcagcaaagtaggagaggagcctttggaagaacatttgttccgaagcgtctcattcctcagcctcaagagcacccagcacgcacctgcgaatctctggttttccaggattctttatttctggaagaccaatgtacctttccccactgggccgggcaaatgtgacactgaccctggcgggacagcctggcaggtcctgagtgcatgggcctctctgggcacaccggcctatctccaagacctgagaaaggcc

SEQ ID NO: 554696 - DNA, 642 bp, Homo sapiens
ccagaacaaacagggtccttcccacctccaagtctttgctcaagccgctcttcaggtgtgggatgagcacagcaagagaatttatcatggcctgaggtcctgcagggttcttaggtcaaaaaagggtggttcccagcccctggccccaagcagggaatcagcctcacctcccaagctcatattaggtgatgcctggctctctctcagaccagctgccattcacttcccatctgtgagcctccatttcttcatctgtaaaatgggctgtagcatcgaccctcctcctacttggcaaggactaagtgcaggtgacattcccaacaggagtgggggcccagtgcacaccattccctcgtccccttccctgatcctcaaatccgtcatgaggatctcagcaaagtaggagaggagcctttggaagaacatttgttccgaagcgtctcattcctcagcctcaagagcacccagcacgcacctgcgaatctctggttttccaggattctttatttctggaagaccaatgtacctttccccactgggccgggcaaatgtgacactgaccctggmgggacagcctggcaggtcctgagtgcatgggcctctctgggcacaccggcctatctccaagacctgagaaaggcc

SEQ ID NO: 554697 - DNA, 664 bp, Homo sapiens
aaggatatttgaggcaagaaagccctctgggatcatctttgctgaacatctctttttacagctatggaaaaagaggccaagaggaatccagaaagttgcctcaggccatccatgggtttctgcctcaggcctccccagggctcctcctaggaatatagtaagggacagggtaaagtcagtgaaaacggcagagtcaggacctccaaaaagtgtctccttgaaaacaatgagaataccggcaaaaattggcagcatcaacgatttcaaagttctggaaattgaccataggcctgcaacaattctaggaggatttattcaagcaaaccggcagaatcttacaaagaacaagccttgcagcactttaacttactctatccccatgccacactccccagccctgtggtrgacttgaaaaccaataacccactatcagggtgaagactaatagcttggcagccgccagaaaggaaaaatggctagaagcaacttcaaagcctcattaacagaattgtcattacttgaagtctgatggttcactaaacccacttgcaaggttgtctttatttgacctgacttggagttctcctggtacaaaaagcattttcagtggggcatttattggaaacatttataggcaaatgtttagcttcatggtaaccaaagc

SEQ ID NO: 554698 - DNA, 649 bp, Homo sapiens
aatgaaggtaaaatgacctcagaatgaacaatgtcatgagaatccaagctgctacatcccgatattagcagaaactttcagcagcacaccctagtatgaagggccgataacaaatactgtaattcaagtgaggaacagccttactttccagaactgcccagttaatcaaaaagtctggaactattcccgggattttttttttaratctagaaaaaaaacctcaagataacccttgtaaaattgatctaacatcaatgggatgtgagaaggtagttataggtttgcattatcaaaggggttttacaaaaaataaagtgatttgcaaaacgagactaaggtagaaaaggtaaacacatatcatttgtgtgtggtgattggaggagagttggggagggcaggggagcattcaagggaatgaagaaacagttttacaatgtggaggaagttggtcagacttcagcttccccagaggataagcaaaatttaattattaacttgttcttggcaccagatttattccccacagaaaaactttaaatcaaacctagaaataactctaagagagaagaggagacattttatttgaacatgtgtgctgtagatgaaatggtaagtggaaatctgtttattctcactgattatttccatg

SEQ ID NO: 554699 - DNA, 562 bp, Homo sapiens
gtgattggttttggggtgtgaggcggttggcgaggtcaggcgagcaaccttttggacgcgttgggagggcgtggaagacgcggtgtcatgcaccctgcctggcgactgcaccccgtggaggctctggctctgtagtaaacccgggggaggagagagtggcttcctgtcggcttcattgtcctaggattcagatgtagggttttggtacgtttcgcttccattttatgcaagcgatgaaaaaataacatttgcagctgcctaacacagggcgggaagacgtgggatttgtatactaagtcacagaatctctgttcggtggtgtttcgtagagttttatttatttatttatttatttatttatttattttgaggaatgtaaggaagacagggactatgcctgctggagtccaagcactgccaaggtgatcaatataaaattactaggtgacgttggagcctgggctagagagggcctgacaacgaagctgttgtgtcagggaaatgaacaagcagaattgttttttcattgggcaggtmatgcatttatgttcctgagggaatg

SEQ ID NO: 554700 - DNA, 893 bp, Homo sapiens
ctaaaccaagtagtggactatggacaaaagcctggagacttgttgaatttcagagtgggagagaccttgatggctttcttcacccagctgtgcaatagagcctagcattcatcttcacctctgcagagctaactgggatttagggagtttcatgctaatgtggggtggggtctgggggattctgggaatgtgtgcacatgctgacttgtcttcaggagccaaaatgctttccctgctcagagctgttttagtacagggttgttttctcatctttctgggaaaaaaaaaaaaaaaaaaaaaaaaaacccaaagggagaatgctagtggatacagcaagttcttttcagaacatgttctgtgccaggctcagctgcctaccaatttttaattttttggcaatttgctagatgtggagcctcatttttaaaaattgctctcttctctagagtacagattcttttcctgcctgcactcctccatttttctcatagagaatagacttctgtttcaggcatccatgatatacttggcatgtatctacattacttctcattcatagatcttcaaaccctctgaaaagagaactaaaaatgggccaggtgtggtggctcacacctgtaatcccagcagtttgggaggccgaggctggcagatcacttgaggttkggagttcgagaccagcctggccaacagggtgaaaccctgtctctacaaaaaaatagaaaaattaggcaggtgtggtggccggcgcctgtaatcccagctactcagaggctgaggcaggagaatggcttgaacccaggaggcggaggttgcaatgagccaagattgtgccactgcactccagcctgggcgacagagtgagactccatctcaaaaaaataaaacgaaac

SEQ ID NO: 554701 - DNA, 635 bp, Homo sapiens
gaagcaggcagcataactgacaggcatattcacactcatctgaacaaagcctaagcctcccaccattggtaacctttgagttccctagaccttatctataccatggatgcaagcatgacctccatccatgaagcaggagggcctaatcagcaggaattagtcatgctctcctgagctgtgcccctcaactcccactgtcatctgcctcaggtctagtgttccattccagggtttaaaccaaagctttggataaaaaggtacctcaggagggtgtatgaacccttaaaattagtcccagatagcccttgacaaattgcatctagcaactgscaaggaccactcctccatcaccttcctatcacaagcaggtgaagctgtggggccagggcctcctcaaacaagggagataaagggagttccaggaattaaggccctggcctaagaaggtgacaatgaagaggttgagcttttcctgagcccctcatggttgtgctaagagaggggggcctaggttggaaaggagaactgaaaggtccactcaagtccaggaggaggtccatcctccttccctcgatccccagaatcacccagcgctcctggataacaatagcagtctggatcaccaaagccaggga

SEQ ID NO: 554702 - DNA, 561 bp, Homo sapiens
ctagtcacaggcaagacagcaaatggcttggatcgagctgtaaaattgactcctgtggcggggaaaagaagacgtttcaatgatatgttaataagatgctaatataattaaaatatggtaaaaataaatacattcataatagtatctgggatatagtaggtgttcaatatatattcattaaatttaataaatacataaattataaatccaagatttatatttctagagaatcacaagattccaacaataacacataatagttatttccaattctgtcaattattgattgagaattcttccaattctctcttttaattttcagaccaaccttccataccaatgcaaaatttcagcttctttcactcatgtttcactaatgagaataaaaatattctcagctccagaatgtgtgaaattacttgctctgatgtatgtatctactcaatacgtgccatataacacatcaaaacaggggcayagggactcctgctgcagcaccatattgtcttagagagttatgttatctggaaaactaggactagaacaatggcagatagaact

SEQ ID NO: 554703 - DNA, 1263 bp, Homo sapiens
actactgattaaaagccctgtcaccaagccaagcactccagcatgattttaccattttccccaaaggtttccagcttccaggaaaggagttgcagagaatgcaaggtaagtgcatacagctcaggcaagcaggctgaggagcagaccaccgcttcaggctttggattttcacaaacaatcctgcctcccccaagctgagacaatgccctgcattcactgagttctcaggagctaccatagtgtgccgaggagcaggaaaaaagttagacttgaattgargatagattggtattcactaaatggcacttctgaatttactgcagccttcgcctttagagagaattgccaaggtgctcataaaaggagaaatgatgaatattcaggatgtcttttgaatccattaggcaaccgggatgaggtctccatatgtagacttctcgttctttccttaagctgttaaggaaactgccaaaatggccgtctgcaggataaaatggagcctgggtttgccaatggggagaaagtctaaacgccaaaggtcaagtctgtggaaataaaattggtttaggagcattttgcaagtgaagagatctataaattttggatttctggacatggtgaatgagggaatgtgtctgtctgcttgtaggaacactgatcaaaatgcagtagcagcctatttatcgtactgtcagcctttctttcccaggatcagatattctgcagatctaattgtgtccactccacacaggaaaatcccagacagtctctctagcggcctcctatagttttgtcaactaatcttaccagaagcagaagcatttgtgcatttaagactgcaaaatgtttattatcaagtctgcttacttaagtcctaagcacttgctcatgccaattatatagagagtaatcgcgggttctccatgctaaaaataatttaaagaaagaatttagcaccgacccttggctcccagatatattgaatacaggtcaatcaattgttaggaaaagggaatttctggggaagggatgatgcaggttacttatcctcagtttctttgcctttacaataaggagtggagtcaggttcaaggcaacaagcattcctgcaagcctctgtgctcccactatgggatggggataagcacccttcttgccttctaggcactgacacattagcaggggagacatacacagaagtgtacttttaacagaatgtcaaaatagctacattaaagtgctatatcaaagcagataagagag

SEQ ID NO: 554704 - DNA, 1263 bp, Homo sapiens
actactgattaaaagccctgtcaccaagccaagcactccagcatgattttaccattttccccaaaggtttccagcttccaggaaaggagttgcagagaatgcaaggtaagtgcatacagctcaggcaagcaggctgaggagcagaccaccgcttcaggctttggattttcacaaacaatcctgcctcccccaagctgagacaatgccctgcattcactgagttctcaggagctaccatagtgtgccgaggagcaggaaaaaagttagacttgaattgaggatagattggtattcactaaatggcacttctgaatttactgcagccttcgcctttagagagaattgccaaggtgctcataaaaggagaaatgatgaatattcaggatgtcttttgaatccattaggcaaccgggatgaggtctccatatgtagacttctcgttctttccttaagctgttaaggaaactgccaaaatggccgtctgcaggataaaatggagcctgggtttgccaatggggagaaagtctaaacgccaaaggtcaagtctgtggaaataaaattggtttaggagcattttgcaagtgaagagatctataaattttggatttctggacatggtgaatgagggaatgtgtctgtctgcttgtaggaacactgatcaaaatgcagtagcagcctatttatcgtactgtcagcctttctttcccaggatcagatattctgcagatctaattgtgtccactccacacaggaaaatcccagacagtctctctagcggcctcctatagttttgtcaactaatcttaccagaagcagaagcrtttgtgcatttaagactgcaaaatgtttattatcaagtctgcttacttaagtcctaagcacttgctcatgccaattatatagagagtaatcgcgggttctccatgctaaaaataatttaaagaaagaatttagcaccgacccttggctcccagatatattgaatacaggtcaatcaattgttaggaaaagggaatttctggggaagggatgatgcaggttacttatcctcagtttctttgcctttacaataaggagtggagtcaggttcaaggcaacaagcattcctgcaagcctctgtgctcccactatgggatggggataagcacccttcttgccttctaggcactgacacattagcaggggagacatacacagaagtgtacttttaacagaatgtcaaaatagctacattaaagtgctatatcaaagcagataagagag

SEQ ID NO: 554705 - DNA, 552 bp, Homo sapiens
gtttgaatacatattttggactgttttaacttttggagctatgtcccttgtttgtaggtttttatttgattgtcctggggggaaaaatctggttttactgggtggtgttttcccccagtgtaactaaataaattgatgattactttcagtatgatgtggaagtagttgcgtctgtcttttactaggattttggttcaaacatttcaccaagcatgaaatcaggtaaaccaaataataccaataataagatcatcatcctactagacaatgcatagaagacagatttttccagattttgaaaacgagttaaaagcagtataaatattttctacttgaattgaaaaagttggagttggaaatattagcctgcttttgacaggggatgaaaaatcacgagtatcagttcttatgatcctttaaaatatattggctctagaaatttttaccattaatcgctatctaaacttgatgagtataataytgcatgtggagtccctgtcaatttttactaataattatgtaatctgtttttatgagtatcaataactaatc

SEQ ID NO: 554706 - DNA, 574 bp, Homo sapiens
ccaggtacccactcaaatcatttatttctttcttcatgcaattttcttaggcaatattttcaacttccacaatgttaactccacatatcctcaattactcatccatatctacctatcacctacaacagttcttggagctgaggaggcatttaattagtatgttctgaataatcaatggatggatggatggmtggatgggtggatctacatgagaagtcacaatctagaaatgttaacgatgaatgtgaagtactggcattttatgtgggtggggggtggtggagagccaattaaaaatatactatattcagtctgggaattctacctttaaacttagattataaattttcttgaaaaccaatgggaaggtacagcaaaaatggcccaatattctagcatggcaaccatccgttagagctgagtcatatttgtgccctttagaggaaaacgtgttgttcaatatggcacagtcagaccatggctacgccttcatttacgttacctgcctgacctcataagcattcaattagatatgtcaaacaaaacagcctgcagacatgtaaattcagtatga

SEQ ID NO: 554707 - DNA, 532 bp, Homo sapiens
tccagctccccttccactgagagccactttcactgcttaataaaacatctgcattcccatccttcacgtctgcgtgacctgattctttccggacgccggacaagaacccaggtaccaagagggcaggatgtaaaagactgtcaccctgactcgctgctgagctggttaacacatccttccatggacagcaaggctaaaaaaggattgtagcacacgtgagctctgccacggggcaggtacaaggcctgctcctgctggaaagaagtaacaggtggttccagctcacttttttcttgaattattttttgtttgtttgtttgtttttcyataaggttcccatcaaccatgggttgtagaagtattcctacatggtagtttttgtgcatttttactgattgtgttatttttacattagtttcttcagttgtaatttccattcattagacagaatatatatctagaattgacacttatgtgcaaacttacatttattttttcatgagtttttttttttaattttccatttggaact

SEQ ID NO: 554708 - DNA, 532 bp, Homo sapiens
tccagctccccttccactgagagccactttcactgcttaataaaacatctgcattcccatccttcacgtctgcgtgacctgattctttccggacgccggacaagaacccaggtaccaagagggcaggatgtaaaagactgtcaccctgactcgctgctgagctggttaacacatccttccatggacagcaaggctaaaaaaggattgtagcacacgtgagctctgccacggggcaggtacaaggcctgctcctgctggaaagaagtaacaggtggttccagctcacttttttcttgaattattttttgtttgtttgtttgtttttccataaggttcccatcaaccatgggttgtagaagtattcctacatggtagtttttgtgcatttttactgattgtgttatttttacattagtttcttcagttgtaatttccattcattagamagaatatatatctagaattgacacttatgtgcaaacttacatttattttttcatgagtttttttttttaattttccatttggaact

SEQ ID NO: 554709 - DNA, 1456 bp, Homo sapiens
ggtctagcctaaaaatcatatgttaactgattgtgtttttttaaagtgtcacttgatcttttagaacctcacattttttaaacagaaaaatgaaatattgatgactggggatcaattcttcataggtctctcatgttttttcacatcttgtgagctgatactgacagcctttgttccagactatctattcaattatgtttgtatagtgaacagccttggaaaatagaaatagcgtctccctccagagcaacggtcaggcatgcttcttgcccattaatagcttttgggttccctaagctcaggrtttcattttgatagtgcaacctactgtgtgaacagatatcatctggcccttttcatgttactctgtgggaactggggctcagtgaactgtcacaagataatattgatgctccagctattgatattactgtgagtattgaaatcctttgtctctgacccaggagacttcttgtcttttgccagcatccatgaaactgcagcaggctaactagttagattgcaagaattgtaaattcccagacccttcacatttcttgacattgatatgtatagtctcataaactcttgcaaagatttatttgcccccatcattcaaatccccaaaactgtactgtctaactccatcttcagctcaaataaacaccaggctaaatcctgacgtttgctggataatttaattagctctttcccagtaactctgcatcatagaccttccaactgtcctgctctgtaaacatgtgccacagttttagctaggaacagcttaagacctttagaaaacttgagtagtgaaaagattatcgtgccctccacatgtgtaattcaaaacaaaaatagtaataaacagcaaaggaagtttaaggaagtccagcgaattctgattatctgcatgatgaccattcagccactgttgttcttatagcagcaaatattaaaatttttgtttctcagtcattttctacacccaaacttgtgatgagtctgtctatagaataacccagcagtactgatttgaaaactaaatcccagatctgagctcttatctactctcttcttgcatatatgtatgttgtcccttctccccaactccctgcctctattctttgtctctgccaagtcaagctgcctttcttctgctgaattaacctgatatcaatagcttacctgtcaccacttgtcagaatttcctcccactgcccatcttgattcatactgtcccactgcctcagtgattctgaactcactgtctgacacaacccacatttctttgagattctgcatgattcaaagttcatctaggagagaggttcatatcataaaccccattttcagcagcatctcaggtcatgctcacttctaattatactgttaaatgagtgtcctttggtatttaattttgtattatcagaggtttattgaaaaatagaaggca

SEQ ID NO: 554710 - DNA, 1456 bp, Homo sapiens
ggtctagcctaaaaatcatatgttaactgattgtgtttttttaaagtgtcacttgatcttttagaacctcacattttttaaacagaaaaatgaaatattgatgactggggatcaattcttcataggtctctcatgttttttcacatcttgtgagctgatactgacagcctttgttccagactatctattcaattatgtttgtatagtgaacagccttggaaaatagaaatagcgtctccctccagagcaacggtcaggcatgcttcttgcccattaatagcttttgggttccctaagctcaggatttcattttgatagtgcaacctactgtgtgaacagatatcatctggcccttttcatgttactctgtgggaactggggctcagtgaactgtcacaagataatattgatgctccagctattgatattactgtgagtattgaaatcctttgtctctgacccaggagacttcttgtcttttgccrgcatccatgaaactgcagcaggctaactagttagattgcaagaattgtaaattcccagacccttcacatttcttgacattgatatgtatagtctcataaactcttgcaaagatttatttgcccccatcattcaaatccccaaaactgtactgtctaactccatcttcagctcaaataaacaccaggctaaatcctgacgtttgctggataatttaattagctctttcccagtaactctgcatcatagaccttccaactgtcctgctctgtaaacatgtgccacagttttagctaggaacagcttaagacctttagaaaacttgagtagtgaaaagattatcgtgccctccacatgtgtaattcaaaacaaaaatagtaataaacagcaaaggaagtttaaggaagtccagcgaattctgattatctgcatgatgaccattcagccactgttgttcttatagcagcaaatattaaaatttttgtttctcagtcattttctacacccaaacttgtgatgagtctgtctatagaataacccagcagtactgatttgaaaactaaatcccagatctgagctcttatctactctcttcttgcatatatgtatgttgtcccttctccccaactccctgcctctattctttgtctctgccaagtcaagctgcctttcttctgctgaattaacctgatatcaatagcttacctgtcaccacttgtcagaatttcctcccactgcccatcttgattcatactgtcccactgcctcagtgattctgaactcactgtctgacacaacccacatttctttgagattctgcatgattcaaagttcatctaggagagaggttcatatcataaaccccattttcagcagcatctcaggtcatgctcacttctaattatactgttaaatgagtgtcctttggtatttaattttgtattatcagaggtttattgaaaaatagaaggca

SEQ ID NO: 554711 - DNA, 1456 bp, Homo sapiens
ggtctagcctaaaaatcatatgttaactgattgtgtttttttaaagtgtcacttgatcttttagaacctcacattttttaaacagaaaaatgaaatattgatgactggggatcaattcttcataggtctctcatgttttttcacatcttgtgagctgatactgacagcctttgttccagactatctattcaattatgtttgtatagtgaacagccttggaaaatagaaatagcgtctccctccagagcaacggtcaggcatgcttcttgcccattaatagcttttgggttccctaagctcaggatttcattttgatagtgcaacctactgtgtgaacagatatcatctggcccttttcatgttactctgtgggaactggggctcagtgaactgtcacaagataatattgatgctccagctattgatattactgtgagtattgaaatcctttgtctctgacccaggagacttcttgtcttttgccagcatccatgaaactgcagcaggctaactagttagattgcaagaattgtaaattcccagacccttcacatttcttgacattgatatgtatagtctcataaactcttgcaaagatttatttgcccccatcattcaaatccccaaaactgtactgtctaactccatcttcagctcaaataaacaccaggctaaatcctgacgtttgctggataatttaattagctctttcccagtaactctgcatcatagaccttccaactgtcctgctctgtaaacatgtgccacagttttagctaggaacagcttaagacctttagaaaacttgagtagtgaaaagattatcgtgccctccacatgtgtaattcaaaacaaaaatagtaataaacagcaaaggaagtttaaggaagtccagcgaattctgattatctgcatgatgaccattcagccactgttgttcttatagcagcaaatattaaaatttttgtttctcagtcattttctacacccaaacttgtgatgagtctgtctatagaataacccagcagtactgatttgaaaactaaatcccagatctgagctcttatctactctcttcttgcatatatgtatgttgtcccttctccccaactccctgcctctattctttgtctctgccaagtcaagctgcctttcttctgctgaattaacctgatatcaatagcttacctgtcaccacttgtcagaatttcctcccactgcccatcttgattcatactgtcccactgcctcagtgattctgaactcactgtctgacacaacccacatttctttgagattctgcatgattcaaagttcatctaggagagaggttcatrtcataaaccccattttcagcagcatctcaggtcatgctcacttctaattatactgttaaatgagtgtcctttggtatttaattttgtattatcagaggtttattgaaaaatagaaggca

SEQ ID NO: 554712 - DNA, 414 bp, Homo sapiens
  misc_feature 314, 315, 316, 317, 318, 319, 320, 321, 322, 323, 324, 325,326, 327, 328, 329, 330, 331, 332, 333, 334, 335, 336, 337,338, 339, 340, 341, 342, 343, 344, 345, 346, 347, 348, 349,350, 351, 352, 353, 354, 355, 356, 357, 358, 359, 360: n = A,T,C or G
  misc_feature 361, 362, 363, 364, 365, 366, 367, 368, 369, 370, 371, 372,373, 374, 375, 376, 377, 378, 379, 380, 381, 382, 383, 384,385, 386, 387, 388, 389, 390, 391, 392, 393, 394, 395, 396,397, 398, 399, 400, 401, 402, 403, 404, 405, 406, 407: n = A,T,C or G
  misc_feature 408, 409, 410, 411, 412, 413: n = A,T,C or G
ttgtctcctctggagtgggactatgaatgactttagtttttcttsctactcttctttttttcagacttcgagtaatgaccacactttatttttataataaaaagtataaaaacaatccttgttaacaaggaaaaatgttaagcctttcattcagacagatatgtgtttgaaagaaggcatttactagaaatgtgacctcaggcaaaccatgtaagcctcctggcccaattttccccatatttaaaataggataataactttctcaaaggatcattataaggattaaataagatgatgtagatagtgcgagggtnnnnnnnnnnnnnnnnnnnnnnnnnnnnnnnnnnnnnnnnnnnnnnnnnnnnnnnnnnnnnnnnnnnnnnnnnnnnnnnnnnnnnnnnnnnnnnnnnnnnt

SEQ ID NO: 554713 - DNA, 652 bp, Homo sapiens
ttgggaggccaaggtgggcggatcacctgaggtcaggagttcaagaccagcctggctaacatggtgaaaccccatttctactaaaaaaaaaatacaaaaaattagctgggcgtggtggcgcacgcctgtaatctcagctactagggaggctgagacaggagaatcgcttgaacacgggaggcagaggttgcagtgagccgagatcgtgccattgcactccagtttgggcaacaagagtgaaactccatctcaaaaaaaaaaaaaaaaaagttacatcaacaatgaaaaaygaagaataaactcctctgtcaatgagagaataaaaaaaaaaaaaacagatttaccctataaaaaatacaagacattcttcacagaaataaaaaaaaaattctaaaatttatatggaaccacaaaagacccaaaataaccaaagctatcctgagcaaaaagaacaaaactggaggaatcacattacctgacttcaaattatactgcagagctatagtaaccaaatagcatagtactagcctagaaatggacacatagaccaatggaacagaatagagaacccagaaacaaatccatacacctacaatgaactcattttcaacaaatgtgccaagaacatacactggggtaaggacagtctctt

SEQ ID NO: 554714 - DNA, 1085 bp, Homo sapiens
tcaggttgagagggaggtgaatagatataacatacaggctgataaataaaaggccaccatttttaggcttaaatactgctaatctaaaggaggttgagcatcactaaaccaaaaacccagaaatccaaaatgctctaaaatccaaaacttcttgagcacacatkatgctcattggagcatttcagattttggattttcagattagggatgttcagccaggataatgcaaatattccaaaatctgaaatatgaaacactctggccccgagcatttcagataagggatacccaacctgtacttgccccagaggataactagccacaaataggcagaaagccaactgagattttaaggggcatgtgttaccaaagaaccatgagtctggctggtacaagtctgcatttttgactccttaaatcaaccgacccctacccaccaaacctgcacctgcaaaaagtgggctgcaaaagctatgcagcccaggcccagtgtggtggcatgtgcctgtagtccctgctgctctgaaggctgaagtgggaggattgcctgagccccaggcactcgagtccagcctgggcaacacagcaagaccttctctctaaaaaaaaatgtttaagctgtatagccctaagagggatacaccgtttgatgccctttagttgtgccatggaaggcagtggacaaagaggggaccaccaaggtccaaagatgtctatcccagggaatactcctggagagaggcgctgtcatccaaggactctgctccactccctgggagccttcacaatttctgcccaccaggatttggtgggtgtgtttttccctcttctggatgaggtttcccaccatgtttatcttatttttactggctgttgcatattgggtgtaaggaggcaggcaatgtatgtaagggttccggggcaacacaccataaagaactgcatccagaagcctggtgtggtggctcacacctgtaaacccagcacttcgggaggccaagatgggaggattgcttgagcccgggagttcgagaccagcctgggcaacatagtgagaacttgtctaaaaaaacaaaaataaaaca

SEQ ID NO: 554715 - DNA, 1085 bp, Homo sapiens
tcaggttgagagggaggtgaatagatataacatacaggctgataaataaaaggccaccatttttaggcttaaatactgctaatctaaaggaggttgagcatcactaaaccaaaaacccagaaatccaaaatgctctaaaatccaaaacttcttgagcacacatgatgctcattggagcatttcagattttggattttcagattagggatgttcagccaggataatgcaaatattccaaaatctgaaatatgaaacactctggccccgagcatttcagataagggatacccaacctgtacttgccccagaggataactagccacaaataggcagaaagccaactgagattttaaggggcatgtgttaccaaagaaccatgagtctggctggtacaagtctgcatttttgactccttaaatcaaccgacccctacccaccaaacctgcacctgcaaaaagtgggctgcaaaagctatgcagcccaggcccagtgtggtggcatgtgcctgtagtccctgctgctctgaaggctgaagtgggaggattgcctgagccccaggcactcgagtccagcctgggcaacacagcaagaccttctctctaaaaaaaaatgtttaagctgtatagccctaagagggatacaccgtttgatgccctttagttgtgccatggaaggcagtggacaaagaggggaccaccaaggtccaaagatgtctatcccagggaatactcctggagagaggcgctgtcatccaaggactctgctccactccctgggarccttcacaatttctgcccaccaggatttggtgggtgtgtttttccctcttctggatgaggtttcccaccatgtttatcttatttttactggctgttgcatattgggtgtaaggaggcaggcaatgtatgtaagggttccggggcaacacaccataaagaactgcatccagaagcctggtgtggtggctcacacctgtaaacccagcacttcgggaggccaagatgggaggattgcttgagcccgggagttcgagaccagcctgggcaacatagtgagaacttgtctaaaaaaacaaaaataaaaca

SEQ ID NO: 554716 - DNA, 1085 bp, Homo sapiens
tcaggttgagagggaggtgaatagatataacatacaggctgataaataaaaggccaccatttttaggcttaaatactgctaatctaaaggaggttgagcatcactaaaccaaaaacccagaaatccaaaatgctctaaaatccaaaacttcttgagcacacatgatgctcattggagcatttcagattttggattttcagattagggatgttcagccaggataatgcaaatattccaaaatctgaaatatgaaacactctggccccgagcatttcagataagggatacccaacctgtacttgccccagaggataactagccacaaataggcagaaagccaactgagattttaaggggcatgtgttaccaaagaaccatgagtctggctggtacaagtctgcatttttgactccttaaatcaaccgacccctacccaccaaacctgcacctgcaaaaagtgggctgcaaaagctatgcagcccaggcccagtgtggtggcatgtgcctgtagtccctgctgctctgaaggctgaagtgggaggattgcctgagccccaggcactcgagtccagcctgggcaacacagcaagaccttctctctaaaaaaaaatgtttaagctgtatagccctaagagggatacaccgtttgatgccctttagttgtgccatggaaggcagtggacaaagaggggaccaccaaggtccaaagatgtctatcccagggaatactcctggagagaggcgctgtcatccaaggactctgctccactccctgggagccttcacaatttctgcccaccaggatttggtgggtgtgtttttccctcttctggatgaggtttcccaccatgtttatcttatttttactggctgttgcatattgggtgtaaggaggcaggcaatgtatgtaagggttccrgggcaacacaccataaagaactgcatccagaagcctggtgtggtggctcacacctgtaaacccagcacttcgggaggccaagatgggaggattgcttgagcccgggagttcgagaccagcctgggcaacatagtgagaacttgtctaaaaaaacaaaaataaaaca

SEQ ID NO: 554717 - DNA, 1085 bp, Homo sapiens
tcaggttgagagggaggtgaatagatataacatacaggctgataaataaaaggccaccatttttaggcttaaatactgctaatctaaaggaggttgagcatcactaaaccaaaaacccagaaatccaaaatgctctaaaatccaaaacttcttgagcacacatgatgctcattggagcatttcagattttggattttcagattagggatgttcagccaggataatgcaaatattccaaaatctgaaatatgaaacactctggccccgagcatttcagataagggatacccaacctgtacttgccccagaggataactagccacaaataggcagaaagccaactgagattttaaggggcatgtgttaccaaagaaccatgagtctggctggtacaagtctgcatttttgactccttaaatcaaccgacccctacccaccaaacctgcacctgcaaaaagtgggctgcaaaagctatgcagcccaggcccagtgtggtggcatgtgcctgtagtccctgctgctctgaaggctgaagtgggaggattgcctgagccccaggcactcgagtccagcctgggcaacacagcaagaccttctctctaaaaaaaaatgtttaagctgtatagccctaagagggatacaccgtttgatgccctttagttgtgccatggaaggcagtggacaaagaggggaccaccaaggtccaaagatgtctatcccagggaatactcctggagagaggcgctgtcatccaaggactctgctccactccctgggagccttcacaatttctgcccaccaggatttggtgggtgtgtttttccctcttctggatgaggtttcccaccatgtttatcttatttttactggctgttgcatattgggtgtaaggaggcaggcaatgtatgtaagggttccggggcaacacaccataaagaactgcatccagaagcctggtgtggtggctcacacctgtaaacccagcacttcgggaggccaagatgkgaggattgcttgagcccgggagttcgagaccagcctgggcaacatagtgagaacttgtctaaaaaaacaaaaataaaaca

SEQ ID NO: 554718 - DNA, 1190 bp, Homo sapiens
ctttttaaaaaagttttctgtgttttattcagcctttccagttgttcttggaatgagtgttggtctgcctcaagcagaaaaaaaattctcagaattcttttctcagaaaaaggattctcagcagagagtgattttatacacggaatgggattaaacaattcttgggaaagctggtgaagccaacgagggaacagttacttttatcagtgtgcaatttttttgctataatggtgcataacaactaatcacaacatgtcaatgccatacttaaataagcactcatttctaacacatctgtgggttggctggaggtggtctgagctagggtaggcaactcactttttttttttttttttttaragtttcactcttgttgcccaggctggagtgcaatggcaccatctcagctcactgcaacctccacctcccaggttcaagtgattctcctgcctcagtctcctgagtagctgggattacaggcatgcgctaccacgcccggctaattttgtctgccttccttcctttctttcctttctttctttcaacggagttttgctcttgttgcccaggctggagtgcaatggcgtgatctcggctcaccgcaacctctgcctcccaggttcaagcgattctcctgcctcagcctcccaagtagctgggattacaggcatgtgccaccacgcccggctacttttgtatttttagtagaaacggggtttctccatgttggccaggctgatctcgaactcccgacctcaggtaatccgcctgcctcggcctcccaaagtgctgagattacaggcgtgagccactgcgccaggcctaattttgtattttttagtagaaacgggggtttctccatgttggtcaggctcgtctcgaactccggacctcaggtgatctgcctgtctcggcctcccaaagtgctgggattacaggtgtgagccactgcgctgggcctggcaactcactttcaagctggctgggcttggctcctcacatttgtgcattctgaacacaggctgcagggacagctgctacccccagggaaagctcttttcatggtgaaggcagaagcataaaaaggcaagctgcattgtgcagatgcatatctgtgtctctccttatgttatgtcatccaatatcccattggccaaagcacgtcacatagccaagctccaaatcaaggg

SEQ ID NO: 554719 - DNA, 1190 bp, Homo sapiens
ctttttaaaaaagttttctgtgttttattcagcctttccagttgttcttggaatgagtgttggtctgcctcaagcagaaaaaaaattctcagaattcttttctcagaaaaaggattctcagcagagagtgattttatacacggaatgggattaaacaattcttgggaaagctggtgaagccaacgagggaacagttacttttatcagtgtgcaatttttttgctataatggtgcataacaactaatcacaacatgtcaatgccatacttaaataagcactcatttctaacacatctgtgggttggctggaggtggtctgagctagggtaggcaactcactttttttttttttttttttaaagtttcactcttgttgcccaggctggagtgcaatggcaccatctcagctcactgcaacctccacctcccaggttcaagtgattctcctgcctcagtctcctgagtagctgggattacaggcatgcgctaccacgcccggctaattttgtctgccttccttcctttctttcctttctttctttcaacggagttttgctcttgttgcccaggctggagtgcaatggcrtgatctcggctcaccgcaacctctgcctcccaggttcaagcgattctcctgcctcagcctcccaagtagctgggattacaggcatgtgccaccacgcccggctacttttgtatttttagtagaaacggggtttctccatgttggccaggctgatctcgaactcccgacctcaggtaatccgcctgcctcggcctcccaaagtgctgagattacaggcgtgagccactgcgccaggcctaattttgtattttttagtagaaacgggggtttctccatgttggtcaggctcgtctcgaactccggacctcaggtgatctgcctgtctcggcctcccaaagtgctgggattacaggtgtgagccactgcgctgggcctggcaactcactttcaagctggctgggcttggctcctcacatttgtgcattctgaacacaggctgcagggacagctgctacccccagggaaagctcttttcatggtgaaggcagaagcataaaaaggcaagctgcattgtgcagatgcatatctgtgtctctccttatgttatgtcatccaatatcccattggccaaagcacgtcacatagccaagctccaaatcaaggg

SEQ ID NO: 554720 - DNA, 1190 bp, Homo sapiens
ctttttaaaaaagttttctgtgttttattcagcctttccagttgttcttggaatgagtgttggtctgcctcaagcagaaaaaaaattctcagaattcttttctcagaaaaaggattctcagcagagagtgattttatacacggaatgggattaaacaattcttgggaaagctggtgaagccaacgagggaacagttacttttatcagtgtgcaatttttttgctataatggtgcataacaactaatcacaacatgtcaatgccatacttaaataagcactcatttctaacacatctgtgggttggctggaggtggtctgagctagggtaggcaactcactttttttttttttttttttaaagtttcactcttgttgcccaggctggagtgcaatggcaccatctcagctcactgcaacctccacctcccaggttcaagtgattctcctgcctcagtctcctgagtagctgggattacaggcatgcgctaccacgcccggctaattttgtctgccttccttcctttctttcctttctttctttcaacggagttttgctcttgttgcccaggctggagtgcaatggcgtgatctcggctcaccgcaacctctgcctcccaggttcaagcgattctcctgcctcagcctcccaagtagctgggattacaggcatgtgccaccacgcccggctacttttgtatttttagtagaaacggggtttctccatgttggccaggctgatctcgaactcccgacctcaggtaatccgcctgcctcggcctcccaaagtgctgagattacaggcgtgagccactgcgccaggcctaattttgtattttttagtagaaacgggggtttctccatgttggtcaggctcgtctcgaactccggacctcaggtgatctgcctgtctcggcctcccaaagtgctgggattacaggtgtgagccactgcgctgggcctggcaactcactttcaagctggctgggcttggctcctcacatttgtgcattctgaacacaggctgcagggacagctgctacccccagggaaagctcttttcatggtgaaggcagaagcataaaaaggcaagctgcattgtgcagatgcatatctgtgtctctccttatgttrtgtcatccaatatcccattggccaaagcacgtcacatagccaagctccaaatcaaggg

SEQ ID NO: 554721 - DNA, 1084 bp, Homo sapiens
ccatctcaacaacaacaacaacaacaacaacaacaatgacaacaacgaattccattttgcaaataaagtctagccacaatcccagtcacaccaccaccaaaccctygggacacagggagctccatttctccagatgctgctgcttccttttcctcttccatctttttagccatgtgacatctcataagcctgggtcttactttccagggtctcctgctataatccactgggttggggagatcattcacattcatggtttcactttacactattgacttccaaacatgcctaacctagaggctgcatttcaaattacctactggccctcttcatctggatttctttagtcacttccagttccataaatccaacatcaaaattgttaacttcatcttcaaattaatttatcttcttttccgctactgtgccccgggacgtcttcctttgctgaacttctgcagcacttcctgaatagtttggcacttctttacttcttcgcttcttttagaggtgttatcattcttccaggttcccttgttagaaatttgcagtcattcaaaactctaatcttccctatatttatttatttatttttatttcaaaagcttttggggtacatgtggtttttggttacatggattaattctattgtggtgaattttgagattttagtgcacctgtcactcaagcagtgtacactttacccaatatgtagtctttcatccctcaccccctcccaccctgagaacatacagcatttggttttctattcctgagttacttcacttagaataatagcctccagctctatccaagttgttgcaaaagacattatttcattcctttttgtggataagtggtattccatggtgtatatatgccacattttctttacccagtcattggtcaatgggcacttaggttggttccatatctttgcaattgtaggactgatttattcatagtaagcatagtgcctagagctggggatagttttagaggcccataaaaatgttttaatgtcttttaaaatataaatttaaaaatttaggtttttttcctgatatgtaatattaatatattc

SEQ ID NO: 554722 - DNA, 1084 bp, Homo sapiens
ccatctcaacaacaacaacaacaacaacaacaacaatgacaacaacgaattccattttgcaaataaagtctagccacaatcccagtcacaccaccaccaaacccttgggacacagggagctccatttctccagatgctgctgcttccttttcctcttccatctttttagccatgtgacatctcataagcctgggtcttactttccagggtctcctgctataatccactgggttggggagatcattcacattcatggtttcactttacactattgacttccaaacatgcctaacctagaggctgcatttcaaattacctactggccctcttcatctggatttctttagtcacttccagttccataaatccaacatcaaaattgttaacttcatcttcaaattaatttatcttcttttccrctactgtgccccgggacgtcttcctttgctgaacttctgcagcacttcctgaatagtttggcacttctttacttcttcgcttcttttagaggtgttatcattcttccaggttcccttgttagaaatttgcagtcattcaaaactctaatcttccctatatttatttatttatttttatttcaaaagcttttggggtacatgtggtttttggttacatggattaattctattgtggtgaattttgagattttagtgcacctgtcactcaagcagtgtacactttacccaatatgtagtctttcatccctcaccccctcccaccctgagaacatacagcatttggttttctattcctgagttacttcacttagaataatagcctccagctctatccaagttgttgcaaaagacattatttcattcctttttgtggataagtggtattccatggtgtatatatgccacattttctttacccagtcattggtcaatgggcacttaggttggttccatatctttgcaattgtaggactgatttattcatagtaagcatagtgcctagagctggggatagttttagaggcccataaaaatgttttaatgtcttttaaaatataaatttaaaaatttaggtttttttcctgatatgtaatattaatatattc

SEQ ID NO: 554723 - DNA, 357 bp, Homo sapiens
tttagattgtgccacctcctggtctagctgtttctttgtgaatttygtaataggctctcagtttgaattctatggtgttattccaaacattgctgccttctttttgaagtatgtggctcacatttcacacagatcctttatgatgatttccttgcatagtgggaagtttttgacgtgaaggtttactggagtcccttggctttcaagttggctcagagcagatggtactgctagagagagcaacaacacagctttgggcttgaaaatgttagtgtacacacgatgctttttcccctcaggactggtatgattgatgggactttggaactaaaaactgagaaaagtagatccttcaca

SEQ ID NO: 554724 - DNA, 357 bp, Homo sapiens
tttagattgtgccacctcctggtctagctgtttctttgtgaatttcgtaataggctctcagtttgaattctatggtgttattccaaacattgctgccttctttttgaagtatgtggctcacatttcacacagatcctttaygatgatttccttgcatagtgggaagtttttgacgtgaaggtttactggagtcccttggctttcaagttggctcagagcagatggtactgctagagagagcaacaacacagctttgggcttgaaaatgttagtgtacacacgatgctttttcccctcaggactggtatgattgatgggactttggaactaaaaactgagaaaagtagatccttcaca

SEQ ID NO: 554725 - DNA, 603 bp, Homo sapiens
tcaaaagttctaaaattatgatggtagtattgtggacatagaacttcaaataaaataataaaacttaggtttttatgcagttgtttagaactataaaatgtttttattttaatgatttaagctgagtcaagttctttatgttgaaatatattttactgtagaaacaataagataatagaacttatattcctcatcagaacttaatatacaacaaactatataaaataaatatgtatgtcatatttaattgtgatatacctttttctaactgaaatttagcatgataatacaaggccagaaacatactttttatttccctttaagtatttcattttatcttcatttaygagacattatcttgtatagaatgtgctgcttggggaaaaaatgtaagaagtagagattttgataaagcagagaagaacaagaaatcttcaacagaatagcaatgtggaaattatgaacttagaagtatccaaggaaaggaaaattcaaaagcaggaaaatctcctaaagcctaagaatgaggggaagttttgtgatattcactgaaactgactggcgatgtggagttttttttgttttggtttttgctttctgcta

SEQ ID NO: 554726 - DNA, 2150 bp, Homo sapiens
gaaataaaaacttctaggaatatagaagacagcattatgtaggatttgagaacacgtactttggagtcaaataaatgcaggttcaattttttaactaacacaagtgaaatcctgggcaagtgacttaaagttctaatgttaaatttatttacaaagggataaaaggacaaaatagcactgatatcacaggtttctttactagcattatgcttggaacacaacgcacaagactctaagtactaagtaaatccttgtggaataaatgtagtaaaacatattaagcattttgcatactcctcctagcacaccatcagtacttaacaaatgttaaattccggaaactcccctgactactggagctctgatttctaggtaagttcctaattctttttcaaatgtagtttttttcttatgttacctatccctctgttctctaataaaggcaattttccacccagtagtggttagtactctgaattaacttatctaaatcagtgaaaataatagtgaacctctgctttattgtgttatatgggaaacattgttatcactgatttcgttatatcacatttaatccacccagtaattccaagaggacactaggtttcatagagtttaatgagagacaagaaataagagcttggttttatactctcactccttatcataataatcaaactcagtgatatttcacagacctatgagttttataaaatacctgaatctggttgtgtatatacaagatacataaagataatgaaaagtagttaattggtctgggtcaattttttgtatctgtataattattctgaattgccatagttgtactgtgggcatctgtactaattgttaagtatgctctggcccgagagagtgatcagttttagaataattttgtacagtattctgctgcacgaaaccactgctttattccccaaaaaatcaggatacattctgcttaaggaaaatctccagacacagcttttgcaaacaggttggtatggtttaccactattggcttggaggaaagcagagaataaacctgacatttttgtttgaccaaaaggatgctgtgctatctatcaatataaagagtacaggatggttaagttatttttatttttaaaggtatgattttaaacaacacaaatttgtctaggagctcaattttaagtcaaattaattccaagatgtaatataaggtacaagacagtataaaatggcctaggactcagagtaatttgatttgaattctacwtcctccttctaccagctgtgtgaaattgggaatttacttgtaatctctttttttctcatgtgtaaataaggacgatattatctcctttaaggatgatatgtaataaggttgacacaatgcatggaaagtgctcagcacagagcatagcatagtacaggatacccagctaaggaggtctagtatgcaatttaatacatggctctagagctcagggcaaagttggagctagagaaagaggtttgagagagtccccactacacagataatagcatataaaaatgacatcatatttgagaaaggggtagtttgaagatcacagaattcagttgatctgaagaagccattcaaatgaaagcctcgttgctagttataaccttaatgttgaatgtagttaatcatgttttgagtgcaggtcctataaccagaaagaaaatgagagctctggagacccagaatgacaagccagtgattgtgactgttcaatggtgtgtccatgctgatttaaaactaaataatcatcactccattggtgagtccaatgatgcttttatcacagcaggataaattcctcttgtcaaaattggcacccattatgcaaatgaaatttgaagggttcattagctaaatggtaattggaataacttgcattaaagaaatgatatagaaaatttccatctagcaaaattactttgtttctaccataacctttaaaatgtttatcagtgaataatacatcaaaattctaaaattatagatatttaatggcttcatagctgacattctgttcatgatgcatttttaaatttgtttttttcctggatatttctttggttactgcctccggtactaacaggaaagatattgtccattatttcaaggcacagcattgtat

SEQ ID NO: 554727 - DNA, 1040 bp, Homo sapiens
ttctgtcatttgcaaccacatggatggaactggagaccattatgttaagtgaaataagccaggcacagaaagacaaactttgcatgttctcatttatttctgggagctaaaaactaaaacaattgaactcatggagataggragtagaaggatggtttaccagaggctgggaagagtagtgggggagaggggaagtggggatgtttaatgggtacaaaaaataattatacagaatgaataagatctagtatttgatagcacaacagggtgactatagtcaacaataatttgttgtacatttaaaaataactaagagtgtaattggattgtttgtaacacaaaggataaatgcttgaggtgatggctacctcatttacccaaatgtgattattatgcactgtatccctgtatcaaaataaatccataaatctatatatctactatgtatccacaaaaataaaaaataataaattttataaagaataaaagaattactatagaggtgcagccactaattgctacagactcaccacatgtgaaggttgcaaaatccttttatgtctaccctgatcctcatctagattacccaaggcaactaagagccaatctctttttaagtatgctttctctgtcaacaaatattaccatgaatatttagcagtgtgttagaattttgaatctctcactgttgggacagtcttccttgggtctcacaataaaatgtctacactctctatacaatgtttgaaagcactaggttttggagtcaacacatctgggcttgctgatgatgtcttggaaaactttcctaagcctcagtttcctcagccgtagaaaagggtaacaatattatcccaactcaatggttgctgcgggagctgaaagaaatcatttatttaaaatacccaacgcagttcctagaacactgtaagttcttgatatatgtcaccaccacttccagccatgaccgtcatcattaccggagcactatagtaaggggcccagctggtagcctttctctgcattaagccctcactgac

SEQ ID NO: 554728 - DNA, 563 bp, Homo sapiens
ggattgaaagtgaaaggatggaaaaacctattccttgccaaaggaaacaaagagaaagcagagctaactattcttatatcaaataaaacactctttaagcaaaaacygcaaaaagagacactataagtgtcagagtaatgctggccagagtcgaatgattttggatgatctcacgcatatgtgaaattaaaatagtccaactcatagaagcagagagtacagtggtggttaccaggggataggggtgggtgaggaagaggaaaaaggggatgtgttcatcaaagcatacaaaattttagttagattgaagaaataatttcaaagatttattgtacatcatggtgaccatgattaataacaatgtattgtattcttaaaaatggctaacagataaatttgtgttctccacacaaaaaataataagtatataagataattcatgttaattagcacaatcttcacttctcacatgtataaatatttcaaaacaccatgttgtacataataaacatataatttgtatatgttatacaatttttttcaaaagagaaacaattataaat

SEQ ID NO: 554729 - DNA, 1549 bp, Homo sapiens
gatgtagacacagaatttatactggaaaatagagagagaaagtaatacctccaaataattcaattatctataatttcatgtcatcagtatagttataccaggatctctaatattgtcttcctaatccagcttagtagtttctcccttagaagtcacacatttaaacaaaaaaataaaaataaaaataaacaaaaaactcctagtaactgaaaatacgtacggaaaggcatttggcaactccacttatggctggagcatagaaattggaaaatgtttaattcaaattaattaattaattaattaaaataaacaaaaaaccatgctgctccattcatccacaaagggagagttgggactgcacccagaggggaatgaaggtggaattgtagactcacaggattacagctcccaggggccacctgtggagcctcgttcttccttcttccttaatactcaggttccatagcgtagctgaacacatggcatcctggaaaagaagacagctcactgacatggtttggatttgcatctctgcccaaatctcatgtcaaattgtaatccccagtgctggaggtgaggcctggtgggaggtaattagatcgtggaggtggatttcccccttggtactgagtggtgatagcgagtgagttcccgtgagatttggttgtttaaaagtgtgtaacacctccctgctcctctcttcctcctgctcctgccatgtgaggtgccagctcccacttcaccttctgccatgattgaaagttccctgaggtctccccagaagcagaagccgccatgcttcctgtacagcctgtggaatggtgagcccattaaacctcttctctttataaattacctaggctcaggtatttctctattgaagtgtgagaatggcctgacacacttacccaccttccctgcagctaagggctgtggactgaactgggtcttcctaaattccaaagctcaagccctactcgcagtgggatgstgtttggaggcgggcctttgggagggaactaggtttagatgaggtcgtgcaggtgggtccccacgatgtgattagggtccttatcaaagaggaagagtccggagcttgtctctctctctccgccttcctgaggaaaggccaggtgaggacacagcaggaaggccgccatgtgcaatcccaggcaggagaaacggaccacctgattctcaccaggttctcaccagaccatgccaacatctggatcttgggcttccaggctccagaactgtgagaaataaattcaccttgttgaagccacccatctgcagtacttcatcgtggcagcttgaattgactaagacactgagtgtggtcagaggtgtgtgaaggtgtggttaacaactacagtagtccccccaccacagattcaatttccagtgttcctgttaactgaggccacaaaatattaaatggaaaattccagaaatcagcaatccacaagttttaaattgcacactgttctgagtagtgtgatgaggactctcactgtccctcatctccttccccagagatgagtcc

SEQ ID NO: 554730 - DNA, 512 bp, Homo sapiens
tttctctaggttagttcattcttttttattccttttctttttggcttttcaacttaagctttaatatatcaataattaccttaaatataaatagcccaaatacacaaatcaaaagacagagattgacagattatataataaaacacagcccatctatatrctgtttaaaagaaattcacttcgaattctacaaaaaggagtgtatacaataatatctaacaaagtgaatgagaaaaagaggcacattacttaataatagaagaatcaatccatcaggaagacacatgattctaaatatgtgctcaccaaataacagagccataatatatataaaacaaaaagatagacctgaaagaaaaaattgaaaaatccacagttagagttggggattttgacactcacctctcactaactgatagaactactagacagaaaatcagcaaggacatagaggatctgaacaatacaatcaacgaatatgatctaattagcatgtatagaactctacagtc

SEQ ID NO: 554731 - DNA, 693 bp, Homo sapiens
atgacaatatggattaatcttacatatcttaagaacatcataacagtaagtggaagaagccaaactcaaaaggctatgtaccatatgatttcatttacatgacatggaaaaaaagatgaaactatgaggatggagaaaaatgttggttgtctgtgattctgggtggggagaggcagaataacaaaatgatttggatgataaaaatatgtgtatcatgactgcggtggtggttctatgactctatgcatttgtcctaatggaagccagaaggcagtgaaaggaaatattgaatgtgctgaaakaaaaaataacaagaaaactcagccaagaatattatagccaacaaaattgtcttttcaaactaaaggcagaatgacaacatctccaggtaaacaaaaacagattatttgttgcaagtagaaccatcttaaaaaaacaaacaaacaaacaaacaaaaaaccactaaaggcaattcttcaggctgaaagcaagggatactagaaagtaatttgaatctactgaaaaaaacaagagtaccagtaaagtaatcatgtaggggaattgtatatctattctcttgcataaactaatttaaaaagtagcaaaaataatatgtatataattgtataattgggccaaaaacatatagaaaaattatatgtttaacaataatagcataaggaggcaactgca

SEQ ID NO: 554732 - DNA, 618 bp, Homo sapiens
aggtcttgttcttttgctcaggctggtctcaaactcttgatttcaagcaatcctcctgccttggcttcccaaagtgctgagattacagtcatgagccaccatgcctggcttaattttatttttatattggtaaattttttatttgtcagcagacttcttttctaaaatttttttaaggaccatagttaagcctcacaatctagtgggttaactatgaatataagaatacagtatgtatagtatatttccaactattatataaattaaagcaaaatgattacatgaaaagcatctaagcgataaattattgattgtaatggatggcacactaaygttaaagaagtatgaattaactttattaaaaaataataagtgtcagtaattctgaattctgtttaaaacttatttgtttccaagttctattatggtgtttcaggtgaagtctacccgaaaccaaaatatatttttcttccactgctagaattgtccatttcaataattccgtttgatcttttaaaagagagcattgtttgaggtggctgttcgttggctctctgacaaatggcccgtgtccatacggagcaataaatggcaaaatatctgcctgttcattttcct

SEQ ID NO: 554733 - DNA, 617 bp, Homo sapiens
cagatggccagctgcaaggcagcctatctggtacctttaaacatctcttccaaggaagaaaaatcccccatgatgctcatcatttaagaaaaaaatagtatctctataaaactgctgtttaaataaggacctttcctgtgtctggtcactttgtggctgaaataaaacctagacaaaaatcagtgtgctacaatctgggccttgagaacctacctaaaatgtgatgtttggttaattgattgagtttaggaattttagtttttaggtttttttcaagactgaactttccattgaatcaggaattcttgtctgctgtagctttatattcatccagcattgtgtggaaattgtgagctgcttggatcattgcagttgggagtcattctattcctgggttagaaaactgagctaaagatgaggttaaaattctaaacctccaacttggtagtcttctgtgagattcaaatttctccatcttcagatttggggtgttcattttgaacctttatttgtcgtggagggttgttgggrtaaaattaaatgaaacattttgtataatgttctttcaacatagaagaaccccagtatagtgtcagtttccttttcttttcctttgt

SEQ ID NO: 554734 - DNA, 1054 bp, Homo sapiens
gaacatccattcattcattcattcgatgataatttaatagtagtaataatagctggaacctattgagtgcttatcttacattatatcattcagttctcaccataatcttgtgaagtaggtgctattaataatcgtttctacagataagaaaactaaggcacaatgcagtgaagcaactttgccaaagtcacatatgtagcatagttatgaagccaggatttggacctgaactcttaaccaagatggatttttgcatctcatgggtcttggtatttacaactatgtgccaagcatgaggctagttgctggggattccaaagcagccaaaactcagaccctggtattgcggatcctgcagttgggtggggaaggaagttaggcaatgaacttaacaggtgctctgctaaagactagactggtgggataaattgcatgattggatgtgtggcaaaccatcaggagggtacatatcctgctgcgtgaggggaacaagtaatcacttggtggacgctttaatccaggttgcacctgcactgccacatgcaggtaaatcaggttctgtggtatgttcctgaaacaccaggaggaaagttaattctcagactccctggatatctgttttccttggcttatggtcagcttctccttggacaaataatgtttcttgtacaggtcgagcacccctaatataaaaatctaaaatccaaagtgctccaaaattccaatatttttgaatgctgacatgatgccacaagtsgaaaatgccacacctgaccatgtgaccagttgcagtcagaacacagtcaaaactgtgtttcaagcagaaaatcatttaaaatattgtataaaatcacctttaggctgtgtgtataaggtgtatatgaaacataaatgaattttgtgtttatacttgggccccatccccaagatacctcattatgtatatgcaaatcttttcatatccagaaaaatccaaaattcagaatgctcctgatcccaagtactttggataacggatatgcaactggtacttaaaagggaagaaaatagactc

SEQ ID NO: 554735 - DNA, 2503 bp, Homo sapiens
ctaacagttacactatctcaggatttcatctgggaacatttctcttttaatcagaagtaaaaacatctggatgagtcagaaaagaatgtggcacacttctgaatgctaaaagtatacagggtgttttgattatgcatttagacctttcagagtctttcttcattgttgccacatacatttaatttattctgaactgatctgactctagaaataattttgctatataaaagattaacattccaaagaaacatccatagtaatagaggaagaaaaatgataacaattatagctaatacttattgagcacttcttgtgtgccagactctgttctaattgctttacctgtgccaactattttaattctctatccctatggttaggtactattttaaagataagcaaacagaggtattttacagataaagaaactgaggcacagagaggcagaatagaaaataaaacatttaaacttatacactaggagagaaatacccacatttttgtagtataaaatacccgtattttgtataagaaaatccaaaatggtgtgcaagttatagaaggtacaaattttctccaaacactgagaaatatagtggcatgaaaaccaaacatatttgtataattattgtttattatctgttgttcatttgggacagaactgtgactgtcatttttatttggaatgatgaggttttgccagaccaaggagaaaactgactttggagtaattccagaatcacagtttgatatggaaagaggtatattttgctgctgtgaatactaatggtagtttatgcattgtctacttgacaatgtggagaaaaatacagtaatttatggaaattacactgtgccattgtattgaggctaatggactgtggctgtgtcagtctgatctaaaatcaagcctgcacatcataatctggttattttggccactttagtactgactcagatcatcatgtggttgatctgaatgactcagctgttggttgttgacatgactgaaaataaatctaaatgcaaaatggtcattttcatggcctcttgtctacatggttattgactttggcaattttgtggttaatgtcatgatatacctatgatcatggagaatttgggtgattacccacataaaaatgctataacagtacctgcatacctcagcagagatagaaaaggagcttcagtggaatcagtgtggaatgcacaagcttgcattcaacattctcgcctcaaaacagtagtagcttagacaaaagatttgatggaatttccaccactttattcccttgtttagcataagcgcctcaatcctttcactgagaaaaagtgcagtggaacctacagggaagaagctccataggcatttttacatttaccttttctcattagggaaactatagccacttaaactcacatttcacatggaggttatataaaaagtgactgatgggtcaatcccatcacattttataaaggatctattaaaataagacaagactttatagttgagttaaaaagacctgtcattttccagtatctttccctccattaatgcagctacaaaatgtttaacattcatttcaaatagttttgttgcacaagacagatttcaaggttagcgtaatgaaatggctgtaaaatgctgcacatttagtgtttataaaagtgcattataagaagcgtatcataccttttgaggaaatgtaagaggaggcgtgaagttaatgaaagtaaattagcaacaagaggaaaacagacatataaaaagcactgcaaaatacgtacatcaaataatatacaatgctcttgttatctgtaataataaagaactagattttctgagttaataataaaatatattttatgacctttgaaatgataataaaagtgagctatgtgctataaccttcatcttgtaagtaaattttataatcttcactttactagctttacaagatgaagagctgggactgaaaactgcttctctattgtacaaactctttatcattcctttttytctcttctttcttccaaagtatgcatcatttctatactccatttaatgccatgtctgtggcagatttttaaaaaatgtgcagaatcaatctttggttcttacagtcttctctgatgggaataagtaaccatgtcccaaagactgaaaactacagcttttagccagaaaagccatgaagtagttgtaataaaaattctgctattacctcattaatttattattacatcactactactttgaagtgaatttgcagtaagataaagacagtggtcatacatcagcagaggaaagggtatgcttaaaatatagccaaaaatcctattgtctttgatctcatttattttatacccttcatgtcttttattattctgcacatactttacattttaaaggaggatctacgtgtcaactaatctggacagaccccctgccctcttcaacaaagtacttcatatcttgaaaacttaacaggagagt

SEQ ID NO: 554736 - DNA, 541 bp, Homo sapiens
ttgaggcccacttgtataagatacaaaaaaaatctagtaggatttttttttaaaaagaaaaactgaagtttcttttatctataccattagaattggtatcctttgtggggakagggaaacaatgcaaaaaataaataggttaagaaactggccaaactaaacagattctaaggaaaatataactctctatttaacagaacactggcaatattggataattatatatctacaactcaatagtcattctaatatactatgagctttagatataataacttttatccagaagtttccttgagatttgagaattattattctaggttactcaaaaaataatttgagtattataagatcaacagaggtccatttttaagtcctctattattcatgtcatgaaagttatattatcataaaaaatactcaatattcaattaaataacattttattcatccatagtttcaatgacatctattaagcatgcaataaaattacttattttcataatttttggtttcatttatatactaaaatccatatcaa

SEQ ID NO: 554737 - DNA, 605 bp, Homo sapiens
ggcctgaggagatgaacaatctggcgtatgagacagggaatgtctttttttatgagcaaagaggtatttttatggtttgccttgagtgagtagcctctgatgctgggaaaacagactggtaacagctggaccacactttggatcagttgccacagcaacttgatacatttgtctctagtgtcatttgatccctttgagagctgtattatctcaatgtagatgtttgacttttgggcctactctgtgagtgaacacgtctgtttgattgtattcctcagattacagacagttattcatttgggagcttgcattctaggattacagatgctggcaacctcataggtgactggaacccaggatcttttggaaccatctttatatttaccaccctcagaacgctgatttcaggagcaaattataccttatagcatctgggaaaatcatgcagatattcaaagtcatccccaatttctgataatatattccacttcctcatcttaggtgatctttgcaagcaacacttttcaaacttgatctcaataygagttatcattagtagttatctttttttttctggaaaaattaagcaagagacactcaccttt

SEQ ID NO: 554738 - DNA, 949 bp, Homo sapiens
atgccctttaattaataatcatgtatcgatattggttccttagctatgggaaacataccataccaatgtgagatgttaataatagaagaactggttgtgggtatatggcaactctctgtactttcttcaaaaccttttggtaaatgtcaaacagactttattttaagaaatacagtggtacccaaacaatctctggatggaatgaatcatgtcacygagtttgccctgatctgttgccctgtctgcatccttcagctttcacatggtaatgggatgggaaggattctgtctgtgacaataattgaggcatgggcaaatgtaagaatgaaagctgtaacattttaagtttcttattgaatcatttgttggctccaatcaatatacagttagaaattagaaaagaaaatctagaatcagcatattttcttaaatgattattttgccttttaatttgtatttgtttgtttaaaagcctatagtcgcatacaacttgggagcttatggaaaaattgttaatactgttagtgtattttttttcaactcaggcatataaaagatactattgcacagttattaaaaacaaaagaaaaacaaacaataacaacaaaaaaagcagattgaattcagataaatgtattagacctaattagaaatagcattaaaaaacaaagacaaaacaactaagaaacaaaaagcctaagagaaaactttacacttcttagatggaatcacagctgtccaatgccaagacactaatgcattctgcatcaaacagattgcagaggaaaatacaatcttattttagatgcagttcaggttttgggaccatcccccaccttctgaggtcatttgctttttagttcatgacattacatagacattgctcatacctcattaaatgccaattgagtttaagtgaggtaataaaattcttttttatttttttatt

SEQ ID NO: 554739 - DNA, 949 bp, Homo sapiens
atgccctttaattaataatcatgtatcgatattggttccttagctatgggaaacataccataccaatgtgagatgttaataatagaagaactggttgtgggtatatggcaactctctgtactttcttcaaaaccttttggtaaatgtcaaacagactttattttaagaaatacagtggtacccaaacaatctctggatggaatgaatcatgtcaccgagtttgccctgatctgttgccctgtctgcatccttcagctttcacatggtaatgggatgggaaggattctgtctgtgacaataattgaggcatgggcaaatgtaagaatgaaagctgtaacattttaagtttcttattgaatcatttgttggctccaatcaatatacagttagaaattagaaaagaaaatctagaatcagcatattttcttaaatgattattttgccttttaatttgtatttgtttgtttaaaagcctatagtcgcatacaacttgggagcttatggaaaaattgttaatactgttagtgtattttttttcaactcaggcatataaaagatactattgcacagttattaaaaacaaaagaaaaacaaacaatarcaacaaaaaaagcagattgaattcagataaatgtattagacctaattagaaatagcattaaaaaacaaagacaaaacaactaagaaacaaaaagcctaagagaaaactttacacttcttagatggaatcacagctgtccaatgccaagacactaatgcattctgcatcaaacagattgcagaggaaaatacaatcttattttagatgcagttcaggttttgggaccatcccccaccttctgaggtcatttgctttttagttcatgacattacatagacattgctcatacctcattaaatgccaattgagtttaagtgaggtaataaaattcttttttatttttttatt

SEQ ID NO: 554740 - DNA, 949 bp, Homo sapiens
atgccctttaattaataatcatgtatcgatattggttccttagctatgggaaacataccataccaatgtgagatgttaataatagaagaactggttgtgggtatatggcaactctctgtactttcttcaaaaccttttggtaaatgtcaaacagactttattttaagaaatacagtggtacccaaacaatctctggatggaatgaatcatgtcaccgagtttgccctgatctgttgccctgtctgcatccttcagctttcacatggtaatgggatgggaaggattctgtctgtgacaataattgaggcatgggcaaatgtaagaatgaaagctgtaacattttaagtttcttattgaatcatttgttggctccaatcaatatacagttagaaattagaaaagaaaatctagaatcagcatattttcttaaatgattattttgccttttaatttgtatttgtttgtttaaaagcctatagtcgcatacaacttgggagcttatggaaaaattgttaatactgttagtgtattttttttcaactcaggcatataaaagatactattgcacagttattaaaaacaaaagaaaaacaaacaataacaacaaaaaaagcagattgaattcagataaatgtattagacctaattagaaatagcattaaaaaacaaagacaaaacaactaagaaacaaaaagcctaagagaaaactttacacttcttagatggaatcacagctgtccaatgccaagacactaatgcattctgcatcaaacagattgcagaggaaaatacaatcttattttagatgcagttcaggttttgggaccatcccccaccttctgaggtcatttgytttttagttcatgacattacatagacattgctcatacctcattaaatgccaattgagtttaagtgaggtaataaaattcttttttatttttttatt

SEQ ID NO: 554741 - DNA, 349 bp, Homo sapiens
ggaaagaggtgatttgcatagccgcctaccttccaatttgttatatagataggtagggcagragattgccaataataactaagatttggagttaaaaccattcataattacttggtctttgtaattatcccagggaataaaagatgctttattcaactccattttatacccagtccttgttgatctggtcaatgcagtgagaagaggatgataacaataatggtgatgataaatcataataatagcagttctcatgtgtcacatcgaaccatgaactatatcctgtgctaagcatttctcctaccaataatcacatgtgctaagtcctattatgacctgcattttaaca

SEQ ID NO: 554742 - DNA, 576 bp, Homo sapiens
ggaggctgaagtgggagaatcacctgagcctgggaagtcaaggctgcagtgagctgttttcacaccactgcactccagcctgtgcaacaagagtgagaccctgtctcaaaaaaaaaaaaaaaaagttaattaattagttagttaattttttaaaagatgggcatatttgtccagattatacatagcagacagcaaagtagaaccagttatcaattatctactgttgtgtaaccaaccatcttagaccatcccagaatttttagtgacttaaaaataatggctttttggccgggygcagtggctcacacgtgtaatcccagcactttaggaggccaaggtgggcggatcttgaggtcaggagatcgagaccatcttagctaacatggtgaaaccccgtctctactaaaaatacaaaaaattagccaggcatggtggtgggcacctgtggtcccagctactcaggaggctgaggcaggagaatggcgtgaacccaggaggcggagcttgcagtgagccgagatagtgccactgcactccagcctgggcgacagagcgagactccgcctcaaaaaaaaa

SEQ ID NO: 554743 - DNA, 576 bp, Homo sapiens
ggaggctgaagtgggagaatcacctgagcctgggaagtcaaggctgcagtgagctgttttcacaccactgcactccagcctgtgcaacaagagtgagaccctgtctcaaaaaaaaaaaaaaaaagttaattaattagttagttaattttttaaaagatgggcatatttgtccagattatacatagcagacagcaaagtagaaccagttatcaattatctactgttgtgtaaccaaccatcttagaccatcccagaatttttagtgacttaaaaataatggctttttggccgggcgcagtggctcacacgtgtaatcccagcactttaggaggccaaggtgggcggatcttgaggtcaggagatcgagaccatcttagctaacatggtgaaaccccgtctctactaaaaatacaaaaaattagccrggcatggtggtgggcacctgtggtcccagctactcaggaggctgaggcaggagaatggcgtgaacccaggaggcggagcttgcagtgagccgagatagtgccactgcactccagcctgggcgacagagcgagactccgcctcaaaaaaaaa

SEQ ID NO: 554744 - DNA, 595 bp, Homo sapiens
agaagagtcctgagattactttaaacaggaaatggtgaaaacttgggttaaggtggcgaatgtggagctgacagaaatgarcatttgattattcagtgcagggactatcctcagaacataatggtgagtacagtcacatagcaaggatggttaaagccctaagaagagatggaaccacttggactgcatggcagttggggcccaggaccaagctgtggggagctccagcattcaggggccgcagaggggacccagcaagtggaacacacagaggaggcatggcaagagacccaggcgggaagccaggtgagtgcagcgtcctgctggctaagggaaggacgcttcaagagtgtcaggagtcagtgttagggcccagagaacgataccctaaatgaaggcttcagaagcagctctctctgaccttctcccgccctcctgtctctggctcctcattctcccctgggcctagccccagaaactggaatccctcttcaccaagtcagggtcatagaaaccagaacccatcttccccaaacccaaccataacacctaaaaatagtgctctaactttctcgctgcgtttctgtgtaaaatc

SEQ ID NO: 554745 - DNA, 595 bp, Homo sapiens
agaagagtcctgagattactttaaacaggaaatggtgaaaacttgggttaaggtggcgaatgtggagctgacagaaatgaacatttgattattcagtgcagggactrtcctcagaacataatggtgagtacagtcacatagcaaggatggttaaagccctaagaagagatggaaccacttggactgcatggcagttggggcccaggaccaagctgtggggagctccagcattcaggggccgcagaggggacccagcaagtggaacacacagaggaggcatggcaagagacccaggcgggaagccaggtgagtgcagcgtcctgctggctaagggaaggacgcttcaagagtgtcaggagtcagtgttagggcccagagaacgataccctaaatgaaggcttcagaagcagctctctctgaccttctcccgccctcctgtctctggctcctcattctcccctgggcctagccccagaaactggaatccctcttcaccaagtcagggtcatagaaaccagaacccatcttccccaaacccaaccataacacctaaaaatagtgctctaactttctcgctgcgtttctgtgtaaaatc

SEQ ID NO: 554746 - DNA, 595 bp, Homo sapiens
agaagagtcctgagattactttaaacaggaaatggtgaaaacttgggttaaggtggcgaatgtggagctgacagaaatgaacatttgattattcagtgcagggactatcctcagaacataatggtgagtacagtcacatagcaaggatggttaaagccctaagaagagatggaaccacttggactgcatggcagttggggcccaggaccaagctgtggggagctccagcattcaggggccgcagaggggacccagcaagtggaacacacagaggaggcatggcaagagacccaggcgggaagccaggtgagtgcagcgtcctgctggctargggaaggacgcttcaagagtgtcaggagtcagtgttagggcccagagaacgataccctaaatgaaggcttcagaagcagctctctctgaccttctcccgccctcctgtctctggctcctcattctcccctgggcctagccccagaaactggaatccctcttcaccaagtcagggtcatagaaaccagaacccatcttccccaaacccaaccataacacctaaaaatagtgctctaactttctcgctgcgtttctgtgtaaaatc

SEQ ID NO: 554747 - DNA, 662 bp, Homo sapiens
taaataaataaayttttaaatgcatctatgaactagcaaaataaagtaaggagtatcaaggccaaaatctaaaagaaagctataactcagagatataaaacaagccatgtagttgacattcaccttgaaggtatttgtcaaatttagtgaaatcatgagtagtttttcataatgtctcaagtcttggaggttggcagacaaagcctaggtcccatacatagtgggaaaactaataaaaaacgttgacagtctggtgcccaaagactactttcttataaatttgaattaactctgtctataagctctttgtctccacttccctaaccatcactggattactagaattttatctttggaactgaccataaaatgcaaaaataaatggaaaaacatctcacataagaaatcttcaacataaaccagagataaaaagtgttgttacactaaattcatgtaatatacgttttccagaaaaacagcctaaacatgtggtttattattcccaggtggctgaccttaaatttctgacagaaacaaatataaataatttctggaggaaattattcttaaaccagccttttttaaaaaaagagattgaatacatacctaaatacacaaacctaaagaattcctatatgaatagtaatttacacaagaaaaat

SEQ ID NO: 554748 - DNA, 662 bp, Homo sapiens
taaataaataaatttttaaatgcatctatgaactagcaaaataaagtaaggagyatcaaggccaaaatctaaaagaaagctataactcagagatataaaacaagccatgtagttgacattcaccttgaaggtatttgtcaaatttagtgaaatcatgagtagtttttcataatgtctcaagtcttggaggttggcagacaaagcctaggtcccatacatagtgggaaaactaataaaaaacgttgacagtctggtgcccaaagactactttcttataaatttgaattaactctgtctataagctctttgtctccacttccctaaccatcactggattactagaattttatctttggaactgaccataaaatgcaaaaataaatggaaaaacatctcacataagaaatcttcaacataaaccagagataaaaagtgttgttacactaaattcatgtaatatacgttttccagaaaaacagcctaaacatgtggtttattattcccaggtggctgaccttaaatttctgacagaaacaaatataaataatttctggaggaaattattcttaaaccagccttttttaaaaaaagagattgaatacatacctaaatacacaaacctaaagaattcctatatgaatagtaatttacacaagaaaaat

SEQ ID NO: 554749 - DNA, 662 bp, Homo sapiens
taaataaataaatttttaaatgcatctatgaactagcaaaataaagtaaggagtatcaaggccaaaatctaaaagaaagctataactcagagatataaaacaagccatgtagttgacattcaccttgaaggtatttgtcaaatttagtgaaatcatgagtagtttttcataatgtctcaagtcttggaggttggcagacaaagcctaggtcccatacatagtgggaaaactaataaaaaacgttgacagtctggtgcccaaagactactttcttataaatttgaattaactctgtctataagctctttgtctccrcttccctaaccatcactggattactagaattttatctttggaactgaccataaaatgcaaaaataaatggaaaaacatctcacataagaaatcttcaacataaaccagagataaaaagtgttgttacactaaattcatgtaatatacgttttccagaaaaacagcctaaacatgtggtttattattcccaggtggctgaccttaaatttctgacagaaacaaatataaataatttctggaggaaattattcttaaaccagccttttttaaaaaaagagattgaatacatacctaaatacacaaacctaaagaattcctatatgaatagtaatttacacaagaaaaat

SEQ ID NO: 554750 - DNA, 950 bp, Homo sapiens
agactctgtctcctgtagccaggaagtgtgtcagcctcacttaggtacatgggtttgagccggggggtagtttacctaagagaaactgaggcatggggacaattagaagtagacatggacatgggccaagtgaaagccccagatctttagaatcgtacagagcatccacccttttctctctcatgcagacaggactaagttccagagaaaggaagcaacccagaatgtgctattatttgccaattaattgaaggcaggaagtctgctcttcttctcagtccacgcaccagcagacttcagagggcctttgtccatcgccagttgggctgaactgtgatggtatctgagcttcaattttccttttggtcagttatacatacaaatctgataaaccttagtgccgtggcctcttcacagaaacctctccgtcagaaaaatctccctttttaacacctgagcaggacgaatgcagcagctttytaaatgagagctctctagggacctgcttcaaccatgggccagggtcgtgcaggggccaggatccaggaacgctaactgcgcgtgcgctagcctggaagctgccgcgagccgcccccccgcccccgcccgcgtccttgtgccaggtgtctagccccagggactcagcagtgtgggctttagagcggctctcaggacttccaggaaaggctggggacgtatacatttacgccagtcaaaaagacccccttctcctctgttctctgaagctcagaatggtggagagtggacaggacttgaatgggcgaccccctgatactgcaagtttcctctggcttttgccttttaacccattaccgtccaccctggcacaaggcaggttgttgccttcagctgccagatatatggcatggcacagatgggcagtggaattccagctctgagcactcccggcccccattcttatcccagta

SEQ ID NO: 554751 - DNA, 950 bp, Homo sapiens
agactctgtctcctgtagccaggaagtgtgtcagcctcacttaggtacatgggtttgagccggggggtagtttacctaagagaaactgaggcatggggacaattagaagtagacatggacatgggccaagtgaaagccccagatctttagaatcgtacagagcatccacccttttctctctcatgcagacaggactaagttccagagaaaggaagcaacccagaatgtgctattatttgccaattaattgaaggcaggaagtctgctcttcttctcagtccacgcaccagcagacttcagagggcctttgtccatcgccagttgggctgaactgtgatggtatctgagcttcaattttccttttggtcagttatacatacaaatctgataaaccttagtgccgtggcctcttcacagaaacctctccgtcagaaaaatctccctttttaacacctgagcaggacgaatgcagcagctttttaaatgagagctctctagggacctgcttcaaccatgggccagggtcgtgcaggggccaggatccaggaacgctaactgcgcgtgcgctagcctggaagctgccgcgagccgcccccccgcccmcgcccgcgtccttgtgccaggtgtctagccccagggactcagcagtgtgggctttagagcggctctcaggacttccaggaaaggctggggacgtatacatttacgccagtcaaaaagacccccttctcctctgttctctgaagctcagaatggtggagagtggacaggacttgaatgggcgaccccctgatactgcaagtttcctctggcttttgccttttaacccattaccgtccaccctggcacaaggcaggttgttgccttcagctgccagatatatggcatggcacagatgggcagtggaattccagctctgagcactcccggcccccattcttatcccagta

SEQ ID NO: 554752 - DNA, 950 bp, Homo sapiens
agactctgtctcctgtagccaggaagtgtgtcagcctcacttaggtacatgggtttgagccggggggtagtttacctaagagaaactgaggcatggggacaattagaagtagacatggacatgggccaagtgaaagccccagatctttagaatcgtacagagcatccacccttttctctctcatgcagacaggactaagttccagagaaaggaagcaacccagaatgtgctattatttgccaattaattgaaggcaggaagtctgctcttcttctcagtccacgcaccagcagacttcagagggcctttgtccatcgccagttgggctgaactgtgatggtatctgagcttcaattttccttttggtcagttatacatacaaatctgataaaccttagtgccgtggcctcttcacagaaacctctccgtcagaaaaatctccctttttaacacctgagcaggacgaatgcagcagctttttaaatgagagctctctagggacctgcttcaaccatgggccagggtcgtgcaggggccaggatccaggaacgctaactgcgcgtgcgctagcctggaagctgccgcgagccgcccccccgccccckcccgcgtccttgtgccaggtgtctagccccagggactcagcagtgtgggctttagagcggctctcaggacttccaggaaaggctggggacgtatacatttacgccagtcaaaaagacccccttctcctctgttctctgaagctcagaatggtggagagtggacaggacttgaatgggcgaccccctgatactgcaagtttcctctggcttttgccttttaacccattaccgtccaccctggcacaaggcaggttgttgccttcagctgccagatatatggcatggcacagatgggcagtggaattccagctctgagcactcccggcccccattcttatcccagta

SEQ ID NO: 554753 - DNA, 545 bp, Homo sapiens
caggggggaaaggtatgaagagaagagtgtttgcctgcagcaggtctgatgaaatgagctcctccagggctcacgcttttagctccagactgtccattttgaaaaatcactaagaagactaatggtgctgcccatcagtagtgccaacctattgccttgccaaccatcctaatggccacaatgatgctaatgatgatggcagtgttgatgctggatatgttatttgtctcactggagcagcagtggattcccttgacatccttggctgaaacgtgcrgtgaagtagaaaccttaattggcgcaatgctggtaggcaagggggaaattcacagcaaacctaagcccttcctctgtaggacgggaggcgaaacaatagcaaaggcactctctaagagtgcatggtcctaggactctcagaacgtgctcatctcccctcactcagtccccaacatgtttcaggtttatttagcttttcatattttcatgaaaaaggcacaataacagccaagtacattttccaaccattgagttctacccagtctgtg

SEQ ID NO: 554754 - DNA, 545 bp, Homo sapiens
caggggggaaaggtatgaagagaagagtgtttgcctgcagcaggtctgatgaaatgagctcctccagggctcacgcttttagctccagactgtccattttgaaaaatcactaagaagactaatggtgctgcccatcagtagtgccaacctattgccttgccaaccatcctaatggccacaatgatgctaatgatgatggcagtgttgatgctggatatgttatttgtctcactggagcagcagtggattcccttgacatccttggctgaaacgtgcagtgaagtagaaaccttaattggcgcaatgctggtaggcaagggggaaattcacagcaaacctaagcccttcctctgtaggacgggaggcgaaacaatagcaaaggcactctctragagtgcatggtcctaggactctcagaacgtgctcatctcccctcactcagtccccaacatgtttcaggtttatttagcttttcatattttcatgaaaaaggcacaataacagccaagtacattttccaaccattgagttctacccagtctgtg

SEQ ID NO: 554755 - DNA, 535 bp, Homo sapiens
ggaaggaggaagagaggaggccagagggaggccttacagttcacgtatacttagagctgggttttgttattttttgttccgtttccttgtttcattgctccgaggaaacagtagaaataacaaaatcacaaacatgggaacattacaaataaagtcagttttattggtctttttgctccagcctcccacagctgagcctgtctgacttatcccctgtctgactcgttccccggcctctttggggagcaggaggggagctcaggcaatccatgcttggagaaagtcgagagtgtttttaggaggctggtgctgacagaggcatgcagctctggctcccggcctcttcttggggccacactggccagcacccaggcacagccatcatggcgcctgccccagtcaccctgctggcccctggggcagcatcctcaatgtcttgcagccagcccggtgcaaataaacaggaagacttcrgggaaaaactcctgcttggcataggctactcccagtcaccatctgggacacgtcatgatga

SEQ ID NO: 554756 - DNA, 557 bp, Homo sapiens
atatcaaagaatggattttgttttagagagtcacttcattattttttttccaggatagccatatacttcaaaactcttctgctttacttgaaagctttttcaactcccaagacaagtcatttaagctgagagaaacagggtgtatggaaaatagcactaatcagagacatatgacacctaccttttagtcttggccttatcactaattagtggtgtgaccttgggaatgtccyttctatctcttgacctcggtatttcatctgcggaatgagggagctactagattatccctgaggttactttgtgctcttacagtctaagtttagtagaaagtttgagtagacagataggcccaattcttgataaatattggggaatatacaaagaatccctgtgttcttccttcccagtgcattatccttcaggcctgactgaatcctcacaccacaagtttaactgcttgggctccatatccaatccaagacccatagtcctaagcagacttttctagttggcacagatttgttcctctcacagactactccccatcaaaatat

SEQ ID NO: 554757 - DNA, 1384 bp, Homo sapiens
tttctgcaaagcaggcataggctatgacagtgagagaaaggaaaagcagcaagttttaaaaattgaaagagtgagtgggagtagaaagggaggtaaatgcattgacatggtcaagggtctgtaacatagaagcaggctgtaaggatgtctcagggggaattggggaataagtcaggggaggtgtgctcacggagagccagaacagcatgctttaagtaagatgggatcattgttatcatccataggcattctcttgaccaattctcaaggtctatgcccagcctagggagccaggaaggcctcgataggggaggatggtgtagagatcaaaaggaacaaaagacttggcacaaggaaaaattacacaaactgatggggtgatccagaggtaacaattaaaatgtgcattagaaaattgccaattttttgctgtcaagtatctatcctctttcctcatgaagaaatacccttccacctgtgtgatgtggtcttgggcatgggtgattccaagtacctcccttctattaccatcttccatcacagaagctgacaggagccagatccttgttcctcccataccttgccatcctagaaaatgggcattgggccctaagctaagccactcagattccagggctttgaatactgaacacatagaacaaggatgtgggaactggtggaggctgcagtgggaataagagaacccttggttccttctgattttctaagcctgggtctgatattctcattgattctctgagctcttcagatccttctagtgtatgccctttctgcttaaaattgtcagagacagtttctattgcttgcaatcaaaatctctgactgatgcacattgcatgacagacagtcagaggatgagagcaaatttagggtgtccacaagggcaatattcaaccgactttaaaatagagatcagactaaaagtcaagaacacagagaaagatgttatttgtaggggcgaaatggggagacaaaacttagaaagttgtgggcatcaataggtgtaggagagaggaagacaacacatacattggcagtggttttgaaaaggataaggggtttctagccacccagagcttactatctagcagacaaaaggccgctgcataaacaatcaccctcaaatatgataaatgctayacttaagaatatgagctttgcagtcaaattattacattcaaatcccaacctttatgagttacataaattttctgcacctaagttcccttaattttgaaataagataataatttatacatggaaaacgattacaatagtgcagaaaaactaatacatactaaaaaaagttagttctttttatagagagtagagcatgttctggggaagcataaagccattcact

SEQ ID NO: 554758 - DNA, 579 bp, Homo sapiens
taattggccaaacttacttgggtaagttctgaatagtagacggtaataatgcacaaatgttaatttcctggatttgatggatgtgctgtggttatgtgtgataatctcttctgcaggaaatacatattaatgtattaagaggtgatgcagcatcaggttgactattcttcaatgggtgaggacaactgtgtctttgtatacttctacaaagcattgtataagtttgtcattgtcccaaaatttaaatattttaaacaaaaaatagagtctctataagaaaagaaaataattaaaggaaatgggtaaaagatttgaacrgatacttgaccaaaagtgatatctgagtggcaaataagcatatgaaaagatgacctcattagtcattagagaaatgcgaatcacaaccagatggaaatatgactacacatgtattgtaatgttatcaaatggaaaagattgtcaatgtcaagtgttggaagataaattatagaaactggaactttcacacagtgcttttgagaatatggtataatacggcactttggaaaacagcttggcagttttaaaaaatatacttcc

SEQ ID NO: 554759 - DNA, 513 bp, Homo sapiens
cattttggtgtaaaattatacaagtagattttggaaatagtccaggaaaaactaattttcatgttcttttataaatcataagtgaattatcttttatttggtatcatcttatgtcaatcaaatgctagactgtccataatgaagcccaagactcaaaagcttaaaatgattttaacctattctaaacaaaaggcttacataagttctctaagttgtaaacctctgtctctataaatttgattcagaaatcatgatacagattttttggtacagttgaccctcgaataacacaggtttggactgcatggcttgygtgggtccacttatacgggattccttttcatccaaatgcagatgaaaaatacagtattctagggatgtacacccacatatatggacggttgacttttgctatacagaagttctgcagggctgactgtgggcttgagcgtgctcagattttgttacacataggggtcctggaacccatccctcgtttatatggagggatgg

SEQ ID NO: 554760 - DNA, 560 bp, Homo sapiens
atgagaaattcctggatgccatcagagatctactgaatcagaatctttgtgggtggagaccaggaatctacattttgattagtatccaagtgattcatctacaccattaaattttcaatctattcttataacacttataacctgcatttyttattttccagagtcctaaagattaagaagagaggtaagttatgtgcaccaactaatataacaaaatgtacagcgtggttaagtaccctaaggaatgttcaaacaaattactagttcaaacgaaactggggcaggagagatcacttattcccataagtaatcagtgaattctcccagcaaaagatgatagaagtttttcatgaaggtgtgactatggtcaagttttcagctttcactggtagctttggcaaaagctgatctttccagaatcataggggattgtgtttactctattgtggtcttaggcatcatgatagcaagaaattcaccagtcatccatcagacaaatttggggtcttttgtttttagtgaccagaattctgaaattctaaatcattgtattttttgtt

SEQ ID NO: 554761 - DNA, 638 bp, Homo sapiens
tggaggtgtgtgtactccagtatgaagactgctattctagaattatttagccctcacrtctaggatgcctaaactggaaattcctttgttattcttactaagcccctaatttctcattcattatcttcactaatacgttttttttttacaaggctttttaggttttataagtctataaacttctcctcttagcttttgtctaatccataatctcccacaaaatttgttaaattgcatcatgagaccagccctccctccctcctgccccttgattattcctgggctggccctctagtaatgcttcagcttgttttctatcatatttctctttctctctcctttatagctcatgctgctcaggtcacttgtgttgctgcctctcctcacaaggactctgtgtttctttcatgcagcgaggtaagagatagctccttcttccctaaacacactccagccatccataggccaaagtctctagtggggagactttctggcctgcaactgctcctttggattatgaaatcctttttctgttccaccttcctctaggacaatagaattttactctgggatacccgctgtcccaagccagcatcacagattggtgagtctgagattcattggtgggagaatagtac

SEQ ID NO: 554762 - DNA, 514 bp, Homo sapiens
tcacctcaccaatggtctcaactgctccacgtsgtggtggccacttctctggtcctggcatccagaatagacctggcttgacaggagagagggtttcttgaaaaaccaagccccacctcagagttcatgtcaaaaccacttgattacttccagggtaaaggttgctgggtctctgtccagcatcagtgagaaataaggagctggtggtgttactgccatttgcattttgcccagacgcatggatatgggagacttccataccagtccaaagcccctgccaaggacaggccacgagggggcccagttcctcaaaatgcttcctttaggtctttcaaggattcttggccccagagtttccaaaagacctagatgaccggaaacactttggtgatgtgatgcaagtcaaatcaggagttagcacaaggagagatattccatgcaaaagtataattctagaatcccggagtgaggtaggcctggctatcagcagaaatcagtaatcctatcacactgc

SEQ ID NO: 554763 - DNA, 514 bp, Homo sapiens
tcacctcaccaatggtctcaactgctccacgtggtggtggccacttctctggtcctggcatccagaatagacctggcttgacaggagagagggtttcttgaaaaaccaagccccacctcagagttcatgtcaaaaccacttgattacttccagggtaaaggttgctgggtctctgtccagcatcagtgagaaataaggagctggtggtgttactgccatttgcattttgcccagacgcatggatatgggagacttccataccagtccaaagcccctgccaaggacaggccaygagggggcccagttcctcaaaatgcttcctttaggtctttcaaggattcttggccccagagtttccaaaagacctagatgaccggaaacactttggtgatgtgatgcaagtcaaatcaggagttagcacaaggagagatattccatgcaaaagtataattctagaatcccggagtgaggtaggcctggctatcagcagaaatcagtaatcctatcacactgc

SEQ ID NO: 554764 - DNA, 679 bp, Homo sapiens
tggtgacagagaacagaaggatggttaccagaggctgggaagtatattgggggtgtaggaggtaggtgaggatggttaatgggctaaaaaaacaaaagttagaaaaaatgagtaagacctagtatttgatagcacaacaaggggactatagtcaatagtaatttaattgtatattttggaataactaaaagastataattggattatttgtagcacaaaggctaaatgctttagaaatagataacccattttccatgatgtgattattatgctttgcatgcccatatcaaaaccactcatgtaccctacaaatatatacacctactatctacctacaaaaattaaaaataattaaaaattgtttaaaaatatgaacacaaatatgaatattacagacaaacatacacaaactacaaagagccaaacaattaaaatatagtcaacctcattatatgtaaagataaaaaaatgtacaacttttttaaatttttattttattttcagaggtacaggtgcaggtttgttatataggtaaattgcatctagtgggtgtttggtgtacagattatttcattactcaggtaataagcattgtacctcataggtagttattcaatcctcaccctccaaaaatgtataaatgtttaaagaacaagaaataatattttatttatcaaat

SEQ ID NO: 554765 - DNA, 630 bp, Homo sapiens
agtaacaggacggggtgtcagcatctcaacacctgcatcaaaacctacatattgttgaattcaatccggttataaaataatcctatagtattataatactatcccagtttccagaacgtgcrtgtgtgtgtgtgtctgtgtgtgtgtgtgtgagagagagagagaaagagagaggctattaacaaaaatgctaacaacagctattgcttttactaaggaaggttttcaactttgttctattatctatattttctgcatataaagtataacttttataataagaggaaaaaatatatttaattctcacttattcagtccaaagggctttagaaataactgtttatacttcccaaatttgaagggaagaaaatctatgtttccaagaaatacagttttattactttaaaaaatgcttaaatctcttttatttacttaaagacacaattttttcccactgtttatttcgacatgcttccttaaaaatacgaccaatatttctaggactgaagtatgagctttgcatactcaagcatgacatctaggtatgattttaaagaaaccaattatggggaagagttttcaaattatgatagattccaaataattggataatgagcagataaatatttc

SEQ ID NO: 554766 - DNA, 630 bp, Homo sapiens
agtaacaggacggggtgtcagcatctcaacacctgcatcaaaacctacatattgttgaattcaatccggttataaaataatcctatagtattataatactatcccagtttccagaacgtgcatgtgtgtgtgtgtctgtgtgtgtgtgtgtgagagagagagagaaagagagaggctattaacaaaaatgctaacaacagctattgcttttactaaggaaggttttmaactttgttctattatctatattttctgcatataaagtataacttttataataagaggaaaaaatatatttaattctcacttattcagtccaaagggctttagaaataactgtttatacttcccaaatttgaagggaagaaaatctatgtttccaagaaatacagttttattactttaaaaaatgcttaaatctcttttatttacttaaagacacaattttttcccactgtttatttcgacatgcttccttaaaaatacgaccaatatttctaggactgaagtatgagctttgcatactcaagcatgacatctaggtatgattttaaagaaaccaattatggggaagagttttcaaattatgatagattccaaataattggataatgagcagataaatatttc

SEQ ID NO: 554767 - DNA, 630 bp, Homo sapiens
agtaacaggacggggtgtcagcatctcaacacctgcatcaaaacctacatattgttgaattcaatccggttataaaataatcctatagtattataatactatcccagtttccagaacgtgcatgtgtgtgtgtgtctgtgtgtgtgtgtgtgagagagagagagaaagagagaggctattaacaaaaatgctaacaacagctattgcttttactaaggaaggttttcaactttgttctattatctatattttctgcatataaagtataacttttataataagaggaaaaartatatttaattctcacttattcagtccaaagggctttagaaataactgtttatacttcccaaatttgaagggaagaaaatctatgtttccaagaaatacagttttattactttaaaaaatgcttaaatctcttttatttacttaaagacacaattttttcccactgtttatttcgacatgcttccttaaaaatacgaccaatatttctaggactgaagtatgagctttgcatactcaagcatgacatctaggtatgattttaaagaaaccaattatggggaagagttttcaaattatgatagattccaaataattggataatgagcagataaatatttc

SEQ ID NO: 554768 - DNA, 630 bp, Homo sapiens
agtaacaggacggggtgtcagcatctcaacacctgcatcaaaacctacatattgttgaattcaatccggttataaaataatcctatagtattataatactatcccagtttccagaacgtgcatgtgtgtgtgtgtctgtgtgtgtgtgtgtgagagagagagagaaagagagaggctattaacaaaaatgctaacaacagctattgcttttactaaggaaggttttcaactttgttctattatctatattttctgcatataaagtataacttttataataagaggaaaaaayatatttaattctcacttattcagtccaaagggctttagaaataactgtttatacttcccaaatttgaagggaagaaaatctatgtttccaagaaatacagttttattactttaaaaaatgcttaaatctcttttatttacttaaagacacaattttttcccactgtttatttcgacatgcttccttaaaaatacgaccaatatttctaggactgaagtatgagctttgcatactcaagcatgacatctaggtatgattttaaagaaaccaattatggggaagagttttcaaattatgatagattccaaataattggataatgagcagataaatatttc

SEQ ID NO: 554769 - DNA, 607 bp, Homo sapiens
taccaaaactctttgaggtgattattgtatacactcccatttacagatgaaaaactgaggtttaaggaaaagatgtgtatgcccaaatttcttaatgactaaatggcagcagaccaggactgtcttgactccaaagaacatgttctaatactgtacagcttcagactccttcatgagagctgtgatgctcaataatatatgtcaggatatgaatacttagactcattccagaccatgtcataagccttaracctttttcatttgtgtttatagatagtgaccttttagtgcagtgacaatttcttaccacacagcaatctgcatgcaaggaattgctaatatctgctttgctcagaaggaagcttgtatgtagcattaattatggcaccattaatccattcagttatttattgaaactattatttgttgagtttctgctacatgcttggaagtttcatgtgttatctcctttaaactcactgtaaaaggcatgaggataccaattttctatatctgcagtaattttcccagggttacgtagctcctaactggatgtagtgtcttggattcagacccagctgtttgtctccgaagtctataccaaact

SEQ ID NO: 554770 - DNA, 629 bp, Homo sapiens
cgtgcagttcttcaatggaaaaaaacctggaaccgtttgcacggtactgacttgggaaaatctggaaagttttcctttctccctccttgcaattcttagggcttgtaacttccattcaacttttctgctcaactattttcacttttccccacaggccaactatatcagtaaggattcaatttagctgctctagcagaaacctggttacagtggtttaagcaaataagaagtttatttttctcccataacaaggagtctggggtaggcagacctgagttattgcagatactcaaccaagctctttatttcttcctgctctaggatccttagcacaagacatctgcccacaagacatctgycatcgtggttacaagatggctgcccattcctacaaattgagtagaaagaagggtgcagggcaacatgaaaaaggcagatgtcagctgtgtctttctccttttcaagaggctttcagaatgtcctctgcttatatttcaacttctgcttatgtctcaatggcctaaactatgttacatagccatcccttgctacaaggtagttctgagaaaatggtgattttatgttaagcacattggctttcaaattagaattagagtcctgttcataag

SEQ ID NO: 554771 - DNA, 629 bp, Homo sapiens
cgtgcagttcttcaatggaaaaaaacctggaaccgtttgcacggtactgacttgggaaaatctggaaagttttcctttctccctccttgcaattcttagggcttgtaacttccattcaacttttctgctcaactattttcacttttccccacaggccaactatatcagtaaggattcaatttagctgctctagcagaaacctggttacagtggtttaagcaaataagaagtttatttttctcccataacaaggagtctggggtaggcagacctgagttattgcagatactcaaccaagctctttatttcttcctgctctaggatccttagcacaagacatctgcccacaagacatctgtcatcgtggttacaagatggctgcccattcctacaaatygagtagaaagaagggtgcagggcaacatgaaaaaggcagatgtcagctgtgtctttctccttttcaagaggctttcagaatgtcctctgcttatatttcaacttctgcttatgtctcaatggcctaaactatgttacatagccatcccttgctacaaggtagttctgagaaaatggtgattttatgttaagcacattggctttcaaattagaattagagtcctgttcataag

SEQ ID NO: 554772 - DNA, 606 bp, Homo sapiens
attataatataaacagtataaataataccaactatttgaaggtaaaaagcatgtgcttaatcgtacttatttaaaagaaaataggtcaaccaaatgaaaagaaaaggcgaaaagtgactggatgagcaagcctcttcactccccagacctccatcatctcttctgcaaaatkaagggatcaggtgaaatgatctgaatatcagagatttataacactttaatgattctaaaactgccttaagaactgcacagtaaattgtggaagaataatgattctgaatttcagatctggttaaatgccagtcttttgcaaatatgggacacttaactctctcttttgcaaaaaatacattgatgtgagaaatcatctgccaaaatattatgaaattcaatcaataaaatatagatgcaaatatgttttgagtttagaaagatgatttagatatcatgagtttaaaatgaaagtattaaacattctagagttttaatccagaaatagtaatttaaaagatggctagcaagttaatattttataaaaatgcaaattaatttaatagtattattcataaagcaatctacatatgtaatttgatattatatacaaaa

SEQ ID NO: 554773 - DNA, 627 bp, Homo sapiens
tgagaagtggcgtttttttgttttatagttttttggcagggtctcactctgttgcccatgctagagtgcagtgatacgatctcaactcactgcaaccttgcctcctgggctccagcgatcctaccgcctcatcctcctgagtagctaggagtacaggcaggtgccagcacacctggataattcttatattttcagtacaggtgtggtttcaccatgttgcccatgctagtctcgaactcctggactcaagtgatacacatgcctcagtctcccaaagtgctgggattacaagcatgagccactgcactggcctattttctattcttaaaacagacgtcaagtccttaaaaccaaaaactgggagtgaccttgaaaagcttaatgtctgctcagagcagtttttgtaataaaatatatacatatatatatatatatatatatayatatatatatacacatacatgtatatatatatttttttttagacggagtctcactctgtcgcccaggctggagtgcagtggcgtgatctcggctcactgcaagctccacctcctgggttcacgccattctcctgcctcagcctcctgagtagctgggaccacaggcgcctgccatcacgcccgg

SEQ ID NO: 554774 - DNA, 627 bp, Homo sapiens
tgagaagtggcgtttttttgttttatagttttttggcagggtctcactctgttgcccatgctagagtgcagtgatacgatctcaactcactgcaaccttgcctcctgggctccagcgatcctaccgcctcatcctcctgagtagctaggagtacaggcaggtgccagcacacctggataattcttatattttcagtacaggtgtggtttcaccatgttgcccatgctagtctcgaactcctggactcaagtgatacacatgcctcagtctcccaaagtgctgggattacaagcatgagccactgcactggcctattttctattcttaaaacagacgtcaagtccttaaaaccaaaaactgggagtgaccttgaaaagcttaatgtctgctcagagcagtttttgtaataaaatatatacatatatatatatatatatatatatatatatatatayacatacatgtatatatatatttttttttagacggagtctcactctgtcgcccaggctggagtgcagtggcgtgatctcggctcactgcaagctccacctcctgggttcacgccattctcctgcctcagcctcctgagtagctgggaccacaggcgcctgccatcacgcccgg

SEQ ID NO: 554775 - DNA, 627 bp, Homo sapiens
tgagaagtggcgtttttttgttttatagttttttggcagggtctcactctgttgcccatgctagagtgcagtgatacgatctcaactcactgcaaccttgcctcctgggctccagcgatcctaccgcctcatcctcctgagtagctaggagtacaggcaggtgccagcacacctggataattcttatattttcagtacaggtgtggtttcaccatgttgcccatgctagtctcgaactcctggactcaagtgatacacatgcctcagtctcccaaagtgctgggattacaagcatgagccactgcactggcctattttctattcttaaaacagacgtcaagtccttaaaaccaaaaactgggagtgaccttgaaaagcttaatgtctgctcagagcagtttttgtaataaaatatatacatatatatatatatatatatatatatatatatatacayatacatgtatatatatatttttttttagacggagtctcactctgtcgcccaggctggagtgcagtggcgtgatctcggctcactgcaagctccacctcctgggttcacgccattctcctgcctcagcctcctgagtagctgggaccacaggcgcctgccatcacgcccgg

SEQ ID NO: 554776 - DNA, 627 bp, Homo sapiens
tgagaagtggcgtttttttgttttatagttttttggcagggtctcactctgttgcccatgctagagtgcagtgatacgatctcaactcactgcaaccttgcctcctgggctccagcgatcctaccgcctcatcctcctgagtagctaggagtacaggcaggtgccagcacacctggataattcttatattttcagtacaggtgtggtttcaccatgttgcccatgctagtctcgaactcctggactcaagtgatacacatgcctcagtctcccaaagtgctgggattacaagcatgagccactgcactggcctattttctattcttaaaacagacgtcaagtccttaaaaccaaaaactgggagtgaccttgaaaagcttaatgtctgctcagagcagtttttgtaataaaatatatacatatatatatatatatatatatatatatatatatacacatayatgtatatatatatttttttttagacggagtctcactctgtcgcccaggctggagtgcagtggcgtgatctcggctcactgcaagctccacctcctgggttcacgccattctcctgcctcagcctcctgagtagctgggaccacaggcgcctgccatcacgcccgg

SEQ ID NO: 554777 - DNA, 627 bp, Homo sapiens
tgagaagtggcgtttttttgttttatagttttttggcagggtctcactctgttgcccatgctagagtgcagtgatacgatctcaactcactgcaaccttgcctcctgggctccagcgatcctaccgcctcatcctcctgagtagctaggagtacaggcaggtgccagcacacctggataattcttatattttcagtacaggtgtggtttcaccatgttgcccatgctagtctcgaactcctggactcaagtgatacacatgcctcagtctcccaaagtgctgggattacaagcatgagccactgcactggcctattttctattcttaaaacagacgtcaagtccttaaaaccaaaaactgggagtgaccttgaaaagcttaatgtctgctcagagcagtttttgtaataaaatatatacatatatatatatatatatatatatatatatatatacacatacatgtatatatatatttttttttagacggagtctcactctgtcgcccaggctggagtgcagtggcgtgatctcggctcactgcaagctccacctcctggrttcacgccattctcctgcctcagcctcctgagtagctgggaccacaggcgcctgccatcacgcccgg

SEQ ID NO: 554778 - DNA, 681 bp, Homo sapiens
taggcaacctatcaaaaccctgtctctacaaaaaaaatttaaaaattagccagtcatggctgtgcgtggtggctcacgcctgtaatcttagcactttgggaggccaaggcgggtggatcacgaggtcaggagttcgagaccagcctggccaacatggtgaaaccccgtctctactaaaaatacaaaaattagctaggcaccatgatgggcgcctgtaatcccagctacttgggaggctgaggcaggagaattgcttgaacccgggatgcrgaggtttcaatgagccaagatcatgccactgcactctagcctgggtgacagagcaagagtccttctcagaaaaaaaaaaaaaattagccagtcatggtggtgtgcacccatagtcacagcaagtgggaggctgaggtggaagcatcacttgaaccagggaggtcgaggttgcagtgagccgtgactgcactccagcctgggcagcaaaataaggtcctgtctcaaaaacaaataaataaataaataaaaatctggtatacaaatattaggttgctcggtgtaatcataccttaggatgtatgtacaattgctttgcaaatctatagagaagtgtgattacgtctgagaaggagggaaggaaggaacattgggtacagtttagtaaagagtcaggatcctgcagtttaccca

SEQ ID NO: 554779 - DNA, 681 bp, Homo sapiens
taggcaacctatcaaaaccctgtctctacaaaaaaaatttaaaaattagccagtcatggctgtgcgtggtggctcacgcctgtaatcttagcactttgggaggccaaggcgggtggatcacgaggtcaggagttcgagaccagcctggccaacatggtgaaaccccgtctctactaaaaatacaaaaattagctaggcaccatgatgggcgcctgtaatcccagctacttgggaggctgaggcaggagaattgcttgaacccgggatgcagaggtttcaatgagccaagatcatgccactgcactctagcctgggtgacagagcaagagtccttctcagaaaaaaaaaaaaaatyagccagtcatggtggtgtgcacccatagtcacagcaagtgggaggctgaggtggaagcatcacttgaaccagggaggtcgaggttgcagtgagccgtgactgcactccagcctgggcagcaaaataaggtcctgtctcaaaaacaaataaataaataaataaaaatctggtatacaaatattaggttgctcggtgtaatcataccttaggatgtatgtacaattgctttgcaaatctatagagaagtgtgattacgtctgagaaggagggaaggaaggaacattgggtacagtttagtaaagagtcaggatcctgcagtttaccca

SEQ ID NO: 554780 - DNA, 681 bp, Homo sapiens
attgccaatccttgataggttggaggaatgtgactggaataggaacagaaccaaaacctatcttgcaagattcctttaggaatcaagtaggatgacttatttaaagtacctagtattttaaagtgctcattatgcagttagcacaaattacagtataaaacccagtagaagagcacagccttaaaatcatgacaattagatttccacttatgtcatttcctggttgtgtcacctggagcaaattcctgcccctctctgagtttccacattggaaaacraggattaaagaccaatcttgaagtgttgtttgaggtcttaactgtggctgcatttaataagacatagttcaaaacaagaaaagaggtcatctaccatccctggaaggatcagagaacttggagaaacatcttccagttttgataccacactctacaagggtcactgccaaatctgggagggttgaaggaaagtggccaggagggagggaaaagaactgtattggccagcgttctccagagaaacagaatgaataggagagctgtatatatattataaagaattcattgatgtagttatggaggctgagaagtcccaagatctgtagtaagtaagatggagactcaagagctttgatggtgtagttccagtctgagtccagggcctgagaaccaggacatctgg

SEQ ID NO: 554781 - DNA, 681 bp, Homo sapiens
attgccaatccttgataggttggaggaatgtgactggaataggaacagaaccaaaacctatcttgcaagattcctttaggaatcaagtaggatgacttatttaaagtacctagtattttaaagtgctcattatgcagttagcacaaattacagtataaaacccagtagaagagcacagccttaaaatcatgacaattagatttccacttatgtcatttcctggttgtgtcacctggagcaaattcctgcccctctctgagtttccacattggaaaacaaggattaaagaccaatcttgaagtgttgtttgaggtcttaactgtggctgcatttaataagacatagttcaaaacaagaaaagaggtcatctaccatccctgraaggatcagagaacttggagaaacatcttccagttttgataccacactctacaagggtcactgccaaatctgggagggttgaaggaaagtggccaggagggagggaaaagaactgtattggccagcgttctccagagaaacagaatgaataggagagctgtatatatattataaagaattcattgatgtagttatggaggctgagaagtcccaagatctgtagtaagtaagatggagactcaagagctttgatggtgtagttccagtctgagtccagggcctgagaaccaggacatctgg

SEQ ID NO: 554782 - DNA, 525 bp, Homo sapiens
cagtaaaacccatactggacttctggyccacagaactctaagacaatgcaattgtattgttttaagccactaaatttgctataattttttatggcagcaaaacccaaaacaaaacacaaaaacacacacaaaaaaacctaacaccatttgttatgaattaaagacctcagtttccaaattctaaaaagtcacccaaacatggcagatttttctaatcaacgagaatagttgacacttattttagcaactattctaggaccatcacagacattttttgaatcactgtagtactatgttctttgaaagcaattacatatgatccctcacttatgatggttcaacctatgatttttcaactttatgatggtgcaaaagtgatatgtattcagtagaaactgtcctttgagcacatatccaaccattctgtttttcacttttactatagtattcaataagttatgtgaaatattcaatactttattatgaaataggctttgtgttagattattttgcccaactgtaggc

SEQ ID NO: 554783 - DNA, 573 bp, Homo sapiens
gcttttggatgacttagtgtttgagacccaagcagaaactttggaaagastcccttcatcaattagcctcctgaaaagtacttagtatacattggttatgcacctggtgtggtacatacaaaagaacaacccttgtgaaataaacaggcctttcagcctctccacttctccttggcatactatgttcacttagcaggacagaaaaaggaggaagctgtcagaagctggccccttgctctgtctggagtttgtttccattaattcctgtactttctgggctttctctccctctatgctcacaggtcccagttcctggatcaaaacttggaagtgaaatgaagctgagtaaggcttgagtgagtagccacactcagtggtctcactgtatgggaaagattcttcacctgtttgaaaacaagatgcctttaaaaatctaataaaagctacatccctcctgcaccctccccaccaaaaaaattcatgtcttctcaaaagacatttcaacaaatttagttaaataatctaattgacttttacttgcgattcatgaatcaggcagcatctcgtctaaaa

SEQ ID NO: 554784 - DNA, 573 bp, Homo sapiens
gcttttggatgacttagtgtttgagacccaagcagaaactttggaaagagtcccttcatcaattagcctcctgaaaagtacttagtatacattggttatgcacctggtgtggtacatacaaaagaacaacccttgtgaaataaacaggcctttcagcctctccacttctccttggcatactatgttcacttagcaggacagaaaaaggaggaagctgtcagaagctggccccttgctctgtctggagtttgtttccattaattcctgtactttctgggctttctctccctctatgctcamaggtcccagttcctggatcaaaacttggaagtgaaatgaagctgagtaaggcttgagtgagtagccacactcagtggtctcactgtatgggaaagattcttcacctgtttgaaaacaagatgcctttaaaaatctaataaaagctacatccctcctgcaccctccccaccaaaaaaattcatgtcttctcaaaagacatttcaacaaatttagttaaataatctaattgacttttacttgcgattcatgaatcaggcagcatctcgtctaaaa

SEQ ID NO: 554785 - DNA, 512 bp, Homo sapiens
tccacatcaatgacaaggggagctccagatacaaatcactcrgtctttctaagcctcagtttccacagctataaaagagaaataatcatgtctacttcactgcagtggttgtagagatttaattagatactatggagcaagtatacaatgccttgcttataaaattgctaatcatatctgctataattattattgtacatatttactgactagccattaataagctatttgcaagaaaataattatgtaacattgttaaatattgaccctgggttgggcattagactaagcacttttcataacttctttagttctccaataaccctataaggtgggtaccgttaaaatacttaatttgtacgtgaggacacctccacataattttcttggccacagcaacatagcgtttctcctaccacctactgggaagcacacatgttgcttcctttgcctaatataaccctttcacaacctgccctaacccttatattcataattgtatcctcctgacc

SEQ ID NO: 554786 - DNA, 512 bp, Homo sapiens
tccacatcaatgacaaggggagctccagatacaaatcactcggtctttctaagcctcagtttccacagctataaaagagaaataatcatgtctacttcactgcagtggttgtagagatttaattagatactatggagcaagtatacaatgccttgcttataaaattgctaatcatatctgctataattattattgtacatatttactgactagccattaataagctatttgcaagaaaataattatgtaacattgttaaatattgaccctgggttgggcattagactaagcacttttcataacttctttagttctccaataaccctataaggtgggtascgttaaaatacttaatttgtacgtgaggacacctccacataattttcttggccacagcaacatagcgtttctcctaccacctactgggaagcacacatgttgcttcctttgcctaatataaccctttcacaacctgccctaacccttatattcataattgtatcctcctgacc

SEQ ID NO: 554787 - DNA, 564 bp, Homo sapiens
tgagtgtgtctggtgtgctgaagagagtcaaaatgagagtaatattgagtatacagttgttgacccagacccatcattctagatatatcaaattgtgaagcttttgtgtttttttttttgagatgaagtttctctcttgttgcccaggctgcagtgcaatggcacaatctcggctcaccacaacctccrcctcccgggttcaagcaattctcctgccttagcctcccgagtagctgggattacaggcatgtgccaccactctggctaattttgtatttttagtagagatgaggtttctccatgttggtcaggctggtcttgaactcctgacctcaggtgatccacctgccttggcctcccaaagtgctgggattacaggcgtgagacacagtgccaggccaagattttacaagaaactacattttccaaagattgtcattctgaagaagaaaaatgataagaataaatttatatacatgagcatatcagacattttcaagaagttctcttacttatgtgttttaatcgcctcctattcactcagttggtgacagagggattccc

SEQ ID NO: 554788 - DNA, 545 bp, Homo sapiens
tccctctcctaggactacagagacatcattgacactccaatggattttgctaccgttagagaaactttagaggctgggaattatgagtcaccaatggagttatgtaaagatgtyagacttattttcagtaattccaaagcatatacaccaagcaaaagatcaagggtatataattacattattttcttttatgactagattaagttagaggagtgtgttaaatgactaaatgttgctttacttaaaatttaggtcaaagttaactttctgttacattcttaatgttgtcctactggaaaaagaaattatacctttctactcagctccttgtatgaaataacattgatgttatctttgatgtctgggaatggttacttttcttgaagtagtgcggttgatgcaaattgtcctggtatgcaccagagccatctggccttgagttttctagctattatctgccttgtggagcatttttgcgaagatttttacaaataagtaaaaatataatttaacactctgaccagacatgacatcacaaaggagtg

SEQ ID NO: 554789 - DNA, 628 bp, Homo sapiens
taatttatcctaataatacatattaaatctccttggaatatacattgaatactttcatttttaaagctcatgagctcatttactctaacaacatatttcctttaataaagcctccaatatatttatcttctgtacctgaattttctaaacttctggtcctgtgtattcaataacaaagggacataccttttgatggctgcttaacacgtgaaaatgtcatttactatagaaattcagccaaacagaaaggattaccagtttttgtagtcatacactttaatagattcaagacttctggcatgaggcatcaccaagttaagtgagagactgaaaaattaaagattagaagtccaacaaagttttatttatttwatttatttatttatttatttttgagacagaattatggtcttgtcacccacgctggagtgcaatggcacgatctcggctcactgcaacctctgcctcacaggttcaagcaattcttatgcctcagcctcccgagtagctgggattacaggcgtctgccaccatgcccggcttatttttgtatttttagtagaaactgggtttcaccatcttggccaggctagtctcaagctcccaacctcaggtgatctgcccacct

SEQ ID NO: 554790 - DNA, 714 bp, Homo sapiens
  misc_feature 491, 492, 493, 494, 495, 496, 497, 498, 499, 500, 501, 502,503, 504, 505, 506, 507, 508, 509, 510, 511, 512, 513, 514,515, 516, 517, 518, 519, 520, 521, 522, 523, 524, 525, 526,527, 528, 529, 530, 531, 532, 533, 534, 535, 536, 537: n = A,T,C or G
  misc_feature 538, 539, 540, 541, 542, 543, 544, 545, 546, 547, 548, 549,550, 551, 552, 553, 554, 555, 556, 557, 558, 559, 560, 561,562, 563, 564, 565, 566, 567, 568, 569, 570, 571, 572, 573,574, 575, 576, 577, 578, 579, 580, 581, 582, 583, 584: n = A,T,C or G
  misc_feature 585, 586, 587, 588, 589, 590: n = A,T,C or G
agtataaactgatacagctactttatagaatattacattatagaataaagttgtgagtatgtatatgcagtgactcagcatcttcattgctagtatgtactcaagagaaacttacaggagtggactaggaagtaaatacaaaatgattacaacattgtttgttatatcaaaaaataaaaaagacacccaattttccagcaaaaaaaataagtaaaaataaatcctggtgtattctaacaatggaataatatatagcmattaaaataaatcaactattactgtacatatgaatgtaagtatcagcaaaacatattgtttagtgaaaaagaagctgaagaagaatatatacaatatggttacgtttatatgaagtccaaaaacttgcaaaataaagaaatgtatttagaaatagatgcacatgtgagaaaaactagaagaaaattaatgaaaggataaaagggatagcagtaattctgagtagttgaagggannnnnnnnnnnnnnnnnnnnnnnnnnnnnnnnnnnnnnnnnnnnnnnnnnnnnnnnnnnnnnnnnnnnnnnnnnnnnnnnnnnnnnnnnnnnnnnnnnnntttcatgtatttaatgtattttttgcataattaaatattatgcaataaaaatgagaaaacaaaaaagtagaaaatgataaattacaataaatggagaaaaaattataatctagttgagtaatgg

SEQ ID NO: 554791 - DNA, 714 bp, Homo sapiens
  misc_feature 491, 492, 493, 494, 495, 496, 497, 498, 499, 500, 501, 502,503, 504, 505, 506, 507, 508, 509, 510, 511, 512, 513, 514,515, 516, 517, 518, 519, 520, 521, 522, 523, 524, 525, 526,527, 528, 529, 530, 531, 532, 533, 534, 535, 536, 537: n = A,T,C or G
  misc_feature 538, 539, 540, 541, 542, 543, 544, 545, 546, 547, 548, 549,550, 551, 552, 553, 554, 555, 556, 557, 558, 559, 560, 561,562, 563, 564, 565, 566, 567, 568, 569, 570, 571, 572, 573,574, 575, 576, 577, 578, 579, 580, 581, 582, 583, 584: n = A,T,C or G
  misc_feature 585, 586, 587, 588, 589, 590: n = A,T,C or G
agtataaactgatacagctactttatagaatattacattatagaataaagttgtgagtatgtatatgcagtgactcagcatcttcattgctagtatgtactcaagagaaacttacaggagtggactaggaagtaaatacaaaatgattacaacattgtttgttatatcaaaaaataaaaaagacacccaattttccagcaaaaaaaataagtaaaaataaatcctggtgtattctaacaatggaataatatatagcaattaaaataaatcaactattactgtacatatgaatgtaagtatcagcaaaacatattgtttagtgaaaaagaagctgaagaagaatatatacaatatggttacrtttatatgaagtccaaaaacttgcaaaataaagaaatgtatttagaaatagatgcacatgtgagaaaaactagaagaaaattaatgaaaggataaaagggatagcagtaattctgagtagttgaagggannnnnnnnnnnnnnnnnnnnnnnnnnnnnnnnnnnnnnnnnnnnnnnnnnnnnnnnnnnnnnnnnnnnnnnnnnnnnnnnnnnnnnnnnnnnnnnnnnnntttcatgtatttaatgtattttttgcataattaaatattatgcaataaaaatgagaaaacaaaaaagtagaaaatgataaattacaataaatggagaaaaaattataatctagttgagtaatgg

SEQ ID NO: 554792 - DNA, 538 bp, Homo sapiens
gaaacagggctgaaaagcttcaataaaaacttccatgtgaaggatgaagaatgggaatcacgatctgcagtgaatgtgaaatcctacctaacaaggatatcaagcccctcctcsccttgagtttgctgtctggaaggcactccctggtctactgttctctgtgccatatcagtatcttctgtgctcattaacatcgatggccatgcttgcaaatgcttagatatcttaagagaacccttggacagaatttactttacagaatttgaaaaaatttgaaagtttttactgagtttttcctgaccttctctattcttgcatgttgggtaggggctgtgggtgaagataactggtcttttaatatcataattttctggaacaggaagagttacataggacctgattgagaagattgtatatcttgaacgggtgaaaatgaagctcttttgtgggtgctataaagcatattagcagagtactgtttcccaaactttaacatctgtagttgtgcattgtcgcaatgcacatgtctcataattag

SEQ ID NO: 554793 - DNA, 582 bp, Homo sapiens
gggcaccatctacactcacrtgtgactcactgcaagtcattaagatataaacattaaggtaaaagaaaaaagccttgctctagctctgcctacccaaagtaacagattgggttggtggccctgaacatactcccacttccagcccaggagtgtcctgtgtgtacagcagccatacacattcacacacattctcagtgtcaggatcggccaccttctgactacagacctcacaaccagccttcacagtgttagttcctacttcacgctgagaaggcaacagaggttgaatcaaccagtgacgcacagccagatgtggagttaaaagttatttattgaaggaagactagggatggttcacttgatccttccccaaatccatcctcaaatgcacccgagcaacaagaagactagctcagtcagtgagacgttcagccttacgcagaggctcaggagccctccagaatgagggtaagggacatctttttagaggtgcaaaggagcgattatgattcagggtgacagcatgctaactgcagggtcaataggcaaatgggattcataagcagaatggagtagggtgtt

SEQ ID NO: 554794 - DNA, 582 bp, Homo sapiens
gggcaccatctacactcacatgtgactcactgcaagtcattaagatataaacattaaggtaaaagaaaaaagccttgctctagctctgcctacccaaagtaacagattgggttggtggccctgaacatactcccacttccagcccaggagtgtcctgtgtgtacagcagccatacacattcacacacattctcagtgtcaggatcggccaccttctgactacagacctcacaaccagccttcacagtgttagttcctacttcacgctgagaaggcaacagaggttgaatcaaccagtgacgcacagccagatgtggagttaaaagttatttattgarggaagactagggatggttcacttgatccttccccaaatccatcctcaaatgcacccgagcaacaagaagactagctcagtcagtgagacgttcagccttacgcagaggctcaggagccctccagaatgagggtaagggacatctttttagaggtgcaaaggagcgattatgattcagggtgacagcatgctaactgcagggtcaataggcaaatgggattcataagcagaatggagtagggtgtt

SEQ ID NO: 554795 - DNA, 582 bp, Homo sapiens
gggcaccatctacactcacatgtgactcactgcaagtcattaagatataaacattaaggtaaaagaaaaaagccttgctctagctctgcctacccaaagtaacagattgggttggtggccctgaacatactcccacttccagcccaggagtgtcctgtgtgtacagcagccatacacattcacacacattctcagtgtcaggatcggccaccttctgactacagacctcacaaccagccttcacagtgttagttcctacttcacgctgagaaggcaacagaggttgaatcaaccagtgacgcacagccagatgtggagttaaaagttatttattgaaggaagactagggatggttcacttgatccytccccaaatccatcctcaaatgcacccgagcaacaagaagactagctcagtcagtgagacgttcagccttacgcagaggctcaggagccctccagaatgagggtaagggacatctttttagaggtgcaaaggagcgattatgattcagggtgacagcatgctaactgcagggtcaataggcaaatgggattcataagcagaatggagtagggtgtt

SEQ ID NO: 554796 - DNA, 987 bp, Homo sapiens
taggagataaagaacatgattaaatttcacaggaggaagtaagaaatccacttagcctgttgctaatctcttaaaattctttcagtgaacactgataaagatataaaatctgggattatctgatattctttcttctactcttcttaattcttcccactgatttaagccctacaagcattggaatgcctagaaacacagctagagaataattacattacagttcatgtaaccctgaacacctttgacattaaaaagcaataccacttgttgtcataacatactctcgagttgccacatggaaagcaaactattcctaataaatatactaatacagaatttaaaagagaaagtaatccacttgaaacaccagtgattctgcaaatgcagggttagagtaaattaaatactttttaaaataaggtcagttacatatactttttgggcatttacatatactttttagtacttaatgaaagaaattagtggagattgatctgaatctttaatttgttcaaaatgtcttttatctagcaaaaaaatcccaacttatgattttttattttttgacaaatactgctagmtatttttccttatgcatatgaaaatatgcatgtgtgtgtcatgtgtgtatatatatatatatagtagcaaagtgtttattaaatgtgcattatttgcctacttatagtctttgtattatttcatcatcataaaagttacaggctttaaaagagggccacaatccaataagctatcaattgaaatatactagaattcaaagtatgcaaagtcttgtcaatagaattactcatacaaaactcttctttacctataacatgtttatctgtttcccaaaaatcaatgtttaaaaaatatatcatttttctctaacatgcctcttttcaatatgtgtgaatcttcagaactatttttttcttttcacatgacctttatatataagcatatattttctaaagaatttagtca

SEQ ID NO: 554797 - DNA, 987 bp, Homo sapiens
taggagataaagaacatgattaaatttcacaggaggaagtaagaaatccacttagcctgttgctaatctcttaaaattctttcagtgaacactgataaagatataaaatctgggattatctgatattctttcttctactcttcttaattcttcccactgatttaagccctacaagcattggaatgcctagaaacacagctagagaataattacattacagttcatgtaaccctgaacacctttgacattaaaaagcaataccacttgttgtcataacatactctcgagttgccacatggaaagcaaactattcctaataaatatactaatacagaatttaaaagagaaagtaatccacttgaaacaccagtgattctgcaaatgcagggttagagtaaattaaatactttttaaaataaggtcagttacatatactttttgggcatttacatatactttttagtacttaatgaaagaaattagtggagattgatctgaatctttaatttgttcaaaatgtcttttatctagcaaaaaaatcccaacttatgattttttattttttgacaaatactgctagctatttttccttatrcatatgaaaatatgcatgtgtgtgtcatgtgtgtatatatatatatatagtagcaaagtgtttattaaatgtgcattatttgcctacttatagtctttgtattatttcatcatcataaaagttacaggctttaaaagagggccacaatccaataagctatcaattgaaatatactagaattcaaagtatgcaaagtcttgtcaatagaattactcatacaaaactcttctttacctataacatgtttatctgtttcccaaaaatcaatgtttaaaaaatatatcatttttctctaacatgcctcttttcaatatgtgtgaatcttcagaactatttttttcttttcacatgacctttatatataagcatatattttctaaagaatttagtca

SEQ ID NO: 554798 - DNA, 1236 bp, Homo sapiens
  misc_feature 1111, 1136, 1137, 1138, 1139, 1140, 1141, 1142, 1143, 1144,1145, 1146, 1147, 1148, 1149, 1150, 1151, 1152, 1153, 1154,1155, 1156, 1157, 1158, 1159, 1160, 1161, 1162, 1163, 1164,1165, 1166, 1167, 1168, 1169, 1170, 1171, 1172, 1173: n = A,T,C or G
  misc_feature 1174, 1175, 1176, 1177, 1178, 1179, 1180, 1181, 1182, 1183,1184, 1185, 1186, 1187, 1188, 1189, 1190, 1191, 1192, 1193,1194, 1195, 1196, 1197, 1198, 1199, 1200, 1201, 1202, 1203,1204, 1205, 1206, 1207, 1208, 1209, 1210, 1211, 1212: n = A,T,C or G
  misc_feature 1213, 1214, 1215, 1216, 1217, 1218, 1219, 1220, 1221, 1222,1223, 1224, 1225, 1226, 1227, 1228, 1229, 1230, 1231, 1232,1233, 1234, 1235: n = A,T,C or G
ggaagcctgagatggcagcaaaattcctggctcccacccgcccttctggggatgcacaggaagaatatcccacaaggatctccatcctgcacattccagggcagatctgggcaatatcaaacaagagaaccagccgagctcacacttgtctggayccagtgaaagctcttgcccgactttatagcaaacaagagtgcttagaataattgctcctaattttgtttgtttatttataagtagaaaggcatgagtctttctatcctgggtaaaagccaaatcaagcaatttgattcattattcatggtgccactgaccaacttgaaattaagaaataagagctggatgaaagccaggcacagtggctcatgcctgtaatcccagcactttaggaggccaaggtgggcagattgcctgagtttaggagttcgagaccagcctgggcaacatagtgagaccccccccagctctcctaaaaaaattagccagtcgtggtggcacgtgcctgtagtcccagctatttgggaggctgaggaaagagaatcatttgaacccaggaggcagaggttgcagtgagccgggatcacgacactgcactccagcctgaaggacagaggaagactctgcctcaaaaaaataaaataaagtaaaataaaataaaataaaataagaaggaactgcatgaagacaacagctttctgtaaaattcagttcaaacctataaatctgaactatctgaactttctggttcttcctgtgtgcctagtaccgtgcatcagagcatttgttgaataaaatgataaatattcagcagcatgtttttataccaccacactctttgatggggttctttgttcactgatcccagcactggttgctttagcagacctccactcaattttctgtctataatgagtccattctatttgctttgaaagccactttaaaataagtgtgccaaagtgaaaacacaattgaccgggcaacgcattttataatttcctgcagcaactgttatcatgacttgtgattatgttagtataatcgcagagaaatagatgcaggatagcagtccttcctgatgttagatacttttcagtgacagtaggtgcanaaaaatacagttactgttaataatnnnnnnnnnnnnnnnnnnnnnnnnnnnnnnnnnnnnnnnnnnnnnnnnnnnnnnnnnnnnnnnnnnnnnnnnnnnnnnnnnnnnnnnnnnnnnnnnnnnna

SEQ ID NO: 554799 - DNA, 814 bp, Homo sapiens
ctaaagggcttgttaaaaatggacacgtctcgctcctatcctagactgactgaattagaataagtcggagcagaacacaagtctgcagttttaaaatgacatggaggaattattctgtacccaaaagcttagagcaaataatctggtaaaagccccttaaggtactgacccttcctgaagtcagaaacttctctgaagaagtaagctgttatgtaagtggtcatgttggagaagccacatggcaagggactgtaagcaagttctcagagctgagtagcctctacttaagaaactaaaaccttcagttctgcagccacaagtaaatggattttgccaacaaactgatggggcttggaagtggacctttactccatcaacatctaatgaggcttctgctgacacctagattgcacctagtgacattctaaaatagaggatagttaagcccagataagccatgcctgacttttgaatggtaaaaactgtgacatgataaatgtgcattgtgttaagccactaaatatgcttaaaaatgcaaacayagaaaatgaatagaaacacgtatagctaaccacatatgttatcacattgaatacaatactcctataatgtagagacatttaatatctatactttactgtggaggaaaaataatttttaaataaaatattatatccatggtcatatagccaacaagtaggagaagtaatatttagtaatgtttgatccaaaagtgcataagtctaggacccattctcatataagaccattaggagatcaatataatatgaattatacattcatatatataaaa

SEQ ID NO: 554800 - DNA, 532 bp, Homo sapiens
gactttcaagttggacagagtaaagtaaaagatgtcttcaactcattttttttttcaggtatgctagtctgattcagtgttagaaagtcaatcagtgtagtayatctaatctacttttcagacagaaaaaagaaatataatgatgcagaaaagcttttgaaaaaattccaacacccttccatgataacaattcttagcaaattaagactaaaagggaatgtcctcaacttcataaagaaaatctacaaaaaaagtattgataatagcatacttaatcatgagaggctgaatatattccccctaagatcaggaacaaggcaaaaatattttgtctcaccattcctatacaaggaagtcctagcaagttcaaaaaacaaactgtatatcagttgtacatgaagaaataaaattgcctttattcagagattatattactgtcttcagagtctatacaaaagattctacaaaaatttctggaagtaatgagtgattataggaaagtcataggaggcaaagtcagtttactatagtc

SEQ ID NO: 554801 - DNA, 532 bp, Homo sapiens
gactttcaagttggacagagtaaagtaaaagatgtcttcaactcattttttttttcaggtatgctagtctgattcagtgttagaaagtcaatcagtgtagtatatctaatctacttttcagacagaaaaaagaaatataatgatgcagaaaagcttttgaaaaaattccaacacccttccatgataacaattcttagcaaattaagactaaaagggaatgtcctcaacttcataaagaaaatctacaaaaaaagtattgataatagcatacttaatcatgagaggctgaatatattccccctaagatcaggaacaaggcaaaaatattttgtctcaccattcctatacaaggaagtcctagcaagttcaaaaaacaaactgtatatcagttgtacatgaagaaataaaattgcctttattcagagattatattactgtcttcagagtctatacaaaagattctacaaaaatttctggaagtaatgagtgattataggaargtcataggaggcaaagtcagtttactatagtc

SEQ ID NO: 554802 - DNA, 965 bp, Homo sapiens
ctatacttgtttttgaaaatgcaaatttgttctaatgggattgagatattaggggaacaatctaaatgcaacgggagttttctgttttcttatgtgtgatttcatctggaaaacactagccaaacgcagctgcacacaacagcctaggaatccgcgaaacgcacccacaatgacctcaaaggacagctggctacctcagtgcaccatgtctgggccacacctgtccacaccacgtgtccatccttccctccacctcacataacccccttcatggtctcatagtaaggcaggagctgcaatcctgccacaggcaaacttcagggattttccaagacagagtgcctatgtattgcagtatttatgtgtctcttacccatgttctatatgtaaaactgtgctgccctttgtattatgttcctgtctttggttttaatgtgtccctgatgcaaggttagactgtttgccccaacctcattatcctcatgagccccatggtttgggtgctgtcgcatagtaaggaagaaataggtcaccttacagcaacactacatctacacccacgtaggaaactttgtcccacccacatgaagtacctttgtcaggcaaggtgtggtggctcatgcctgtaaacccagcattttaggaggtcgaggcaggtggatcacttgaggccaagagttcaagaccagcctggtcaacatgacgaaatcctggctctactgaaaaatatacaaaaattagctgggcatggtggtgcacacctttaatcccagctacttgagaggctaaarcacgagaatcacttgaacctgggaggtggagattgcagtgagccgagatcgcaccactgcactccagcctgggccacagagcaagactctgtcaccaaaaaaaaaaaaaaaaaaagaaaaagaaaagaaaagaaatgaaagaaatgcacttgtttagcaacttgcttcacttgc

SEQ ID NO: 554803 - DNA, 965 bp, Homo sapiens
ctatacttgtttttgaaaatgcaaatttgttctaatgggattgagatattaggggaacaatctaaatgcaacgggagttttctgttttcttatgtgtgatttcatctggaaaacactagccaaacgcagctgcacacaacagcctaggaatccgcgaaacgcacccacaatgacctcaaaggacagctggctacctcagtgcaccatgtctgggccacacctgtccacaccacgtgtccatccttccctccacctcacataacccccttcatggtctcatagtaaggcaggagctgcaatcctgccacaggcaaacttcagggattttccaagacagagtgcctatgtattgcagtatttatgtgtctcttacccatgttctatatgtaaaactgtgctgccctttgtattatgttcctgtctttggttttaatgtgtccctgatgcaaggttagactgtttgccccaacctcattatcctcatgagccccatggtttgggtgctgtcgcatagtaaggaagaaataggtcaccttacagcaacactacatctacacccacgtaggaaactttgtcccacccacatgaagtacctttgtcaggcaaggtgtggtggctcatgcctgtaaacccagcattttaggaggtcgaggcaggtggatcacttgaggccaagagttcaagaccagcctggtcaacatgacgaaatcctggctctactgaaaaatatacaaaaattagctgggcatggtggtgcacacctttaatcccagctacttgagaggctaaagcacgagaatcacttgaacctgggaggtggagattgcagtgagccgagatcgcaccactgcactccagcctgggccacagagcaagactctgtcmccaaaaaaaaaaaaaaaaaaagaaaaagaaaagaaaagaaatgaaagaaatgcacttgtttagcaacttgcttcacttgc

SEQ ID NO: 554804 - DNA, 573 bp, Homo sapiens
tatttatttttgcattcccagtgtatagctctcgcgcagtacacagcacaagtaagtgcccaataaacaattgcttaatttaataggcccctgcttcctctgcatctttctttccagagttgccagcccagatactcagtcttctttccattggtagggcctgggccaccactgggacagtgtaactgagaccttcagagcctcacttgcctagtgtcccaagcccagcagttctgcttttagcccaggctcactgagcaacttgccgtagagcaagtgatcaatccattttaagcacaaacagatgcatatagttgaatatcaagaagttagccttaggcctggaagaaggaaattattaaatagcaatatcttaaaatctatctttgcctttggatacaatctctattggaggaaagggcaaggtttccaatatagagtttctgaatttattgtgcaatgcaacaaatactaaagtgttacctccaggttctccccgatagytattttaaaagaaacctctgtggcaggaggattcctccgtggtgaattacatttcctgtgtctgtagtt

SEQ ID NO: 554805 - DNA, 643 bp, Homo sapiens
  misc_feature 324, 325: n = A,T,C or G
tttctttgaggtccagagacaccagaaacattttcttcctgttcttgaaaaaagaaagaaaaaaaacaaccgcctcataaaaaggaattttgtatgtcaaaaaataaaaaaagatattggcactattactcacaatgtcatgtcttttcaatacggctgtttgtatttgagccaaaaaaaatttcttgtccctaaagttcgcaacgttatttatttaatgctggttacagtgttacacaagatgctgcctcattcattgtgccacttaagaatgctgcctgccaatgactttaactcagaatttttcctccctttaaagcccgnngatgtcttttgtgggyaaatattacccaaagtatgcaggagcatgtgaaatatcattttaaaaataaaaggtcatgttaaatattccctttgggttttattgtataaacatagaaaacaacttccaactgtgtttttttctttaacattttagttgttactttatctctgcattcttaaatgtgatctctttgaatgctggccatacccttgcttttcaggtaccgacgaccagcaaggaggatagatgagaaatccattgcattagtaagtggtgtggtcccatttctgcaaggaatgtctattctatctccagcat

SEQ ID NO: 554806 - DNA, 643 bp, Homo sapiens
  misc_feature 324, 325: n = A,T,C or G
tttctttgaggtccagagacaccagaaacattttcttcctgttcttgaaaaaagaaagaaaaaaaacaaccgcctcataaaaaggaattttgtatgtcaaaaaataaaaaaagatattggcactattactcacaatgtcatgtcttttcaatacggctgtttgtatttgagccaaaaaaaatttcttgtccctaaagttcgcaacgttatttatttaatgctggttacagtgttacacaagatgctgcctcattcattgtgccacttaagaatgctgcctgccaatgactttaactcagaatttttcctccctttaaagcccgnngatgtcttttgtgggcaaatattacccaaagtatgcaggagcaygtgaaatatcattttaaaaataaaaggtcatgttaaatattccctttgggttttattgtataaacatagaaaacaacttccaactgtgtttttttctttaacattttagttgttactttatctctgcattcttaaatgtgatctctttgaatgctggccatacccttgcttttcaggtaccgacgaccagcaaggaggatagatgagaaatccattgcattagtaagtggtgtggtcccatttctgcaaggaatgtctattctatctccagcat

SEQ ID NO: 554807 - DNA, 631 bp, Homo sapiens
aaattagctgggcgtggtggctgacgccagtaatcccagctactggggaggctgaggcaggagaatcacttgaaactggaaggtggaggttacagtgagccgaggtcgcgccactgcactccagcctgggcaaaagagtgaaactctgtctccaaaaaaaaaaaaaaaaaaaaggtgttattcattttagacaggacttatgtttttcaccrtgtaaagaaaaatgttacaggtagcgaaatggaataaactgaaattcatcacgtatataggcaaagaaacagtacactgctgttggaagtttcaacaaaccttttatttatgccattaatataatcattattataattcacacagatgggatttatattatcctctagaaatgtttacagcttcagaggtttcactgccttctcaagaagaacaatgttttctttattctgaagttggtgtagggcaacaaggaaagagaccaagagatacatccaggtgcacatttttttctcttagtttatataatcaaaatttgtttgtttctaagaataaggagatcatcacagaaatggtttaccccaagtcaggaagacaaggtcagctcagagtgggcataaaattgcttaaagcatctcag

SEQ ID NO: 554808 - DNA, 1349 bp, Homo sapiens
tcacatttctgaacaaagtgggaaatgttcatttaaaaatatgattaagctggacatgagatggtgtgtgccataatctcagctcctcgggaggctgaagtgggaagatggcttgagtccaggagttcaagactagcctgggcaacacagtgtgatcccatctcaaagaataaattaatttattttaaaaatatgattatattctggggatctaataaaaacgcaaaattaatgcctacaattttggtctaattgatatattttaataattatttttataaacttaaaatgcctagttatatcattaatctactttccaaatcttaacatctcctttaaactgtaaaaaatattttaaatagaagtgctttataaagatattaaaattaatactttacttataatcacacataattttaaattttacattaaaataacaaggccattaaaacattcatcaattttaaaaaatcaaagtatagaatactagatcatctcttttcatggtagacagctgtttgcttagattacagatacttcccaaaatatccayttaatgtcacagtgactgagatttttttacctgatgttccagcttcatggtttttttcttcaggtttgccatttgtcttgaaagctcttttttcatccacctcatcatccccccaccatgacggctgcccatataatggagtaccacggggcatagcagaaatatctggaaagaggtgggaaaaatctgtctaaagcagatgaaacagaaaagaatacactttcgcagaatgctagaactgcctgcttgattaattaaattaaaaagcaaagtatagtcttgatagctaaaatgtactctatactgaattaactcggtatttgtggaagatcttatacaatgttggacatgactaaataaataagatttccactgggtggtatctaagtaacacaacgtgctacatatctcaatagctttttgttaaggtgttatgagttgtttgctatataactgaactgcttgtaacaaatggcattttacttgaatttagacagaaagtgacctcagaagaacaagtttgttgaaactagacaataatcaactagggaagaacaaaaccagtctgatcagaaatggctcattaagactaaatgtaaaagacaaagctaaagtaaattttcacatgagtagctattttccaatttttttccagcccaaggacacaaaaactagttcttaacagaactaacatttttttgtttgagcaaatgtagtaatgcctattcatttaaaaacttgtttctgtttgaatgggattatttatgtaaggcattttataacgtgcctagaattg

SEQ ID NO: 554809 - DNA, 1349 bp, Homo sapiens
tcacatttctgaacaaagtgggaaatgttcatttaaaaatatgattaagctggacatgagatggtgtgtgccataatctcagctcctcgggaggctgaagtgggaagatggcttgagtccaggagttcaagactagcctgggcaacacagtgtgatcccatctcaaagaataaattaatttattttaaaaatatgattatattctggggatctaataaaaacgcaaaattaatgcctacaattttggtctaattgatatattttaataattatttttataaacttaaaatgcctagttatatcattaatctactttccaaatcttaacatctcctttaaactgtaaaaaatattttaaatagaagtgctttataaagatattaaaattaatactttacttataatcacacataattttaaattttacattaaaataacaaggccattaaaacattcatcaattttaaaaaatcaaagtatagaatactagatcatctcttttcatggtagacagctgtttgcttagattacagatacttcccaaaatatccacttaatgtcacagtgactgagatttttttacctgatgttccagcttcatggtttttttcttcaggtttgccatttgtcttgaaagctcttttttcatccacctcatcatccccccaccatgacggctgcccatataatggagtaccacggggcatagcagaaatatctggaaagaggtgggaaaaatctgtctaaagcagatgaaacagaaaagaatacactttcgcagaatgctagaactgcctgcttgattaattaaattaaaaagcaaagtatagtcttgatagctaaaatgtactctatactgaattaactcggtatttgtggaagatcttatacaatgttggacatgactaaataaataagatttccactgggtggtatctaagtaacacaacgtgctacatatctcaatagctttttgttaaggtgttatgagttgtttgctatataactgaactgcttgtaacaaatggcattttacttgaatttagacagaaagtgacctcagaagaacaagtttgttgaaactagacaataatcaactagggaagaacaaaaccagtctgatcagaaatggctcattaagactaaatgtaaaagacaaagctaaagtaaattttcacatgagtagctattttccaatttttttccagcccaaggacacaaaaactagttcttaacagaactaacatwtttttgtttgagcaaatgtagtaatgcctattcatttaaaaacttgtttctgtttgaatgggattatttatgtaaggcattttataacgtgcctagaattg

SEQ ID NO: 554810 - DNA, 858 bp, Homo sapiens
ggctggcaagggtgttcatttttttgagtttagaaaatttaataagtaggccataagaatattcttataccagattctagacccgttgccaccttaagcaaatgttccagacttgatgtgatgttaatgagtttcatgtttttaaataaggtaagtctggcatgttgatctttgaagaaataccagcacaaatattaacttagtttactacttaaatgctgatcagcttgcagtagtaatacatttacatgaggttatatagtgttgtttaaactagatttccaggcttactgaaaaaaatttaaaagaaaccaaaaaagtagctagtatttacatctaagactgctgaatcatgtctgatagactctaaagtgttagaaaagtgtcccacatttgaaagacacgtcaaaattttgtggtcctttattttataagttatttgatgttagggtaatgataggataattatctttattggcaattgtttttatcaaaagggtagcatcctaattcctaataggttattatgtgcaagtatactaacacgaattaacaattgttaaagaaaagcacagtaagtactcccaatttttkgtcttcaaaataatatacacacttttcttgatcgataaggtgcttattcccatataaagaggtcttaacagacacaattgtttatacctaattcaacctattttcatctcacttattcctatactgcatatattctgtctgaataaaattgcattttctttataagtgacagttacacagtcttttctccttatacccaggtgatacatgttgttccaagatacccactggatgcctgacaccacagataattctaaaacctaa

SEQ ID NO: 554811 - DNA, 858 bp, Homo sapiens
ggctggcaagggtgttcatttttttgagtttagaaaatttaataagtaggccataagaatattcttataccagattctagacccgttgccaccttaagcaaatgttccagacttgatgtgatgttaatgagtttcatgtttttaaataaggtaagtctggcatgttgatctttgaagaaataccagcacaaatattaacttagtttactacttaaatgctgatcagcttgcagtagtaatacatttacatgaggttatatagtgttgtttaaactagatttccaggcttactgaaaaaaatttaaaagaaaccaaaaaagtagctagtatttacatctaagactgctgaatcatgtctgatagactctaaagtgttagaaaagtgtcccacatttgaaagacacgtcaaaattttgtggtcctttattttataagttatttgatgttagggtaatgataggataattatctttattggcaattgtttttatcaaaagggtagcatcctaattcctaataggttattatgtgcaagtatactaacacgaattaacaattgttaaagaaaagcacagtaagtactcccaattttttgtcttyaaaataatatacacacttttcttgatcgataaggtgcttattcccatataaagaggtcttaacagacacaattgtttatacctaattcaacctattttcatctcacttattcctatactgcatatattctgtctgaataaaattgcattttctttataagtgacagttacacagtcttttctccttatacccaggtgatacatgttgttccaagatacccactggatgcctgacaccacagataattctaaaacctaa

SEQ ID NO: 554812 - DNA, 858 bp, Homo sapiens
ggctggcaagggtgttcatttttttgagtttagaaaatttaataagtaggccataagaatattcttataccagattctagacccgttgccaccttaagcaaatgttccagacttgatgtgatgttaatgagtttcatgtttttaaataaggtaagtctggcatgttgatctttgaagaaataccagcacaaatattaacttagtttactacttaaatgctgatcagcttgcagtagtaatacatttacatgaggttatatagtgttgtttaaactagatttccaggcttactgaaaaaaatttaaaagaaaccaaaaaagtagctagtatttacatctaagactgctgaatcatgtctgatagactctaaagtgttagaaaagtgtcccacatttgaaagacacgtcaaaattttgtggtcctttattttataagttatttgatgttagggtaatgataggataattatctttattggcaattgtttttatcaaaagggtagcatcctaattcctaataggttattatgtgcaagtatactaacacgaattaacaattgttaaagaaaagcacagtaagtactcccaattttttgtcttcaaaataatatacacacttttcttgatcgataaggtgcttattccyatataaagaggtcttaacagacacaattgtttatacctaattcaacctattttcatctcacttattcctatactgcatatattctgtctgaataaaattgcattttctttataagtgacagttacacagtcttttctccttatacccaggtgatacatgttgttccaagatacccactggatgcctgacaccacagataattctaaaacctaa

SEQ ID NO: 554813 - DNA, 709 bp, Homo sapiens
cacagtttggttatgcatcaatgtctttgaatgactattggcttttctatcttacttccttctcctgaccatttttgagggaaaggttctgaaataaaaggcctatttgtttccatttttgttcaattacttttcaacacattgtctaaatgtcatccatgtagatgtagggagtaaatagtcctcatctgttsttctgcttgggtagaagtgccctctcattaccttttcaagattatgttgtctcttaagaaaatatgtttcaattgcagaaagcagctgatataatatttttgaagaaattttctttaagactataagattgagataggatgacaattgaacttctgttctaactgaattgggtctgcaaaacaataaaaatagttttcagaatctttaactttacaaagccagactcataaaaccaacaagaggaatcgtgacatttctgtcatgccatactaaggacttaatcttcaaccaggactaaacatttggttgtattgtttgttcagagacttccgtatgagtaggagacaatgccatatggtcatcacagctatgtggccatagcaactacatgattatttgaataattcccttttccgtttaatttttcttcctctacaactgagtgccattttacaggcaactctcaatttgcagcagatggttgtacagtttgtgaatttttcatgcttcttcc

SEQ ID NO: 554814 - DNA, 585 bp, Homo sapiens
atgtgcaacattttctaatttgcctctaaattctaaaatgagccaagttacagaggcaaggagagtttgatgagtgattcatggatatttatgtacataatatgtctgctatttaatgactttctcatcttaggcaaatcacaagatcttcctaaatgacatttatttccttaatataggggtaataatagtatttcttatctcacaatgttgttaagagaatcagagataattaacaggaaagccttggcaattataaataaaatatatgttttacttttccttttttaaaagaaaccttattgtttaaagagatatgaacaktgtatacaatcaaaagcaattctgattataatacaataatcaagaacatacaaaaacagacaataatggagaataaactttcattgtttatattatatataaatgcaggtaatctatattaagcaaaatgttgtaattaggtagtgccttagataaaattgattaacattatagagtcttcacttaaatcttcaaggatttccagctaacaagatcatctgaaagataaaatgataaagtaactttcctttcaaaactgac

SEQ ID NO: 554815 - DNA, 585 bp, Homo sapiens
atgtgcaacattttctaatttgcctctaaattctaaaatgagccaagttacagaggcaaggagagtttgatgagtgattcatggatatttatgtacataatatgtctgctatttaatgactttctcatcttaggcaaatcacaagatcttcctaaatgacatttatttccttaatataggggtaataatagtatttcttatctcacaatgttgttaagagaatcagagataattaacaggaaagccttggcaattataaataaaatatatgttttacttttccttttttaaaagaaaccttattgtttaaagagatatgaacagtgtatacaatcaaaagcaattctgattataatacaataatcaagaacatasaaaaacagacaataatggagaataaactttcattgtttatattatatataaatgcaggtaatctatattaagcaaaatgttgtaattaggtagtgccttagataaaattgattaacattatagagtcttcacttaaatcttcaaggatttccagctaacaagatcatctgaaagataaaatgataaagtaactttcctttcaaaactgac

SEQ ID NO: 554816 - DNA, 585 bp, Homo sapiens
atgtgcaacattttctaatttgcctctaaattctaaaatgagccaagttacagaggcaaggagagtttgatgagtgattcatggatatttatgtacataatatgtctgctatttaatgactttctcatcttaggcaaatcacaagatcttcctaaatgacatttatttccttaatataggggtaataatagtatttcttatctcacaatgttgttaagagaatcagagataattaacaggaaagccttggcaattataaataaaatatatgttttacttttccttttttaaaagaaaccttattgtttaaagagatatgaacagtgtatacaatcaaaagcaattctgattataatacaataatcaagaacatacaaaaacasacaataatggagaataaactttcattgtttatattatatataaatgcaggtaatctatattaagcaaaatgttgtaattaggtagtgccttagataaaattgattaacattatagagtcttcacttaaatcttcaaggatttccagctaacaagatcatctgaaagataaaatgataaagtaactttcctttcaaaactgac

SEQ ID NO: 554817 - DNA, 603 bp, Homo sapiens
gtgggacaaagaagagaaaactggattgacaatcagaaagactctgttaatagattatgtccagagacgacatccagaagaaaccagaagaaagccagattataaggtgttaaggaattggtaactgatgatcaaatggaggaagaaaataatgcattatgctttctagaatgtttgcaaatcaaccttttaattaatcagaaaattattaaatcacttatatccarccagaaattggaaatgtcactgaagcctggattacaaacagccaaccataacagagttatgctctggctgctggagtagggttgaggagagagaatccgagtaacagatgccgtgagactccatgtaaggagatccagcctagtatctgaaggtcagggtaggcttctcagaggtagtgactgtcgagaaatggaggtgggtataagaaaagaagaagaactggggaagacaggcagctcaggtaagagaaaaagaatatcaagtagctggaaaatggcccacgtcaggaccctggaaaggaaaatattgtgagggggttggtgagaaatcaggaaagtgatgagaggtaaggcttaaaaggaaatcatggccttg

SEQ ID NO: 554818 - DNA, 603 bp, Homo sapiens
gtgggacaaagaagagaaaactggattgacaatcagaaagactctgttaatagattatgtccagagacgacatccagaagaaaccagaagaaagccagattataaggtgttaaggaattggtaactgatgatcaaatggaggaagaaaataatgcattatgctttctagaatgtttgcaaatcaaccttttaattaatcagaaaattattaaatcacttatatccaaccagaaattggaaatgtcactgaagcctggattacaaacagccaaccataacagagttatgctctggctgctggagtagggttgaggagagagaatccgagtaacagatgccgtgagactccatgtaaggagatccagcctagtatctgaaggtcagggtaggcttctcagaggtagtgactgtcgagaaatggaggtgggtataagaaaagaagaagaactggggaagacaggcagctcaggtaagagaaaaasaatatcaagtagctggaaaatggcccacgtcaggaccctggaaaggaaaatattgtgagggggttggtgagaaatcaggaaagtgatgagaggtaaggcttaaaaggaaatcatggccttg

SEQ ID NO: 554819 - DNA, 1159 bp, Homo sapiens
  misc_feature 1058, 1059, 1060, 1061, 1062, 1063, 1064, 1065, 1066, 1067,1068, 1069, 1070, 1071, 1072, 1073, 1074, 1075, 1076, 1077,1078, 1079, 1080, 1081, 1082, 1083, 1084, 1085, 1086, 1087,1088, 1089, 1090, 1091, 1092, 1093, 1094, 1095, 1096: n = A,T,C or G
  misc_feature 1097, 1098, 1099, 1100, 1101, 1102, 1103, 1104, 1105, 1106,1107, 1108, 1109, 1110, 1111, 1112, 1113, 1114, 1115, 1116,1117, 1118, 1119, 1120, 1121, 1122, 1123, 1124, 1125, 1126,1127, 1128, 1129, 1130, 1131, 1132, 1133, 1134, 1135: n = A,T,C or G
  misc_feature 1136, 1137, 1138, 1139, 1140, 1141, 1142, 1143, 1144, 1145,1146, 1147, 1148, 1149, 1150, 1151, 1152, 1153, 1154, 1155,1156, 1157: n = A,T,C or G
cattcttcaatggcttacaaggactgctcttcaagtccttctttagtctcttttgctgattcttcttcttctaccctatacctaaaccccacatgcttatgcttatctctccttaaggcctakgtctaccttcatgactctaactaatcaactacaaataggccagtgactccacaaacttaactccacccgagactgcttttctgaattccagacacacgtttataactatgaagaaacttgtttctagttgatatctcaaatgtacttcaaaactcaacatgtccaactggagctctcatatacatattctaaaaatcaaacagtttcatgttcactatctctgcttactaaaacagcatccatcagtcagcagtcagctaagctaacactttatagtcagtataaactcctcctaattctgaatttctagatttgtcagtcaccaagtcccttgaacactagctctaaaatctcagctgttctttccatttcatttttgtggacattgccccagttcaaacaatattccacttttacctagactcatgcctgtaaagtttctcattcaacctattcgttgtccgttatttttctaaactacatatctggtttgcccacatccatgctcataatgcttttggtggttctcattgtttaaaactgtgtttcccaaactatgatactaataacttttggtgacgcagaatatgattttggtgatgtgtactttttttaatttaaaaagttttgcatataatttatattaggaaaaaatatagctagcacatcaaatctttgatttcacagacatattgctgagaatgagcaatatgttattgctcaagtataaacagtccaattaaaagtactctaagaaaaaatatcaagtacgtaaataatagtttataatggtgacaaaatttgtgtcagtggtatatagatgtttgaagtttggtagctgtcagccttctagataaaatctaaagtccttagtaggtcataaagttgttctcataatctcatcaaacctctacatagtaactttcccatagttnnnnnnnnnnnnnnnnnnnnnnnnnnnnnnnnnnnnnnnnnnnnnnnnnnnnnnnnnnnnnnnnnnnnnnnnnnnnnnnnnnnnnnnnnnnnnnnnnnnntc

SEQ ID NO: 554820 - DNA, 1159 bp, Homo sapiens
  misc_feature 1058, 1059, 1060, 1061, 1062, 1063, 1064, 1065, 1066, 1067,1068, 1069, 1070, 1071, 1072, 1073, 1074, 1075, 1076, 1077,1078, 1079, 1080, 1081, 1082, 1083, 1084, 1085, 1086, 1087,1088, 1089, 1090, 1091, 1092, 1093, 1094, 1095, 1096: n = A,T,C or G
  misc_feature 1097, 1098, 1099, 1100, 1101, 1102, 1103, 1104, 1105, 1106,1107, 1108, 1109, 1110, 1111, 1112, 1113, 1114, 1115, 1116,1117, 1118, 1119, 1120, 1121, 1122, 1123, 1124, 1125, 1126,1127, 1128, 1129, 1130, 1131, 1132, 1133, 1134, 1135: n = A,T,C or G
  misc_feature 1136, 1137, 1138, 1139, 1140, 1141, 1142, 1143, 1144, 1145,1146, 1147, 1148, 1149, 1150, 1151, 1152, 1153, 1154, 1155,1156, 1157: n = A,T,C or G
cattcttcaatggcttacaaggactgctcttcaagtccttctttagtctcttttgctgattcttcttcttctaccctatacctaaaccccacatgcttatgcttatctctccttaaggcctatgtctaccttcatgactctaactaatcaactacaaataggccagtgactccacaaacttaactccacccgagactgcttttctgaattccagacacacgtttataactatgaagaaacttgtttctagttgatatctcaaatgtacttcaaaactcaacatgtccaactggagctctcatatacatattctaaaaatcaaacagtttcatgttcactatctctgcttactaaaacagcatccatcagtcagcagtcagctaagctaacactttatagtcagtataaactcctcctaattctgaatttctagatttgtcagtcaccaagtcccttgaacactagctctaaaatctcagctgttctttccatttcatttttgtggacattgccccagttcaaacaatattcsacttttacctagactcatgcctgtaaagtttctcattcaacctattcgttgtccgttatttttctaaactacatatctggtttgcccacatccatgctcataatgcttttggtggttctcattgtttaaaactgtgtttcccaaactatgatactaataacttttggtgacgcagaatatgattttggtgatgtgtactttttttaatttaaaaagttttgcatataatttatattaggaaaaaatatagctagcacatcaaatctttgatttcacagacatattgctgagaatgagcaatatgttattgctcaagtataaacagtccaattaaaagtactctaagaaaaaatatcaagtacgtaaataatagtttataatggtgacaaaatttgtgtcagtggtatatagatgtttgaagtttggtagctgtcagccttctagataaaatctaaagtccttagtaggtcataaagttgttctcataatctcatcaaacctctacatagtaactttcccatagttnnnnnnnnnnnnnnnnnnnnnnnnnnnnnnnnnnnnnnnnnnnnnnnnnnnnnnnnnnnnnnnnnnnnnnnnnnnnnnnnnnnnnnnnnnnnnnnnnnnntc

SEQ ID NO: 554821 - DNA, 1408 bp, Homo sapiens
gatgctattgatatcctgaagccttcccttgtatacttaagcagtggtttggatgttggctgaaggagaaatgaaccccatgctgacaattagaatcttctgctgtcctagaactgtttaccacaattctgtttcttgcccttcacctattaaaataattraaagtaatggcaaaaaccgcaattacttttgcaccaacctaatcctttactttgtaccactgagagattgactactgcctgtcacaggggagagggatctcaaggcttcccaggcctgcaactttttataggatatgatcactctacaggtacctctgcctccctccttcctccaaactcttaaatcaaatttaaataataagatatactaaaatgtgtacaagcaacatcaaatgcaagctaggcttaggcaattgttctgcactttttctgctttattttgttggtacagaaaacttttaaataagtcacgggccatctgttggccttaacctcaaagcaccagggataaaagggacaccaagtttacatatctgagtaccacgaaaaactcacagtgtgctgatttactaaagctcttgaaaggaataccctgggaattaatttagctcaagatgaaattcaatttgaagtttttcttctttggctttgaaaatatgcaaagaaaaaaatagtactgtcatgaccattcaattatttgccatcattccttaatttgctattttcaaagtacaaatccataatatttacagagttgaaagtgccttcatacatcgccaaccattcctgaaatcaaagctctgatacaactacaaaatatcttcagttatttttctaaccaactgaagactttgttatgttttctttaaaaaatacatacaacttagagaaatttagaaggtttccatggtagcatttttgtaagctgtgtagccatggctaaagacaattttgcactggcaagctttttctttcaaattttttcattcccttatctactccattggtactgttggtgaagtcttatccttaaagtcttatgtatgttgagcactttggcttcagaattgcagataagtggcttcagaacagaagacaacacggtggaggggatctttgttgaacaatagacatagaagacattcagaaagccacatttcaaggagcaatacttctagaagtgagttggtgttttctcaaagggttggatacttgtgatagatttgagttcagacagccacaaaaattcttttcttcaatatcacaaggacctttcgggatagttttatcaaattttcctacgctaagagactcatacctgctggttgttcgattatcagtgaacagcttaaataatcggtttgatactaaattttatacagataatttcaatgataaaacaaaaa

SEQ ID NO: 554822 - DNA, 1408 bp, Homo sapiens
gatgctattgatatcctgaagccttcccttgtatacttaagcagtggtttggatgttggctgaaggagaaatgaaccccatgctgacaattagaatcttctgctgtcctagaactgtttaccacaattctgtttcttgcccttcacctattaaaataattgaaagtaatggcaaaaaccgcaattacttttgcaccaacctaatcctttactttgtaccactgagagattgactactgcctgtcacaggggagagggatctcaaggcttcccaggcctgcaactttttataggatatgatcactctacaggtacctctgcctccctccttcctccaaactcttaaatcaaatttaaataataagatatactaaaatgtgtacaagcaacatcaaatgcaagctaggcttaggcaattgttctgcactttttctgctttattttgttggtacagaaaacttttaaataagtcacgggccatctgttggccttaacctcaaagcaccagggataaaagggacaccaagtttacatatctgagtaccacgaaaaactcacagtgtgctgatttactaaagctcttgaaaggaataccctgggaattaatttagctcaagatgaaattcaatttgaagtttttcttctttggctttgaaaatatgcaaagaaaaaaatagtactgtcatgaccattcaattatttgccatcattccttaatttgctattttcaaagtacaaatccataatatttacagagttgaaagtgccttcatacatcgccaaccattcctgaaatcaaagctctgatacaactacaaaatatcttcagttatttttctaaccaactgaagactttgttatgttttctttaaaaaatacatacaacttagagaaatttagaaggtttccatggtagcatttttgtaagctgtgtagccatggctaaagacaattttgcactggcaagctttttctttcaaattttttcattcccttatctactccattggtactgttggtgaagtcttatccttaaagtcttatgtatgttgagcactttggcttcagaattgcagataagtggcttcagaacagaagacaacacggtggaggggatctttgttgaacaatagacatagaagacattcagaaagccacatttcaaggagcaatacttctagaagtgagttggtgttttctcaaagggttggatacttgtgatagatttgagttcagacagccacaaaaattcttttcttcaatatcacaaggacctttcgggatagttttatcaaattttcctacgctaagagactcatacctgctggttgttcgattatcagtgracagcttaaataatcggtttgatactaaattttatacagataatttcaatgataaaacaaaaa

SEQ ID NO: 554823 - DNA, 572 bp, Homo sapiens
taggtaggtccttttggttaagctttattaaaacattccactttaaatttgatattttagatgcatatgttatttataagatatactaattatagagaattccaggaaaacttaacccttcttcttagagatttaaaataatttttcttatatttcttattctgagaacaaagagaaaatctacttgatggcaatgggactaattgtaatttttgtggaaaagaaaagaaaaaaaggaagggttggttctaggatttcagcaaggtatttagtacagcatctaggtctgaatttccttatctgcaaaactatgcagaagatctatttgatttttctgttttttcctagctctaaagttttatccaaaaatttkcactagccgactttcttgtgaatatgtaatttttattcaccaagtggtatgataaaaatgatagtgcttataagtacaaactatgaataataaaaaatgttcttacttataaagtgaattccaagattacttttgtaaatatatcttagaatgtgattgtgagtgtgggagggtctatggctccaatgtattgatgatg

SEQ ID NO: 554824 - DNA, 590 bp, Homo sapiens
cccatgtgtccatgtcagctctctcaaagtctccatctccttctgggttcacctgccaggatcattgttgtagatatgtggagcccagcaatgtgtgaggctgccccttgctcatgtccttggagcagcttatggcarccaagacaccagtgggtttcctagccatgatgggatgacctccattaattccaggatctttttcaggccggcaatgactttttttccaggcatggatatgatacttcctggttctaaaaagttcttttccaggccttttgtgtcctttacagcagcagctgtttggggctgcaaaacaatgctatgcatatactgctgggccagatggaagggctaattccccaggctactgctccagccccacattctttatgttgcagctcaagctaagcctatggctcatacctccaagaacacattcttccttgtttacccctatttcttaacattggaatcattcaatgaactcccacctttataacatgttacattgggctgggctaccccatgaagttgtgcattttgtgcaatgcacaaatgcactgaggaattgaagatcagatgttccctgc

SEQ ID NO: 554825 - DNA, 644 bp, Homo sapiens
aggtgcttgggaaaggaagggcatactcttgccatgcacaaatttctacttcacactttaagaagggtacaattaaacaacagcaataataatagtttacttttattgagggttttctcggtgccaggccttgtgcttagaactttacatgcaatggtggttaagtgtaggctttcttcagctagaaatatgccttcctaagggatgaattagtaaatgtttctcttcagaggtggactaaggtatattaattatggaaaatagcactacatagtgaatatatgtatatatatatttgacataatatatttatatgtaattggggactaggaggcatatacatttctcaggaaagtgctaaggaatagcaaacagcttctccaggaacatttgactactcttcttagccagttatgctctgaggagtgaataaaagatgytggaaagaaagtataaattatacagattcaatccatttgtagcaataaacataatggctctggcaatattatgtgcaaattccatgaaaatgtaaattattatgaattagaaatgaactagaaatcgatgaagaattaggctaagaagcttcctttttgtttttgtgggttattttccttttgagataaggatagtgtttcccc

SEQ ID NO: 554826 - DNA, 1476 bp, Homo sapiens
tcaccccaaggctcaaggctcaggaaagctgcccaggataaatgaagtcttgtctgcatgtcccctacttgcaccacagctgagggaccctagaaagcatgctccattctgagttttatacccaggggcaacatgaaacactgagctaaagcactgtaagacatcctgttctaggagaaactggaacagagcacaggctattctggtcacttcctcttcatcccaggakattgcattctcagcacattctacagttgttctgagaactacaagggaggaaatgaggaggagctaggttagttcaaggtcacctggagaactctcctgcaactcatcacatttcaaaatgagtatatatctgtcccctcaatctgagctcctcattctgtgctccctggctcagggtactatggtgttgttctgaatgataccatgttctatcagggaaaatgaatcaagagctgtgaagttcattctagaccccttctgcttttcctcaagtttgaggggaaaagacttttgaaatccgacttcaagtagcaccaagtccatcacactgtctttatcctcaccactggtgactttcttctctcccttcctatttgtggatgaatgctacaggccctttgctttccagttcactgtcttctgatatgctttatcttctaggaggtggatcatttcaaaattcaagttttcttatgttacttcttctagctttgaaactcaacaatttcttctcttaacctttaggataaatccccaaatccaaagcctagcaaataaagccttttgttacctgaccactgcctccttctcctgtttcacctctcctcatcctcttgtgtcctctctgggttccacgcatgccaaaatatatgcccttccttggagactccacacttttccttgctacttcacctttaaaaatgtcattctctttggctggaataccctctcctctctttatcattaggttaattccatcttattttttatgaccaagctcaagtgttacctcctctgaaaagccctctgtgaacgcttgtggcatatgttaattagttaggcagatattaggactctgagcagaagtgacagtgtgacttatggaccaacactgttagtagtcaatgtgctgcttccattcctctctttctctgccatgaaaccttggagtccacacattacaaatggcatagctacaggaaggctgcccaacatgcatcagcctcaaacgagagagcaataacccttgttaagccccttaggcttcagagttgatttgttaccacagcagagcaaagtcatgctgaatagtatcacctcccactaaaatgaatagaggacctttcctttttgcctccccagcctgtctccactgcaatcgttgagttattactctgtcttctttgctagactatgggtgtcttaaggaaaaagattgctttttatctctgtggactcactgcaatg

SEQ ID NO: 554827 - DNA, 1663 bp, Homo sapiens
agagtcactgaccttttagatcagcccccacctctgactcgggtcgggggagaaagggctggctgatggggtggggtgggctaatgacacctgtcagcctccggggcctgctaggtgagggcacagaggtaggggatgtaggtgtggtgccatggcaggcccttgctgggcacagctgaagctgctctcactgctgactaccccctggacaatggcactgtcacctgcacttccagtggggtaggctgagagtcttgtgcatgcacatgcctttttctgaatatgcttttctgggacaaggcagatgttcctctagagcaaatccccagaaacaggttggccacattgtcccagctggtgccatgaggataaaagaagaggagttccctgcagatactggccccagtctcccggctcaccctaaccctgcttgactttgtcttgttgctttcctttttgaaaataagatattttccttgagcctctataagccttgtcattttccttaaagaagatatctgttggcatttcaaggagacaggatttgtgttacacactgtattagtctgttctcacactgctataaggaaatacccaagactgggtaatttataaaggaaagaggtttaattggctcatggatctacaggctgtgcaggaatcataggggcttctgctcctggggaggcctcaggaaacttacaatcatggcggaaggtgaaagggaagcaggcacatcttacgtggtcggagcaggagcaagagagacacagatgtggggtattacacacttaaatgaccagatctcgtgagaactcactcactatacagtaacaagaggatggtgctaaaccattcatgaaggatccaccccatgattcaattacctcccaccaggccccacctccaacactggggattacaatttgacatgagatttgggcagaaacactgatccaaaccatatcacatacccttctccaaggaccactacccacttcctgaacttgccaggggagaacattccctaggacctccctccaacatggggacacatttgcacagcaacaaaaggcacacagtttggagttgaacccaggcagtttccgagctgagctctgccaccctctccatgatccaaccctgggaaaatgaacccttcggaattggagtttctgtacttgcaaaatgaagttgcaaaatgtaatggcttacctgggcttacctggatgcacttagcatgcctgagcaaggctgacatttggaatgtgaaacctgacagctgtcatcactcaaaccgtgactcttcccccagtgctgggttcctggttacttgcatctgccgcatagtgtccccacaagggcaagccctgggaagtgggaagtaagaggggtccctctgcttagaggaatgtgcctgccttagaccaacctgacagcttgttctctctgatgggggcctgcaggcagcaaaagccattaggagcaatttgttgtcaccaggcaggcctgctccccctaaactgttatcaatgagcttgtcaaygcaaggcctaaccgcctttgttcttttcatctgtttttccctcagaggcctctccggaccctatggccttctcagaggagctgcaacaggctgttgtacacctgtttggctggaggc

SEQ ID NO: 554828 - DNA, 518 bp, Homo sapiens
gtttccaacttgagatcctggcatttcattgctaggttgtggtctayttcaaacccttcacaccaaactgtagataaattttgcaagataaatgcattgcagatgaccacatcgatctcttgctttagatgtagacagctggaaagtagcttagagtgcttctgtaaaagtggaagtcacaaggacttagcctaggtcaattttttacttgtcaaaaatagtacagttacatcaaagatacctagagaaactttctctaggcttgaaaaaaaaatcccttctcttccagggaagtctacttaatgtgaccacttactgcttttttactccaacctgtgtatccacatcagaactaaactcttccattacagaggactgcctctgggtccttctgataactgtgccgcggcacttctgcctgtgggtctcaaaatgactcattttcccatgagttgtgtttataatcttgtacagtttggggaattaatctgaaaaagagactgggctggcaataaaaa

SEQ ID NO: 554829 - DNA, 1390 bp, Homo sapiens
aattggccatataattaccaagttttatttttaaaaatcttttcaaaacctcaatgacatcaggagtcattgaggtgttggaaaaaaaaaagtgtttttttttttttggccagttttccctttctggttttcataatgcttatacttatctgggagcatgaggtgaaatgcattcttttacttttattttttttctttttgaggtggagtttcgctcttgttgcccaggctggagtgcaatggcgtgatctcagctcaccgcaacctccgcctcccagttcaagcgattctcccgcctcagcctcccaagtagctgggattacatgtgcccaccaccacacccggcttttttttttatatatatatttttagtagagatggggtttctccatgttggtcaggctgttcttgaactcccgatctcaggtgatccaccagccttggcctcccaaagtgctgggattacaggcgtgagccaacacgcctgacctgccaaatgtattcttaagatgcctttcataatgtgtcaatgatatttattctatccatacaatatatatatgggccatgtttttacattttctttaaaaagagtgatatatttctttaaaaacagcgatatataaagtatttaacctgattttccttttactttactaagaactttgctaataagtagatagaaattttagttttgaaagtgttctgtactttttatatatcgtttttgataacatatggtgaagatagaaaggagtatgaaagaagatgggatgtggcgatctgtcattcttttaatatcttcctgttgatctgggaccatggaatatacaccagtatgtccaaggatgatcgtcctatctggcttaaagtcaattaattttaatccagattagtttaacaatattgataaggatccagacaaattctatccaataggatgaatgttttgtaatagcagaaagattttatatctttacattctccaatgaagtcatcacaaacaacagatgactattgataatttttcaatatggctagtgtgaatgaatttttaaatttcaattaatttagatttagttacatgtggtttcctataacacagcaaagatctagattaaaccctatttcaatgttatctcatatgaaaccaatgagtatcccaagagatgttttccactgagctttattaggtactcaactatagaaaataggaggacataggcatgggcaaggacttcatgtctaaaacaccaaaagcaatggcaacaaaagccaaaattgacaaatgggatctaattaaactaaagagcttctgcacagcaaaagaaactaccatcagagtgaacaggcaacctacaraatgggagaaaattttcgcaacctactc

SEQ ID NO: 554830 - DNA, 599 bp, Homo sapiens
gctgccrttttcagtgtgtcctcatcttgtggacagcaggccagctccagtgtctttttttttttttttttttgagacggagtctcgctctgtcacccaggctggagtgcagtggcactatctctgctcactgcgacctccgcctcctggcctcaagcaatttcctgcctcagcctcctgagtagctgggattacaggcagccaccaccatgcccggctaatttttgtatttttagtagagacggggtttcaccatgttggccaggctggttttgagctcttgacctcaaatgatccaccaggctcagcctcccaaagtgctgggattacaggtgtgagccaccccgccaggccatccagtgtctttctcttcctatcaggaccctaatctcatcatgggggccccaccctcatgaaatcatttagacctaattacctagcaaacgtcccaccttcaaataccagaatattgggaactggggcttcagcatatgaattcattggtggaggggagcactaagatttagtccataacaaagacaatttttatactgctcccttctgcctcttcatgtaaagctatcccacaggggctgtgc

SEQ ID NO: 554831 - DNA, 599 bp, Homo sapiens
gctgccgttttcagtgtgtcctcatcttgtggacagcaggccagckccagtgtctttttttttttttttttttgagacggagtctcgctctgtcacccaggctggagtgcagtggcactatctctgctcactgcgacctccgcctcctggcctcaagcaatttcctgcctcagcctcctgagtagctgggattacaggcagccaccaccatgcccggctaatttttgtatttttagtagagacggggtttcaccatgttggccaggctggttttgagctcttgacctcaaatgatccaccaggctcagcctcccaaagtgctgggattacaggtgtgagccaccccgccaggccatccagtgtctttctcttcctatcaggaccctaatctcatcatgggggccccaccctcatgaaatcatttagacctaattacctagcaaacgtcccaccttcaaataccagaatattgggaactggggcttcagcatatgaattcattggtggaggggagcactaagatttagtccataacaaagacaatttttatactgctcccttctgcctcttcatgtaaagctatcccacaggggctgtgc

SEQ ID NO: 554832 - DNA, 672 bp, Homo sapiens
cattctccagccttttattatttctgttaaccccaataacttcccttattgcttaaaaaaagctctttcatatcaacagccctgatacaattattgctggtatatatagcaaaactattgacttcaatactttattttattttattttatttttttgagacagggtctcactctgtcacccagackggagtgcagtggtgcaaccatggctcactgcagcctagacctcctggactcaagcaatcttcctgccttggcctcccaaagtgccaggattacagctgtgagctaccatgacaggctttatatgttatttttatatcaggccatctcactaaacactccgtttcaatgcttgtcctgaattttgaatgttaattctaatagttttctccattgattaccctgcctcagaatttctggctattcagattatctgcaaacaatctataagtaagagaaaattttgtctcttattttcttaaatttgtgcctcttgcttcttgctcttgtattgagtaagacatccagaaaaatactgaatagaggagtgacagaatgagatttgctgtagtttttagttttggatacatataaggcttacttatatttctagattactaagcatttttaaaagaagtcagtgttgaattttatggaatgtcttttcag

SEQ ID NO: 554833 - DNA, 555 bp, Homo sapiens
aaattttatgtaatactgcacagtctgtttgcatgatgccttgtacgtagtagcaactcagtaaatactttttgaatgaactagtatagtattttaattagctagtcttcatgtactggtacaaaagaacagtgtcatcttacagctgaagtcatagaggggaaatatcccactcaagatcatataacattccaggtactcaggatgaatggtttgaggactggtctgaattcttcaaaggtttcagctgtattaacattctccatctaataaactttatcttgtcattgcattgtctgtgagattagtgatctgaaacattccatcaatacccccaccccacccaacacatacatattaaagacaaagatagaattcggaggttcttaygggaggtactgtttttctcgaaggctatgagaagaggtgctgagaaatgagttctcagccatcttgggggcccaaatatctgaaaccttccagaaatgtaactagtctgaatttgcttttctgtcaccatttgggtatttggttaatgaaagttcttaacatgca

SEQ ID NO: 554834 - DNA, 555 bp, Homo sapiens
aaattttatgtaatactgcacagtctgtttgcatgatgccttgtacgtagtagcaactcagtaaatactttttgaatgaactagtatagtattttaattagctagtcttcatgtactggtacaaaagaacagtgtcatcttacagctgaagtcatagaggggaaatatcccactcaagatcatataacattccaggtactcaggatgaatggtttgaggactggtctgaattcttcaaaggtttcagctgtattaacattctccatctaataaactttatcttgtcattgcattgtctgtgagattagtgatctgaaacattccatcaatacccccaccccacccaacacatacatattaaagacaaagatagaattcggaggttcttatgggaggtactgtttttctcgaaggctatgagaagaggtgytgagaaatgagttctcagccatcttgggggcccaaatatctgaaaccttccagaaatgtaactagtctgaatttgcttttctgtcaccatttgggtatttggttaatgaaagttcttaacatgca

SEQ ID NO: 554835 - DNA, 1716 bp, Homo sapiens
agactacagctgtgcgccaccatgcctggttaatttttttgtatttttagtagagacggagtttcaccattttggccaggctggtcttgaactcctgacctcaggtgatccacctgcctcggcctccctaagtgctgggattacaggcgtgagccaccgcacccggccagtttgggcttagaccggtattaaatggtgtgtgtgtgtgcgtgtgtgtgtgtgtgtgtgagagagacagagagagagagagagagagcgcgcgagcaggcagccaccattttgctccacagtaaacttaattccaacaattgttgaatgaaattcaaataggtaaagaagtgaagagaagagtttgaaaatttgagtgtaagctttgactcccccaaaacttaactactaatagcctactgttgatcggaagccttattgattacataaacaacatatattttgcatgtcatatatatatatatatatactgcactcttacatatatactgtactctagtaaacagagaaatgaaaatgttattacggaaaccataagaaagagaaaatacatttactattcattaagtggaagtgagtcatcataaaagtcttcatcctcattttcttcataatgagtaggtggtggaggaggagggtttagtcttgctgtctcggtggaagaggcagaagaaaattcacatataagtggaccctcacagttcaaacccatgttcaatggtcagttgtatatcagtggttgccaggggctggggaaagggaggggtatggggaatggttactagtgggtagagtttattttccaggtgatgaaaacgttctcagattagagagtagaaatggttgcatgactttgtgaatatattaaaaagtgtgcatttttaatggtggattttatagtatgtgaattatatctcagttgcggggtggtctctaggggtgcaaagttttgagggtggtagaactgggatttgaacccaaggccatgtggcagcctaggaaagagcctgtgatttcagatcttggctcagcccttcatctcgggccagccttttctgtctcagcgggcagtgaggcgtggtgggggtgggacattccctccaggccctggcgtggaggactccaagtgtggccctgctcaaaggatccgagggagcaaaggcgcagaagaagcgggagaggaggcgagggccattcttatccaagaaccccctctccctttcctgtaagaacagctaggctctttccatccccgcctttatctgctccttccaggcctgggaaggccgctggcgcttgacagcggttcccaggcgcactggccgccgggcttgcaggggcaggcacggtgcgcgcccagacttttctgggaaagcgtgcgcgaacctgctgcctggcagctcggtggctgggagcccagccctagctcacaaacgggactcttctacgcccggtggggactctggtcctacccgttggaccttgtgggcctactactgtgtgctacatcctcctgtgattctcctccctttagaaaattctttctggctcacgcctgtaatcccagtattttgggaagccgaggcaggaggatcgcttaagccrgtgaattcgaagccagcctgcgcaacacggtgagacccccgtctctacaacaaaaataataaattagccaggtgtggtggcatgcagctgttgtcccagcta

SEQ ID NO: 554836 - DNA, 614 bp, Homo sapiens
taaatgagaattaaggggggaaaaaaaggcttttctaacaagtattgagtgctagatgccaggtacagataatgcacttcacacgcattatcttttaatcctcacaataaccccataagggaggaatacaatttttatatacactttacaggtgaggaaactgaggctcaaagagctgtagccacttgcccgacatcatgtagctagttgggctgagatttgaaaggaggcctgtgagtctcagaacaatactatcctaacacataggtaagtcttagcacagtgcttgcaaaatacaaacgctaactaaacagcagccctcattatttaytgtcattattgtggatataattattatgttacaagtaattggctggtctctgtttatgtttttttaaactttgtttttttttttttttggaatactgttctgttttaaatctcctctgcagaggaaccaagagctgtgctgatccatgaaggggaagtaggtgccagccttgctcagccccacaggagcaggaagggggcagcagcaaagcacggggagtgtctctttaaaggcctggcatctctgggttgttgggatgaaggcctaaaaagcacttgtacct

SEQ ID NO: 554837 - DNA, 575 bp, Homo sapiens
gaggctgatcttgggagaaagtaaagatacaaaacctggaggtctgctgcagtaagtcctagatagatggaaagggaagtaaagcaaaattgaaagtggtctgctctggattttgtaaagaaaagaagcaacctgggagagtgagaatgtcatagacaaacctcattgcctcctctcttccccttactttacttccactaactcaggtgcatgcacatacacacacatacacacacacacacacacaatgttccaaccattcaaaatagacaccaatctatgctgctacaaaagagtcttagaggcttcccattgtgattggccatacaagttctgagacaattgcttattgaccaacctgcatgggaatgcttcaatattttaacaactattggggttatcctggtacaaactgtcttggatgtttgggccctgaaagcacgcatgatcagccctgwtcctgtgtcctttcagggcctaacatcccagaataagagaggattaaaaaacatacacaaaagttggggaaccccatctcattctgcagaaggtgcacagttggccctgaatgggga

SEQ ID NO: 554838 - DNA, 526 bp, Homo sapiens
tcagtgttgattgaaagatccaataccggtcaccattttctgcattattttctgggtagctcagtgggacacactgagagagtatggattagaagagacaggggccagagaagggggttggtaaaaataaggattgtgttgctggaggcagcaaaacatattttccctcatctaaagaaatttcccaagagatgaaccagaatgcraatgatctgtgctgaagtcctcgagtagactgtgagtttcctctagttcaatgtgtaatatgaactcctagcataatgcttgccacatagaaagctctaaaaatattccgtttatctttggtgaaaggctggagggaaaatggtatattcaacattaataaatatttaacatttaaaaaatttttccttttgtaatttaccccattgtctacctccagtgaagactaattgctagaatacttcagcctgccaatgagaaaacatgttcagcaagggaagtcgggatagtaatgtcctgtattacccttgctggagggttc

SEQ ID NO: 554839 - DNA, 526 bp, Homo sapiens
tcagtgttgattgaaagatccaataccggtcaccattttctgcattattttctgggtagctcagtgggacacactgagagagtatggattagaagagacaggggccagagaagggggttggtaaaaataaggattgtgttgctggaggcagcaaaacatattttccctcatctaaagaaatttcccaagagatgaaccagaatgcaaatgatctgtgctgaagtcctcgagtagactgtgagtttcctctagttcaatgtgtaatatgaactcctagcataatgcttgccacatagaaagctctaaaaatattccgtttatctttggtgaaaggctggagggaaaatggtatattcaacattaataaatatttaacatttaaaaaatttttccttttgtaatttaccccattgtctacctccagtgaagactaattgctagaatacttcagcctgccaatgagaaaacatgttcagcmagggaagtcgggatagtaatgtcctgtattacccttgctggagggttc

SEQ ID NO: 554840 - DNA, 1255 bp, Homo sapiens
aaagaattcaactcattctgtgaacataatttttaaaatagtatttgccataggccatttaaaacagattccccaggcaatgtagcctcactggtgtcttgcagtttctagatctccttccctaagtatagagacacagtataaacttttgtttgcaagraaaatttgtagccgttttacatcttccagcgctccttgggtcacccttgaagaaatcagatataatcttactctggtctttaaataagggaaaccagaggtgatccctggaggttcagaagactcctaagacccagataggttagagcagctctatgttactaaattggtgaattaattggtgaaaataaaagaataatatattttttaaaaaattttaaaaatgagactgccttatcactaaggatacataatggtttaatggataaataagctatttgttttttactggccatgtatgctcctgtttctttgagcttctggctcttgcttctggatccttcaccagattacatcttcgacagcccctgaaaatttggagttacctgagagtcgaagacacctgtcctacttgattcttcttacttgtacagtcatctgagaacaaaattcaaaaaggccagtcatgctttaagcaggtctcatttcccagactgcaaacaaacatggaggtctatctgggaccagagacttgactacctgatgcttgccttgattccaggatactctgaattttctcagatcttgggttgagtctttagagagcttgtctggcaggctttcctgagcccaccatgaaggtcatcatctccacttgctttgccctgagtcacagcaaaaagctaaaaatgtctttattcccacatatcatggaacacatatccactccagccaaagcctccaagtcctggcacaaggccagcacccaaacccatggctgtgtgttccaccatagctttcatgcagaacttcctcccttctccaaggagatgatagacatccgtgtcccacctaccatcaggagacagcacagtgaactcaagccttctgctactatgggcccttgggttctcaagggggaatttcatgtaaaatgctcctgaaacagctaattatctcaccaccgtgtactagtacacacagtgcctgaaccatgccaaagtcagcatgattctttatcatttttttgaagtgcgccgattaatgttacttatttaatccctagaacaatcatgcaacattcaagggctggaat

SEQ ID NO: 554841 - DNA, 1255 bp, Homo sapiens
aaagaattcaactcattctgtgaacataatttttaaaatagtatttgccataggccatttaaaacagattccccaggcaatgtagcctcactggtgtcttgcagtttctagatctccttccctaagtatagagacacagtataaacttttgtttgcaagaaaaatttgtagcygttttacatcttccagcgctccttgggtcacccttgaagaaatcagatataatcttactctggtctttaaataagggaaaccagaggtgatccctggaggttcagaagactcctaagacccagataggttagagcagctctatgttactaaattggtgaattaattggtgaaaataaaagaataatatattttttaaaaaattttaaaaatgagactgccttatcactaaggatacataatggtttaatggataaataagctatttgttttttactggccatgtatgctcctgtttctttgagcttctggctcttgcttctggatccttcaccagattacatcttcgacagcccctgaaaatttggagttacctgagagtcgaagacacctgtcctacttgattcttcttacttgtacagtcatctgagaacaaaattcaaaaaggccagtcatgctttaagcaggtctcatttcccagactgcaaacaaacatggaggtctatctgggaccagagacttgactacctgatgcttgccttgattccaggatactctgaattttctcagatcttgggttgagtctttagagagcttgtctggcaggctttcctgagcccaccatgaaggtcatcatctccacttgctttgccctgagtcacagcaaaaagctaaaaatgtctttattcccacatatcatggaacacatatccactccagccaaagcctccaagtcctggcacaaggccagcacccaaacccatggctgtgtgttccaccatagctttcatgcagaacttcctcccttctccaaggagatgatagacatccgtgtcccacctaccatcaggagacagcacagtgaactcaagccttctgctactatgggcccttgggttctcaagggggaatttcatgtaaaatgctcctgaaacagctaattatctcaccaccgtgtactagtacacacagtgcctgaaccatgccaaagtcagcatgattctttatcatttttttgaagtgcgccgattaatgttacttatttaatccctagaacaatcatgcaacattcaagggctggaat

SEQ ID NO: 554842 - DNA, 1255 bp, Homo sapiens
aaagaattcaactcattctgtgaacataatttttaaaatagtatttgccataggccatttaaaacagattccccaggcaatgtagcctcactggtgtcttgcagtttctagatctccttccctaagtatagagacacagtataaacttttgtttgcaagaaaaatttgtagccgttttacatcttccagcrctccttgggtcacccttgaagaaatcagatataatcttactctggtctttaaataagggaaaccagaggtgatccctggaggttcagaagactcctaagacccagataggttagagcagctctatgttactaaattggtgaattaattggtgaaaataaaagaataatatattttttaaaaaattttaaaaatgagactgccttatcactaaggatacataatggtttaatggataaataagctatttgttttttactggccatgtatgctcctgtttctttgagcttctggctcttgcttctggatccttcaccagattacatcttcgacagcccctgaaaatttggagttacctgagagtcgaagacacctgtcctacttgattcttcttacttgtacagtcatctgagaacaaaattcaaaaaggccagtcatgctttaagcaggtctcatttcccagactgcaaacaaacatggaggtctatctgggaccagagacttgactacctgatgcttgccttgattccaggatactctgaattttctcagatcttgggttgagtctttagagagcttgtctggcaggctttcctgagcccaccatgaaggtcatcatctccacttgctttgccctgagtcacagcaaaaagctaaaaatgtctttattcccacatatcatggaacacatatccactccagccaaagcctccaagtcctggcacaaggccagcacccaaacccatggctgtgtgttccaccatagctttcatgcagaacttcctcccttctccaaggagatgatagacatccgtgtcccacctaccatcaggagacagcacagtgaactcaagccttctgctactatgggcccttgggttctcaagggggaatttcatgtaaaatgctcctgaaacagctaattatctcaccaccgtgtactagtacacacagtgcctgaaccatgccaaagtcagcatgattctttatcatttttttgaagtgcgccgattaatgttacttatttaatccctagaacaatcatgcaacattcaagggctggaat

SEQ ID NO: 554843 - DNA, 1255 bp, Homo sapiens
aaagaattcaactcattctgtgaacataatttttaaaatagtatttgccataggccatttaaaacagattccccaggcaatgtagcctcactggtgtcttgcagtttctagatctccttccctaagtatagagacacagtataaacttttgtttgcaagaaaaatttgtagccgttttacatcttccagcgctccttgggtcacccttgaagaaatcagatataatcttactctggtctttaaataagggaaaccagaggtgatccctggaggttcagaagactcctaagacccrgataggttagagcagctctatgttactaaattggtgaattaattggtgaaaataaaagaataatatattttttaaaaaattttaaaaatgagactgccttatcactaaggatacataatggtttaatggataaataagctatttgttttttactggccatgtatgctcctgtttctttgagcttctggctcttgcttctggatccttcaccagattacatcttcgacagcccctgaaaatttggagttacctgagagtcgaagacacctgtcctacttgattcttcttacttgtacagtcatctgagaacaaaattcaaaaaggccagtcatgctttaagcaggtctcatttcccagactgcaaacaaacatggaggtctatctgggaccagagacttgactacctgatgcttgccttgattccaggatactctgaattttctcagatcttgggttgagtctttagagagcttgtctggcaggctttcctgagcccaccatgaaggtcatcatctccacttgctttgccctgagtcacagcaaaaagctaaaaatgtctttattcccacatatcatggaacacatatccactccagccaaagcctccaagtcctggcacaaggccagcacccaaacccatggctgtgtgttccaccatagctttcatgcagaacttcctcccttctccaaggagatgatagacatccgtgtcccacctaccatcaggagacagcacagtgaactcaagccttctgctactatgggcccttgggttctcaagggggaatttcatgtaaaatgctcctgaaacagctaattatctcaccaccgtgtactagtacacacagtgcctgaaccatgccaaagtcagcatgattctttatcatttttttgaagtgcgccgattaatgttacttatttaatccctagaacaatcatgcaacattcaagggctggaat

SEQ ID NO: 554844 - DNA, 398 bp, Homo sapiens
aatgtcctacaaaagttgttcttgtggggaaagtctacatgctacagggaatccctttccaggtcttttccctaatctaggcacctttttaagtctgataagaaacatttacaatcaattctctctgaagcctgctacctggaggcttcatctgcataataagaacaaccccttaacacagagactgccttctatggattccaggtctttagataaactctttcaaccaattgccaaagtatcagaaaatgatggctggtaactatttaattatgcayatatattagtagaatttggggggtgggcacggtggctcatgcctgtaatcccagcactccttcaggaggctgacagattgcctgagtccaagagtttgagaccagcctgggaaacatggt

SEQ ID NO: 554845 - DNA, 639 bp, Homo sapiens
tggcctctgaagtgggtacactctttgttgtttcaaaggggatgaaaacccaaacttggaatgagcaactgatttgtgtttacctttaatataaagattatagctaggcgtgatgtttagctgtgaaataacttgcagaaccacctcttgttttcagaatttggcttactgtagttgcacttactagtctactactgggttgagttgaatgaaaggacccctcagcagacttcccataccaccattagcacagagcactgtcaattctattacttccttcagaaagtagggaaaggggatggttggccgtagaaatccagaatttgctactgggactattccttacagccgtgtcaaatcactttcccccttccctaaggaacagtatttgaaggaatccgggakactaggaaatgctttgtctctttcctgtttgtgtgtctgagtccagtgtttttggtgagggggagacacagctgtctaaaattaaatagaacaacgatgctcagtctttcttttttcccccactgctgcgtgaatggaggcagattttataaaaaataaaatttaaattctagttgtagttgaatgttaccaaaaaatttaaccccagaggtcagccttaattatacctcttcc

SEQ ID NO: 554846 - DNA, 916 bp, Homo sapiens
gtactgatctcagagtgaagacaggaaaatgactgtaattgtcttgagtccatagcaattacactgttgagggttaggtcatgagtcactgtaccactcgcatctcttttagctacccaggatataactcatattattctcgaataaaggaaaagactgcggtgctcttatatctttctgagaacacctatggtatagaggttaagaacacttacatcatgggtcatgaggtttgggcttgaaaaggaaaatgaaaagtcttgggggccaatgactgtttcacctttagacatcgggtaggtcaagactttgtgtcttggaactggttttgtacctccagcgtcttccaacattcccaccacagagctgtagtacaggttctattcgaatttgaagaatccaattttgagattccagcacataaatagtgaattatagacgatcatcatactatttattttcttagccaatctgtttttcacaagatttcttccacaacctttgctatacatktgtttctgccccaactggtcatgctgaaaatacaagggcatgcatcctaattttttttgaaaaaatcttcagtgctggctaccttctttgtataaataacttgcatgcacaatgctttttctccagattctcaaggagcattgtgagggggtaattaaagcagtctgtttctccagcacgttctgtctgttttttcttttcattattagatgtgatgacacatttgcctgtgtggcttcccacagatggcagagaaattttgtgatcaaatggtaagagtaaaccaactgtcatctcagatcacagcttctatgttgttccccctgtgcaggagtctcactttaataaaatgcttgcttcttttaaagtggtattacctgctatgcaaaagattttagaatta

SEQ ID NO: 554847 - DNA, 916 bp, Homo sapiens
gtactgatctcagagtgaagacaggaaaatgactgtaattgtcttgagtccatagcaattacactgttgagggttaggtcatgagtcactgtaccactcgcatctcttttagctacccaggatataactcatattattctcgaataaaggaaaagactgcggtgctcttatatctttctgagaacacctatggtatagaggttaagaacacttacatcatgggtcatgaggtttgggcttgaaaaggaaaatgaaaagtcttgggggccaatgactgtttcacctttagacatcgggtaggtcaagactttgtgtcttggaactggttttgtacctccagcgtcttccaacattcccaccacagagctgtagtacaggttctattcgaatttgaagaatccaattttgagattccagcacataaatagtgaattatagacgatcatcatactatttattttcttagccaatctgtttttcacaagatttcttccacaacctttgctatacatttgtttcygccccaactggtcatgctgaaaatacaagggcatgcatcctaattttttttgaaaaaatcttcagtgctggctaccttctttgtataaataacttgcatgcacaatgctttttctccagattctcaaggagcattgtgagggggtaattaaagcagtctgtttctccagcacgttctgtctgttttttcttttcattattagatgtgatgacacatttgcctgtgtggcttcccacagatggcagagaaattttgtgatcaaatggtaagagtaaaccaactgtcatctcagatcacagcttctatgttgttccccctgtgcaggagtctcactttaataaaatgcttgcttcttttaaagtggtattacctgctatgcaaaagattttagaatta

SEQ ID NO: 554848 - DNA, 534 bp, Homo sapiens
caaagtctgtgcgtcttaatagctgactcattgatggaaacatttatatcccacatccactggctctwgtctggcttcttcaaatgcacctgtccctaggaccccttcctagagataccagcatttagaacagaccagtctaaacaaggtcttctcaagtgaactgaagatactaggcctgcaaacgctcatctgcacttcacttacgatgtggcatttataaatgcattcaccgtaggtgtttgtagattctttttatgttttaagttttaagtttgcagcattgaggcctattttgattgcaaattgcataaacctcaaataagatctaaatcaaaggaaaggtattgcatgcttataggtgactcaacattaagaattcagttcttcccaacttgatctacagattcactgcagtcccaatcaaaatcccagcaagtttttttgtggctattgaccaactgattccgaagttcatgtggaaaggcaaaagacccagaataatcaacacaatatttatggagaacaaagtca

SEQ ID NO: 554849 - DNA, 617 bp, Homo sapiens
tttttttgtaacttgcttttctaacttaatacatttctgaaatcactcaaattaaattttagaactaacccattactttttaacaactgcataatattttatactgtctttgtatccagttttcaacaaaggacacacataagtttttcaagagttttgccaccagaaataagacagtatctctcttgctctctttctctctcggtctcttcccagccttctccccaaccccactacctcccacacacacattttatttttgtagtataagtttcaagaackgttattgctggcgtaagagtgtattagtcaggattctctagaaaaatagaaccagtagaaaaaaaatatagagatatatatatagagagagagcaagagagatttattttaaggaattggctcacacaattgtggaagctggcaagtctgaaatctgtagggcaggcctgcagagaaaagttgatgttgcaatctcaattccaactctgcagtctcaaaattcaggcagggtttctatgtcgcagtgttgaggaagaaatgcttcttcaagaaatcttggtctttgtatttgagacctttaattgattagatgaggctcacccacattatggagg

SEQ ID NO: 554850 - DNA, 1264 bp, Homo sapiens
ctgttcctccatagttaacgtgaggtcaattaaaagttggatgtcttcacatgaatttgctttaaatcatatatcgtttaatctgtgtttgaatagaattttttaaatggcacacttatatttgctaaaaattttatattcctgggtttagctctttcagtctaaatatttgtaattttattttttattaaatattagctcactcttctggcctcataaaatgtataatcatgttgtttgtacctaattctaatatggtaataaacagaatgatcctgagatagccccttaaaaagctaagttcaggttaacgttgaagcatttataatagttgttaagtaagattattcaactacataaaaactgaggcagggcacaatggctcatgcctgtaatcccagcactttgggaggccgaggtgagtgaatcacccgaggtgaggagtttgagaccaacctgaccaacatagtgaaaccccatctctactaaaaatacaaaattagctgggcgtgctggtgcatgcctgtaatcccagctacttggtaggctgaggctggagaatcacttgaacccgggaggcagaggtaacagtgagccaagatcatgccattgcactccagcctgggcaagaagagagaaactctgtctcgaaaaaaaaaaaaaaaaagtaaaaatgtacccataccttaatattttctattttgtcctaagattattaagaaaatctcttaaattcaaagatctctaaaaatcaagatagcctgtrtattacataaataattatttgaacaccaataataatgaaaattagatttatttgacataatgtgtacttagtaatcccctatgggcttccatttcttatctattttctttctaaattctcaaaaaatattatacaatagacacattttttggtataaccacagctacttttcataatacatttcagttctatgggtatatgaggtctaataacaacaataacagcagcagcagcagctaacatttattaacaattattctgtgctagatattttactggaaaattgagtatacacatgtgctagactttatgtcaagtactatccatgcattctctcacttaattttcatagcctacttatgaaatatatgtttttattatagctatttgattataataaaagtccatcaccatggttagtatattactcaagataattaacactagatgccatggcagacaaaacctaaaatcataatggttaacaaaacaaaagtt

SEQ ID NO: 554851 - DNA, 1264 bp, Homo sapiens
ctgttcctccatagttaacgtgaggtcaattaaaagttggatgtcttcacatgaatttgctttaaatcatatatcgtttaatctgtgtttgaatagaattttttaaatggcacacttatatttgctaaaaattttatattcctgggtttagctctttcagtctaaatatttgtaattttattttttattaaatattagctcactcttctggcctcataaaatgtataatcatgttgtttgtacctaattctaatatggtaataaacagaatgatcctgagatagccccttaaaaagctaagttcaggttaacgttgaagcatttataatagttgttaagtaagattattcaactacataaaaactgaggcagggcacaatggctcatgcctgtaatcccagcactttgggaggccgaggtgagtgaatcacccgaggtgaggagtttgagaccaacctgaccaacatagtgaaaccccatctctactaaaaatacaaaattagctgggcgtgctggtgcatgcctgtaatcccagctacttggtaggctgaggctggagaatcacttgaacccgggaggcagaggtaacagtgagccaagatcatgccattgcactccagcctgggcaagaagagagaaactctgtctcgaaaaaaaaaaaaaaaaagtaaaaatgtacccataccttaatattttctattttgtcctaagattattaagaaaatctcttaaattcaaagatctctaaaaatcaagatagcctgtatattacataaataattatttgaacaccaataataatgaaaattagatttatttgacataatgtgtrcttagtaatcccctatgggcttccatttcttatctattttctttctaaattctcaaaaaatattatacaatagacacattttttggtataaccacagctacttttcataatacatttcagttctatgggtatatgaggtctaataacaacaataacagcagcagcagcagctaacatttattaacaattattctgtgctagatattttactggaaaattgagtatacacatgtgctagactttatgtcaagtactatccatgcattctctcacttaattttcatagcctacttatgaaatatatgtttttattatagctatttgattataataaaagtccatcaccatggttagtatattactcaagataattaacactagatgccatggcagacaaaacctaaaatcataatggttaacaaaacaaaagtt

SEQ ID NO: 554852 - DNA, 629 bp, Homo sapiens
atttaaccagcattctaagtatgaataaattttcttaagtcttttataatatgaataaactatgattgtggtgattaaactatrtgtacatattatatttcaaatatcattgtggtaagttcccagtagttattttgtttggtcaaaaataactacttttagttatgatacacatttacccacaatgaatgggtaaatacttggatcaactataatacttgtattaacttgcactcccagcaacactgaatgaaatatttcttcactctctttttaaaagttggctaatattaacctcaaaattacttgaattattcaacaattcaaaacataaaaactatagattaatttcattaagtatgctatgaaatttacatagtatatgtttccatgaatttaacaatcatatcatgtatatttttaacataaatgctattttaatgtaaatgcttaaagctttttcccattttttgtttcaaaatcctttattttatgcaatattttattttgtgtacttcttcttttgtcataggtaaatattttccaagtcttcaatgtgtcatgcaaatatttatcaaattcttatacaattgtaacatttgtgtttaatcaaaactttaattattata

SEQ ID NO: 554853 - DNA, 793 bp, Homo sapiens
caagagagtgtcctttcaacctcaagcccttctcatgaatgagtgttaatctcattcatgagagaagggtggagacttcataattaaatcacctcccaaaggtcacaccttttaatgctgttgaattggggattaagtttcaacaaaaatgttgaagggaacatcatcattcaaaccattgaaatcctccatcccagtaagtacctttttctctactcgcaacctgtcaaaatcttacctctttctttatgtcttcattctcaagcatactcttcaaatttacaatttcctttcttcttaatctgctatgcttactgcctttacatataattgtgtcactttattgcctcctacattatattttgctctctattaatatagataatgataaattttctatttatacaaaactttaaaaaatttaaatatctgaactcattatttactccaactaaattgtaatattgaaaatcacagattgttgtatatattctaaagcacgtagcagaatgagatacatagaaattactaaattttgtgaaatataaaaatactgtcaaaaaaatgatgtcaattcacatcatgatttatttgaacaaattatgaatagcagaaaaaataygtaaatcatttacttacaactgtagataaatgctaatatttaattgggcattttgccaacatttagtattttataatttacagttattacagatctaagagcaaaatattttttggttacaagagtaagcagattgactcatgctatttttcttcattccatctatgtgcc

SEQ ID NO: 554854 - DNA, 793 bp, Homo sapiens
caagagagtgtcctttcaacctcaagcccttctcatgaatgagtgttaatctcattcatgagagaagggtggagacttcataattaaatcacctcccaaaggtcacaccttttaatgctgttgaattggggattaagtttcaacaaaaatgttgaagggaacatcatcattcaaaccattgaaatcctccatcccagtaagtacctttttctctactcgcaacctgtcaaaatcttacctctttctttatgtcttcattctcaagcatactcttcaaatttacaatttcctttcttcttaatctgctatgcttactgcctttacatataattgtgtcactttattgcctcctacattatattttgctctctattaatatagataatgataaattttctatttatacaaaactttaaaaaatttaaatatctgaactcattatttactccaactaaattgtaatattgaaaatcacagattgttgtatatattctaaagcacgtagcagaatgagatacatagaaattactaaattttgtgaaatataaaaatactgtcaaaaaaatgatgtcaattcacatcatgatttatttgaacaaattatgaatagcagaaaaaatatrtaaatcatttacttacaactgtagataaatgctaatatttaattgggcattttgccaacatttagtattttataatttacagttattacagatctaagagcaaaatattttttggttacaagagtaagcagattgactcatgctatttttcttcattccatctatgtgcc

SEQ ID NO: 554855 - DNA, 793 bp, Homo sapiens
caagagagtgtcctttcaacctcaagcccttctcatgaatgagtgttaatctcattcatgagagaagggtggagacttcataattaaatcacctcccaaaggtcacaccttttaatgctgttgaattggggattaagtttcaacaaaaatgttgaagggaacatcatcattcaaaccattgaaatcctccatcccagtaagtacctttttctctactcgcaacctgtcaaaatcttacctctttctttatgtcttcattctcaagcatactcttcaaatttacaatttcctttcttcttaatctgctatgcttactgcctttacatataattgtgtcactttattgcctcctacattatattttgctctctattaatatagataatgataaattttctatttatacaaaactttaaaaaatttaaatatctgaactcattatttactccaactaaattgtaatattgaaaatcacagattgttgtatatattctaaagcacgtagcagaatgagatacatagaaattactaaattttgtgaaatataaaaatactgtcaaaaaaatgatgtcaattcacatcatgatttatttgaacaaattatgaatagcagaaaaaatatgtaaatcatttayttacaactgtagataaatgctaatatttaattgggcattttgccaacatttagtattttataatttacagttattacagatctaagagcaaaatattttttggttacaagagtaagcagattgactcatgctatttttcttcattccatctatgtgcc

SEQ ID NO: 554856 - DNA, 546 bp, Homo sapiens
ggccatggtaaaaagcctttgaaaacacaaattgcaataatgttgctgtaggaagttctggattctatagccatagctggaaaccaaagaatagtctattgtatttccagatgttcattgaacatctttacttgtataccccatatgcatcttcaattcggtatgcctagactggactcagtttcattccccacccttgacaaaaacaaaacagagcaaaataaacatttttwaaaaaaaaaaaattgctctcctccttctttgttttttatctgggtgagtggcatcaatattcaaccagttacctacaccagatggctgggactcaagcttgatacttccctctcttttactgcctgcattcaatccatcaccatatcctattgattctgcctacaaaatagctcaaatttgctttgtttcctccatctccatcaactttaacctagtttatcatcatctctcaatccctttaccacaaaagcctcgtagatggtttctgtctcttacctcaaactcctcgtatttattctccgtacatcaaac

SEQ ID NO: 554857 - DNA, 603 bp, Homo sapiens
aacttaaaaactgaatgcataacaaacatggtgcctaacacaacaccttttactgcctaacaaatcatgggtgtgttctgcgtcttagtgagcagcaccaccacctgcattgcctcttgcctctaccaccaaaacaaccacagccctcggccacacccttagtgttctctcccaaacacataytctcattttttgcaatatggataggctgagaattttttaaatctttaagttctgctttcttactgctcaacaattctgtctttaagttgtttctctctttttgcattttaatatacaaagtcatgaggggctgcgcatagtggctcacacctgtaatcccagcactttgggaggctgaggcatgcagatcacttgaggtcaggagttcaagaccagcctgaccaagatggtgaaacctcacctctactaaaaatacaaaaattaatcaggcatggtggcacacacccataatccctgctacttggaaggctgaggcaggagaattgctggaacctggaaggcagaggtttcagtgagccaggattgtgccattgcactccagtctggacaacagagtgagactccatctcaaaaaaaaaa

SEQ ID NO: 554858 - DNA, 676 bp, Homo sapiens
ttttaaatagtttccctatccctacrttccccagtgatttgaaggcagatgactctacttggagaaatactccttgggtaaacaactgaagtctttggtaattttgcctagttgagaagtaaatttttaggacagagtaagataacaatttttaaaatgtaagcctcttacttgggtctctgaacttcttcttgcttgagtgatgaacaagttaaggaataaaagaaggaaatagcagatggggggctgaaatatcctcctaattactgataagagtggatttgtaggatgaggttgagtgtgagagccaaacaagccacctacgaaccccagaatgggacagcgtgtcctcactctctgtgcactgaggcaggcttccctgtgcttcaggcaggaacgaaaaggaactgttttctggggcagcttgtgctgagaggaggaggtgagagaagtacaccaaggttatgcttcccaaattgaccaatctaatacatgactttaccttccagggagtggagagagccatgggggttccctttacttatcaggaaatagcagaaatagagtaagcagtgcttctctatctacacctctcagtactggccaaaaatcaaagtttgacaacccagggagctcgctgggctctaaggaaacaggccctctagtgggaatgcaa

SEQ ID NO: 554859 - DNA, 531 bp, Homo sapiens
ccacctcaaaaaaaaaaaaaaaaaaaaaggacatcttctaagtgccgtttagaataatatagtacttagtacaaagtactgcaacttaaaatattatgtcttccttgcaaactgtatcttactcatgtttgtttatcttctttccaatatccatgctccattgtttgaaactcataacaagtgcttcataaatgctgatttgaagaagctgggaagtaagattaagtggcaagtccaaggttaccagctactaagtatcagttaggactcaaacctaagacgtttaactctgcattcagtgacacaactgtcatttaaggagtgctgaggaagagaaagcagctctgacatccaggtgctggaactatcagctgggccttggtgttgctaagaacttttctggaccatggtgttctgtcgaatgaaaacaatttcwcggaacaccaaagtcagacaagagcattctgtaaccatgatcaagacaaaaacaagaccacgtcataattttgtctgaacacggacaaaatttag

SEQ ID NO: 554860 - DNA, 555 bp, Homo sapiens
aggcaaaaaaaaattctgtaaaatgtaggggaaaaatcacagggtctcactcagttgcccagcatgaagtgcagtggtgtgatcatggctccttgcaaccttgaattctcaagcacaagtgattctcccctctaagcctatggagtagctgggatcacaggggcatgccaccatgcccacatacataggtatttgctggagaggagatggagactctctgtcctggatgtgagacaggtgkctggcatctgggtaaggatgacattccctcattgctaaagagtgaaagagaaaagtgtcatggatagtgcaagcagggacatgccctgacctagtgaggtccagaggcttatattgtgcttcataggggagtgggaagaagcgagtgtaggcaacccaggggaaataaatgacttaaaataaaagaaatagatcatcagaagtgtagatgtattagtcagggttctctagactgacagaattaaaggactatatacatatatatatgaaggggagtgagatggttaataatgagtgtcaacttgataggattga

SEQ ID NO: 554861 - DNA, 611 bp, Homo sapiens
gctttgcctctcacaccccagcctgctgtacttcagtttaacctaatctgctatatctattccaaatgttaaccatgctaagattggaaaatgcccaagagaaggagtcctgaaacctaaaatccttgaccttcttgctggagtcatgacacrttccatgatagacacacaaaaaggaaacttcacaaacaataacaacaaatgagccaccaccaccaactctattaatctgcttctactaaatccaaaaaagagtcactaaggctggttggacccaatgaagtcacaaagactccttttgccgggaaatcacatatctagagtaacagcatactgagtgaccaccttagctccttgtgccgtaatctatgatgttaacaccattctctgccttatatgttttacattctgatatagtagaaaacaaacccaagggaaataaagggggaaagaaagatgtttacctaaggcccagactagagcattaaacctagccatctactgcaagcctattttataggggtcttcatctgacactctaaagagggacttctgtcaatcagaaaaaaaaattgctaaggtgtgttaaaaagaaaagaggaaaagaaaaa

SEQ ID NO: 554862 - DNA, 611 bp, Homo sapiens
gctttgcctctcacaccccagcctgctgtacttcagtttaacctaatctgctatatctattccaaatgttaaccatgctaagattggaaaatgcccaagagaaggagtcctgaaacctaaaatccttgaccttcttgctggagtcatgacacattccatgatagacacacaaaaaggaaacttcacaaacaataacaacaaaygagccaccaccaccaactctattaatctgcttctactaaatccaaaaaagagtcactaaggctggttggacccaatgaagtcacaaagactccttttgccgggaaatcacatatctagagtaacagcatactgagtgaccaccttagctccttgtgccgtaatctatgatgttaacaccattctctgccttatatgttttacattctgatatagtagaaaacaaacccaagggaaataaagggggaaagaaagatgtttacctaaggcccagactagagcattaaacctagccatctactgcaagcctattttataggggtcttcatctgacactctaaagagggacttctgtcaatcagaaaaaaaaattgctaaggtgtgttaaaaagaaaagaggaaaagaaaaa

SEQ ID NO: 554863 - DNA, 1018 bp, Homo sapiens
taattgagaaagcaaatgtttatttaaatctactatattcaagatatcgtgtttacaataacaaatatttggagaaaatataaactttcaggtgttgatcatctttcattgctacaatgaaattatacatgcttttttatgaaataaaaaattaaaaagcatttttaattactcacaattaaaatataagtagaaaaaatgaaattacaaaacagaacacatactgtgtttgtgaacacaagtttatacacatatgcacaaatatctacacatgtacatgttgatatatttctttgaaaatgatagaaacaaatttggaaagaaatgtaaaagtagttaactttggccagtggtattgctttttgtagattttctatttttaagatattttatacaacatagatcttatgtctttttcaaaagaaatkcatgctagtgttactagattgtttgttgtttgcttttaaaatctattccctggctttgaaaagcttacattcttgtatttccgggtttgccgatagagaatccccaaataaactgaatgtaaagtagaaatttcaatttgcaaaatatctgggtggaaataaagcatttctggcaaaaatgaatagtgaattgcatttctctcttcaggtgatagtgtggttgtttgattctgtacctttcatgtgttgagaccacgaaaccagcagactgaggagttaaacatgccctcgttttatgacttcagtaattcacacatccctggggttggccagatggggatgcctctctttgtttaatctaatatctctattgcattaattttttctccttttgtagcccaaccagatagctttattgagctgctcacgatgattcctggatccccaccctccaactcactgagagttgtcagtcgacaaggcataaaacagcctgtggaagatggtctaccattccttctgatgttcttgctttaggactgacactgcttggcctgaatttgatgtgccatatgactgactgcctgatt

SEQ ID NO: 554864 - DNA, 792 bp, Homo sapiens
tgggggatttttgcataaataacctgtatcaactccttggtcccttctcacaatgtaggagagggaagctgctttgggtaacacagacatggacgcacacacgtatacacacactcatgcaatgtctccatttgcttcctttttatctattgaagtgggttatggcttcttacagaacataacaaagcactaaaacttaaaggcaacatttccttttgattgaatgactgctttaagccaggcccgcgtgtaatccacgaacttatttttctgatatgtacaagcaaggctaaggcttcttgtcacattaatgaaaagagagaaaactcagaaaatgtaaccccttattggaaaacttggacctaactggaagacaaaaattgatttatattgtcttttttctaatgtctctgttgtataagtccatctttttaggagaagaactttcaaacttttttttctccctgcacacaatttaaaataatgaagtgtttccatyaaagcaaatttacatggtcactattgctctacagaaatgaaagaatttttaggactggatgatagaaggaaactttgcatggctttcaacactatgatgaatttttaaaaattaataaatagtgtattcttacaatattaaaagggaattatatagacatttctttgagtttcaaaagtatatcatagtttttatttccccaagagcttagcctggatgaagtgaaggtaggggtaaaatggttgggaaagtaggtatgatgttgaggggactgatgtaaactttatcacctc

SEQ ID NO: 554865 - DNA, 640 bp, Homo sapiens
cagcatgactttagctccagctgtgccctgtgcacatcccgggacccccacactcacgcagacacattcatcaccactgtcttggttcatgcccatctggcttgcatgctccctgaacagagctgtgtccaggccctggacatcgatgccacagtcagcaagccaccaaatgacatcgccagggctgggcgcggtggctcacgcctgtaatcccagcactttgggaggctgaggtggggagatcacgaggtcaggagatcgagaccatcctggctaacacggtgaaaccccggctctactaaaaatacaaaaaattagccgggcatggtggcagctgcctgtagtcccagctactcaggaggctgaggcaggagaatggcatgaacccaggaggcagagcttgcagtgagcagagatcgcaccactgcactccagcctgggcgacagagtgagactcygtctcaaaaaaaaaaaaaaaaaaaagatgacatcgcccagcaagagaatggtggcagaccagtggggaaagtgctaagagacacagcagcctggccaaatctcgagacccaggagcacaggcacagggtccacccagagtggtccactctctgcatgggctggccttcaggtctcacccagg

SEQ ID NO: 554866 - DNA, 556 bp, Homo sapiens
cccaagcaggaagacaatctatttccatttgcttctcactattccccataaaggagacctgatacattttggatctggcttgcagtcttgatgcatgcacagacatttttctgaggccttttcgtggcaatgcagtcaggggcctggaccattcagaagctgggtgggatggaggaagcacaaaycccctttctgtcgagtgccttctaggacagagtaatgtcaatgactcagagctgcctgggcttggatcccaatttgaccatttatcagttgtgtgacttcgggcatttcacttaacctttctgtgctctggtttcctcttctgtaaaatgaagataataacaggctgtcttgtagatttgttttgaagatcaatgtataatatctgtaaagtacttaccttgtaataagctaattattagctaagagaccctttcttcatttccagagcaagtatacaattttacgtacctaagagatgaattcttcctaaattccatgggcagaagaagtccttttatggctatgtggccactgaggaagacacagacat

SEQ ID NO: 554867 - DNA, 464 bp, Homo sapiens
gtgagcttttttatgatgaaagcttatagagagacctgggaattagttgcagctagtatgtattataaagttgatttctggagccagaatcaaatccctgggagaatggatcaaaatatggggagaggaagaactgtaagagagtgattggatggggatatgtagcttgcaaaatgtcccctaaatgatcgcacacatggactctcccctgtcctctttttcactgaaaatcccacatgttagtcaggatgagtcatttagagaaattattgggtaactgtgtgagatgatggatatgttaatttgttcactatagtaatcattttactatctatatgtatctcataacatcatgttctataccttaaatatatacaataccatttataaatttaaaaaataaatcgtatcatttaaattggattagataatctaatttaataattccagttctttstcacata

SEQ ID NO: 554868 - DNA, 1084 bp, Homo sapiens
tggacatggacagcagccctgaagagccagagtggtccagggaagtgaggggttcccacagggggtggtgagctctgagcatgggagaggatctcaaagaagtgggagaggccagtaacaggaagctactgcaccaggacagtgaccagaatcttcaggcgtgggctctgggacacactggggaggactgagcaggtggccaggcagatcagagagtaacgtgttggaagagacacagtcgcctcttgtctaggaaaagttctgcttggacccactctctcctgctcccctctgcagcccctctgtggtccaggccacctgtggtcagctctccacgcatcgttcttctcggcagcctagcaccttgctgcgaaagggcaggacacaggtcagcaaaactgcctggcagcttgtaagaaatgcagaacctcaggcctcacaccggacctaccaaatcagaatttgcattttgttttgttttgctttgtttgagacggagtcttgctctgtcgaccaggctggagtgcagtggcgcgatctcggctcactgcagcctccacctcttgggttcaagtgattctcctccctcagcctcctgagtagctgggatcataggcatgtgccaccaygcctggctaatttttgtatttttagtagagaccgggtttcactatgttggccaggctggtctcagactcctgacctcaggtgatcctcccactcgacctcccagagtgctaggattacaggcacgaaccacgacgtctggccaaaatttgcattttcacaagatcccaggtgcgcactgaagtctgaaaaaccctgcaccggaatgtcagttctgtgagggtcgggagcgggtctgtctcattcacatcatgtgtgttaaggttgtagaagtactgggctaacagcaactgtacctgcgtgacttgggcatggcattcaaactgtttgtgcctccatgacctcatctataaaatgagagtgatgacaatagttcatgcctcagtggagttgttggggtgattaaatgagttgatatataagaagagtttgctcatggtaatcattatataagtgc

SEQ ID NO: 554869 - DNA, 1084 bp, Homo sapiens
tggacatggacagcagccctgaagagccagagtggtccagggaagtgaggggttcccacagggggtggtgagctctgagcatgggagaggatctcaaagaagtgggagaggccagtaacaggaagctactgcaccaggacagtgaccagaatcttcaggcgtgggctctgggacacactggggaggactgagcaggtggccaggcagatcagagagtaacgtgttggaagagacacagtcgcctcttgtctaggaaaagttctgcttggacccactctctcctgctcccctctgcagcccctctgtggtccaggccacctgtggtcagctctccacgcatcgttcttctcggcagcctagcaccttgctgcgaaagggcaggacacaggtcagcaaaactgcctggcagcttgtaagaaatgcagaacctcaggcctcacaccggacctaccaaatcagaatttgcattttgttttgttttgctttgtttgagacggagtcttgctctgtcgaccaggctggagtgcagtggcgcgatctcggctcactgcagcctccacctcttgggttcaagtgattctcctccctcagcctcctgagtagctgggatcataggcatgtgccaccacgcctggctaatttttgtatttttagtagagaccgggtttcactatgttggccaggctggtctcagactcctgacctcaggtgatcctcccactcgacctcccagagtgctaggattacaggcacgaaccacgacgtctggccaaaatttgcattttcacaagatcccaggtgcgcactgaagtctgaaaaaccctgcaccggaatgtcagttctgtgagggtcgggagcgggtctgtctcattcacatcatgtgtgttaaggttgtagaagtactgggctaacagcaactgtacctgcgtgacttgggcatggcattcaaactgtttgtgcctccaygacctcatctataaaatgagagtgatgacaatagttcatgcctcagtggagttgttggggtgattaaatgagttgatatataagaagagtttgctcatggtaatcattatataagtgc

SEQ ID NO: 554870 - DNA, 1488 bp, Homo sapiens
  misc_feature 750, 751, 752, 753, 754, 755, 756, 757, 758, 759, 760, 761,762, 763, 764, 765, 766, 767, 768, 769, 770, 771, 772, 773,774, 775, 776, 777, 778, 779, 780, 781, 782, 783, 784, 785,786, 787, 788, 789, 790, 791, 792, 793, 794, 795, 796: n = A,T,C or G
  misc_feature 797, 798, 799, 800, 801, 802, 803, 804, 805, 806, 807, 808,809, 810, 811, 812, 813, 814, 815, 816, 817, 818, 819, 820,821, 822, 823, 824, 825, 826, 827, 828, 829, 830, 831, 832,833, 834, 835, 836, 837, 838, 839, 840, 841, 842, 843: n = A,T,C or G
  misc_feature 844, 845, 846, 847, 848, 849: n = A,T,C or G
tgctttgtattctccctaatgcagaccaatatggtattttttataacacgtattttaaacaaattataaaaatctagacatggcttcagtaaaattacctcccgactagtttagtgtgatcatcattcagatatatgattgaccagatcatactgtttgataaagtcatcatgataaataatacacacaaagacaattagtttttttcagtaactacaaaaaagggaaaaatgtaatgattaattttcaatacagtatacagattgaaattcagttrtaattaactaccaaatagtgtgtttctgtgcacacacacacacacacacacacacccgggttgcaggagagggtggttaatcagtaagagaatggagttggcatgtattcctcacagcaggaggaaaagaagcaatggccccttaaattaaaattatgtaaacctaaaagtaaattggagcctgtggggttttggaatttactttgaaataattcgtttctaataccttgtcttcaaaactgagttggagaaattaaaacaggaagctagtattatataatcgttttgtctatcagaatttgaaacaggaaatttcagataatttaataaacataaaatggaatgataaaaggaactcaattatgagaacgaactctctcaaccatcagcaaggaataccaagataattgaataattccaaagagtatgaatggcaaactttaaatagcaaatcatttaatggtactcagaannnnnnnnnnnnnnnnnnnnnnnnnnnnnnnnnnnnnnnnnnnnnnnnnnnnnnnnnnnnnnnnnnnnnnnnnnnnnnnnnnnnnnnnnnnnnnnnnnnnactccatgtatggctcaccatttgcctctattttcccactgtctctcttcagggaacctgtttcctacattttttgttaattattctcttgagtctctctttgacaatgtcacctatattgtatccataaatgatatattgttacattttgcttgcttttcttctttaatggaatgaaatcatatcagactttgaaataagatttatccatattaatgtatattattgtagtttattcattatcattgctatataaaatatccttgtgtaactttaatgagttttatccattctactttgatgaacctatgctttctgcccaggattttttctattctaaattatatagtgatttttctaatgaggtgaaaaacactggtgaaagaatttttcaaatctatattctgaggagtgggattgccaactcacttcgtgtatcaatgttcaaagttataggaatctgcatgactgttttctgaagtgatataattaatttatattaccccaatagatacgcttgttcctgcttcacatcattgtaaattcatggtatctaagacttctacattttttaaaatgttgtatgtaaagtggaaattcactggggttttcatttgcattcccaataatttgtttggc

SEQ ID NO: 554871 - DNA, 526 bp, Homo sapiens
aaaaataaaataaaataaagtaaaatgaaataaaataaaattgcaaaacaaaatgaaaacatggaatgttaaacttactgaacaccattaagtagattactacatttggaaaagaaatcttagaagacgaatgtagggaaaaagtagtagaggggttatttgaagataaaagaggatgagaactttcctaatttttatgtgataaaagaaaaactaataccaatcaayactgtttgctttgaaattatttggaattattctggaattaaaaataaggaaacaataaagaacttacaaaataaacaaaaggtgaaggcatttatcatcaccggcatggtcccacaagaaatgctacatggtggccaggcaccagtggctcatgtctgtaatcccagagtcttgggaggccaaggcaggcagattagttgaggctaagagttcaagatgagcctgagtaacatagtgagatgctgtttatttttttattgccaaaaagagtccatatgttgaaaaatataatgatgct

SEQ ID NO: 554872 - DNA, 1089 bp, Homo sapiens
agggaactcaaattaagtaatgaaagcatatataatgatgggtgctgatagatattattgctatcttggtcattgtttattgcctatatgcccctactagaatgaaagtttcctataagcatatttaatggctgttttcctagtgcctagtatagtatctgcacatagaagttgcctaaaacatagttgttggatgaatgaatgaattcttaatttggagataacatcctagggaaagaaataccttaatagcacactgggcagataaagcttcagacagcctggcgtgaaaaagatgccatgtgtcttgatcctcctagatgtggccaagagagtagctagagccagagcatatggaccccaagggactagagggataaggttcaggggttgctcagacatgaactctatggaaagatcactgaaggccatatgataccaacagatacctcagggaacacctgtgtgcactggaccatctgcccctatgcttggtaaaaactcagtactcagaatttagatcccaatccaccagaattagttgattcccttggaggaaaaaaaaaaaaaaaaaaaaaaaaaaacttgatctttcttttgtctcacttttctcatctgttaaattggaaagtgaggaagattggacaaagattagattcacttttacaaagrtgtcttcaagaagataagtaatatgcaagggtttgttaagtaaaataaaatatacctcatacacccgagctgtggactggtacttggcccattctgtgaataatacgatttttaccaaaaggtcacctaaatttaattaggcactgtaaatataagaccagtttgaataactcttactttgttgtttcattcattgaggaaaataattattacagttagaaagtttgcaaacttgtaactgagctgttaatcaaattacctgactggttttttacattgtttcaaaactactagcatttaagaaaaaaagcagtacttttggtaagtttgcactgggaaattcactggttcacccttaacctcctcagcatgtttcttctccttctaggacttaacatctccaagtcatcattcgag

SEQ ID NO: 554873 - DNA, 515 bp, Homo sapiens
gccatgggaagtggaraaaacagtcccctgtctcactctctccaccaatcgattacaggccttctgaaatcctaggcagacagcatttttgttttccacccactaattatgtttctggaaggctgcactcttagcagtgtttataggcacataaactttcatttggaaaccatcttttaaaaatcaagtgactcggggaccaaataccctgaattccatccaaggtcttgagtgtggcctgtgcctctgcctgaaactggacttgccagtttctgaggggccgggacctccccaagacatcgcatgcctgcagcgtcacagaaggcttcgtgctgtccgaggggcagggtggagactccccccgcgacctcagaaccagttggcccaggacaccaacactagaaaccgagccaggctgttacaagtttggcattacatagggattctttccctctcctctcctattctgtgtgtttggtgatgagaagacggtggtagggaggacagaaatgaaa

SEQ ID NO: 554874 - DNA, 531 bp, Homo sapiens
tggtctcttctcatggacacgtaacacctcagtggaatgaaaattaaaatctgttaatcccagtaacttctagaaattccataatccatggatggtggcaaaatcaggccagccacggaaatattttggaaagaatctctttaccggcattgttatataataatatttttttttaaattccaattgcactaaccagtgagaaactagttagagaatatgtctttaattataacgaacaagctgtctggaacattcccagaagggtccagttagtttctatgagctgatgaaaccactcatctctacctgggtcctattggyccccatgttgctgtacccagtacacaggctgatttccaaaggaaaggttagggcttatctgtcaagtgtggattatcattccttattcagatggctattttcctcccaataatggataccatagcatcggtttgcatattttgccttttgtactgtgatctaaatgaatacctccattcactgagacaggaaaacaactcaaaccaaatt

SEQ ID NO: 554875 - DNA, 705 bp, Homo sapiens
gcagggaacatagtgagttgttttaatttagatagggtctgatggcctaatgtgtgacagtcaaggtgggcatgagaagacaactttaagctatgttttagaagtgaaactgtaagtacaatgatgaattggattcaagaagtgaggacatagatatgtcaagggtaacactgatttctggcttgagtaaagtcgatagaggtgctatttatggaaatgggaaagattacacagggaatgcatattttgatgaagagtgggtggaaatccagagttaagcttyggatacatcacatttgagatgcctgaagaaattcaatgaaaaagtccaagtagacagtttagtattaggtctggagttaagaagaaaatgtcttatccctattatggccatacttaagatactgtgtgaagtatgtctttcactacattgtaatctctttaaatgcaaggactctttctttctcaatttcggatcttccacagcattttatacaaggcagagaatggttaaagtgaagaataaaaaagagttggcatgaattgaatctgtgtacaaggagtgagttaactgcctccaacttaatcctaatgaaaggttactgatttttacagatggtcaaagtgaacagcaattaaatgacttgccaaagttcacaaagtaaatggaaaactagtcctggttgactccagggcacaaattga

SEQ ID NO: 554876 - DNA, 607 bp, Homo sapiens
gcatcatttattacaaaattaatactgttttcaaaaaaccaaaacaatatattataaagcacaacgtggagtcttctctcacctccttgtcattcccagcctcaaagggtaaccactgtttacagttcaagtgtgtcttcacagcagatgtttttctatgctcgtgcagacgtatagatgtattcctggraagagtgatgcttgcattcttgaggagttaggagcattgctatttgaaaaaataaaaatccagtttgatgatgttagtcattatgctgaaaggagtgattttaacaaataccaacagatcttcttgtggtaggccagctttccaagttactggttcaagagaacagtcattttataacaggtataaaatcaaagacgtttagtaaaatattttgcccttaattttccatggatagcttgtttatgaagagttcagtattcagggaagatggaaaaacagccctgtgtcagctaaagtaataaaaccgacttaatcccaaattgacaatttaaagccctttaaaattacttgttgcaaacaagaaacaatccacccagtctgtcatctcttttcagcttattagtagtagaatctctt

SEQ ID NO: 554877 - DNA, 1710 bp, Homo sapiens
tttgtatatttgtgtaagaaaaatttgtgtatggtagaagacactaaatatagccaacaaaatgaaaaataggattataggtgttatttatgtaactttttcttttttaaatctttctacaatagaaatataattcttctaagaacattgtctttttaaaaactcttctacctgctttgctagaacctgatttggacaatttgataaattttttcaggcacaagagaaagtatacttaataaaatagatttctcagaaatagcctacgtgtcaaattctatttcatccatttaatgcttctaaatctttatgctataatctagcataaacttaggtaagaacatttattttaatcagaaaacatgttaacaattgtgttgccaagcaatgcggtaaagggcaggaacygaaagatcgtctatttcaagtaattaaatcacatttaatattaaataataacccaaacataattgtctagtttattccattgaacaaattttattttgtgtgcctactgtgtgttaagcactgtactgatggttaacttgacagagtcttctttaatgctttggatttgagatcaaagaaaattcaagtctaaggggttaatctgaacagttgtccctaaatctaaagcctagtagaacagcaactcctctgatagaaattcctctgatgcataaaaaagacgctgatgttttatgcctcagctgctatgtcttatctgcaaagctctcctactcctgcacatgcaagacactccatcctcaacccaaacctcaacactgaaatgcagtgtgccaaaaatgaagtcagtctagcacataattataattccaaaggtaaaataatgcaatgctttagttgaatcaaatttcagtgaaagcaacccaactaaagccacctgttacatgtatagaaccatcttttagcagttcagcaacaaaaaactagaaatatttattctttatgaaattgctcaaaggtcacttttaaagagaaggttatctatgggacagctggcaatagactagctgtatttaaagactctacacctgcattttagaaggcaccggtaattgagaacattgtaatgtactattactacactggtggagaaaattaatgaaaaatattactaggtgtataattcttaaaagcattacatttgataatttaactgtgaaaaccaaaatcatttaaattctaaaaaatactatttgcctgaacagtctgcacaccttttcaaaaggttcattaaataatcccagtgttacaaataacctccttaacctcctgtaacaacagaatagattttcaacagctgtcaaaatagattccagtatccattctattcaagtgtgttagaagaagatcttaaaactgtcaaggagtgtcagaatgtgggtaacttagtaaaaaatgtaactgagctgattccgccaactacagagaaaagaagaaagctcaaatcagctcaaagaaaaagatcaatcaaagggagaaggataaggagatcatatccaactacaggtaatgtcccaactccatgctcagataaaaagggttttctctaatagaagactgcacaacagaattctgaagaggcaccattcattccacataacagatgaacacctcctacaggccaccctgctgcttctcggggcactgctaattcaggacaaggttgccagactcagcaaatac

SEQ ID NO: 554878 - DNA, 1710 bp, Homo sapiens
tttgtatatttgtgtaagaaaaatttgtgtatggtagaagacactaaatatagccaacaaaatgaaaaataggattataggtgttatttatgtaactttttcttttttaaatctttctacaatagaaatataattcttctaagaacattgtctttttaaaaactcttctacctgctttgctagaacctgatttggacaatttgataaattttttcaggcacaagagaaagtatacttaataaaatagatttctcagaaatagcctacgtgtcaaattctatttcatccatttaatgcttctaaatctttatgctataatctagcataaacttaggtaagaacatttattttaatcagaaaacatgttaacaattgtgttgccaagcaatgcggtaaagggcaggaaccgaaagatcgtctatttcaagtaattaaatcacatttaatattaaataataacccaaacataattgtctagtttattccattgaacaaattttattttgtgtgcctactgtgtgttaagcactgtactgatggttaacttgacagagtcttctttaatgctttggatttgagatcaaagaaaattcaagtctaaggggttaatctgaacagttgtccctaaatctaaagcctagtagaacagcaactcctctgatagaaattcctctgatgcataaaaaagacgctgatgttttatgcctcagctgctatgtcttatctgcaaagctctcctactcctgcacatgcaagacactccatcctcaacccaaacctcaacactgaaatgcagtgtgccaaaaatgaagtcagtctrgcacataattataattccaaaggtaaaataatgcaatgctttagttgaatcaaatttcagtgaaagcaacccaactaaagccacctgttacatgtatagaaccatcttttagcagttcagcaacaaaaaactagaaatatttattctttatgaaattgctcaaaggtcacttttaaagagaaggttatctatgggacagctggcaatagactagctgtatttaaagactctacacctgcattttagaaggcaccggtaattgagaacattgtaatgtactattactacactggtggagaaaattaatgaaaaatattactaggtgtataattcttaaaagcattacatttgataatttaactgtgaaaaccaaaatcatttaaattctaaaaaatactatttgcctgaacagtctgcacaccttttcaaaaggttcattaaataatcccagtgttacaaataacctccttaacctcctgtaacaacagaatagattttcaacagctgtcaaaatagattccagtatccattctattcaagtgtgttagaagaagatcttaaaactgtcaaggagtgtcagaatgtgggtaacttagtaaaaaatgtaactgagctgattccgccaactacagagaaaagaagaaagctcaaatcagctcaaagaaaaagatcaatcaaagggagaaggataaggagatcatatccaactacaggtaatgtcccaactccatgctcagataaaaagggttttctctaatagaagactgcacaacagaattctgaagaggcaccattcattccacataacagatgaacacctcctacaggccaccctgctgcttctcggggcactgctaattcaggacaaggttgccagactcagcaaatac

SEQ ID NO: 554879 - DNA, 1710 bp, Homo sapiens
tttgtatatttgtgtaagaaaaatttgtgtatggtagaagacactaaatatagccaacaaaatgaaaaataggattataggtgttatttatgtaactttttcttttttaaatctttctacaatagaaatataattcttctaagaacattgtctttttaaaaactcttctacctgctttgctagaacctgatttggacaatttgataaattttttcaggcacaagagaaagtatacttaataaaatagatttctcagaaatagcctacgtgtcaaattctatttcatccatttaatgcttctaaatctttatgctataatctagcataaacttaggtaagaacatttattttaatcagaaaacatgttaacaattgtgttgccaagcaatgcggtaaagggcaggaaccgaaagatcgtctatttcaagtaattaaatcacatttaatattaaataataacccaaacataattgtctagtttattccattgaacaaattttattttgtgtgcctactgtgtgttaagcactgtactgatggttaacttgacagagtcttctttaatgctttggatttgagatcaaagaaaattcaagtctaaggggttaatctgaacagttgtccctaaatctaaagcctagtagaacagcaactcctctgatagaaattcctctgatgcataaaaaagacgctgatgttttatgcctcagctgctatgtcttatctgcaaagctctcctactcctgcacatgcaagacactccatcctcaacccaaacctcaacactgaaatgcagtgtgccaaaaatgaagtcagtctagcacataattataattccaaaggtaaaataatgcaatgctttakttgaatcaaatttcagtgaaagcaacccaactaaagccacctgttacatgtatagaaccatcttttagcagttcagcaacaaaaaactagaaatatttattctttatgaaattgctcaaaggtcacttttaaagagaaggttatctatgggacagctggcaatagactagctgtatttaaagactctacacctgcattttagaaggcaccggtaattgagaacattgtaatgtactattactacactggtggagaaaattaatgaaaaatattactaggtgtataattcttaaaagcattacatttgataatttaactgtgaaaaccaaaatcatttaaattctaaaaaatactatttgcctgaacagtctgcacaccttttcaaaaggttcattaaataatcccagtgttacaaataacctccttaacctcctgtaacaacagaatagattttcaacagctgtcaaaatagattccagtatccattctattcaagtgtgttagaagaagatcttaaaactgtcaaggagtgtcagaatgtgggtaacttagtaaaaaatgtaactgagctgattccgccaactacagagaaaagaagaaagctcaaatcagctcaaagaaaaagatcaatcaaagggagaaggataaggagatcatatccaactacaggtaatgtcccaactccatgctcagataaaaagggttttctctaatagaagactgcacaacagaattctgaagaggcaccattcattccacataacagatgaacacctcctacaggccaccctgctgcttctcggggcactgctaattcaggacaaggttgccagactcagcaaatac

SEQ ID NO: 554880 - DNA, 1801 bp, Homo sapiens
ttgttaccaaactagacattgtcttcaagacccactctggccaagtcctggggtcatgtttagtcctggaaggacctccaggagatggaggtagttcttagttgaccagaggggagcaggaccacctgtgctttaaggtcatcctgatttcctggtggtcgttaatacgaaagaagctacaccaggcttgacttctctgagtcagtggtgttcagagcccttgactcaccctggacctgggcttggcaggaattkctctaaccttaggtggatgtatgggtgagtctgcacagcaacttactgttctggtgcatttgtgttggcatgcccatgtaccgggagatgccctagggacttacttatgacatactgacctagagagggtttgcgtataaaattttaacttgactcactggttcctggcagggtcaataaatatttgtggactcactgagtgaatgagtgagtgaatgaatgaaccagtctgctaagaagtgtgagcacagaatatgtgtgctgttctgacacatgatgaccctatcatcctttgaggacctaccatatagctcagttttgacactgcttgtgatttttttttttttttgtctttgagacagggtctcactctatcacccaggctggagtggagtggcatagtcataactcactgcagccttaaactctttgactcaagtggtcctcctgcctcagcttcctgagtacttgggaccagaggcgtgtgctaccatgccagataattaaaaaaaattttttttttatagacaaggtctcactgtgttgcccagggtggtcttgaactcctgacctcaagcaatcctcctgtcttggcctctgaaagtgctggttttacaagtgtgagccaccaacccctggtcccacctgtgatatttttcaccagctcatggccgtggggagcccgactatttgcatacgtgttttttgctcagtactgacacctggtggcagtgtcccaaattgcaagcacagtctctagcattaactcagtgtcaggactttggtgtggcggaccataagaatgggagcctctggagttatgcagagagaagtagccctaccagggaagatgtaatcttgcaaaataacctacctaatgacaatgagtctcttgtcttttcttagggctgcataatcagcaccacctgatttagtggtaagaggaaaggtgctagtgggaaatgccattatttaaaaatacctggagactactgatctagtttaagaccaatatttgtcccacatttgatattagaaccaatagaatgatagaagtaatagctatggtactattaatagctcctattgaggacctgtgaacacactgctggaccctgtatatttagtatttctaatcctcatgataacctaacacatagggattattatttccattttacaaattaggaaatggagctttggtttagtaacatgcctgagttcatggtaggggctggatttgaatctcaatttgcttgacctcaaaggctatgctctttcactctgcttcaagggtactgtgttactccaggggtgccattcacattctagtcagtgtacatggcatttctggggttgtgtgacttgtagccatcctctttccatcattcccactgcctctccaggagccaatcatttatgtctcttctaagctcagtgggtgactgaggctgtgaagacatttaaaattgaataatgtatcctgtagtagatgcattgactatttctctagagttggcatcctaaaatcaaaatttttggtctg

SEQ ID NO: 554881 - DNA, 547 bp, Homo sapiens
tgtaaccccagtgaagctgccagtgaagaaagtaacagtgagatagagcaggtacatttgcacttcattgggtagaagatatctttcattgttgtttcagataaataagtaggtaactgctatatgtactctttaatagtaggagaaaatgtgatgtgtcagcaccttgtgggttgggggataccttaggctgactgggacttcatcttaaaaattagcatacgacagggcatggtggctcagctaagagtactctgtcttttttatttttttatttttttgagacagagtctcgctctgtcacctaggctggagtacagtggcacgatctcagctcactgcaacctctgcctcctgggttcaagtgattctcctaccttagcctcctcagtagstgggattacgggtgtgtgctatcacgcctggctaattttttgtatttttagtagaggcgggctttcaccatgttggccaggctggtctcgaactcccaaccccaggtgatctgcccgcctgggcctcccaaagtgttgggattacaggcatg

SEQ ID NO: 554882 - DNA, 531 bp, Homo sapiens
caccaagattgtgccactgcactccaacctgggcgacagagtgagactccatctcaaattaaatatataaataaaagcactttggggggatttgaaatgttcttgatcagggtgatggttataggggcatatgtttgtcaaaattcttaactatacatttaaaataaatatattttattacatagagaatttgattaaaacagtatatgtttaaaatgcattatctgtatatgcataaaatgcatattctatattgataaaaagactagaaagtattaacagtagcggtggcaatgtaatgttaccaaattttttaatcttaaygtttttattttattcaatgcagatatacatttataatagttattaaaatatcagtctcctataagccaattttaaaatattttatacttaaaatgctttctgcatagaaaatgtccacaggtaagaataaaacaatttctacaaaataaatgcccttttatattgtctgttgaagcccaaaacataaaatgtactccagtccttcca

SEQ ID NO: 554883 - DNA, 553 bp, Homo sapiens
cctcctttggggcttacatgggtttgcctttgagtggagaattgagctgagtgcatatacccctcagattacattgactcttttgaggcaacaggctgcagagggtctcagaatagctggtgttgctatcacagtcagtgagcaaatatagactagtatctgataatctctcatgttgagtgtgatgagcaaaatgctaggtcgttttattcaagtatctgcataagaagttatgtgcagaagactggttggtctagtccatgcctttgccmgctaaatcagtatcatttaaacaaaattttaatgttttattctcttcttgtttatttgtttctaaaataaatatagacatgtctataaatttgtatatcttcccttttaaatattagaatgctatatatttgcttttttacccttttattttgaaataattatagattcacagaaaagtacaaaaatagcacagggaggtccctgtgtacgctttatccagctttccccattgttatatcttacatcagtttaggaaaatgtcaaaaccagaaaattggca

SEQ ID NO: 554884 - DNA, 551 bp, Homo sapiens
ttttcaagatggagtcttgctctgtcacccaggctggaatacagtggagtaatctcggctcactgcaacctccacctaccaggttctagcaattatcctgcctcagcctcccaagtagctgagattccaggcacctgccaccgtgcctggctaatttttgtatttttggtagagatggagtttcaccatgttggccaggttggtctcaaactcctgacctcgtgatctgcctgcctcrgcctcccaatcctgccttctttttaaccaggccaactcttgcttatttctcaaggcctaacttaaatgtcgcttcctctgagaagcctccctacccaggcagaaataaccactcctcctttgtgtaagctcttgtcattgaatttaataagtagtgttgtatgtgcttggttgttcatgctattgtttcttctattaatcagtgaccaactccagcttctacatacatctatttttagaaatatattctttgtgtatttttcttactacaaaagtaatagaggataagtgcagaaaatgtagataagcaaagg

SEQ ID NO: 554885 - DNA, 612 bp, Homo sapiens
tgcagggtatgtggaagttatctaattaacctcagttgtatatgaataacccacagatgtactgaattacttttggtgctatcttgtactcttcaatctgtaacacaataaaatccctttgtacgatgtctaatgagcaccctgagccataaattgcttaataaacacattttgggtgattattccaagtttttatcagcccattgatacatgtattcatgagctctcagcattcccatccagctctgcagtgcattgaggcttctctttaatggtcaccactgtggtggtttttcccttctttctggggagaaaatgggaaaaaaaaaaagaaaacttactgggttsccaccttaaaataatatcaataaaaactgagtaggacactcatgtaagagtagatttaattttcagtgttgatatagttcaattaaaacatgttaaagacaaattaaaagacatttatattttaattctggcatccaaagtattctttggacgcactttgattttttttgtgtcattaatttgtctgtactctgctgcgctgcacttcttgggatttattggatgatgttttttcattagtagtatggtaactagcagaacaca

SEQ ID NO: 554886 - DNA, 559 bp, Homo sapiens
ttcagatttcaaaactgcaagtaagccctgcagtatgattctccaaatcctttcaagcagttgcaaacccgcaaatcaatgtttctctgtttgtatgtttcacaatgccttccatctyatatccagcatgggaaaaatgaattcattgtcacaagcggttcatttgccatggcttgaacccgatgaatgcaacgtgcagaagctgagatatgctgtctttgtgttcagttctggcccgagcttccccaaagcaaaactcagccttcctattgaccatttataaaggtctcatggttaacaataatttacattttatacatatgaagttatcattaaagaaccaaagtgaactgcatttgatgttgtagagacaggtcattaagctgacagaggagggttctgggagaaccaacagcactgacatcagccatccttctcattcttaattttaaaggttttgaggaacttatcatataattggttttcatttatttttcttttcttgagtttccattttacttctaatttaagcatggaggctatgttattatcaatttgt

SEQ ID NO: 554887 - DNA, 545 bp, Homo sapiens
gcaacacatattagaaatttattaaatcacgtaccggatcagaaaaataaaataatctcaaaataggcttaaacataataatctccaactatgcttaaaaatacatatgcttaaacacatatgtataaaaacttggttactgattactacaagatccagtcatacaaacattcactgagtagtaactggggacaaattactataaattgattaaaaaaaaaaaaacatgactaggcatggtggctcatgcctgtaatcccagcactttgggaggccggggtgggcagatcacctaaggtcaggagttcaaggccctctggccaacatggtaaaaccccatctctactaaaaatacaaaaattagctgtgcatggtggcatgtacctgtagtcccagctactcggaaggctgagacacgagaatcgcttgaacccaggaggcggaggctgcagtgagccgagatcgcrccactgcactccaactgggtgacagagtgagactctgtctcaaaaaaaaaaaaaaaagaaacatgacaaagtcctttc

SEQ ID NO: 554888 - DNA, 559 bp, Homo sapiens
gataaggctctttctcattgttgtcagtgtaatttatctatttaattatagaacctagttccaggatgcttaatctgaagtatatacttggggcaaaatgaattatatcttaataataatctggaatttttatctctaacttgacatattttaattcttgctagattttcaaaatgtcataccttgaaccaccgccagatggctatgagaatgttacaaatactgtgtcaccatataatgctttctcagcccaaggcatgccagaggtaaaataaaatacatttgtaacccaagtctttaaatggttcttttgctatataaaacctgtatagaggactaaaaccaaggaaattaggtgaatcattcatgcggattcattgtttgatattcagtgctatraaaacctcatccctcaaatttaaaaaattataataaaatagaaaacaacaccagacagagaaaaaagaaacaaaacaaatacattaaaaactgaccctgctgaagcagatgacactcttcgaaataacaaagaaactgctgaacacacctttaattcagt

SEQ ID NO: 554889 - DNA, 1197 bp, Homo sapiens
caacctaagtgtttatcaatgaataaatgtataaagaaaatatgctatatacacacaatggaattctatttggccataaaaaagaatgaaattatgtcatttgtagcaacatggatgaaatcagaggtcattatcttaagtgaactaagccagccacgaaaagacaaatattgcatgttctcacttatatatggagcaaaaaatttgattacatggaggtagagagtggaaagatagataacagagactggaaaagtgagttgggagatgggagaggattaagagaactagattaaaaggtacaatcatacagtaagatagaaggaataaattcattatttgatagcagagtagagtgactatacttaaaaaaatatagtattcaggtgatggacactgtaaataccttgacttgatcactataccttacatacatgaaacaaaacttctcatgtactccataaatttgtacaaataaaaaataaacaacagcaagaattaatacaacagactgaaatagaggctggtcctccattctgggtcctaggatgaagaacaggtggaaagagccacagctgactcacagtggacaacagtggagtgagaactaaatatttatggttacaagcaattagaacctgggaatgttttgtaatttccacaaaattttgtctaagttgactgatccatcgcctttccttgtattctcatagcattttataattctcatcataaaatggcacaaattccagtgaagtatcttttaacctgctctccacttgacccccttctaccacaccccaacctgtaagggtggagactgtatatgtcttggtcattcttgtaaacctagcacccagtactttgatgaatgaatagtaggttttcaacacatattcattcaatggaatgacttttaaccttttgttgatgggaaaatcaattttcctaggtgtgcttaccacacatagtggcctggaatggagcaccatttccctttgtctttaacttttaacagttkgattatgtgtctcgatgtgaatttttggggatttatcttatttggtgtcccttgtgtagaacaccatttccaagtatgttctccttattgaggagaagatgatagctctaatctcccttcctaaggacaggctactcctaaatatatggcttaggtgacattagtctttgatagtg

SEQ ID NO: 554890 - DNA, 656 bp, Homo sapiens
  misc_feature 542: n = A,T,C or G
tgttggccaggctggtctcaaattcctgacctcgcgatcggcctcccaaagtgttgagattacaggcgtgagccactgcacccagccaatttctatttattttttaattgcatgctttaaaaaaatttgcattcatgttttacgtgcatgtgtaaacattacaatctatggtcaaacattttttctgagtggagtacagtcttgtaacagtaggtaatccagcagtgtccacaagatggacctgtggggccccagacacccattgtgttcgtgtatttaataatttcacttgaaggctcactgttatagtgtttctgtgtggatatcaagactgcttactcgtttttacttatcattagggtgaygaaggtttttgctttccagtctcaggaaattcacacaatatttgcctaccaaggcttttaggttcataaagcaacattaaaatataaaataaatcgtattgaacttctggtattactactgttattacctaaattttgtcacctgtggtgagatacattttcaatcttttttccacnttgtgaaccaaatgctccctttaggtttctttacaattgctatgtggctaattgctttcagctacaggaagcctagatatgtatgggtttctaaatgaattaggccttcaaaaa

SEQ ID NO: 554891 - DNA, 656 bp, Homo sapiens
  misc_feature 542: n = A,T,C or G
tgttggccaggctggtctcaaattcctgacctcgcgatcggcctcccaaagtgttgagattacaggcgtgagccactgcacccagccaatttctatttattttttaattgcatgctttaaaaaaatttgcattcatgttttacgtgcatgtgtaaacattacaatctatggtcaaacattttttctgagtggagtacagtcttgtaacagtaggtaatccagcagtgtccacaagatggacctgtggggccccagacacccattgtgttcgtgtatttaataatttcacttgaaggctcactgttatagtgtttctgtgtggatatcaagactgcttactcgtttttacttatcattagggtgacgaaggtttttgctttccagtctcaggaaattcacacaatatttgcctaccaaggcttttaggttcataaagcaacattaaaatataaaataaatcgyattgaacttctggtattactactgttattacctaaattttgtcacctgtggtgagatacattttcaatcttttttccacnttgtgaaccaaatgctccctttaggtttctttacaattgctatgtggctaattgctttcagctacaggaagcctagatatgtatgggtttctaaatgaattaggccttcaaaaa

SEQ ID NO: 554892 - DNA, 526 bp, Homo sapiens
ttttttttttttttttttcctgagatggcgtctcgctctgtcacccaggctggagtgcaatggctcaatgttggcccactgcaacctctgcctcccgggttcaagcgattctcgtgcttcagcctcccgagtagctgggacttacaggcgcctgccaccacgcctggctaatttttgtatttttagtagagacagggtttcaycatattggtcaggctggtcttgaactcctgaccttgtgatttgccaccttggcctcccagagtgctgggattacaggcgtgagtcaccgcacccagccaacaatgcgtatgacttttaagttgcatcccctggcaccatctcgattccatgcatatatgtctctagaaacctttccttgtgtgccacatatctagataagggcccattggacaccctccaaaaaagccttctctacacttagaatcttcctgggagcgacactatctttatggtctagaagggaatgaggaggctccgtgacatgatgtcatcatgaccccac

SEQ ID NO: 554893 - DNA, 526 bp, Homo sapiens
ttttttttttttttttttcctgagatggcgtctcgctctgtcacccaggctggagtgcaatggctcaatgttggcccactgcaacctctgcctcccgggttcaagcgattctcgtgcttcagcctcccgagtagctgggacttacaggcgcctgccaccacgcctggctaatttttgtatttttagtagagacagggtttcaccatattggtcaggctggtcttgaactcctgaccttgtgatttgccrccttggcctcccagagtgctgggattacaggcgtgagtcaccgcacccagccaacaatgcgtatgacttttaagttgcatcccctggcaccatctcgattccatgcatatatgtctctagaaacctttccttgtgtgccacatatctagataagggcccattggacaccctccaaaaaagccttctctacacttagaatcttcctgggagcgacactatctttatggtctagaagggaatgaggaggctccgtgacatgatgtcatcatgaccccac

SEQ ID NO: 554894 - DNA, 526 bp, Homo sapiens
ttttttttttttttttttcctgagatggcgtctcgctctgtcacccaggctggagtgcaatggctcaatgttggcccactgcaacctctgcctcccgggttcaagcgattctcgtgcttcagcctcccgagtagctgggacttacaggcgcctgccaccacgcctggctaatttttgtatttttagtagagacagggtttcaccatattggtcaggctggtcttgaactcctgaccttgtgatttgccaccttggcctcccagagtgctgggattacaggcgtgagtcaccgcacccagccaacaatgcgtatgacttttaagttgcatcccctggcaccatctcgattccatgcatatatgtctctagaaacctttccttgtgtgccacatatctagwtaagggcccattggacaccctccaaaaaagccttctctacacttagaatcttcctgggagcgacactatctttatggtctagaagggaatgaggaggctccgtgacatgatgtcatcatgaccccac

SEQ ID NO: 554895 - DNA, 656 bp, Homo sapiens
tctccttcctcccaaatggcttcttttttccccctgagagaggatcactgcaatgggagagaaaactaagggacaagagtgcttcccttctggggctgtccccccatgctcagaggtcagggtcagctcttaccaaagatcatgatcactgccaacagtaggagggtcttcatggtaagagttcttgggtgacaaatgcagatggactggcctagctcctctgctgggtggtctcaacttctgccccggccgtcgctcccctgctcctccttggtggctctgagacacacagacatgctctcccatccaacctaagtccagggtgacttcctctgtcacactcagagcacacaaggagtgccctccagcaatgcacacacacacacacacacacacacacacaaccacctcctgacccgttcccagctctgcagaatggtttcacacacatcaggccctcagacctgtggagaaccccatgatacactaatgagacctcccctgtacctcatcagactgagagttcttgggaggttggaaccaggttcctcccaactacctgggaggttcctgaggtcagaggatgtgtccctcgctagacatagcttgcatatccccacactggattcaaggcttggagtctccaaggcayccat

SEQ ID NO: 554896 - DNA, 928 bp, Homo sapiens
cagtaaaattaaagtcatattaagaagtatattttcaagaaatatttgagagattgtttttctaatatgcctttcaaatttctcaaaattatactggcagctttcatgtagatcttgctcatcgaggggaaagtgattttttttttcaggtagtaactttaatcaagtcctattataacatttctaatttctttagtttaaaacctgacaagagtgtcaagtagtaaagtagtgagaacatattaaaatatttcccatatacaacatttcattataccgtcctttgtacatagaatcatttttgttcatcaagatagatttcaaatagaaataaattttgaacacaatcttggttaagttcttacactgaaacttaaccattaaacttcgatgaagtgtagcaagattatacaaaacaatcttttcacatctgaatgagactggacatttccaatgtaccatcaatatcatttgttcgcttattaaaattttgtttcattatgaaatacttaacaaatttactttagtcctgcaatttggcagctaagtgttacacatttgaattctgaggttagtccactatattctctttgtcactgatttgcctattaccagtttttgctataaatggaagaatggcttactgggttaaatttaacaaacattttattttaaaagttttctctattagttttactaaagcaaattatgtacctaggttataataacatttccaagagaaatggaattagtttccatctgtccaattttaagttgaacaaataatttagtaatttaaacagtaattgagggagttggcaataaaatagtctactctttccatgtgaatatatttcaattttatttataaatttaagccttgtaattawttttaccttgtttgcaattaaaaattaaaatttactca

SEQ ID NO: 554897 - DNA, 1712 bp, Homo sapiens
acatattactttcaggaaaagtttggatttagtccttcatgtraggaaatgacttgttagctcttttaaagcaccccaaacatagtgactttaaacaataaccattcatgatgactcacaagcccgtcaactggctaggcagttctggcctgggagggatgacagtgcttccagcagtgcccccaccatgtgtctgctgtctgatgggaactgatttgtctagaaagggcccagctaggatggctcatctctgccttatgtggtctttcatcctctggcagcatagcttgggattgttcacatagcaacttggcaagtttccaagaaagggtttggggcttcttgaaaggtaggcctgggactagcacatcttcatttatgtcacattttggtgatcaaagcaagtcacaaggccagcccagatttgaggggtgaggaaatagattccacttctacctgggaggaggtgcaaagtcacattgtaagaagcatggacacagagagggaaataattgtagatatttttgcaaacaatctacttcaggtgatgtaatccctcttatttccaaaaacagcctaaactatcatagtcttggcacaaatataatagaagtttaatgcatatgtttcaaatgagttttgccatctcgccattcatgagagtacatgtgaatgagttaataatgtgagtgtgtgctgtaccggagtgtgtgtgtgtgcatgtacatgtgaatttgtgtactcttaagtcttttgagatgcaggcttctttctgcaaggacactttgtaaagccagggcattttaggaccaaggagagcaatctgacctaaaagagcagatgatgccaggccccggcagaccccatctcaagtggcagatcataaattagagtctatttcttggtagcaatagcacattgggcaatagagttttgttttctaacatcagaaaacacatacatttgtctgcacaggaaaagtatttcctggaaaactgtctcaaaaagagcacactagagaagagacattagcttcaaatacagccatttttccagagtcttcaccataaggaacaaaaacccttcagctcccaatccacagggtctcacctgaggggtcaaggccaccaccactgccaagatgccagtacattttcacttaccctaactttgtggcctcagagaggacaatgtccataccccttacctcacccatactaaggttatagacttcctcacaactaacatttactgaatagctgctgagtaccagtcacttgtctaggtgctaggtttatagagaaaaaataacagtcatggccctgctgttatatagcccacattctagtgggagaagcggacaataaacaaagagatagtctaatacataaatacaaaaaatgtgatgaatgatatcaaggaaatgacagggtgtttttaaaaagagaataagaagggaatccagttgagtttagatgattgggtaagtcctcactgaagaggtgatgtcttagctgagatctggaggaaaagtggtataggcaggcaaagggaagaggagaggaccattctaagtggaggaaagagcatgcgcctaagtcctggggcaagaacaagtttaatgctttgggatttggaagaagctcaatgaaactaaactctagtgagtaggagagttcaagatgagagtgtagaaataggagagaccaaat

SEQ ID NO: 554898 - DNA, 1712 bp, Homo sapiens
acatattactttcaggaaaagtttggatttagtccttcatgtaaggaaatgacttgttagctcttttaaagcaccccaaacatagtgactttaaacaataaccattcatgatgactcacaagcccgtcaactggctaggcagttctggcctgggagggatgacagtgcttccagcagtgcccccaccatgtgtctgctgtctgatgggaactgatttgtctagaaagggcccagctaggatggctcatctctgccttatgtggtctttcatcctctggcagcatagcttgggattgttcacatagcaacttggcaagtttccaagaaagggtttggggcttcttgaaaggtaggcctgggactagcacatcttcatttatgtcacattttggtgatcaaagcaagtcacaaggccagcccagatttgaggggtgaggaaatagattccacttctacctgggaggaggtgcaaagkcacattgtaagaagcatggacacagagagggaaataattgtagatatttttgcaaacaatctacttcaggtgatgtaatccctcttatttccaaaaacagcctaaactatcatagtcttggcacaaatataatagaagtttaatgcatatgtttcaaatgagttttgccatctcgccattcatgagagtacatgtgaatgagttaataatgtgagtgtgtgctgtaccggagtgtgtgtgtgtgcatgtacatgtgaatttgtgtactcttaagtcttttgagatgcaggcttctttctgcaaggacactttgtaaagccagggcattttaggaccaaggagagcaatctgacctaaaagagcagatgatgccaggccccggcagaccccatctcaagtggcagatcataaattagagtctatttcttggtagcaatagcacattgggcaatagagttttgttttctaacatcagaaaacacatacatttgtctgcacaggaaaagtatttcctggaaaactgtctcaaaaagagcacactagagaagagacattagcttcaaatacagccatttttccagagtcttcaccataaggaacaaaaacccttcagctcccaatccacagggtctcacctgaggggtcaaggccaccaccactgccaagatgccagtacattttcacttaccctaactttgtggcctcagagaggacaatgtccataccccttacctcacccatactaaggttatagacttcctcacaactaacatttactgaatagctgctgagtaccagtcacttgtctaggtgctaggtttatagagaaaaaataacagtcatggccctgctgttatatagcccacattctagtgggagaagcggacaataaacaaagagatagtctaatacataaatacaaaaaatgtgatgaatgatatcaaggaaatgacagggtgtttttaaaaagagaataagaagggaatccagttgagtttagatgattgggtaagtcctcactgaagaggtgatgtcttagctgagatctggaggaaaagtggtataggcaggcaaagggaagaggagaggaccattctaagtggaggaaagagcatgcgcctaagtcctggggcaagaacaagtttaatgctttgggatttggaagaagctcaatgaaactaaactctagtgagtaggagagttcaagatgagagtgtagaaataggagagaccaaat

SEQ ID NO: 554899 - DNA, 523 bp, Homo sapiens
tgaattctgatgagggcctacttcctcacttgcagacagctgccttctctctgtgtcctcacatgacagagaaagggaggaggagagagagacacagaaagagaaactgagagagtgcgcacgagagagcaagctcttgctttctggtatctcttttttaagggacactaatctcatcatgaagacctcactctcatgacctcatctaaacctgattacctcccaaaggccccatctccaaatataatcacactggggcttagggcttcaacatgtgaatgtgagctcatagcattgacttatttttttcatctcttcatatagactactggtagcagatgagaatgaaacataaatgaagcaaagaatacatttcaacataagttctgtaaaattcattcaccagtcataaaattttatttatyacaaatcttttcataagcttattctcttcaatatgggaaattatcgttcagccagggatatgtaaaattggcatagtagaaagactaatggcttttca

SEQ ID NO: 554900 - DNA, 575 bp, Homo sapiens
ttggctctttgtaccttagctgataaaatgaagaagttaaaggaggcttatgaaaggttggtaagggcataaagaaaaggctagatttctttcccatrcctttatgtactgtagcccccagcatgattccaagaggcctagcattttgaggtcagaaagagagattatctaacaagaggaacattccaatcaatgtgtcttttactgtggacaaaaaaagtattatatatgggctttcaaaagaaggaaatgcacgtagagaaaacaatttcccgtatactagactctactatttatactaataggatacagttgtctgatatcaggaattaaccaaatttctctttgtttcaatttccttattcctaaaatagggattcaatagtacctacttcataggtggatgaaaagattaaatgagttaatatatgtaaagttctgagaacagaaactatggcccatgagccaaatcaatccagcagcctgttttgttttttttttttttttttttttttagtgatccatgaactaagaattaaaataaaatgttttaaatgattgcatttgaagtggtt

SEQ ID NO: 554901 - DNA, 644 bp, Homo sapiens
ggcaaattcttactttcaaatttcttcattttgcaagtgtagtgtctctttattctgtttttattgactaaaaagtggtggtgttcatagttgcatgattaaaaaaagtaaaagtacttaaaaatgaaaatatcaatccatcatttgtggagtagggtctgtgagacggtagactaacttctcagggagaacattaggaggaaaaaaaagtgaggaattkgcagaaaactggacctatagcctaaaatagagggcagtttatttgttatttgtctaagtcaaaggcaaaacagcaaggtaaacatcagaagtaatgttacattaatatgaacattaacagacacagtacaacaggtacactcaccaaccaagcacaaaggatactggctatcataggagtgggctgccagatgtctgttgatgtgctgggggactacccttccgttgctgaataatatgtatgtctgggagtctcgaaagagagccaagatagaggagggaagggaggaacattgggagtgaggggaagtatgggatcagcaactattgaccaactagtgggaagtaatgtattattttagcaggtgctatgcccacacggttcatgctatctgtttgtcaactctgatacaaagtatgattca

SEQ ID NO: 554902 - DNA, 644 bp, Homo sapiens
ggcaaattcttactttcaaatttcttcattttgcaagtgtagtgtctctttattctgtttttattgactaaaaagtggtggtgttcatagttgcatgattaaaaaaagtaaaagtacttaaaaatgaaaatatcaatccatcatttgtggagtagggtctgtgagacggtagactaacttctcagggagaacattaggaggaaaaaaaagtgaggaattggcagaaaactggacctatagcctaaaatagagggcagtttatttgttatttgtctaagtcaaaggcaaaacagcaaggtaaacatcagaagtaatgttacattaatatgaacattaacagacacagtacaacaggtacactcaccaaccaagcacaaaggatactggctatcataggagtgggctgccagatgtctgttgatgtgctgggggactacccttccgttgctgaataatatgtaygtctgggagtctcgaaagagagccaagatagaggagggaagggaggaacattgggagtgaggggaagtatgggatcagcaactattgaccaactagtgggaagtaatgtattattttagcaggtgctatgcccacacggttcatgctatctgtttgtcaactctgatacaaagtatgattca

SEQ ID NO: 554903 - DNA, 1014 bp, Homo sapiens
agtgctggtatagaaaacaagaggaaacatttgagaaggctgaaatgctagtggttcaggtaaaagccttaggttccccttctcctggatagtgatgtctttagatgtgaccataaatgctgaggggaccagttgggccctctggcaagtccaacatgggaaagcagttcctctaggattttggtcacaactctggaccaacagtgctgaaacccactattccccacttgaacaacagatcctgggggatgtacaaggtcttatagcaagtggaactcaaaactgctgctttgccaataacagtaaggccgagtctccttgccaggcatggcagctcaaacctgtaataccagcactttgggaggccaaaggggaaggatcactcgaggctctgagttcygggctgcagagagctttgatggtgccactgccctccagcctaggtgacagagcaagactttgtctcaaaaaaacaaaacaaaacaaaacaaaacaaaaaaacaaaacgggtttccctctcagaggctggatggaagcgttgtttgccaggactgcctcagctattgcccaggcctccactttacaaaagtggcgtgcatacctgcaataacgtagtgccctctccatgagtctcttcagagatgaattgcatgctatcttttttttttttttggagatggagtttcgctcttgttgcccaggctggagtgcaatggtaagatcttggctcactgcaacctctgtctcccaggttcaagtgattctcctgcctcagcctcccgagtagctgggattacaggcatgtgccaccacggccagctaattgtgtttttttggtagagacggggtttcaccatgttggtcaggctggtctcaaactcccaacctcaggtgatccgtccaccttggcctcccaaagtgctgggattacaggcgtgagccactgtgcccagccgtgcatgctatcttaaggccagtacattatgagaccagtgctgcccctactgcagagtg

SEQ ID NO: 554904 - DNA, 849 bp, Homo sapiens
cgccatttcactctagcctgggcaacaagagcaaactccatctccaaaaaaaaaaaaaaaaaaaaaagcaagcactggattcttcttgaacaaatatttctagaatgctttttaaattaagcgttaaaaaggagtaattatttcagttttgcatttttaaatttcatctcccatctcttattgcatttaaaaaatcagactgaggccaggctcggtggctcaygcctataatcccagcactttgggaggccgaggcgggcgggtcacctgagtttgggagttcgagagcagcctgaccaacatggagaaaccccatctctactaaaaatacaaaattagccaagtgtggtggcacatgcctgtaatcccagctactagggaggctgaggcaggagaatcgcttgaacctgggaggcagaggttgcagtgagccgaggtcgcgccattgcactccagcctgggcaacaagagcgaaactctgcctcaaaaaataaataaataaataaataaatagtaaaaaatcagactgagttgttacgtgtgcctgtgaacaatgtgactaataaatcccaataaacatgtaatatttgcttcaatgattccaagatttgggctaggaaaatatcagcatcctaaaatgataatatatataaccactactgcaaatgaaaggattataatggataagaaatatattctttggaaaatttgccccctttcaagttcctgaacctacagagaaaaaacaaataacaaatttgcccatttgaaatgctcgtttcctggtgccgtaaagaaatagtacttgaacctaagtttaatttacttagcaaggtcatttttattttt

SEQ ID NO: 554905 - DNA, 849 bp, Homo sapiens
cgccatttcactctagcctgggcaacaagagcaaactccatctccaaaaaaaaaaaaaaaaaaaaaagcaagcactggattcttcttgaacaaatatttctagaatgctttttaaattaagcgttaaaaaggagtaattatttcagttttgcatttttaaatttcatctcccatctcttattgcatttaaaaaatcagactgaggccaggctcggtggctcatgcctataatcccagcactttgggaggccgaggcgggcgggtcacctgagtttgggagttcgagagcagcctgaccaacatggagaaaccccatctctactaaaaatacaaaattagccaagygtggtggcacatgcctgtaatcccagctactagggaggctgaggcaggagaatcgcttgaacctgggaggcagaggttgcagtgagccgaggtcgcgccattgcactccagcctgggcaacaagagcgaaactctgcctcaaaaaataaataaataaataaataaatagtaaaaaatcagactgagttgttacgtgtgcctgtgaacaatgtgactaataaatcccaataaacatgtaatatttgcttcaatgattccaagatttgggctaggaaaatatcagcatcctaaaatgataatatatataaccactactgcaaatgaaaggattataatggataagaaatatattctttggaaaatttgccccctttcaagttcctgaacctacagagaaaaaacaaataacaaatttgcccatttgaaatgctcgtttcctggtgccgtaaagaaatagtacttgaacctaagtttaatttacttagcaaggtcatttttattttt

SEQ ID NO: 554906 - DNA, 1635 bp, Homo sapiens
agccagctcattgctccatttgctgggctcattgggtcataaaggctgtggccttcaaagacctgggcgtggccctgccggctgacgaggactctggctgaagggtggggccttcccgactcccgttcaggcctccttttaagacagcagcccactgtcattctttaaacagggctgatgagggaccccctgtccatttttcttcagtgggaagtcaagaccgcagtcccaccctggccattgtggaggcctggaagctgcggggcccccgcccaggacagaccagtgccccccaccctcacaagccgtccctctgggctctccaaacactgccgacggtcccaggctctggtcatcagaagggtggccccagaccggtgcccagcccaggcccccaaccgaggccccaggagccgtttcatccccccgtgtttatgcatttttaactaagttcccccaagtccacacgtgactaatgtgacgtccaaccaccgtgaacgagaggagaccagcacgacagagctgctttgtcaaaatttgtatttattgtcaaaactttaccacatctcacacatttaaatgaaattagctctactgaaatttctgaccagaaaatcaactcatacccatgattacaaaagtaataaaggtgttaagaagcaacagccagccgggcgctgtggctcacgcctgtaatcccagcactttgggaggccgagtgaggtggatcatgaggtcaggagttcaagaccagcctaacaaggtgaaaccctatctctactaaaaatacaaaaattagccgggtatggtggcaggcgcctgtcgtttcagctacttgggaggctgagacaggaaagtcgcttaaacccgggagacagaggttgtagtgagccgagatcgcgccactgcactccagcctgggtgacagaacgagactccatctcaaaaaaaaaaaaaaaaaaaaaaagcagcagcagcaaaagtgcacagacccagcgtgcacgcgtctccgccacgcctcactcccgtctgtgcgcctggatccaccgccacccgcttgtataaaaagtgggccccacacrgtgcagcttcgtagtctgcaaagaaaatgtccaaagaatgagttgtggatcctcccagccagagcccagatcccaggcaccccgccccacttcccccgaccaccaggcggccccagagcccaggttgtccctcccgccacctcctgtaatgggtccacccccaactccggtcagactggtcacagagcaccgcccagctccagccctcctctctgcatcctgggtcccagctcaggggctgcagagatcaacccagggcagaggcctggaccacgtcctccccagacacttccagaacccacacaaaagcacacatccacgttttccttgttctagaatatttggcccctttctgccccaaggatgtgggggtcaaagccccggggttccccgtccgagcagaaagcaagcaggtgtagtcccaagtcagtaggcaggtgctgctggagcaggtgcaggtgcactggtgcaggtgccgctggggaggacccgaccgccccgttttcccatgccctatacctctttaggccagatcctcaaagaagtatatgca

SEQ ID NO: 554907 - DNA, 517 bp, Homo sapiens
gtcctttatctctgccttggaatggagactatgcaagccttctcctcaaatcaatgtctctattatagattacaaaagtctattttgaaattccaaagctgaaattaacttttgtcctgtggtcctatgtgttgcctgaatactgggagaggagaggaagtgaggcatagaaagaagagaaaagagcagctgttcatattcaaaactattaaatactacayatgtctttggttgtgtgaaataaagatacacagcttagtaatagtatgacagtagaagcatatcatacatactttctacaatattcttatcaccactgaaaaatatgcctttgagttattgggctaataaattctttgcaatagttgaaaactattctattattccattttgatatctaatcatttgtttcaaaaatagagttgcttccaatttttcaatatttaatgcttcaatgaacattcttgtgcatatctcttgctcacttgataaactatttctggcagataaattccta

SEQ ID NO: 554908 - DNA, 554 bp, Homo sapiens
gaggctgaggcaggagaattgcttgaacatgccaggcgaaggttgcagtgagccaagatcacaccattgcactccagcctgggcaacaagggtgaaatttcatctcaaaaaaaaaaatttcaggagggagtggagataaatgaatatatagttgattcttcacattttcttcaatgtgatagctcacagccatcatattgtttcctttcttgtaattatttgttgtcttccctctcctacatatgmgctctggccacaaatgattgcatgtatacagtgcaatatttactcttgttttatatgctgtgagcagacactcttagaagttttctctggtggaagtgactcgggccaactgaaatgccagccatagtcttgatccctggcttctgtttcttctccttgtaactattgttccttgtaactgttgttctttacaataactcgtaaagtatcttatttatagtaaactccaggattaattgttttgaggtttaaaataataatacagaatttcaagtctttaaaagtttaatgtgaatccctacagaact

SEQ ID NO: 554909 - DNA, 554 bp, Homo sapiens
gaggctgaggcaggagaattgcttgaacatgccaggcgaaggttgcagtgagccaagatcacaccattgcactccagcctgggcaacaagggtgaaatttcatctcaaaaaaaaaaatttcaggagggagtggagataaatgaatatatagttgattcttcacattttcttcaatgtgatagctcacagccatcatattgtttcctttcttgtaattatttgttgtcttccctctcctacatatgagctctggccacaaatgattgcatgtatacagtgcaatatttactcttgttttatatgctgtgagcagacactcttagaagttttctctggtggaagtgactcgggccaactgaaatgccagccatwgtcttgatccctggcttctgtttcttctccttgtaactattgttccttgtaactgttgttctttacaataactcgtaaagtatcttatttatagtaaactccaggattaattgttttgaggtttaaaataataatacagaatttcaagtctttaaaagtttaatgtgaatccctacagaact

SEQ ID NO: 554910 - DNA, 1169 bp, Homo sapiens
tagcccaccctcataccttgcaagctgcctctcccatgtgaggttcctcacccacatctgcaatagcaaaagcaacaggacgccatccaacacgtggactcagccctttatgcgttgcaggttggttttgtaaatgccaggttggtgcagtttggactttaatatgttgattctggggagtcagggatggttttcaggaaggtaggtttgagaacctcagtcatttgyatcttttgggatgcaaacaataacaacaacagcacatatatatttagataattattttcatgtagttatttcctgggttttttttgttttgttttgttttgttttattttgagacggagtctcgctctgtcacccaggctggagtgcagtggcgcgatctcggctcactgcaagctctgcctcccaggttcacgccattctcctgcctcagcctcccgagtagctgggactacaggcgcccaacaccatgcctggctaattttttttgtatttttggtagagacggggtttcaccatgttagccaggatggtctcgatttcctgacctcgtggtccgcccgccgcggcctcccaaagtgtcatgtagttatttctataatgcctatttgttcaacaattacacatttagtatttggtctgactctcccaactgtgagtggtaagttgtcatagtcctcctaattttacatatgaagaaacagaatcagagacagtcaataaaaataccagctcacttatagagagtgcacatagaatgtgccaggcaatgttcaacatgttttgaacatgttgtgaagattaaataaatctaatttatttaataataataattataattaattataattacaataataattaataataatctaatttatttaatcttcacaacaacccggtgaggttggtattattattatccctgttttattgatgaaggaacttaggcccagagagggttagtaattttctctggccacacagctggtgaatcatacagaagcaatttgaagtcaggtagatgggttctagagccctacagcctcttactgacttgctcaacatcatgtaactggaaagaggcaaacatggaattcaaaccttggcctgtctgactccaaaccctgaattctactaagtaataatagctgacatatctg

SEQ ID NO: 554911 - DNA, 583 bp, Homo sapiens
atggttgcaagggtgataagagagacaggactcttgctttccaaccatatgaaagcagaggggaaaaaataaagccatggacataactttccctgcatggtctctcttctccaaatgtttggaaaggcactaagaaattgcagtcagtaaattttcagttgggtggatgggggaatgggatggagatggaaagattaaatgtgtcttgtgctgctgtcgatggagggacccagaatggctctcccagacgtcccccatgtgtgtcatagtggctatgtctgcaaagctggcatctgccccttggcacttgaatcttgataactgtgaagtggccaggctaagctttcaaagggagaaaattacttyaccgaagattacagtccagccctcctctggagctgggaggtacttattttgacttgcatgtgattctaagacagcccattttttggcagtgagctgtgtgaggcccaaaccagggccattctgattatggggtggggcaagccagagagctaagcagcaggcttttttctttttttcccttccaaagctgttgtgacacatattgaaaattaattat

SEQ ID NO: 554912 - DNA, 1482 bp, Homo sapiens
gtatctcctgtatatccttcatagtgactttccaggtatttcatgcagttctttggaagagataagagtctgacaccttgattcttaatgcttattaaaagtgaccccttaagaaaaaaggacttctggtccaatattgtgtctgcagtcaaatgtgggttattttttttttttcgtgttagactagtaaaggcaagtacatgtcaatttatgtgccatttctaaacaacaggtagtgaaaagcttgaagttctttactgagtaccaggaactgtgataatgcatatgcaccatgactcagtaacaatgcccattataggcacaggtgggacagcagagaccagtgtatcacatatttgtcattcctcgtataaacaaactcaagcatattttgataaccacagtctttggagtaattaaatgtatagtcaagcttacaacccttcataattcacataatctatagaaagtccaattagaatatctgaagcctggattatgaaatagcacccattatattatatgaaatgtagatttttagtacacaagtggttattaatggagctccataaaaacagcacatttcatagtcaagccttcatttaacagatatttgtgtattaactctgaaattctattagagaaaaaaagtgctgatgagattcctacccttaaacaatacacacgacatgacgggacattaaatgcagatttctggaatagttgaataaccagtcaaacagggctctagtaccagcatgtgagcaatccatggtttcataagtaaaacccaatcccaactcagagttcttcaggtggaagtaaagcctctcaagttctataaggtactaactttttgccaaccagatgttgtgcattagagtttatctagctcatcttctcatttatagggaaactgaggtcaatggagatagttatatttatcaaaggtactcagtattgacagcagctcagatttctgtattcctagtctagtgctggtactggaaagtkctgcctaatattttttatttaatagttttattaaacagatgtatcaaattttaggcttgttcacttacttaataaaggttgctgatttacttaataatatcacttactcaataaattattatttcaggtagcattgtatggtagataagagctaaggattgggattaatataaatttggttctatttactagccaagtaacttagactaattctgtgtgcctctgttttctcatctgtaaaagagaaaatcatgcctaataaatagagtgaagattaaatgagataatgtgtataaggtcgatgtcctggacacgtactaaatgtcttagtgtctccttgtctgaatgttgcatcaatcacagaagatacgtaaaaccccattggctcatctttcctctcttaaatgaagtttaaactgccgaaattattgaaacagcaattaaaatagaggttagtaagtgattgca

SEQ ID NO: 554913 - DNA, 2377 bp, Homo sapiens
  misc_feature 811: n = A,T,C or G
cttggtgaacagtagggttcctgagcatgagtgaaagcagcctggaattgccttcaaagagacatgtgtaggaatcccggctctgcctctgactagcacaccacatttgaactagagtatgcaaggatttaggagaggagaagaaactgtgaagtattggaaggttctggaaaacaaagggtagagagcagctggactcaaggtatctctctaataggcccttgttttcacctctcagacctgctttctccacaagggggaaaaggttgggacagcagtttcatttccttcttcctctctgccagcagcagcctgagatttgcttaacaatagcctgagatttgttctttctgaccccaagttcaaaatcccagggatcgctctgatttgagtaaatgcccattcttgggacaatctagaatatcccattcatataaaaaggctagagtagaggaaggatcatttcccagaagaagagtcttctgcacaaacaaaaccatagtgttgacaaatagtcatggccaatggcaatctgatggtccagggccctggatgactcctctgcaggagcatcttcagggttctagggaagtcacaggggcaagaagttaaaaatgttgagtgactactttatgccacatactttacacattatttcactgaattcttggaggtaagtagtattactcacattttatacatgaagtaattgagaaactcagaggggctcattgacttgtagcaatcacacagtgggtaggttcatctggctccaaatttaggctctgcatgcccagaggccaagggtctntcctgtgtgttgtagtattcacctcatttgattttattaaggcagtgtttgttagcatagctctgaattaaaagaaaaataagaggttgtaaatatggttctacccctccctcttctctgcagtaggagtcagcctttctcaccatctgaaaaataaaagagagcagtgcttcccttgcttcatttcttacaggttttggaattctaactttgctcattcacaaagtcaaacacttgtcatgttatgaaatgataaaayttatgttaagcccatgaccttagtaataagaagggagggagtggaaatggagtcagactgatggggtctcctctgccacactgcagctctggagccgtggaccgtgcatggaatgtctctgaacctcagctttctaattaatagaatgggaataaattaaacatcatgcattgctgtgcatttttattcagagacctataaattatttttttgtataatgttaagttttgctaagttctatttatgtagcattaaatagccaggcagtgttgcatatgatatgaagcacagggtcctcaatttaaagtgaaaccagtctgtgaggtgtaatggtaggtggcctcattggttttcagcggacattctgtatgcaatatcttttcatgcgctgttgctgggaaaaccaaagagtaaatctgaaataaatgctacagaaccaagaatgcgaaggtcattgttggctgtttggggaagggaagttaaagattagaaatggtcatcaagacaggatcgccaaattgacacctgtgaatgtttccaggaactaaacaattacactaggctagtgtccctttaaaatggtacctgtgatatccaagtggaataaagaacaacgtggccaggcagacaatctaattttactaagattgaccttgctttgggaagacatggaaatgtttcatccaaacaaaatatcattgaaattgccaagacattagaagaataaccacacacccattttaaggagacaggttgcagtggtgaaaatttattttctgagtatagcttttagttgttgttgctttacttgtcaacttggaaatccaggatcctggggttaatttccaggagggaaaaccagagagaagggtagtacagaataaaatggagtccacagggtttgaattcagacatactgccggtgaatttagctgggctactggattcctagtttgtgacatggggtgagtccaagcttcaatgtttttatagctaaaaataaagatacaaacggcagccttcagtgctgactaaacaggataacatggcaaaagagcacatttatgaagcatttattgttgccaggtatgattttaagcacttgacgtgtattgtttttgacccttataacaacccttgcaactctgttacaggtgaggagaaagaaaggtaacttcctgaagtcacaaagctagggaacacagggtggctacataaacccacacagcctgctgcaatgtcctccacacgtcctttctgaggcacattcatcaaagggatgaataaggtcccgagcagcaccgaat

SEQ ID NO: 554914 - DNA, 415 bp, Homo sapiens
gcatattactatgctgtggtactatacaattgtttgatctaaaaacagattagaaggaagatggggtgtttgtgcttggaaccctgtgctctttttaaaacctaattcagasgtttgagaaaccagcaagggctttctgtcccagtggagcttaacagttatgacagggatcggcggggagtctctttctccatctcatcgcttcagacaggtagaaatgaagactgtatcaggactaaaaatagtaccccaaatcaggggtcacaaataggcaaacaaatgagcagcacccgttaccattcctttgcaatgcactctagaaggatacaaggagatacagacatagatatatatatgctgagaccagctcggtcggggagaccctcacccagcggcactagaggaattaaagaca

SEQ ID NO: 554915 - DNA, 628 bp, Homo sapiens
gcaggccaccatgtctacaagggctgaggtggaggtggcataaagagagacaggaattcttaaccttgggtctttagagagattgtttgggagtgtatccctgatctgaagaggtatgtgtgtgtgtgtttgtgtgtctgtgtgtgtgtgtgtgtgagcacacatgcagaggagagtatttacagaggggagttctacaacttttgaataatctatttttaattgagtttttattgagataattatagattcacatctagttttagcaataatacatgcagctcccatatatcctttatgcagtttccaccactggtagcatcttgcagtgctatagtccaataacacaagcaggttattgacattgaatcaatccacctgtcttattcaagtttccccagttttttgtgtactcatgttgatgcacatgtgtgtttagttctattcaagtttatcaaatgtgaaggctcttgtactaaccatcagagtcacaacacacaacagctccatcaccaaaartacctgtcctgtctcccatttataaccatactcactccattcctccagccctgtcctgatcctaaccattggcaacagctcatctctcctccatttctaaatttttgtc

SEQ ID NO: 554916 - DNA, 524 bp, Homo sapiens
atccctcaacctgtccctggccccaaccactaaagaaacactttgtccaaaaaaatgaaacatccagagggctgagaagtaggatgtaatgaaaaattgagaacaactttttaaaaatcaaaattatatgagatttttgttgcattatgccaggagacctcattttcctgcagtgagcttttatccagtaggtgggcattgtgtccacccccacaccctacaccttgtgtcagttgtcttgcgaggagcaccaggtgagttccaaaccctatttyattagaatgcaatattcccccatagctgagagagtggtggagtcagtcaggcaagcaaataagcttggattgggtggaattaaccatctcaggagctggatcagcgctaacatgcagcaaaacagaggctgggatgggagaacagagggaagacgaccctcatgctcaccacataggctctatggggttgggaggaatctgtgcaaagaagggagatactggctgagaggtggattatggggccttctc

SEQ ID NO: 554917 - DNA, 536 bp, Homo sapiens
taaagaaaattaaaagattttctgtttaggcttttctcaccatagcttagctaaagctaaagcaatagctaacatttattgatcacctaccatgtgcctagcagtagtatagcttttggggtgttataacccattttaattctcacagagtaggtaatactattatcccttgttttacagatgaagaaactgcacaaagaaataaagcagtttgctcaaggtcttgtatgtgatagctgttatacatgacctctataatagtaggtggttgtagcaggcactcaaacccaggtagtttagttctaaaactcaagcttataaccaatatgtaacattacctccaatttcctaataacatttaagcatcctaatgaygtggtgaactgaaataccaagtaaccaccttagcttctcagtccattcaaatagagtagctgctagagttaactgagaatttagtacctgtgtttagtgcctgtgtaacaataagatgaaattcatgggactatcaagggtgacctctgttgtgcttataa

SEQ ID NO: 554918 - DNA, 3108 bp, Homo sapiens
  misc_feature 1046: n = A,T,C or G
tgcatgcctacatgcttttactttctgagcacttccttatttcctgacactacaagactctccaggctcatcttgtatttttcgcactcttgccctagaatcagccatgtctccaaaaagccctggcccctttcactgaaaaacaatctttagaaaaagcaagatctgagtgttcagcgtgctcattgctcctggggtggcactggctctagaccaagaaacttccttttaaaccataagcgagagaggcatggtggtgagagatgaggcttgaacacccactgggtttttgttgtgctgatctcagtaaggaccaaagcagtaatttacattctagatcctctgggaaaacagaataaatcccacagatgagttagttgggagaaaaacatgaacataggtgatgcagtgcatgccagaattgagagaactagatgaaaaaggagtgtgcaaggacaggcctggtgtatgcctgtgcccagtgaaattataaatcgcatgctctttgcacccaaaagtgtccccatttggactacaaattacctggtcaacttagaaactgccttgaagatgagatttgtgatagctgagccactgattaagaatattacaatgttttgctgtgtcaaacaatgtaatcattcctttgcacattttatagaaatttttataaagatttaaaccatatttcagtgtttcttggatgtcaaatgtgcctccgttaaatgtgcttcttttctctttggcacctagctgtcctccccaggctaagccctccctccaaagaggaaaagagctccatctgaaaaatccatttgctacaagagatagaaagaagttatttaggcagatagtatgggtaagagagtcctcagcagaatttcccttttaatgaaaaacagcctcaaactcgtttcttttctaacaactgcctgaaaaatcgagctgcagacatagatacaagcaagctagaagcttgcacaggtgaatgctggcagctgtgccaataggaaaggccacctgagagccaggcatgttccacatgnaggctctatcttcccttttctttgtcaccacgtgtacagtaaggaaacaggcaacatggcatcagccagatagagaacccatctgcataataaaagattagggtggggtggccagctttttcatgccctatgcaaatggcacatctagccctaaccagtttttcgcaccctatgcaaatgacacacctggtccaaccaatcttttgtgccctatgtaaatccaataccacctcctcaagctcatctataaaacctgatgyatttcacaatggaccagaaaacctgctcgggacccctctctctgcaggagagagctcttctctttctttcacctattaaacctctgctcttaacctcactgctcgtgtgtccgtatctttgatttctttggcgtgggacactgaacctcgggtattaccccagatgaatgatgctgctttgcattgtttctatagtcaattgacctcatcaattgtgctcagtttataatctctgaactttttctacctgaggcccttttggtgtcctaggagaagatatgacaaataggaggaaagaaatttagaaatttaccttctttttttttttcttcttgagacggagtcttgctctgtcgccaggctggagtgcagtggcgcaatctcttctcactgcaacctctgcctcccaggttcaagcgattcccctgcctcagcctcccaagtagctgggactgcaggcacatgccacaatgctcagataatttttttgtatttttgtagagatggggtttcacctgttggccgggatggtcttgatctcctggcctcgtgatctgcccgccttggcatcccaaagtgctgggattacaggcgtgagccacagcgcccaaccaacaaatttaccttctaaccatcttttctcgcttaccccatcctctttcagcttgacctgtatcttgggtaacatcttaaccttatgtccacagcttcctccactgtgtgtcctcgcttcacttcaacacaccatcttgaaggacacaggacacaggtagcatgggaagtaagcttcatgcaaggatctagagttcagattttgacatttgaaaccactactgtttatgcagcaagaaaaagaaaaagttttcttcttagattaaaaaaaaaaaaggcagagcaaactatacagtgtaatttgaaaactccagctgtccacccaacaagaaaaaggagtccagtaattcctggcaatgacagaaatttggtgaatgtacatagtgctaaatttggaatctagctgaacactcatttttaaattggttttatgaaacaatgattgctctagaaagtgtggtcctagaaaatttaatcaactgcaaaagaaccaatagagtttgtgaaggcttgacaattaaatcgttttaaatatttaactaaaagggtctcctggtttctttcaaagttgtaccagcaagggttacctaagtgcaagcaagcccaggtgacatttttatatttccaggaaactcttgtgccaggattcagcccttagagaatgatcaaatcttcattaaaactcccaaaagtaggaattgagaccaggaaataagacattctcactccaccagtgtgtttagtgccagagctcaaactgtgagagctgctcaggaaaaggtcttagacctggcaaaggatgtgttgtaaaaacccacagcccccatagcgacctgccccatttcctgcagaaagaggcaaggacctgcccagagccagaggtcagaaggtagctgtggagtagccctgctcaagtggcctccttaacctggtgtcctgagaatgtggctcagagccaagcctgggaaaatctggagagtccatctgaggttcaaggtacagtcccttcctctcaccacctccttcttttggggggctgtggtcgggagggtggtttcaggaagcagggtcttgctctgataccctggctgagtgcaggggcacaatcacagcccactggggcctcaacttcttggactcaggtgatccttccacttcagaatcccgagtagctgggactacagacatgc

SEQ ID NO: 554919 - DNA, 1255 bp, Homo sapiens
taccgagatcccacctggaagttatgaaatacttgcaggtagagattaaacaaggtgtctctggagggtatgacggatgtgctgtgaacgtctctccaccacatgggaagcttgacaactgtctcayacagatggagcttgatgtgtgcttcaaaagtaatctacaggcaacagcgtagctgaaaatccttggcaggggaagaggtaagtttgggaagtgcctgtgcgccctctagtggcagatctaaggggagcgtattctatgggccagatgtggccacgcagagcccacctggggttttcttaaatcctttggggccaggagatcttatcagagggaggctaaatctgtcctcccagaatcagagacataagatgcaattctgcatgaatctagagaacagcttgtgagagagggctctgaagaacccacaaattacccccacagaatgggcatgagcagatggtgtggggcatgggagaatgaaagtgtttgcagatcacaccccaggaatcttgcttgttcaacataacgacttttttttttaacttggtgtaaagggaaagttatataatattaaaatttttcattaaaaaatcatagtctgacgaatctttttttaatttctgggaaaatgtaaaccctatttaattcaccctgtgacccatagagaagtcatttgttcacattttttatgctcacatttatagatccttttcctttgctcggaaggaaacaactcaagtgattttctaattgtaaaaaaattcaccaagtatagaaaaagtctaaataagaaagtaaaaaggccgggtgtagtggctcacgcctgtaatcccagcactttgggtggtcgaggtgagagggttgcttgaggccaggagtccaagatcagcctgggcaacatagcaagaccccaaccctactaacaaaataataataataatagaagtaaaaataacttataactttaactctcagtgttaaatactggtaacacctggcaacattttcttttgttttggggggttgttggattttttgttgttgttgttttttgtttcttgttttgttcttgagtcttgttctgtcacccaggctggagtacagtggcccaatctcggctcactgcaacctctgcctcctgggttcaagtgattctcctgtttcagcctcctaagtacctggggttataggtgtgcaccaacacgcttggctaacttttgtatttttagtaaagacagggtttcacca

SEQ ID NO: 554920 - DNA, 1255 bp, Homo sapiens
taccgagatcccacctggaagttatgaaatacttgcaggtagagattaaacaaggtgtctctggagggtatgacggatgtgctgtgaacgtctctccaccacatgggaagcttgacaactgtctcatacagatggagcttgatgtgtgcttcaaaagtaatctacaggcaacagcgtagctgaaaatccttggcaggggaagaggtaagtttgggaagtgcctgtgcgccctctagtggcagatctaaggggagcgtattctatgggccagatgtggccacgcagagcccacctggggttttcttaaatcctttggggccaggagatcttatcagagggaggctaaatctgtcctcccagaatcagagacataagatgcaattctgcatgaatctagagaacagcttgtgagagagggctctgaagaacccacaaattacccccacagaatgggcatgagcagatggtgtggggcatgggagaatgaaagtgtttgcagatcacaccccaggaatcttgcttgttcaacataacgacttttttttttaacttggtgtaaagggaaagttatataatattaaaatttttcattaaaaaatcatagtctgacgaatctttttttaatttctgggaaaatgtaaaccctatttaattcaccctgtgacccatagagaagtcatttgttcacattttttatgctcacatttatagatccttttcctttgctcggaaggaaacaactcaagtgattttctaattgtaaaaaaattcaccaagtatagaaaaagtctaaataagaaagtaaaaaggccgggtgtagtggctcacgcctgtaatcccagcactttgggtggtcgaggtgagagggttgcttgaggccaggagtccaagatcagcctgggcaacatagcaagaccccaaccctactaacaaaataataataataatagaagtaaaaataacttataactttaactctcagtgttaaatactggtaacacctggcaacattttcttttgttttggggggttgttggattttttgttgttgttgttttttgtttcttgttttgttcttgagtcttgttctgtcacccaggctggagtacagtggcccratctcggctcactgcaacctctgcctcctgggttcaagtgattctcctgtttcagcctcctaagtacctggggttataggtgtgcaccaacacgcttggctaacttttgtatttttagtaaagacagggtttcacca

SEQ ID NO: 554921 - DNA, 651 bp, Homo sapiens
cctggcctcctcgctgacttcgctccctctatctctttgctccactggcctccttccagagcctcagacacaccagagagtttcctcctaatgcctttatcctgttgactcagcctacaatgctcttccctcagcaccttggccagctccatcacctgcttcaaacttttgctcaatattcacttatgaggccaaccctgaccactctacttaayactgccatctgtccccattcccaccatgctcatttctttctttctttttgaaacaaggtcttgctttattgcccaggctggagtacactggtgcaatcacagctcacagcaacttcaacctcccaggcttaaacaatcctcccgcctcagccaccctaggaactgagactacagctgcatgccacaacacatggcttttttttttttttttttttgagacggagtctcggtcgcccaggctgaagtgtaagggtgcaatcttggctcactgcaatgtctgccttttgggttcaagtgattctctgcctcccgagtagctgggattacaggcacccaccaccacacctggctaatgtttgtatttttagtagaaatggggtttcaccatcttggctaggctggtcttgaacttctgacctcgtgatccaccctcctc

SEQ ID NO: 554922 - DNA, 651 bp, Homo sapiens
cctggcctcctcgctgacttcgctccctctatctctttgctccactggcctccttccagagcctcagacacaccagagagtttcctcctaatgcctttatcctgttgactcagcctacaatgctcttccctcagcaccttggccagctccatcacctgcttcaaacttttgctcaatattcacttatgaggccaaccctgaccactctacttaatactgccatctgtccccattcccaccatgctcatttctttctttctttttgaaacaaggtcttgctttattgcccaggctggagtacactggtgcaatcacagctcacagcaacttcaacctcccaggcttaaacaatcctcccgcctcagccaccctaggaactgagactacagctgcatgccacaacacatggcttttwtttttttttttttttgagacggagtctcggtcgcccaggctgaagtgtaagggtgcaatcttggctcactgcaatgtctgccttttgggttcaagtgattctctgcctcccgagtagctgggattacaggcacccaccaccacacctggctaatgtttgtatttttagtagaaatggggtttcaccatcttggctaggctggtcttgaacttctgacctcgtgatccaccctcctc

SEQ ID NO: 554923 - DNA, 1490 bp, Homo sapiens
aaaataaaacattttctcttcttgagaggaaactttaaaaacataaataaataaataaataaataaatttattttcatgagatttctaataatttcagaatgttgtcatgattaagttagaaaatttagccaaaaataaattacgattgtgggaaaagcccttaagagcactgaccacatgcaaaatgcccgtataatattacacctatgaaacttatgtagaatcaactaagtggtagaataaaacagtttctttgttttctaactatgaagaatagcttttttcaaggaaaacaaatcatttttagacagaactacattatgatttagtttatatgtttcatagcactgaatttcaaaaatatacctcagtctatttcctaagagactatccattctaaaagatctaagcagttatgattcttccaaatgaagtgaaacagcagtaagtgaattttttgagtcaagctcatggcaaatggtgcataaatcgataaaagatgacacttgtacagccatttatgaccttgcgtgacattaaattaattcaaccacataatagtattgtctatgacttgatggaagagcaaaataacaggaacttgttaattgagagagagaggaaggcaaagaataagtacatgtcaagctggcaagctgctattctacactggaccttgtcattgaagagatgattgagggaaaaatgcttctaaggaaatgactgaaacctatgaatatcaggatggtttggctttcttaggcttgcaattcttctcttctgatttgccactcttttccttcagaagtataggaacaatagaacttggaattactaacagaagaatttagtactgaaatttaataagtacgtaaaagacaccacccctctgtctgtttagggaataagaaagcaccaaggarcagcattgtattaaatgtggttaggtcatggagggtttcctggatgaatagacatttttcctagtcctgaaaaatgagtaagagtcatttagttgagatggcgctacgaatgatggaggaaggaggggaatgttgcaaaaacagagcaagaaaaagggtgaaaaaaataatattatcattcacttagtcatcaagcctgaaaatgaagtcattttgaccaagttttccccattatgctctaaatatgtcaagttcacttatatatatataaactattttaattatatatattcagaagagagtatctggaccttgtctcaagaacctgccagagacttaaaacaattcttggaacagagtatttaaaaatatgtaatttaggctgggcatggttgctcatacctgtaatcctagtactttgagaggccaaggcaagaggagcatcactcgagcccaggaggtccagagcagcctgggcaacatagtggaaacccatctttatttaaaaaaaaaatttagccgtgagtgatggtacatgccttagtcacagctattgggaggctgaa

SEQ ID NO: 554924 - DNA, 591 bp, Homo sapiens
aaatgcagtggtgcagtcatggctcactgcagtctcaacctcctgggctccagaaatcctccctgctctaattcttgagtagctgggaaggcacttgggaaggcacctggccttgacaatgttttttaaagctgaggatgcacacaccctatgtaaagccaacaattccactactagtgtacctgctgatagattcttgctttggcaacaggagatacaggcaacaacattcactgcagaaggtttacaatgttgaaaagtcagaaacaaatgtactccccaggagggaaaaggataagtaaccatggtttattcttacaatcaaaagcactccactgcggtacaaatgaacaaaacatatttataaattaacatgaataattctgaagagtgtgaaattgaatagagatttaactcaacttcagaagcctgggagtagaggggaagggaatgggagtattggggctttagttgtattcttttaatattttatttcttcaaagagagagacaaaggtaaaacaaatgtgrcaagctgttatcatctattagatttgggtggtgaacacatatttaaatgttttgttttttt

SEQ ID NO: 554925 - DNA, 680 bp, Homo sapiens
tgaagccaagacttcccttttagcctcaaaacagagccagcttcctcccaccaccatgtgcacagaggtgtgaggrcccaggggtcaccagatggtgtttttggccacatctgctcatgcaaatagagaccatggtcagcagcagagcagcatcttaatttgttctctttttcctgcagtgtccattgcttgagaccctctgggctaaaactgaaaaaatgctgtgtcttgatggaattattttactaaaggaacaattggtcagatcctgagaatcactcctcagctattggcacatgttggttttgtctgctctgcagagttgggaaccacctgctcctggcgggaaggttgcgggtaggggcgggtgccctctcctcttccctcccctcattggttgacttactggcatttgatgtttccttggagtctgttcatcctggtcttcctggggcccctccactcttctgagctgcccacatgtagcccagcatccttagtgaggccagcttttagcactgcctgtgagatgtggtatttaaggaatgaagctgtgcagaagagccaggaaaaggtattttgaaagtgaggtgtggttttcagaggtcaaggattccaagctataggagatactgtccctaccccaagaagctcagtatccaagtgattattagatcctg

SEQ ID NO: 554926 - DNA, 1151 bp, Homo sapiens
cttcaacatgggctgcccctaggagatggaggagcacagctcacctaagtgcaccttgatacaaaggaaatgtgaacgcagtccctatctgtgaagcgggtggtactagtggccagaaacagatacggaggagtaaaccccactccccctattcactattgtggatgtagcagaggctttctctgctgggggctgacatgagtgcccttggaaacagcatttccagcactattcatggtagctgcaccccactgaaagggtacctgtaccacctgggcttgcagacagggcatgggccatctgccctccgtacacagagcagtagcgtcctagcaacacagcacagacaagccacagaattgtctgctctggaatgggggaagaggatctgccctgcaaccacttttgtggtagcagccagagaggtttatttcaagaatctcagttgcactgtggctgggagataaagcacaagtctattaattgaagatcataaaccttgcaacaagggcatgatagggaaaaggattgtgttcctgcctgcccaggacaaggaactggtgcagcgccccctacccctctccccaagacctcagcacatcccaacacaaatttcccctgccaaccccatcaaagagggtcctttcattagttatcaggctgtgaaagaaggagctagtgcctactcttaaacaccacctactggactgaagacttaactgccccaccatgtaagaaatctgctatcagaagggcatagagctaatgtaagasagacgcttcctgagacctccgcatttccaatcttgcagaagattgtgtgtttggctcatatgccaaacacattactacaacaagcagcatttgagaaagccaccacacaaaagctacccataacaccaaggaacttattcagagccttggcccctgaaagcatccagaaacaaagccaaagaaacatacacaagatacactgcagtcacattctcaaggtacaaattaaaaaaaaagaaatcccactcaaacaacagcaaattcaaaataagaagtgacagcttcttgagacgagaaggaattagtgcaagaactctggcagtacaaaaagacaaagtttttgacaccaccaaaggattgcactagctctctacaat

SEQ ID NO: 554927 - DNA, 2195 bp, Homo sapiens
agccctgaacaagctgcctgccccaccggacattctctcatgtcgctgcctcaaaattcctgcagattttgatgaggtatggacattcagaagcctgagaaactgctgcttcatcaaaattgtatctcctactttagtttgctattgtagactagagtgaaaatgacagaatttatatacctgagtcatcaagctgggacagttggtctggaagggctgttgctctaattgttggcctctatagacagcccaagctgaatgggacataaaaacgtgtgaccagccagaaagtgaaggctaaaggccaggggaaacatgggggcatggtttgtagttcatgtaattgacagggcataaaaagaagagaaggttggaaactagagtgaatagtggtaactatagttgtcgcctgttcaacgagctttcctatcctcttctcctgcttcctttgttgaactcctcctgtactccacatagtctgagtaaggctattaatcagagtatatctcttccatactccatccccactctgcaaaactacaaagctcacagggatgggcacatggctgtgcacctaggtcaggccaatgttctctttggaatgtctctgtgggagctagcacagaaggctgctaggaaaacatcatgaacagcagagacaaatggaagaaagagaaataggcgggtgggaagagggagagaggagacaaagactgaattgatattgacattgttagagcttctggatccagccatgctagatctacctcttgacttcccagttatttgaatcaataaacttctttccccttgcataagatagattgagattgatttggacaaaatgtgtcctgatgaatttaccaaggtgggccagaggacaaatggagcaagattagatgatttaggaactgatgaatcaaatactgggcatgtttaggaatctctctactgtgagtcagagataactcaccaaaggagctctactttcttagacagaaacagagcttgtaaaacccaagactgtgaataggaaaaaaaaaaaaaaagagagagagagaggtcttcaaagctcattcaacttttgtttaattattccaacagtgaaatctatctacaactgtctatgtcatatgcaaatggtgatcaccataggacattgtttagacctatcatactgaaaaagacccagcaaaaaaactagggctggtgtggggcatctctgggtgaagtgggtatcatgcactgctgctagaataatcaactggctcactttctaaaagagcattttgtactatgtactaaaatcctaaaaatatacctatttttgacctaataattctgatgtttcaggtctagtacaggctcccatctgcccaagagggactttgaagaataaatttccaagttaaaagaatccatttacataatgataagaagaatacctaagttgagagcactcgtgccatttgttaccacaattccgcttctatgttggagggatctagcaagcactactccttattattatagcaaagataattgcttttgtatttttggcttgcactttaagtagtaaatgtactctggaaaaggtatacattgcaatcaaatgaataaactacatccacctcacctccactgactatacgctcctcaagggccagcatttgtgtttattttgtttactattttgtccctactacctggaacagtgactgcaataaatacttattgaatgaactaatgaataagcatttttagaaaatgactgggaaagaagaaaatcactattgtacttcctttttccygtgagtgttgtggctataaagattagtgctttatacattttatacattttatttatttatgctttatacattttaactcagaattatgtatatggattaataaagtaacagtgggaggttagaatgtttgaacttgaacataatgtttctggaatgtttacagttacttatatgttcacaatttttaggaaaaaaataaaactcttcctccactgtaaacatttctaggaatattacattgggttaataaatatgaaaggttattgttcttgattgtaattagggtatgtgagtcaggttttgtgcaggtgctgatcagtcaacagaaggtagacagttggctcattatgtatgctcatttcaggggagctgctgatatttcat

SEQ ID NO: 554928 - DNA, 1365 bp, Homo sapiens
aagctaagtccagcagtttatgtaatatgcactaaggggagggggtgctggacacctggagaagatcaaagaaggatggaggcacttgcagtaatccaagtgtaaaggcagagcctcgagtcaggtcttgtagaagcagagccagagagaggggtgtgggtgcccatgactggagggaggactcaggaggaagagacggagggaagcagaacaagtcagggaaggagtgagatggcctcatatccgctgcagtcacacctcagcctggccccgctgggggctctggagcaggggctgcactgtggcattgatccaccttgactcacaggcaccatgtttgtaatgtggctatttccagccagcacacacaacagctgggggtgtgaccactcagtaaaatgaattgggcagggcacctgcagagttataatacatcaaccctggaacaatacacaccccttcgaatttactgacaggccaattttcaagccaaaaatacagtcctcaaaagggtgtcagtggctggccaagggaggtattagtggtgttagaaggagaaaaggaatcaatccctagagaagatgctacttcttcagggtctgatgatttcatttgcaaggatttttattggtgttttttctaagcaaagtttactggaaaatactaaaagagacccatggcagggactggaaagggaagaggaagaagtgactaagctgatgttttacgcatgactgactgggacgataacagtatcagaacagaaaggaccacattcaagtcttcttttctgtttctcagatgttcactagagccatatctgaccaaccaagttccttcaggagggactcaatcctgagatcgtcaattcatctttctctcacaatagcttcattaaaaaccccacaattcaatgctgacaaatccccattacttctcattataaatcttaaaaccataagaattagcgtcttccttactacataaacttccagacctcaaatctcaccttttttgggtaagggtaagctatttgttgacatttgcacaaacttttgcctggcagaaaatttttaaataatttctaaagaatcattcaaataaaatgccagacccaggaagaaagaacmatttcactcaccaacaacaataatgtctccctcagccatctatccacacacgtccaggcacatccctttttggtttggaactggtcaggtgtgcactgtgaaggcatgacaagttgcttcaggaaaagaacgatcaggtgcacaggctgaggcaggcagacaggctcttatctctatccccagtagatccatcacagggcataagaacagcatagctctttgagtaactggtttc

SEQ ID NO: 554929 - DNA, 612 bp, Homo sapiens
atgttcttacttataagtgggagctaagctatgaggatgcaaaggcagaagaatgatacaatggactttggggactcaggggaaaagggtgagaagggggtgagggataaaaggctacaattgggttcagtgtatactgctcaggtaaaatgggtacaccaaaatctcacaaatcaccactaaagaacttactcatgtaaccaaatagcacctgttccccaaaaacctatggaaatgaaaaatataaaatttttaaagttaaaaataaataaataaaataaaaattagctgggcatgatggcacacacctgtggtcccagctacttgaaaggctgaagtgggaggatcacttgagcccaggagttcaagccagcagtgagccatgatcatgcygctgcactccagcctgggtgataaagcaagacccagtctcaaaaattaaattaaattaaaatttaaaaaataaaaacatcttatactcataacagattaatttatccaataataacttaattttgattgcatacacaatacctccacttttactccacctcctcccatgttttgtttttgatgttacacttttatatcatcttataacatgtatccctt

SEQ ID NO: 554930 - DNA, 612 bp, Homo sapiens
atgttcttacttataagtgggagctaagctatgaggatgcaaaggcagaagaatgatacaatggactttggggactcaggggaaaagggtgagaagggggtgagggataaaaggctacaattgggttcagtgtatactgctcaggtaaaatgggtacaccaaaatctcacaaatcaccactaaagaacttactcatgtaaccaaatagcacctgttccccaaaaacctatggaaatgaaaaatataaaatttttaaagttaaaaataaataaataaaataaaaattagctgggcatgatggcacacacctgtggtcccagctacttgaaaggctgaagtgggaggatcacttgagcccaggagttcaagccagcagtgagccatgatcatgccgctgcactccagcctgggtgayaaagcaagacccagtctcaaaaattaaattaaattaaaatttaaaaaataaaaacatcttatactcataacagattaatttatccaataataacttaattttgattgcatacacaatacctccacttttactccacctcctcccatgttttgtttttgatgttacacttttatatcatcttataacatgtatccctt

SEQ ID NO: 554931 - DNA, 1670 bp, Homo sapiens
tttttaagcctgagtaacatcttggtccacttcagatattagtaataaacttttaccattttccatccaccaaaaagtcaactcctttatttatgcctttcaaacagctctaacatatgttggatgatgaggaaatgatgggaacaaagtttttgtattggtctttgtgacccaaatgagatagattttcccaaacctgctggctgggtatcatgttagattctaagatgcaaaaatgaacaagcttcatgctgggtttgtgctgtttgctaagagacagaaaagaaaaaagaagctacagcaaagggtatatgtgctttctgagatacaagaaatacagagtgctttgagayagcacaggatggaaatccctgctagtttacgctggcctcttggaggaagagatttatcagctgagacttgaaggaacagtaaaaagacagccaggtgtaaagggaagggcaagttttccagttagttggaacagtaaaaagacagccaggtgtaaagggaagggcaagttttccagttagttggaacagtatatctgaggacctgaacaagtcagagagagcttggttcacacgaagaacagatttctctcctagccgtggcaataatatattgagcttatttgctaatacagcatccctgcctctccatatatacactatatcatgagaaacttgttttattcatttgaatgttgaatttcctaatctaggaatgggaactagggagctagggatgcaggatcctgggacaggatggggactttttaatctataccttttgttatttgctgattttaaaaaattctgtgaaagtattacataattaaaaattaaatatgtaatgaaccaaatggtagcaaatcccaaacattacaaaatgcacataaaatagggaaacatatcatctgtaatgccatcattcagagatgttcagtcaacaatttttgtgtgtttatatctctctaaacttctaactatgcatttgcatgtgtacacacacatctctgtttcaaaagctgcttttctcatttgaccttagaagatgaatataattttaatgtcaatatatgattgcatcaccatttctaatatctccatgatactcaatttcatggatatagaataattcttttaaccattgcccactttgataaatacttaggtttttttctggttgtctatggttacagtgctaattcaaaagagcaaggtacagagtagtttgtacagtgtgctaccatttaggtaaaaatggattgggaacctattgatcaatatacatattcacttggaaagttactgaattctttaccaagtgaatgttagaaactatttttagaatttcacaaaaattcaaatgaacatttattcccacaagagtgtgctatactagaaataacctataaaacccttttcacagagaagacaatcctcttcaacccctccactcttctccacctccagtccttgaccaccaaccagataactttttaaaaaaaacagattctccaacctgtccctttgccatcctctgccctgtaaccttctgtactttttttttttcatgaatcacctatcattaccaatcatcactctaagggggacagccctcatccgtgcacacactattcagtgcccagggcctgagtattttga

SEQ ID NO: 554932 - DNA, 565 bp, Homo sapiens
tttgaaataacttgtttcaatgtatgttgaatgctgccttaacatataatccacactatgttgaaaattgttttcattagacttgctaatatggcagtgctgagggacaaggtattgactggcagtgtttggatactgttttaaactcatgagatattcatttatttaaattaatacttttattcattcactcattctttcattacacaagcatttattgccaacctactctgtgccagacactggagatacaaaggcaataagacttagttcatacctttaagaagttacagtcattgtttacccagtgacatattaagctgttctccttctaattgaaaaaatggaagaaccaagaaaagtgcaactaaaaaggtagacttcacagacactggtaaccagaaacagtgaagtgtttttgtgtttgtwtgtttatatctccagtgttgcttgttggagacataatagggtgacagggagctttatagatttatacagaacttccaaagcagtcctaggctctgtttgcttatactaaatgtctctttatcctcttttcttgttc

SEQ ID NO: 554933 - DNA, 565 bp, Homo sapiens
tttgaaataacttgtttcaatgtatgttgaatgctgccttaacatataatccacactatgttgaaaattgttttcattagacttgctaatatggcagtgctgagggacaaggtattgactggcagtgtttggatactgttttaaactcatgagatattcatttatttaaattaatacttttattcattcactcattctttcattacacaagcatttattgccaacctactctgtgccagacactggagatacaaaggcaataagacttagttcatacctttaagaagttacagtcattgtttacccagtgacatattaagctgttctccttctaattgaaaaaatggaagaaccaagaaaagtgcaactaaaaaggtagacttcacagacactggtaaccagaaacagtgaagtgtttttgtgtttgtttgtttatatctccagtgttgcttgttggagacatartagggtgacagggagctttatagatttatacagaacttccaaagcagtcctaggctctgtttgcttatactaaatgtctctttatcctcttttcttgttc

SEQ ID NO: 554934 - DNA, 636 bp, Homo sapiens
tggtagaccaagtaaagtagattaccattcttaaagggcagctctcatctgctcagctgaaggcctgaataggacaaaagggttgacccttttgcaagtaaaaaggaactccttcctgagtgcttgacctgggacatagatcttttcctgtttttggacttgaactgaaacatcagctctccttgggtctggagyctgacagcattcagactagaaccccactattagctctcctgggtctccagcttgctgactgcagacctcaggactgtcagcctccataatcacatgagccaactccttataataaatctcttatatgaatatataatgtctgactaatatagacaatcttgcaccttgctttagaatgtaaaggtacttaagtacctacaattttgctctcagcctttggggcctctgttaaaccttaaagtcaacaagagaagtcacattaaaattctgccagactattactcagtaattttttaaactctttcctaatttggatgattcaaatggggatcatctgtgaggcacaataaatattcagacttagacctcagacctggatgagttatgttcctctccttcccccaactggctgcacgagtgaaaacaaaaatgggctagttg

SEQ ID NO: 554935 - DNA, 846 bp, Homo sapiens
tacaggcaagttctttgcacgttttaaggtagtacagtgctctgaggtgttattctgtattgtactattctctgattttatttctccagggaagagacctcattttgtcctccatgacagctcttttatctctagatgctgtggggcagagtgaaaattatacaactatgttgtcatacacatccagggtggtatctaaagcctgtgtgtgaccatccctcacctcctaactccctgaacttctctttatagccccttgctacagctgaccactgagaagtcttattttgagrgtaagtggctgataaaaatactcaagatagtgcccttggactgtatagaaacagaaaagacagatattttttctgatgaagattctggggctgatgcacagcagatgctctcttttaatgggaggctctaaatgtcttgctttatttgatcacttgtatacagctgctgaagatatatttctcttcagggggaagcataggtgaggagtatacaattttcagaaaacagttgggggacaaatcttatgaaattatgcaaacgtcactctttgcctcttaatattgatctctattatataattttccattttgtaccctatattttaatgtctgttacgttccctcattcataggcactctgttgcccttgaccaatttccttccaggagacatcagaaggtgcctccaagtgtaatcataaagtcatgcttgcatttttttccccttttgtagtgataaacagacttggctagaactgccaaatacaaagaaaaaccttcagtaaaagctaaataatccctttttagagtctctagccaaacctgcttaatat

SEQ ID NO: 554936 - DNA, 846 bp, Homo sapiens
tacaggcaagttctttgcacgttttaaggtagtacagtgctctgaggtgttattctgtattgtactattctctgattttatttctccagggaagagacctcattttgtcctccatgacagctcttttatctctagatgctgtggggcagagtgaaaattatacaactatgttgtcatacacatccagggtggtatctaaagcctgtgtgtgaccatccctcacctcctaactccctgaacttctctttatagccccttgctacagctgaccactgagaagtcttattttgagggtaagtggctgataraaatactcaagatagtgcccttggactgtatagaaacagaaaagacagatattttttctgatgaagattctggggctgatgcacagcagatgctctcttttaatgggaggctctaaatgtcttgctttatttgatcacttgtatacagctgctgaagatatatttctcttcagggggaagcataggtgaggagtatacaattttcagaaaacagttgggggacaaatcttatgaaattatgcaaacgtcactctttgcctcttaatattgatctctattatataattttccattttgtaccctatattttaatgtctgttacgttccctcattcataggcactctgttgcccttgaccaatttccttccaggagacatcagaaggtgcctccaagtgtaatcataaagtcatgcttgcatttttttccccttttgtagtgataaacagacttggctagaactgccaaatacaaagaaaaaccttcagtaaaagctaaataatccctttttagagtctctagccaaacctgcttaatat

SEQ ID NO: 554937 - DNA, 885 bp, Homo sapiens
ttgcatgtcacctgtctctcacatcagactctgtcctccagaaaggcagggattttgtctgttttgtcattgatgtattacccaatacctagcatagagcttggcacatggcattcctcaaaaagatttgctgaataaataaataatgacataaatatttcctttaatatgcagtactcaacctgaaaaagaaagtattactcatttaataactggagtatgctstcttccactttaatcaggggtcagcaaataagggcccttgggccaagcctagcagttttgtttttgtaaataaagttttattggaaaacaaccatgcctgtttgtttatggctgcttttgtagagagaaagtataaccccaaacatttactatctgacattttacaaagtttgctgaaccctgatttaaagaaatgcgagttctaccactagacagctttccctttgggtcttggccgccagaaagctgagatcaatgagatacatcaagctaggcagtttggtatatttgctgcttctaccctctgcagaatttctaattttctgttttactgtaggcttccttacatgattttgggaattaggtagatgataaattaggaaagaaaaataaaaagaaataatgcatcctgatatgatgtactgaggatgtaaaatatcaacagatagtactcttggcaaaaatagttaccctgaatttactcatgaggaacatgacagatccaaattgtgagattcaaattgcagggcattctacaaaacacctagcctagcctccagaaaaacatcaacaccataaaagacaaaaaaagatgggaggactgtatttttagtaaaggacatggcaacgaaatgcagtgtgtgactcttaattggatcc

SEQ ID NO: 554938 - DNA, 1433 bp, Homo sapiens
tacagtgatatacaccagaagcttctgatctggcttattcactaactctgactttctacattgcatggggtcgtccaactatgggaaaaggtctccattatttgctatgcataagatgatctacacataagccagtcttcttttagcctcttcatgttccacagttccataagagcagcctgcaatcatttactcagcacacatgtatgggggcctaaggagggctggtgctgttctggtccaacataagcacagagaaggacagaacacagtgctggccctcaaaaatattttgatctkcacaagcacttcctggtgcctgaaatgctacccaaccacaagacccagatggggctgaaaagagcaaatggtgaattcaggaacactcagactgtattagggtaaaacaaacctccctacatcaatcaactggggatcaactggggacagctcacaatgttttccatccagaaatgaccataactttcttttcaaaggggtctgaaagcatctgggagcatcacacctccccgggaaggatttgggatcagctgcacatttcagccccttatttatttcttttggcagcaatgaattgacatcagaatccaagtctatttccatcattttaaaggaagcagtgaagggaaaggggccagatgctctctcctttgggcctcttccttttgtcctaaagctcaaaacctttacatgaacaggcaactcccacctgcttcttggttttggccagtacaacctccctggccagctccagccctgtgggatgaccaagctgtgtgctggatcaacagggactctcgatatcttacagatttctttgcattctccatcgcatgtcaataaaaaaaattaaccaaccgcttttaatagctggaaaacatgtcaaagaagtctggctgaactaggaatgttttctatttggtaaaatgttgaattagcatcttctctttgctgcctgaacatcagtgaagcttgaaattgatatggttccttgggggatggcagtgacaccgggctgccatacatcccaggatagggtacctgccacacgcattgcccccactcactcctatctgaggaccaataaggggcttgtagaacagagggaatccagcggtcaactggtcaacccttctgccccgtgactcagaacttttcaacacagagtaacaatccttaacacacaggaatgcttaggaattatatcccatttgatgagaatcatttttttttttttttttttgagacagagtcttgctctgtctcccagactggagtgcagtggcacgatctcagctcactgcaagctctgcctgccgggttcatgccattctcctgcctcagtctccccagcagctgggactacaggcgcccgccactacacccggctaatttttttgtatttttagtag

SEQ ID NO: 554939 - DNA, 511 bp, Homo sapiens
tttagttctgaaaagcatwgtttgaaaagtgtcaacttaaaaaaagaacatgactatataggacatgtcaaatgtcatcaaactcttttcttatccttatattctagagatttttacagaataatagattttgctttgcaaaatctaggcacccacaggttatataaaatctgagaccctgtaaaacgttcaattttctataagagtatcaaaattccattttatatagagggatgaaaaaagtaataattcctacccaaaatgagtgaagctatcatttacattttatttgtgcaatatagctagattctgaattctaatttgatttatggtattttgattataaatttgagaaatcatggaacttctttatatacattatataagcatattattcgttcatagaaacatggaatagttggccctatcagcttctttgccataactcatacaaagttctccttgagcataattttgaatccccttatcaactatacctcctttttctaaa

SEQ ID NO: 554940 - DNA, 513 bp, Homo sapiens
aagcaaagaccaattctaaagtggaatctagagtgaaatcatatctatctatctatctatctatctatctatctatctatctatctacacatatatgaacctttgacattatcttccattagaaattgcaccgattggtcatcaaaaggaagaagaaacagattgttgaaaacacattaatggttcttgaaactgttctaatcagcaaaggcatcagtactgggaagaagtctgagaaggtaactattagttatctatttatgcataataaattaacctagaataacagcttaaaacatacatctcacaattttttaagcccaggaattcaaggtgaattagtggagtggttctggctcagggactctgatgaggttgtaattaggatgtcaactagggctgctgatacctgaaagctgctcccaggactggaggatgagcttccacaacagctcacgcacgtggctgttgggtggagscctcgctgttgggtggaggcctcagttcttcatc

SEQ ID NO: 554941 - DNA, 648 bp, Homo sapiens
cacaaaaatccctaacaaagatgttcattccagtgttatttataagaaataaatcagaaacaacctaaacatttaacaacagaaaaatggttaagcaaatcatgactcaacagatgaggcaatactaatactagcagtgaaaatgctatgaatgatttctgatttaaaaaaaaaaaaatctggccaggcacagtggcttacacctgtaatcccagcactttagtaggaggccgagggcagatcatctgaggtcaggagttcaagaccagcctggccaacatggcgaaaccccatctctactaaaawtacaaaaattagctgggcgtggtggtgcacacgtaatcccagctacttgggaggctgagacaggagaatcacttgaaccctgggggcggaggatgcaataagccaagatggcgccagtgcactccagcctgggtgacagagcaagactccatctaaaaaaaaaaaatctgcatgatctgccatcagcaggtccaggaaaaaaaaaagtataagggcaactaagaaaagcagaaaataaaacaatacaatgaaattccaattaaattttaaagcataaagaaaaactaaaacattatcagttttctctggatattagtattatatatgtttttttctatgtga

SEQ ID NO: 554942 - DNA, 503 bp, Homo sapiens
attctgaggtttgtactctctccctgtcttactacagtgtgaaataaaattgtccactcacaaaaggtctgaagcaaacttactcatgtaaccaaacagcacttgttccccaaaactattgaaattaaaaaaaaaagaaaaacccagctcttcatttaataaagtcaaactttgcagaattacctaagtaaaaataaaaagttttaccattttctttatttttcagaaattatctttgttgagtatttggtgatactttcttgatcttttctatgtgtaagtacacttatatagacacayaaataaatacattaaaagcacacatgtgcatgggatcacaataacatagtggtctacaacctgctttttccccttggcaatatattatgggcatctttctgtggtattacttaaagatctaaatcactaacttttaaaattcatctgtattaaggcataatttacacacaataaagtacaactcttaaatttgcaacttgata

SEQ ID NO: 554943 - DNA, 503 bp, Homo sapiens
attctgaggtttgtactctctccctgtcttactacagtgtgaaataaaattgtccactcacaaaaggtctgaagcaaacttactcatgtaaccaaacagcacttgttccccaaaactattgaaattaaaaaaaaaagaaaaacccagctcttcatttaataaagtcaaactttgcagaattacctaagtaaaaataaaaagttttaccattttctttatttttcagaaattatctttgttgagtatttggtgatactttcttgatcttttctatgtgtaagtacacttatatagacacataaataaatacattaaaagcacacatgtgcatgggatcacaataacatagtggtctacaacctgctttttccccttggcaatatattatgggcatctttctgtggtattacttaaagatctaaatcactaayttttaaaattcatctgtattaaggcataatttacacacaataaagtacaactcttaaatttgcaacttgata

SEQ ID NO: 554944 - DNA, 381 bp, Homo sapiens
atgagtgatttatgattatagatggatagaagaaaagtgtgatggtgaaaatgatggtaaaatttaagccatcataggagaaagggatttttaaaaaayattattctgttaacttttttgtaagtttgatctattccaaaatatgtcattaaaagtacagaaatgctgggataaatagtatcctgatagaatgagataatgagctttctatcattattaggcaaaaatttaattagccactagcagaatctactctctcaggttaattatagtggaagtatcccaaaaatggaaacgagagttactcagttttcaatcagggtgacagagtcacaaaactctatgacccacagcaaagcagtgttcattcaccaggaattt

SEQ ID NO: 554945 - DNA, 552 bp, Homo sapiens
ccagaagcctcaaccatccagaactaaaatttatgaactttgactcatgcagcaaacatttaggccctcattttgagtctctcacatttctttctgtttttttggggagggggcgaggggcagggtctcgctgtgtcgccttggctggagttcagtggcatgtgaatagctgggtctaccggcgtaagccaccatgaccggctaattcttttatttcatttgttggtagagatagggtctcacctcaccacgttgcccaggctggtctcaaactcctgggctcatgcaatcctctggcatctgcctctcaaagtgctgggattacaggcgtgagccactgcaccyggtttatttcattttaattcttattaaaattatatttttaaatgtatcccaaatatcctttattgatctctattatctgccggccctgggctgggcattaaacagactgatagataattaagacatcgtcctcatgccctaagagctcacaatctagttgaaagctacacatctgcaatttaccacatgacaagtcagactaggcca

SEQ ID NO: 554946 - DNA, 552 bp, Homo sapiens
ccagaagcctcaaccatccagaactaaaatttatgaactttgactcatgcagcaaacatttaggccctcattttgagtctctcacatttctttctgtttttttggggagggggcgaggggcagggtctcgctgtgtcgccttggctggagttcagtggcatgtgaatagctgggtctaccggcgtaagccaccatgaccggctaattcttttatttcatttgttggtagagatagggtctcacctcaccacgttgcccaggctggtctcaaactcctgggctcatgcaatcctctggcatctgcctctcaaagtgctgggattacaggcgtgagccactgcacctggtttatttcattttaattcttattaaaattatatttttaaatgtatcccaaatatcctttattgatctctattatctgccggccctgggctgggcattaaasagactgatagataattaagacatcgtcctcatgccctaagagctcacaatctagttgaaagctacacatctgcaatttaccacatgacaagtcagactaggcca

SEQ ID NO: 554947 - DNA, 696 bp, Homo sapiens
taaattccatttctgctgaagccagccaggctggactctgttatttacaactaagaaccctgaacaatataagtgggtttagcagcgaggatgaaaaggaggtgaaaggacaggggcatgctgaatgtgaggtgccagtggggtatcgatgtggtgatgtccaaggggctattggctctatgggccaggagcatggggtggcctgtgctgggaacactggtgtgagatcatgaatgtgtaggtggctgtgaggcctatttgggacgggtgcggagggacgggagagcatcgagtgtggaacctcagtgaacagcttcgtttaagagatagcaagaagcaggggagacttagaaggagactgagatgggaggatctagacaaaatggtgtcatgaaaagtaagacaggaattcaaagaaagagtagtgcctcggtcaaaaaggcacagaagggcaagggagatgaggagtgaaaamacgatgccttgcgtttgacatttaaaaggctaaggatgggccaggcaagatggctcatgcctatagtctcagcattttgggaggctgaggtgggcagaatgcttgagcccaggagttcaagtccagcctgggcaacatggcgaaacaccatctctatgaaaaatacaaaaattagccaggcgtggtggtgtgcacctgtagtcccagctactgaggtggga

SEQ ID NO: 554948 - DNA, 595 bp, Homo sapiens
gaaagctgccatgtgaggacatagtgagaagagagcaggcagtgtgcaagccaggcagagagccctcacccaaaattgaattggtcagcacctaggccttggactttgcagcctccagacctgtgagaaaacaaaaaaattattagttcaagcagactaagacaactatatgataatctcttagctctttcactgtcactttattttcacaattttatggcaaccttcatatatcaaatgcagacaaatcaataaacaaaatgttcaacactgttagrtattgcatgggatattaatagagtaatggtagagaaatagaagagtgatcagggtaacttcatgttgaatatgtcaaggatcaagtagtgtagttaatgttgtgaaaagtaaatggagggagtgtttcaggaagagggaacagccatctcactgggcctgtgtgtatcctagaattactctttgtgtattctaaatattaaatagaaacaatggaaaggaatagacaaagttgacatttgcttagaatttggctgggagtggagagagactgaaaatatagaatttcacgaggcatgtatagaaattctttaaagga

SEQ ID NO: 554949 - DNA, 595 bp, Homo sapiens
gaaagctgccatgtgaggacatagtgagaagagagcaggcagtgtgcaagccaggcagagagccctcacccaaaattgaattggtcagcacctaggccttggactttgcagcctccagacctgtgagaaaacaaaaaaattattagttcaagcagactaagacaactatatgataatctcttagctctttcactgtcactttattttcacaattttatggcaaccttcatatatcaaatgcagacaaatcaataaacaaaatgttcaacactgttaggtattgcatgggatattaatagagtaatggtagagaaatagaagagtgatcagggtaacttcatgttgaatatgtcaaggatcaagtagtgtagttaatgttgtgaaaagtaaatggagggagtgtttcaggaagagggaacagccatctcactgggcctgtgtgtatcctagaattactctttgtgtattctaaatattaaatagaaacaatggaaaggaatagacaaagttgacatttgcttagaatttggctgggartggagagagactgaaaatatagaatttcacgaggcatgtatagaaattctttaaagga

SEQ ID NO: 554950 - DNA, 627 bp, Homo sapiens
acatgtaactgaggcacagtgaaaagttattgttcagagtgtgtactcgggaagctctcttccagagcagattaaaatctttcttttggtgtattaaaagatacacttcacatctgcctattttcaaaacggcaaagattcttacttttgagtctcaaggaaaaaaaagattttttttaaaaaggactggcatgtcgccctgttttttttttttaatgggggaagtaatttaatgctgatatttctactttaaaaacttcttttgttgcagcagtggatgtgccccgcgatttccagctttctgcggttagcaatattatcttaagtaacttttggcgcccttcgtaagacttttggatatgggacgattgtttgcgccctctaggcaagggctggatccaagttcagcaccaaagcccttcacatccgctcctgctttctctcctatctccgccagctcccgctccctcccccgcggagggagsgggggaggcgggggaacactacaaagcacagttccaactacagcctttggaaacaagactgagaaaaatacagtagaagagttacagttacagaaaggcttctggtaactttctctccaacaggcataaatttaaacacacg

SEQ ID NO: 554951 - DNA, 540 bp, Homo sapiens
cttctgtttcattactcccatctttaattcttttctggagttctggagttgctgttagcattagaaaagttttgcatgtgatagctgtttccttaaatatcatgccaatattcttgaaagcatcctcaatgctgttgaagtgcaaaaaaggaaastaatattcatcagacacctactaaatatctggcagtattctaggtattgtacatagggtatgtaatttcgttctcagaacagctctgtgaggtgggcgctattattattccagtttacagatgagggaatagatgcttagggagaggcaaggcttagggtcttcagagcaatgaggcgaatggcagggtataaagcccttagcctcttacctctcttgtcttctatgagcctgttgctggttataaacttgcttgaaaagtttgctcttagtgctaaattgtgcaactcagacacactaaaacaactatttattgtacacacatcgtgccagacacttttcatgcaacaccattaatttaatctctacagtggcagccctgtgaa

SEQ ID NO: 554952 - DNA, 540 bp, Homo sapiens
cttctgtttcattactcccatctttaattcttttctggagttctggagttgctgttagcattagaaaagttttgcatgtgatagctgtttccttaaatatcatgccaatattcttgaaagcatcctcaatgctgttgaagtgcaaaaaaggaaactaatattcatcagacacctactaaatatstggcagtattctaggtattgtacatagggtatgtaatttcgttctcagaacagctctgtgaggtgggcgctattattattccagtttacagatgagggaatagatgcttagggagaggcaaggcttagggtcttcagagcaatgaggcgaatggcagggtataaagcccttagcctcttacctctcttgtcttctatgagcctgttgctggttataaacttgcttgaaaagtttgctcttagtgctaaattgtgcaactcagacacactaaaacaactatttattgtacacacatcgtgccagacacttttcatgcaacaccattaatttaatctctacagtggcagccctgtgaa

SEQ ID NO: 554953 - DNA, 540 bp, Homo sapiens
cttctgtttcattactcccatctttaattcttttctggagttctggagttgctgttagcattagaaaagttttgcatgtgatagctgtttccttaaatatcatgccaatattcttgaaagcatcctcaatgctgttgaagtgcaaaaaaggaaactaatattcatcagacacctactaaatatctggcagtattctaggtattgtacatagggtatgtaatttcgttctcagaacagctctgtgargtgggcgctattattattccagtttacagatgagggaatagatgcttagggagaggcaaggcttagggtcttcagagcaatgaggcgaatggcagggtataaagcccttagcctcttacctctcttgtcttctatgagcctgttgctggttataaacttgcttgaaaagtttgctcttagtgctaaattgtgcaactcagacacactaaaacaactatttattgtacacacatcgtgccagacacttttcatgcaacaccattaatttaatctctacagtggcagccctgtgaa

SEQ ID NO: 554954 - DNA, 595 bp, Homo sapiens
aagcggtgagatagggcagggktgcggggaggggggtgcggaagagggatgaaagaatatgtggtgaaaagatgaaataaaaataaacatgttatcattcccagataatatgtggtctaaataaaaactccaaaagaacctatgtcaaattactggtattacaactaataagagttcacaagagttgttaatattcaaatgcaaaaacctacatttaagatcccagcaatgacaaattagaaaatgtaaacttaaaaagataaccacttataatgacaatgaaactgtaagggacttaggaaaaaagacatataagacatttatgaagaagattataaaacattatgaaagatataaatgaagacctaagtaaagaaccataccatgttcacagatataaaggttactattatgaaaatgtaaatttgcctacagctgacctataaatacaatataataatcaaaatcccaagagagtttttcatgaaacttgacaagctgtcctaaacttcacatggaaaagcaaagggctaagaatagtcatgacaagtctcaaaaagccccacagtgaatggactcaccctgccaagtgtca

SEQ ID NO: 554955 - DNA, 552 bp, Homo sapiens
atattacctcttaccattatattatattccattgcattgcattgtgtatacacacatatatctgtatatctatataatatgaatatgtgtgcatatatagtgtattacaaaatattttgtaaacattttacagtttttttyaactcagtaacactttactcatttcaaaagtaggtgtttgaaatgaagtatatgaattttcctcctattgaatatcttgatttagactaagatacttgagcacattgggacaatcagctgcacaggatgaggtgtggacagagagttttgaagctcaatggcatggggcagagtgagctgaaggtgagttccagcaggcccgagttcaaatcctacacaaccacaagatggttgagtgtgccagcaatgaccagcccctcaagacctcttttcccacattggctcctctgaggggcagagtaaatgcactaaagttcccagagcagggcctggcttgcaagtttctggtaataggggtttcatttactgttgcaaccatcttttatcatgatgggaaggggcaggcaaatg

SEQ ID NO: 554956 - DNA, 1106 bp, Homo sapiens
ggtgttgttatccagggctgaagaaatgaatcatggtcccagctttgaagcacctgtggcaacattgccagtctccctgttctttcctgctaagcccatgactccagtgtggcttgtggaggaagctcactgggactattttaaaacgtgtgcccaaggaagtgcaaatgctgtgcccagcactactacaaaccagtagctcttgtaaaccaaaaacaaaatttgaacgccccccaaccatctgagtggacttcttccttggccagggctctcctaaaatttaacctgagagactggttcaggccattatggtaagtggggatyggacacgccttattatacctctctggcattaacatcaacacagacccgaagtctgataagaatcggttacaatctactctctctgaagcctgcaacctggaggcttcagctgcatgataaaactttggtctccacatctcttatcgcaacctagacattacctttctattgatcccaggtctttagataaactcaacccattgtcgactagaaaacattctaaatctacctataaactggaactaacaacccccctcctttgagttgtcccgcctttctggactgaaccaatgtatttctgaaatgtatttgattgaagtctcatgtctccctaaaatgtatcaaaccaagctgcaccctgaccaccttgggcacatacatgttctcaggacctcctgagggctgtgtcactcatatttggctcagaataaatctcttcaaatattttacagagtttgactcttttcattgacattcttctgccattcccctgttcctggaggctcaaggaccataaacttgaatagcatgatttggctttggtttgagcctatgcctttaggtttagatctttgcctaattgactagtagactttgctgctaaaaagcatgactgcaaatctgataaacactccagcttttgcctttagatctctgaccaattctccttctcagtgacttttcctgacttcctcttctgtctgtccccttgaatgttgggggtaccccatggtttgtcttcagcctctttttcttctcatccctcactgtttcttggggaa

SEQ ID NO: 554957 - DNA, 1106 bp, Homo sapiens
ggtgttgttatccagggctgaagaaatgaatcatggtcccagctttgaagcacctgtggcaacattgccagtctccctgttctttcctgctaagcccatgactccagtgtggcttgtggaggaagctcactgggactattttaaaacgtgtgcccaaggaagtgcaaatgctgtgcccagcactactacaaaccagtagctcttgtaaaccaaaaacaaaatttgaacgccccccaaccatctgagtggacttcttccttggccagggctctcctaaaatttaacctgagagactggttcaggccattatggtaagtggggattggacacgccttattatacctctctggcattaacatcaacacagacccgaagtctgataagaatcgkttacaatctactctctctgaagcctgcaacctggaggcttcagctgcatgataaaactttggtctccacatctcttatcgcaacctagacattacctttctattgatcccaggtctttagataaactcaacccattgtcgactagaaaacattctaaatctacctataaactggaactaacaacccccctcctttgagttgtcccgcctttctggactgaaccaatgtatttctgaaatgtatttgattgaagtctcatgtctccctaaaatgtatcaaaccaagctgcaccctgaccaccttgggcacatacatgttctcaggacctcctgagggctgtgtcactcatatttggctcagaataaatctcttcaaatattttacagagtttgactcttttcattgacattcttctgccattcccctgttcctggaggctcaaggaccataaacttgaatagcatgatttggctttggtttgagcctatgcctttaggtttagatctttgcctaattgactagtagactttgctgctaaaaagcatgactgcaaatctgataaacactccagcttttgcctttagatctctgaccaattctccttctcagtgacttttcctgacttcctcttctgtctgtccccttgaatgttgggggtaccccatggtttgtcttcagcctctttttcttctcatccctcactgtttcttggggaa

SEQ ID NO: 554958 - DNA, 1106 bp, Homo sapiens
ggtgttgttatccagggctgaagaaatgaatcatggtcccagctttgaagcacctgtggcaacattgccagtctccctgttctttcctgctaagcccatgactccagtgtggcttgtggaggaagctcactgggactattttaaaacgtgtgcccaaggaagtgcaaatgctgtgcccagcactactacaaaccagtagctcttgtaaaccaaaaacaaaatttgaacgccccccaaccatctgagtggacttcttccttggccagggctctcctaaaatttaacctgagagactggttcaggccattatggtaagtggggattggacacgccttattatacctctctggcattaacatcaacacagacccgaagtctgataagaatcggttacaatctactctctctgaagcctgcaacctggaggcttcagctgcatgataaaactttggtctccacayctcttatcgcaacctagacattacctttctattgatcccaggtctttagataaactcaacccattgtcgactagaaaacattctaaatctacctataaactggaactaacaacccccctcctttgagttgtcccgcctttctggactgaaccaatgtatttctgaaatgtatttgattgaagtctcatgtctccctaaaatgtatcaaaccaagctgcaccctgaccaccttgggcacatacatgttctcaggacctcctgagggctgtgtcactcatatttggctcagaataaatctcttcaaatattttacagagtttgactcttttcattgacattcttctgccattcccctgttcctggaggctcaaggaccataaacttgaatagcatgatttggctttggtttgagcctatgcctttaggtttagatctttgcctaattgactagtagactttgctgctaaaaagcatgactgcaaatctgataaacactccagcttttgcctttagatctctgaccaattctccttctcagtgacttttcctgacttcctcttctgtctgtccccttgaatgttgggggtaccccatggtttgtcttcagcctctttttcttctcatccctcactgtttcttggggaa

SEQ ID NO: 554959 - DNA, 1106 bp, Homo sapiens
ggtgttgttatccagggctgaagaaatgaatcatggtcccagctttgaagcacctgtggcaacattgccagtctccctgttctttcctgctaagcccatgactccagtgtggcttgtggaggaagctcactgggactattttaaaacgtgtgcccaaggaagtgcaaatgctgtgcccagcactactacaaaccagtagctcttgtaaaccaaaaacaaaatttgaacgccccccaaccatctgagtggacttcttccttggccagggctctcctaaaatttaacctgagagactggttcaggccattatggtaagtggggattggacacgccttattatacctctctggcattaacatcaacacagacccgaagtctgataagaatcggttacaatctactctctctgaagcctgcaacctggaggcttcagctgcatgataaaactttggtctccacatctcttatcgcaaccyagacattacctttctattgatcccaggtctttagataaactcaacccattgtcgactagaaaacattctaaatctacctataaactggaactaacaacccccctcctttgagttgtcccgcctttctggactgaaccaatgtatttctgaaatgtatttgattgaagtctcatgtctccctaaaatgtatcaaaccaagctgcaccctgaccaccttgggcacatacatgttctcaggacctcctgagggctgtgtcactcatatttggctcagaataaatctcttcaaatattttacagagtttgactcttttcattgacattcttctgccattcccctgttcctggaggctcaaggaccataaacttgaatagcatgatttggctttggtttgagcctatgcctttaggtttagatctttgcctaattgactagtagactttgctgctaaaaagcatgactgcaaatctgataaacactccagcttttgcctttagatctctgaccaattctccttctcagtgacttttcctgacttcctcttctgtctgtccccttgaatgttgggggtaccccatggtttgtcttcagcctctttttcttctcatccctcactgtttcttggggaa

SEQ ID NO: 554960 - DNA, 1106 bp, Homo sapiens
ggtgttgttatccagggctgaagaaatgaatcatggtcccagctttgaagcacctgtggcaacattgccagtctccctgttctttcctgctaagcccatgactccagtgtggcttgtggaggaagctcactgggactattttaaaacgtgtgcccaaggaagtgcaaatgctgtgcccagcactactacaaaccagtagctcttgtaaaccaaaaacaaaatttgaacgccccccaaccatctgagtggacttcttccttggccagggctctcctaaaatttaacctgagagactggttcaggccattatggtaagtggggattggacacgccttattatacctctctggcattaacatcaacacagacccgaagtctgataagaatcggttacaatctactctctctgaagcctgcaacctggaggcttcagctgcatgataaaactttggtctccacatctcttatcgcaacctagacattacctttctattgatcccaggtctttagataaactcaacccattgtcgactagaaaacattctaaatctacctataaactggaactaacaacccccctcctttgagttgtcccgcctttctggactgaaccaatgtatttctgaaatgtatttgattgaagtctcatgtctccctaaaatgtatcaaaccaagctgcaccctgaccaccttgggcacatacatgttctcaggacctcctgagggctgtgtcactcatatttggctcagaataaatctcttcaaatattttacagagtttgactcttttcattgacattcttctgccattcccctgttcctggaggctcaaggaccataaacttgaatagcrtgatttggctttggtttgagcctatgcctttaggtttagatctttgcctaattgactagtagactttgctgctaaaaagcatgactgcaaatctgataaacactccagcttttgcctttagatctctgaccaattctccttctcagtgacttttcctgacttcctcttctgtctgtccccttgaatgttgggggtaccccatggtttgtcttcagcctctttttcttctcatccctcactgtttcttggggaa

SEQ ID NO: 554961 - DNA, 555 bp, Homo sapiens
tcaggccccacccagacctgctgaaccagaatctacattttcacatgaaacctggggacacgctggccttggctgagtacctagatacgggatttctgagttacagggcacatccatcttcaacttgaccagctagcattggatgtctaccaatatttaaacacccacattctcacttaaaaatcagtgcacaggccaggcgcggtggctcacgcctgtaatcccagcactytgggaggccgaggcgggtggatcacgaggtcaggagatcgagaccatcctggctaacacagtgaaaccttgtctctactaaaaatacaaaaaaaaattagtcgggcatggtggcgggtgcctgtagtctcagctacttgggaggctgaggcaggaaaatggcatgaacccgggaggtggagcttgcagtgagccaagatcaggccactgcactccagcctgagcgacagagcgagactccatctcaaaaaaaaaaaaaaaaaaaaatcatcagtgcgcagaacctgaaaactaaagggaactctggttttgctacagagagaa

SEQ ID NO: 554962 - DNA, 556 bp, Homo sapiens
gacggaatttcaccctgctggccaggctggtctcgatctcctgaccttgtgatccacccgcctcggcctcccaaagttctgcgatgacaggtgtgagcaactgtgcccagccttcctctccttttttttttccccaaaagaaacgcggagttggagacagacttattagcattgaagggagagatctgatgaagagaaatggggccacattgaggcagtgtcctgggaggagctgtggtttttacgtctgtcgctgttagggggaaagatgtggaccagggtggtagccagtgggcwaagggtgaggctcccacctcacagggaggtggagagaaagacatggagacagagagacagagacagagaggcagaaacagacagacccacagagagagagggaaacagagatgaagagacagaaacacacagacagacagtgatagaaaaagggagacacagaaatagagggacagatacagagatggagagaaagacagagacagatagacactaagagagacacagagagagaaagagatggagacagagagacaga

SEQ ID NO: 554963 - DNA, 2489 bp, Homo sapiens
cccagagctgcttccatatgaagaggtggaaacggattctgtgcatgatactggttaggatcgggaactgtttttttttaaaggagatttttaaaatttgttttccttgtacacatagccttaatattgtgttgctaactgccctctgggaacaaagtcataccaatcacaaatacattgcctaaagtgggatggttattactctgctgtgaattgcacctcctattatgttttaaagatgctacaaacttgagacattactatgtagatgacattcccagcaaatccccaaacaacacttaatgagatttcaaataccaggatcatgaaacagtaagagatataaggaaataaagaaaaacacagtatatgtgtagaaggcattaaaacacaaattttataattacgaatgcatataataaggaayaagttttattctaaatagcaattatatcagaactacgatacagggaataaaagtgaatattaagccattgtaccaacaataacagagccccttttctgctgcgtgatggaatttagtgtttactaaggaagaaaaaaatgcaagatatcttaaatttggtactttccaacaaatttaagaaatgtgtacacacttgaggagacttaagaagtctctgactaaaacactagaaaagaaaagcagtgaaaaaccaaataagtattactcaacaataacaacatttgttactattatattaatattaaacacactattaagcaacaacatttcagttactcactgagcccaaagtcatttttcatgaaccattcacaacactgataacctattgaaaaatgattgaaaacaaaaaagcttatttctttccaagtccttttaaagccttctcatgtgtcatttcatataatccttataacaaatctatggagtatatactgactttatctctgtacagaaaagaaaactgaatcacattcagaataagttgcaaagatccccagataatcagtgtcataggtgaaatatgatgtcacagtgtactcaagagtaatttagggaagcagtacaaatgatggttgaaagcacaggttctggggtaaatagcctgaagtcaaaatctagttcatatcctcagtggctgtgtgatcttgggaaatttcccttaactctctgtgtcttgattttatagtttcatccatttttgcctctcatatgatctggtgagcgttacactagtttatgcttctaggacactgaaaacagtgcctggctcttgataaatattaacaattttgtttcattttcttcaccttgagtatttcatggccagatggaaatcaatgtcaatatgaaaaaatgttcataattcagcaggaagaaatacaaaaccatataaacaactttgttttattggcaagtgtatttggaagctatgttaaattgagaaggggaagggaaagcctctaaggatatcgattaatcaatgactgaaagctgatgagacttgtctggaattttttttttggagactctgagacttaaaattttgacaaaataaggagatgaattgagtagtgtggaagagacattttctgaagtcagcagagaaaggagagacaaatatggtaaggggaaaatggtatgaagtaataatatgaatgaagtgctttctaaagtataacacatgtaagttgtgttaaatgtaaactatcatgattatatcattactgtctgactgatacaactatatccacctcagttagccacataagatcaattttcctatatcttagagaataccagtaacctccagttcagaaacagcataaatatctatccacagctgagcagacacatacagctagctaccagatgaaatgggctatatcttcaaatactattgttttccattttttaactgtggcaaaacacactcaacaatttgcatcttaaccactgttaagtatacaattcagtgtcattaaatgtattcacaatgttgtgcaagcatcaccaccacccatctccataattctttttgtcttgtaaaattgaaatcctgtacccattaaaaagtgactccccattccccgccctcccagggcaactacagctttactttctgtcttgatgaatcatacaatatcaaatggaatttttaagatatttaaaatcttttgtctggaagcgaagtggaagttaatatcaatggctatgccttcagtgagttctcagaccacattgcaatgtagttaactatttatcttttattacgttctagacctattatttctttctggcacaaaaatatcttctttgtagattatggcatttacctctatctccacacctttctgcgtctgtcatccacagatcatcagcctcttgcttagtctccatttaatgacaatttctatttagtatacaagagtccttccccccgcaatgcaatttcttcactctgaaaagctctgactctggctactggtctctgttatgtact

SEQ ID NO: 554964 - DNA, 975 bp, Homo sapiens
cccctccccccaccccgcaacaggccctggtgtgtgatgttcccctccctgtgtgcatgggttctcattgttcaattcccacctatgagtgagaacatgcagtgtttcatttccacttaagtatctatctctatttgtcctttattttcacttccatcctagctctatcccttgtctccttcgtgtgtctcaggataagtgccctataacattttatacttctggaaacccttcaatataatgttattagatgtaaaaataaaaagtctgttttagcgaactctttcttcacaaattatcttttcctagttccctattagacaatttttgtaggctccatatgctattaatttatattcacttttagaagaattttcatcaaaagcaaaagtcttatgtaaattgtttatatgctatttgtacttctgtgtatatatacacgcatagccacatacatatatgtaactccagaggcctgcctggactgttaaataactgtattgaacaagagcaagaaaaagctkttcaaatttcaaacaacaagttgaactgaagagctcacatctttgaatgaaatagacactagtagcctttaaaaattaaacatttctactgttttaaaaaattataggcatcatagtatgaggaaaaaatgtaataatcctttttaattcttgccattttattaaccacggactccttatgccctgacttcattggtacccctttgagattaaacagaacaattaatttaaaattctgataaataaataaattacaccatttacttgaggtactctttcacctttcaagaaatattttgagaattcattagctaaatattgctataatgcaggctagtaataaatagaaataatgatttcattgtaaagtttaaactaatgatggtatgatctggaatttttgttaacctagaagacataattagctctacaggtgaaatgaaagacaaaa

SEQ ID NO: 554965 - DNA, 975 bp, Homo sapiens
cccctccccccaccccgcaacaggccctggtgtgtgatgttcccctccctgtgtgcatgggttctcattgttcaattcccacctatgagtgagaacatgcagtgtttcatttccacttaagtatctatctctatttgtcctttattttcacttccatcctagctctatcccttgtctccttcgtgtgtctcaggataagtgccctataacattttatacttctggaaacccttcaatataatgttattagatgtaaaaataaaaagtctgttttagcgaactctttcttcacaaattatcttttcctagttccctattagacaatttttgtaggctccatatgctattaatttatattcacttttagaagaattttcatcaaaagcaaaagtcttatgtaaattgtttatatgctatttgtacttctgtgtatatatacacgcatagccacatacatatatgtaactccagaggcctgcctggactgttaaataactgtattgaacaagagcaagaaaaagcttttcaaatttcaaacaacaagttgaactgaagagctcacatctttgaatgaaatagacactagtagcctttaaaaattaaacatttctactgttttaaaaaattataggcatcatagtatgaggaaaaaatgtaataatcctttttaattcttgccattttattaaccacggactccttatgccctgacttcattggtacccctttgagattaaacagaacaattaatttaaaattctgataaataaataaattrcaccatttacttgaggtactctttcacctttcaagaaatattttgagaattcattagctaaatattgctataatgcaggctagtaataaatagaaataatgatttcattgtaaagtttaaactaatgatggtatgatctggaatttttgttaacctagaagacataattagctctacaggtgaaatgaaagacaaaa

SEQ ID NO: 554966 - DNA, 514 bp, Homo sapiens
ggtttacttagctcatggttctgcaggctgtacaagcacgcamcagctctgctcggcttctggtgtggcctcaggaagcttctactcatggtggaaggtgaagggggagcaggcgtgtcacatggcaagagaaagagcgagagaggaggaggtgccaggctcctttaaccaaccagctcttctgtgaactcatagagtaagaactcaactcactactgcaagaacagcacccagccgttcatgagggatctacccccttgacccaaacatctcccaccaggcctccctgcaacactggggatcacatttgaacatgacatttggaggggacaaacatccaaactacaccagctttaaactaacaaacttgatcaatggtactgctttgcctcccacctccccaccccctaaatcctgctgtggttctatgtaaaatttcaaaatttgtgtagacacaaacaaaatgcttcaaagtaagaaaggtacaagtaatttccactaaaaagaaaccccc

SEQ ID NO: 554967 - DNA, 514 bp, Homo sapiens
ggtttacttagctcatggttctgcaggctgtacaagcacgcaccagctctgctcggcttctggtgtggcctcaggaagcttctactcatggtggaaggtgaagggggagcaggcgtgtcacatggcaagagaaagagcgagagaggaggaggtgccaggctcctttaaccaaccagctcttctgtgaactcatagagtaagaactcaactcactactgcaagaacagcacccagccgttcatgagggatctacccccttgacccaaacatctcccaccaggcctccctscaacactggggatcacatttgaacatgacatttggaggggacaaacatccaaactacaccagctttaaactaacaaacttgatcaatggtactgctttgcctcccacctccccaccccctaaatcctgctgtggttctatgtaaaatttcaaaatttgtgtagacacaaacaaaatgcttcaaagtaagaaaggtacaagtaatttccactaaaaagaaaccccc

SEQ ID NO: 554968 - DNA, 514 bp, Homo sapiens
ggtttacttagctcatggttctgcaggctgtacaagcacgcaccagctctgctcggcttctggtgtggcctcaggaagcttctactcatggtggaaggtgaagggggagcaggcgtgtcacatggcaagagaaagagcgagagaggaggaggtgccaggctcctttaaccaaccagctcttctgtgaactcatagagtaagaactcaactcactactgcaagaacagcacccagccgttcatgagggatctacccccttgacccaaacatctcccaccaggcctccctgcaacactggggatcacatttsaacatgacatttggaggggacaaacatccaaactacaccagctttaaactaacaaacttgatcaatggtactgctttgcctcccacctccccaccccctaaatcctgctgtggttctatgtaaaatttcaaaatttgtgtagacacaaacaaaatgcttcaaagtaagaaaggtacaagtaatttccactaaaaagaaaccccc

SEQ ID NO: 554969 - DNA, 514 bp, Homo sapiens
ggtttacttagctcatggttctgcaggctgtacaagcacgcaccagctctgctcggcttctggtgtggcctcaggaagcttctactcatggtggaaggtgaagggggagcaggcgtgtcacatggcaagagaaagagcgagagaggaggaggtgccaggctcctttaaccaaccagctcttctgtgaactcatagagtaagaactcaactcactactgcaagaacagcacccagccgttcatgagggatctacccccttgacccaaacatctcccaccaggcctccctgcaacactggggatcacatttgaacatgacatttggaggggacaaacatccaaactacaccagctttaaactaacaaacttgatcaatggtactgctttgcctcccacctccccaccccctaaatcctgytgtggttctatgtaaaatttcaaaatttgtgtagacacaaacaaaatgcttcaaagtaagaaaggtacaagtaatttccactaaaaagaaaccccc

SEQ ID NO: 554970 - DNA, 552 bp, Homo sapiens
cataattataatactaacccactttgcaaacattttakaataattattctattgtaatcaaacccctttttatcacatgctgatccatccagaatctattatgccattgccctcaggacgaactgcaaaaagttccaagatttctttctaggaaaacaaacagccaatagcctaagaccaaactaactagaatatagggccctctgcatgaatatttttagacctgagcaataaatactgtgaatctattaatatgttaaagccaaccagtcattcactatgtgcaaatggctgtttaattattaaacaagcaatttcccttaaataggtttgttataatctttagactataaagactaagaatactgcttgtttattggccatgttactttcaaaaagtaacatctcaatgagattaaaatatacacaaatatctgttcacattccttcctctttctcaactctccatgctactaagtataaacctctggctgtaaccctcctagttttctgtttacaaaagacaagatccataacatcacccaacaacca

SEQ ID NO: 554971 - DNA, 513 bp, Homo sapiens
aaaaaaaaaaaaaaaagaaagaaactcctgaatacttcgaaagttgagaacacaagctctaagaggcatacttctgttagaaaaaaaatawttcaccactcatgctaatctgaaatctattttcaaattcagaacttcggtctagttactgactgggaaggtgccaaggttctacctacacctaagaagtccctagcagcacgggcgccactggaatttcccacttgtcgctgctgttgatgcaaggaaatcgcaacataagaggaaaatggggttggagccacgaggcttgcttttgccacttatcttccagagttcattctgctacatggacagaagataactggagtgaaatagatatttccctatgttccttctgcatttggttggtcaatgtcaaagtaaggaccaaattccatctgatagctaagcgcacagaaggggctcggctctgggagcagtgagggtgttggcggatctgtatggcaatactcttaagacagcttccaccag

SEQ ID NO: 554972 - DNA, 521 bp, Homo sapiens
tgaaagatttgattcaaaaatcaaacagagaacctagagaactactggggaagacaatattgctagagcaccatgatcagttacatgttggttattatacgtcccttaggctaccagtgtttcctgtaaaataatctgcctttattttttgctacgcattctgctaggtgatatcggtagaaaagttaaaaaaaaaaatgctagaggtggatctcacaaaacatagcagtgtgagggtgagcatcaacatagtatgcctctgaagtcttgaatttactcttgctatccaaattacctcactcaaacggggaaatgttccttccattaagtaatagctgtgaaaatatttatcttcaccaattcaatggatattctttggagaaatctctgtmtaatttaataaattagagtggttgagcatataatgttgtgttttgttgttgctgccgttttactgactatggctattgtgtgaatttctgtttaatcaatcaaaattatccattttgtctttaaaaaga

SEQ ID NO: 554973 - DNA, 649 bp, Homo sapiens
cggcaagcagagatgtcccagctcagcagtcaggtgggaggggctccctcttacttagcctttttgttctattcaggtctacagttgatgagatgaggtcctcccacattagggaagttaatctgctttagacagtccattgagtaaaatgttaatttcatccagaaacaccctcacagagacacccagagtgatatttgaccaaaagtctgggcaccccatgatgcagtcagaagacacataaattaaccatcacactaagagtgattcatctttttaggtaaatgaagaatcaatcacattattgatagcattcatgataggtagtgtggtatctgagttgccaaaatgacatacccaaatgaagagygtttgtagctgtgaaattcagtgattcaacttagagatgtggatttctgaccattctgcctgaaaatttacatattgaaatttatatttattaaaaatggtttttatattatagttgctgtgttaagtagatatttttggaagatatatctaataaataagttatttctgaatttcatttcaggataataaaggtatattttcaatagtttttaaagaaaggggatgaggcatgatagttcacacctgtaatcccagctactcgggaggctcattggga

SEQ ID NO: 554974 - DNA, 670 bp, Homo sapiens
gcgcccgccaccgcgcccggctagcctggctaatttttgttttgttttgttttattgtttttctttgtttttttgtagagacaggcttttgccatgttgttcagactgttcctgaactcatggactcaagccgttcgtttgccaaagtgctgggattacaggaatgagtcaccatgactggcccttttttcttttctttctttttttttgaaatggctatctggtcgtaccagtaccatttgctttaaaaaaagccattttttcttcattattttactttggtgcctaaataaagaaaatcartggactattgttgtataagaaagaatttggcttttgtcaggaaacagtgactgttaaagagaagtggtggggctgtgggttctctggggagagagaaatctctgggtcagggtgtcagtagaggtctcagggagaaggtgactctgagctggcttcctaaggataggctcagctgggggccttttaaaagctagagccttggtggcatgtgcctgtagtcccagctacttgggaggctgaggtgggaggatctctggagcccaagagttggagattacagtgagctatgattgcaccagtgcactccagcctgggccacagagcgaggccttgtttctaccaaaaaaagaaaaaaaaaaaaaaaaaa

SEQ ID NO: 554975 - DNA, 253 bp, Homo sapiens
ctgaggcaggaggatcgcttgaacccaggaggcggaggttgtagtaagccaagatcgtgccactgcactccagtctgggcaacagagtgagtctccgtctcaaaaaaaaaaaaaaaaatccatttcctttagttttttaggtgcagactggggttcaagacccagctccaccactgtcctgarcagactcccaagactgggccagctgcctcgtcagctgcctcgtctgagaggtgaaggggcaggtacttaa

SEQ ID NO: 554976 - DNA, 512 bp, Homo sapiens
tcactgcagcctcaaactcctgggctcaagtgatcttcctgcctcagctagtcctcagctaggactgcaggcacatgctaccatgacaggtgaatttttttttaatcttttgtagagataggatgtttccccaggctggacttgacctcctagcctcaagtgatcctcccacttcagtctctcaaagtgctgggattacaggccttaaccatcgtgcctggcccaagattattgttattattcaagattgaaaatacagcatatcctgatacataaaaccccaactttataaaactgttaaattggtaaaagattatttgttgcttaaaattatttcttgcttaaagtgagttaactggagtaactcttttgaatgacaagcttcccaaaagcatttaaaatgtgtcttatggttgttttaagaaaagaatgataattggtgcataactcccaagtcacatatacagaccagggtccctgtgtgccccaggaaggtctttgtggkttctttg

SEQ ID NO: 554977 - DNA, 517 bp, Homo sapiens
aatttgagggtcaagacagtctctgagccaagatgttgggtttgtggcagacccaagactatgcctgccttggcttccargccccccctggagaacttctgttggttcgttcttgtgatagcattgtcctttaggatgccatcattatgtgaatgtttcctgctatgattgtccaaagggaaaatggtctggaagtacacccacgtcaacagagttggatttccactgtggagccaggactatttatatctttcttagacctttcctaagacagaccacatctgccttacccgtcacattactccatgggtaaatactgtgttttggtttggtttggtttggtttttaagagacagggtctcactctgtcacccaggctggtgtgcagtcataactccctgtagccttgaatacctggcctcaagggatcctctcaccttagcctccagagtagctaggactacaggcacactaccatgcctaatttttaaattttttaaaatttttttgtcgggat

SEQ ID NO: 554978 - DNA, 517 bp, Homo sapiens
aatttgagggtcaagacagtctctgagccaagatgttgggtttgtggcagacccaagactatgcctgccttggcttccaagccccccctggagaacttctgttggttcgttcttgtgatagcattgtcctttaggatgccatcattatgtgaatgtttcctgctatgattgtccaaagggaaaatggtctggaagtacacccaygtcaacagagttggatttccactgtggagccaggactatttatatctttcttagacctttcctaagacagaccacatctgccttacccgtcacattactccatgggtaaatactgtgttttggtttggtttggtttggtttttaagagacagggtctcactctgtcacccaggctggtgtgcagtcataactccctgtagccttgaatacctggcctcaagggatcctctcaccttagcctccagagtagctaggactacaggcacactaccatgcctaatttttaaattttttaaaatttttttgtcgggat

SEQ ID NO: 554979 - DNA, 952 bp, Homo sapiens
ccagcacagtacctggtacataattggcattcagtaagtatgaatgaaggaataaattaatacataattttagtagatkagttaactgcccttctttcgtcattgttcagttgaagaataacctgctatccctccaaagtgtataaaaactcatgttgcaatgggtaccttatatttgacaaaaaaaaaaaaaaaattaacacgagctcatttcttgtactttgcggatgtgctaatttaacttgctcctttggatacttggcatctagcaagagaacctcccctggggggttgaggatttgagaaggcatcggggaggattatctcgaaactgactcactgctgaatgtgtgcttggtttctcccactaggaaaaacagtaccagttttactgtcatcttgcaacagcacacatatcagtgcttcagagatgattgggaaatttgatgtgaaagactaataagatcaagtctttattcaaaagttaatgcagtagctgcattttattcactgattataggcaaatcagtactttgcctactgtctgttttcttcatctcataagtaattgcaaaaatgagattttctggttgattagacttctgagccagtcctttgtaaatcacaccgctctccttttccttataatctttcattattaagagccactaattgtgtgtgtgtgttttttttgtctctgccccccctttttttttttttttcatttttaggatctgcagaaaaggctgtcttggaacaatttggattccctttaactggaacagaggcaaggtgttacactaatcacgctttgtcttatgatcaggcaaagcgggtgcctagatgggttcttgaacatatttccaaaagcaagataatgggtaggtggttggataaaaaaactgaagtaacagtatttatgaaagatgtctccaaatttaaaacagggatg

SEQ ID NO: 554980 - DNA, 952 bp, Homo sapiens
ccagcacagtacctggtacataattggcattcagtaagtatgaatgaaggaataaattaatacataattttagtagatgagttaactgcccttctttcgtcattgttcagttgaagaataacctgctatccctccaaagtgtataaaaactcatgttgcaatgggtaccttatatttgacaaaaaaaaaaaaaaaattaacacgagctcatttcttgtactttgcggatgtgctaatttaacttgctcctttggatacttggcatctagcaagagaaccycccctggggggttgaggatttgagaaggcatcggggaggattatctcgaaactgactcactgctgaatgtgtgcttggtttctcccactaggaaaaacagtaccagttttactgtcatcttgcaacagcacacatatcagtgcttcagagatgattgggaaatttgatgtgaaagactaataagatcaagtctttattcaaaagttaatgcagtagctgcattttattcactgattataggcaaatcagtactttgcctactgtctgttttcttcatctcataagtaattgcaaaaatgagattttctggttgattagacttctgagccagtcctttgtaaatcacaccgctctccttttccttataatctttcattattaagagccactaattgtgtgtgtgtgttttttttgtctctgccccccctttttttttttttttcatttttaggatctgcagaaaaggctgtcttggaacaatttggattccctttaactggaacagaggcaaggtgttacactaatcacgctttgtcttatgatcaggcaaagcgggtgcctagatgggttcttgaacatatttccaaaagcaagataatgggtaggtggttggataaaaaaactgaagtaacagtatttatgaaagatgtctccaaatttaaaacagggatg

SEQ ID NO: 554981 - DNA, 952 bp, Homo sapiens
ccagcacagtacctggtacataattggcattcagtaagtatgaatgaaggaataaattaatacataattttagtagatgagttaactgcccttctttcgtcattgttcagttgaagaataacctgctatccctccaaagtgtataaaaactcatgttgcaatgggtaccttatatttgacaaaaaaaaaaaaaaaattaacacgagctcatttcttgtactttgcggatgtgctaatttaacttgctcctttggatacttggcatctagcaagagaacctcccytggggggttgaggatttgagaaggcatcggggaggattatctcgaaactgactcactgctgaatgtgtgcttggtttctcccactaggaaaaacagtaccagttttactgtcatcttgcaacagcacacatatcagtgcttcagagatgattgggaaatttgatgtgaaagactaataagatcaagtctttattcaaaagttaatgcagtagctgcattttattcactgattataggcaaatcagtactttgcctactgtctgttttcttcatctcataagtaattgcaaaaatgagattttctggttgattagacttctgagccagtcctttgtaaatcacaccgctctccttttccttataatctttcattattaagagccactaattgtgtgtgtgtgttttttttgtctctgccccccctttttttttttttttcatttttaggatctgcagaaaaggctgtcttggaacaatttggattccctttaactggaacagaggcaaggtgttacactaatcacgctttgtcttatgatcaggcaaagcgggtgcctagatgggttcttgaacatatttccaaaagcaagataatgggtaggtggttggataaaaaaactgaagtaacagtatttatgaaagatgtctccaaatttaaaacagggatg

SEQ ID NO: 554982 - DNA, 952 bp, Homo sapiens
ccagcacagtacctggtacataattggcattcagtaagtatgaatgaaggaataaattaatacataattttagtagatgagttaactgcccttctttcgtcattgttcagttgaagaataacctgctatccctccaaagtgtataaaaactcatgttgcaatgggtaccttatatttgacaaaaaaaaaaaaaaaattaacacgagctcatttcttgtactttgcggatgtgctaatttaacttgctcctttggatacttggcatctagcaagagaacctcccctggggggttgaggatttgagaaggcatcggggaggattatctcgaaactgactcactgctgaatgtgtgcttggtttctcccactaggaaaaacagtaccagttttactgtcatcttgcaacagcacacatatcagtgcttcagagatgattkggaaatttgatgtgaaagactaataagatcaagtctttattcaaaagttaatgcagtagctgcattttattcactgattataggcaaatcagtactttgcctactgtctgttttcttcatctcataagtaattgcaaaaatgagattttctggttgattagacttctgagccagtcctttgtaaatcacaccgctctccttttccttataatctttcattattaagagccactaattgtgtgtgtgtgttttttttgtctctgccccccctttttttttttttttcatttttaggatctgcagaaaaggctgtcttggaacaatttggattccctttaactggaacagaggcaaggtgttacactaatcacgctttgtcttatgatcaggcaaagcgggtgcctagatgggttcttgaacatatttccaaaagcaagataatgggtaggtggttggataaaaaaactgaagtaacagtatttatgaaagatgtctccaaatttaaaacagggatg

SEQ ID NO: 554983 - DNA, 648 bp, Homo sapiens
ttattttgctcatgatttgtaagcctggctgccaccccgctgcctgcctgcaacacatctcttggttctggaccatgcctagtaaacattctgggtaaatacgggacgtttcctggaggctctgctattggcctgccacgtgatagatgctttgtgttaaggcacaagacagtatttataaagatacctactctttggaatgttgcaaagtaagagaggtttaagggaaagaaattgcatagctaaagttatgaaatgctagctggatcattactacagtgttttttttttttcttttcttggttgttgttttagcgcctccatcctttatagatgatttataactgggagagtattatttacccaggtggctttaacatttccgttttaaaatagtaaagccaactagatccaaaaatcatctgtgatatggaaaaagttggatgtacatttgagtgtatgtcattatcacaactatgtaaaaggaaaagtccagggtaagaatcctggtgagaaatacatgacaatgggcaccattctttcttgcatttgtgggtatttwctctgtgcttcttcttctccaaggccattactcactttttatgatgctggcttatttataatttttttttttttttgagatggggt

SEQ ID NO: 554984 - DNA, 532 bp, Homo sapiens
tttatttctttcagtatcatctgtatcctctctaaaagtttctgtccttagaattccagtttctggttgtcctttaatcttaaaaggcttgcctgaacctgaatcccctgtcgcagatgtatgggacacatctcttgttgactttttctgtacttctggggttgaacatcttctccccctgtcctctacagacttctcggcaccagaggtttcatgatcacttttactttgtctttttactcttgttatttctttgcccttctttgctgagatttctttatccactttcttggcctgttcacgttctttcttctccatttcttcttttgctttttgttgcttctgtgtaatttcattttcttcagcttcttgtttctttttggctttttgctcgtgttcttccctcctcagtttctttytgtttcccttgctgtctttcctgaagttctttttcttgtttgtttttctccattagaagagcagtttctgcatgaatatgagccttttcttcatctgttaacatgagagttgg

SEQ ID NO: 554985 - DNA, 1104 bp, Homo sapiens
caaaaaactcaccaggtatggtggcacacgcctgtaattccagctgctctggaggctgaggcaggagaattacttgagcctgggaggcagaggttgcagtgagccaagattgcaccactgcactccaccttgggctacagagtgagattccgtcaaaaaaaaaaaaaagaaagaaagaagaaagaaaggaaggaagggaggaaggaaggaaggaaggaaggaagraagaaaaagaaagaaagaaagaaagaaagaaagaaagaaagaaagaaagaaagaaagaaagaaagaaaagaaagaaaggaagaaagtaagtaagtttccctggtaagggctcatgccttggcactgagggcatcttgcaaaactcaaggatgccacttggcatagcagatagaaaataattgtgatatgagacaggcctgaattggatttatggctctattgcatatttgttttgtgattttgggaaagtcatttaatctctccgaattttagtttctttagggattaatagtaccttttccagggagctgttattaggatgagacaacgaccagaacatagcaagaattcattagtgctctcaccacccttcccccattgcagccctcagtacctgaatggcaatcgtgcatcttctcatcagcctggaattgcttcccctttcatctttggctctgcagtattcagtgtcactagtgaaatgtgtgaaatgaatgaatcgacaactgatgcttaatacctaatgagacaagtgaatgaatccttttgttcattttatggccagaaagatagtgtaattaagtaataacaactggcaaaaaagagaaactcaacctatactttgtccttttctcaagtagcatctaaaactttttccctctgattaaaaaattatcactgaaggatctctttgaatgtgtcttgaattttatataagcagatgatcacagctcagcataatattagaagattatatgattttaaaaattggttcatagttttatagtcttggaatatctatctatctgtctgtctgtctgtctgtctgtctgtctgtctgtctatctatctaggtatctatctatctatctacctacc

SEQ ID NO: 554986 - DNA, 1104 bp, Homo sapiens
caaaaaactcaccaggtatggtggcacacgcctgtaattccagctgctctggaggctgaggcaggagaattacttgagcctgggaggcagaggttgcagtgagccaagattgcaccactgcactccaccttgggctacagagtgagattccgtcaaaaaaaaaaaaaagaaagaaagaagaaagaaaggaaggaagggaggaaggaaggaaggaaggaaggaagaaagraaaagaaagaaagaaagaaagaaagaaagaaagaaagaaagaaagaaagaaagaaagaaagaaaagaaagaaaggaagaaagtaagtaagtttccctggtaagggctcatgccttggcactgagggcatcttgcaaaactcaaggatgccacttggcatagcagatagaaaataattgtgatatgagacaggcctgaattggatttatggctctattgcatatttgttttgtgattttgggaaagtcatttaatctctccgaattttagtttctttagggattaatagtaccttttccagggagctgttattaggatgagacaacgaccagaacatagcaagaattcattagtgctctcaccacccttcccccattgcagccctcagtacctgaatggcaatcgtgcatcttctcatcagcctggaattgcttcccctttcatctttggctctgcagtattcagtgtcactagtgaaatgtgtgaaatgaatgaatcgacaactgatgcttaatacctaatgagacaagtgaatgaatccttttgttcattttatggccagaaagatagtgtaattaagtaataacaactggcaaaaaagagaaactcaacctatactttgtccttttctcaagtagcatctaaaactttttccctctgattaaaaaattatcactgaaggatctctttgaatgtgtcttgaattttatataagcagatgatcacagctcagcataatattagaagattatatgattttaaaaattggttcatagttttatagtcttggaatatctatctatctgtctgtctgtctgtctgtctgtctgtctgtctgtctatctatctaggtatctatctatctatctacctacc

SEQ ID NO: 554987 - DNA, 1104 bp, Homo sapiens
caaaaaactcaccaggtatggtggcacacgcctgtaattccagctgctctggaggctgaggcaggagaattacttgagcctgggaggcagaggttgcagtgagccaagattgcaccactgcactccaccttgggctacagagtgagattccgtcaaaaaaaaaaaaaagaaagaaagaagaaagaaaggaaggaagggaggaaggaaggaaggaaggaaggaagaaagaaaaagaaagaaagaaagaaagaaagaaagaaagaaagaaagaaagaaagaaagaaagaaagaaaagaaagaaaggaagaaagtaagtaagtttccctggtaagggctcatgccttggcactgagggcatcttgcaaaactcaaggatgccacttggcatagcagatagaaaataattgtgatatgagacaggcctgaattggatttatggctctattgcatattkgttttgtgattttgggaaagtcatttaatctctccgaattttagtttctttagggattaatagtaccttttccagggagctgttattaggatgagacaacgaccagaacatagcaagaattcattagtgctctcaccacccttcccccattgcagccctcagtacctgaatggcaatcgtgcatcttctcatcagcctggaattgcttcccctttcatctttggctctgcagtattcagtgtcactagtgaaatgtgtgaaatgaatgaatcgacaactgatgcttaatacctaatgagacaagtgaatgaatccttttgttcattttatggccagaaagatagtgtaattaagtaataacaactggcaaaaaagagaaactcaacctatactttgtccttttctcaagtagcatctaaaactttttccctctgattaaaaaattatcactgaaggatctctttgaatgtgtcttgaattttatataagcagatgatcacagctcagcataatattagaagattatatgattttaaaaattggttcatagttttatagtcttggaatatctatctatctgtctgtctgtctgtctgtctgtctgtctgtctgtctatctatctaggtatctatctatctatctacctacc

SEQ ID NO: 554988 - DNA, 1135 bp, Homo sapiens
tgagtgtataagggctgattaagttgaaagaagattgccaggcgaggtggctcacgcctgtaatcccagcactttgggagactgaggcaggcagatcacttgaggtcaggatttcgagaccagcctcgccaacatggtgaaaccccatctctactaaaaatataaaaaatattcgggcgtggtagcgcatgcctgtgatccaggtactcgggagactgaggcaggagaatcacttgaacccaggaggcagaggttgcaatgagctgagatgatgccactgcactccaacctgggcagaagagtgagactccattcaaaaaaattgcaaagtatctactaatctaaaaaatgcacagcctcagttctcaaagagtttatgttgtaggatcacgtcagttccatatataatttgtttatcacaactgcacactgttactgaatctgaaatgcttcaaaatctgaaagttttgagcacttacatgatgctcaaaggaaatgttcattggagcatttcagatttcagattttcaaattaaggatactcaactggtaagtataatgcaaatattccaaaatctgaaaaatatccaaaatccaaaatacttctggtcccacgcattttcgataagggatactcaacaagtattttaaaagatcaaaataagggtaagagaatatggatatttargcttatggttacttacatggaacagttgaggccattaaaaaatgtctaagacataggcagtggaaggctgaattcaagaaaaagtctcagagctgaggaaacaaagaacctatgaggttaaggtgttaaatgagccaaccacatgagtgtgaaagggaggccaaatgagaaaatgatgttgcttgggtgtagaggaagttctggaataaatgtggcagttgttagaagacattatagttagaagacattatagttagatggatagacagtaaagaaggggcttttgtattaaaatagaggaatagtggttgggaataggaaatatggagctaaaattatgccaacccacttctattaaataaattctatgacaccttagcctttgggaaaatgactagccttcagtggagcacatgtcaagggaagcattgtccccatatagatagc

SEQ ID NO: 554989 - DNA, 1135 bp, Homo sapiens
tgagtgtataagggctgattaagttgaaagaagattgccaggcgaggtggctcacgcctgtaatcccagcactttgggagactgaggcaggcagatcacttgaggtcaggatttcgagaccagcctcgccaacatggtgaaaccccatctctactaaaaatataaaaaatattcgggcgtggtagcgcatgcctgtgatccaggtactcgggagactgaggcaggagaatcacttgaacccaggaggcagaggttgcaatgagctgagatgatgccactgcactccaacctgggcagaagagtgagactccattcaaaaaaattgcaaagtatctactaatctaaaaaatgcacagcctcagttctcaaagagtttatgttgtaggatcacgtcagttccatatataatttgtttatcacaactgcacactgttactgaatctgaaatgcttcaaaatctgaaagttttgagcacttacatgatgctcaaaggaaatgttcattggagcatttcagatttcagattttcaaattaaggatactcaactggtaagtataatgcaaatattccaaaatctgaaaaatatccaaaatccaaaatacttctggtcccacgcattttcgataagggatactcaacaagtattttaaaagatcaaaataagggtaagagaatatggatatttaggcttatggttacttacatggaacagttgaggccattaaaaaatgtctaagacataggcagtggaaggctgaattcaagaaaaagtctcagagctgaggaaacaaagaacctatgaggttaaggtgttaaatgagccaaccacatgagtgtgaaagggaggccaaatgagaaaatgatgttgcttgggtgtagaggaagttctggaataaatgtggcagttgttagaagacattatagttagaagacattatagttagatggatagacagtaaagaaggggcttttgtattaaaatagaggaatagtggttgggaataggaaatatggagctaaaattatgccaacccacttctattaaataaattctatgacaccttagcctttgggaaaatgactagccttcagtggagcacatgtcragggaagcattgtccccatatagatagc

SEQ ID NO: 554990 - DNA, 1135 bp, Homo sapiens
tgagtgtataagggctgattaagttgaaagaagattgccaggcgaggtggctcacgcctgtaatcccagcactttgggagactgaggcaggcagatcacttgaggtcaggatttcgagaccagcctcgccaacatggtgaaaccccatctctactaaaaatataaaaaatattcgggcgtggtagcgcatgcctgtgatccaggtactcgggagactgaggcaggagaatcacttgaacccaggaggcagaggttgcaatgagctgagatgatgccactgcactccaacctgggcagaagagtgagactccattcaaaaaaattgcaaagtatctactaatctaaaaaatgcacagcctcagttctcaaagagtttatgttgtaggatcacgtcagttccatatataatttgtttatcacaactgcacactgttactgaatctgaaatgcttcaaaatctgaaagttttgagcacttacatgatgctcaaaggaaatgttcattggagcatttcagatttcagattttcaaattaaggatactcaactggtaagtataatgcaaatattccaaaatctgaaaaatatccaaaatccaaaatacttctggtcccacgcattttcgataagggatactcaacaagtattttaaaagatcaaaataagggtaagagaatatggatatttaggcttatggttacttacatggaacagttgaggccattaaaaaatgtctaagacataggcagtggaaggctgaattcaagaaaaagtctcagagctgaggaaacaaagaacctatgaggttaaggtgttaaatgagccaaccacatgagtgtgaaagggaggccaaatgagaaaatgatgttgcttgggtgtagaggaagttctggaataaatgtggcagttgttagaagacattatagttagaagacattatagttagatggatagacagtaaagaaggggcttttgtattaaaatagaggaatagtggttgggaataggaaatatggagctaaaattatgccaacccacttctattaaataaattctatgacaccttagcctttgggaaaatgactagccttcagtggagcacatgtcaagggaagcattgtccycatatagatagc

SEQ ID NO: 554991 - DNA, 604 bp, Homo sapiens
gccatccatgcccatggtctattgttcttacgctttcaaaacgcctcccctgcttcatgctttctagtcttgaggacttggcttaaatatgcttctgaattgccactccctcttgttgacaattcttctttttttttttkgggagacggagttgctcttgtcacccaggctggagtgcagtggcgccatctctgctcactgcaacctccgcctcccgggttcaagcaattctcctgcctcagcctcctgagtagctgggattacaggcatccaccatcacgcctggctaatttttgtagcagagacggggtttcaccatgttggccaggctggttttgaacttctgacctcaagtgatccgcccctctcggcctcacaaagtgctgagattacaggcgtgagccactgcacccggctgacagttctttacaccgttctccagttggggcggagtgggagacaccacggagcctacctctgcaggaggcacagcttggcagaagggagacaccagccagaggaaggatgcattttaggcaccgaactttaggtaaagcgctctgggtcaggggtctcctccagagtggtctgtttaaagttaaaa

SEQ ID NO: 554992 - DNA, 604 bp, Homo sapiens
gccatccatgcccatggtctattgttcttacgctttcaaaacgcctcccctgcttcatgctttctagtcttgaggacttggcttaaatatgcttctgaattgccactccctcttgttgacaattcttcttttttttttttgggagacggagttgctcttgtcacccaggctggagtgcagtggcgccatctctgctcactgcaacctccgcctcccgggttcaagcaattctcctgcctcagcctcctgagtagctgggattacaggcatccaccatcacgcctggctaatttttgtagcagagacggggtttcaccatgttggccaggctggttttgaacttctgacctcaagtgatccgcccctctcggcctcacaaagtgctgagattacaggcgtgagccactgcacccrgctgacagttctttacaccgttctccagttggggcggagtgggagacaccacggagcctacctctgcaggaggcacagcttggcagaagggagacaccagccagaggaaggatgcattttaggcaccgaactttaggtaaagcgctctgggtcaggggtctcctccagagtggtctgtttaaagttaaaa

SEQ ID NO: 554993 - DNA, 3035 bp, Homo sapiens
tgcatttaaagcaaaggcaactggtaccataaaaaattatctgccttcccatgttttatgaagcgctattcacaatatagaagatatggaatgaacctacctatccaaccacacatcaagagatgaagacactgcagtgtatctgcacaatgcaataatactcttcatccttaacaaaataatgtaattttcatttggagccatatggatgaacctggaaaatatattgttaaataaaataagcctggcatagaaaaacaagcaaattcatctcacttatatggaatccaaaaaactttgccttcaataagtacaaggtacagtagtggttttccgaagacaggggaaggaggagatggaaggattggttatggaaacaaagttgcagttagttgggacaaacacattcttgcattctataccacagctgggtgactctggttaacaaaatagtacatttttcaataaagctagaagggagcaatttgagtgttatcacaacagagaaataatacctgtatgagaacagatacagcaagtaccctgatttgatcattactaaaaatatacatgtaccaaaatgtcccagaggaaaaacagtcccagcatactctctaattatatactttattacgcacagaaatttaagaaatgtgaatacgcaatgctaatgatcacatggaaatggccctgaatgtctaaggaatcctgagaaatagaaactaagttggaggactcacaatccctgatatgccgcagtgctccagcctgggtaagagaatgagactctgtgtcaaaaaaaaattgttagaaaatttgagggaatcatagaagtgataaattgttgttaccaaacatgtacacagaaaaaagcaatactaagtagcataaaaatacatatctgaactcatattgagcaaaaaacttgaatagagttatctgcaaagatgacataaaactaacaggtaagagaaaaggtcctcaacatcactgttcatcaaaaaaaagtacttcaaaacaacactcagatgtcatttcactctttttgaaatgaatgttactaaaaagatcaaaaaaatttttttgagacagggactctgtcactcaggctggagtgcagtggcatgatcatggctcactgcagccttgacctctccggcacaagtgatcctcccacctctgcctcctgaatagctggaactacaggcacacaccaccacgcctggctaatttttttgtatttttttgtagaaatgaagttttgccacgttgcctaggctggtctcaaattgtttggctcaagtgatctgcccaccttggcctcccaaagtgcttggattacaggcatgaaccatcacgcctggccataaaaaaacatgcatggctacatcaaagtgaaaactttttgcaaggaaaaggaaacaatgagcccaaagaggaaggctgggagaacaaatcacatatcggctaatgggggttgttatggaaaatatgcaacacattaatagtactaagtagcaacaacaaacaaatgatccatccaaaactgagcagggaacctgaataggcatttctgcaaagaagacattaaaccacatggaagggcgcttcctccacagtcaggtggccgtgactagatggacagagttaggcagacgctgtggggggcggggggtgttgagaaaagtgacccctatgtcccgacggcagggaaacaaatgtaaaagttcagtagaccacctgcagtagttcatgcctgtaatcccggcactttgggaagctgaggcgagaggatttctttgagctcagaagtttgagaccagcctgggcaacatggcgaaaccctgcctctaccaaaaatacaagaaaaacaaaattcagcagaccaggcacagtagttcacacctgtaatcccagcacttagggaagccaaagtggaaggattgctttgagttcagaagttcaagataagcctgggtaacatggcgaaaccccgtggccagcaaaaatatgaaaaaaaaaaaaatagctgggcatggtggcacaagcccagctaatggggagactgaggctggagaatcccttgagcccagaaagtggaggctgcagtgagctgagatctgccactgcactccaggatgcacaacagggccagaccctatctccaaaaaaataaaaccaattaaaaaatcagcaaaccctggaggtggctgggatcctttccttccacctgaggcttggatgcaaggcagccaaactggggcctggtcccaaaaccccacctaggccgsgcttcctcttcctcccacagccagagatttcctctctctccatctacatggggagtctccctcagaaacagccctaaagcctcctactctttccaacctcaaaagccctcagggactgagtactactataaaattcatactaagatggaaagaaagaaaaaaggaagacccatcaggaatacatagaacattccagaaaacgaaagcttctgtactcaccatgatggaagaactccccgaagaagccagccgcagagaagccacaccaaagctctgtcctcagccgtcagcgccacggacaggaggtgtttcttccccaggatgcagcctcaagttatcccgaagctgccgtggcacacggtggctcctgaggacaccttggctcttccggtttaacacaggcaagtcaataagtgtgataatcacataaacagaattaaaagcaaagtcacataatcatctcaataaacacagaaaaggcatttgacaaaatccagcatccatttataattaaaaccctcagcaaaaaatgcacagaagggacatagcttcaggtaataaaaaccatctgtgacaaacccacagccaacataatactaaatggggaaaggttagaagcatttcctctgagaactggaacaataaatacaaggatgcccactctcaccacttctattcaacatagcactgacaggcccagccagagcaatcaaatgagagaaagaaataaagggcatccagatc

SEQ ID NO: 554994 - DNA, 3035 bp, Homo sapiens
tgcatttaaagcaaaggcaactggtaccataaaaaattatctgccttcccatgttttatgaagcgctattcacaatatagaagatatggaatgaacctacctatccaaccacacatcaagagatgaagacactgcagtgtatctgcacaatgcaataatactcttcatccttaacaaaataatgtaattttcatttggagccatatggatgaacctggaaaatatattgttaaataaaataagcctggcatagaaaaacaagcaaattcatctcacttatatggaatccaaaaaactttgccttcaataagtacaaggtacagtagtggttttccgaagacaggggaaggaggagatggaaggattggttatggaaacaaagttgcagttagttgggacaaacacattcttgcattctataccacagctgggtgactctggttaacaaaatagtacatttttcaataaagctagaagggagcaatttgagtgttatcacaacagagaaataatacctgtatgagaacagatacagcaagtaccctgatttgatcattactaaaaatatacatgtaccaaaatgtcccagaggaaaaacagtcccagcatactctctaattatatactttattacgcacagaaatttaagaaatgtgaatacgcaatgctaatgatcacatggaaatggccctgaatgtctaaggaatcctgagaaatagaaactaagttggaggactcacaatccctgatatgccgcagtgctccagcctgggtaagagaatgagactctgtgtcaaaaaaaaattgttagaaaatttgagggaatcatagaagtgataaattgttgttaccaaacatgtacacagaaaaaagcaatactaagtagcataaaaatacatatctgaactcatattgagcaaaaaacttgaatagagttatctgcaaagatgacataaaactaacaggtaagagaaaaggtcctcaacatcactgttcatcaaaaaaaagtacttcaaaacaacactcagatgtcatttcactctttttgaaatgaatgttactaaaaagatcaaaaaaatttttttgagacagggactctgtcactcaggctggagtgcagtggcatgatcatggctcactgcagccttgacctctccggcacaagtgatcctcccacctctgcctcctgaatagctggaactacaggcacacaccaccacgcctggctaatttttttgtatttttttgtagaaatgaagttttgccacgttgcctaggctggtctcaaattgtttggctcaagtgatctgcccaccttggcctcccaaagtgcttggattacaggcatgaaccatcacgcctggccataaaaaaacatgcatggctacatcaaagtgaaaactttttgcaaggaaaaggaaacaatgagcccaaagaggaaggctgggagaacaaatcacatatcggctaatgggggttgttatggaaaatatgcaacacattaatagtactaagtagcaacaacaaacaaatgatccatccaaaactgagcagggaacctgaataggcatttctgcaaagaagacattaaaccacatggaagggcgcttcctccacagtcaggtggccgtgactagatggacagagttaggcagacgctgtggggggcggggggtgttgagaaaagtgacccctatgtcccgacggcagggaaacaaatgtaaaagttcagtagaccacctgcagtagttcatgcctgtaatcccggcactttgggaagctgaggcgagaggatttctttgagctcagaagtttgagaccagcctgggcaacatggcgaaaccctgcctctaccaaaaatacaagaaaaacaaaattcagcagaccaggcacagtagttcacacctgtaatcccagcacttagggaagccaaagtggaaggattgctttgagttcagaagttcaagataagcctgggtaacatggcgaaaccccgtggccagcaaaaatatgaaaaaaaaaaaaatagctgggcatggtggcacaagcccagctaatggggagactgaggctggagaatcccttgagcccagaaagtggaggctgcagtgagctgagatctgccactgcactccaggatgcacaacagggccagaccctatctccaaaaaaataaaaccaattaaaaaatcagcaaaccctggaggtggctgggatcctttccttccacctgaggcttggatgcaaggcagccaaactggggcctggtcccaaaaccccacctaggccgggcttcctcttcctcccacagccagagmtttcctctctctccatctacatggggagtctccctcagaaacagccctaaagcctcctactctttccaacctcaaaagccctcagggactgagtactactataaaattcatactaagatggaaagaaagaaaaaaggaagacccatcaggaatacatagaacattccagaaaacgaaagcttctgtactcaccatgatggaagaactccccgaagaagccagccgcagagaagccacaccaaagctctgtcctcagccgtcagcgccacggacaggaggtgtttcttccccaggatgcagcctcaagttatcccgaagctgccgtggcacacggtggctcctgaggacaccttggctcttccggtttaacacaggcaagtcaataagtgtgataatcacataaacagaattaaaagcaaagtcacataatcatctcaataaacacagaaaaggcatttgacaaaatccagcatccatttataattaaaaccctcagcaaaaaatgcacagaagggacatagcttcaggtaataaaaaccatctgtgacaaacccacagccaacataatactaaatggggaaaggttagaagcatttcctctgagaactggaacaataaatacaaggatgcccactctcaccacttctattcaacatagcactgacaggcccagccagagcaatcaaatgagagaaagaaataaagggcatccagatc

SEQ ID NO: 554995 - DNA, 1469 bp, Homo sapiens
tattcatcagaagaaaaattcaatgaacctttactcactgacaatagtgagaatcagaatgaatgaatcagaatgtctgtcctaactactccctctggttctacttcaattcctgctgcctccatatggttcatcagtgtgtggaagatgaatgtggtaaaactgaagtggctgcttgtacttggagaacaacaacaatgcactgaaaattcactgcttagaagctgttgaaagagtttggcaataaatacaacctaatattcacaataaagagcaatgatctataagcccattttcacatctattgtaaaggccaaccatgtgtttcagccaaaacaaactgattttattaatacaatgaccagacatatataaataataatatgagtttattttaccagaggaattggctctcacacttgcattctattgtaggtttttacacttatccaattctaacaagagttggataaactcagggttttcctaaartaacaatgaccattcctcacaaaagagtcacaagcaaagtctacacctgaaaatgtgtagattgccttccatgtcctgtgtgcattaagaaacgttttatttttacacctggtatacggacaacatggatgaatatgttggctaattagaacaagtttatcaagttctttgaaacccttggtagacaaagtaattcaaggattcagcccagattagtagtgtgaaagcctgcaacaaaccaaactgtagaaaagtaataatgtaaatacaaatgtgatttcaatctccgcttggcgactgacctccctcagaccactaaactctgtgcatcagatgcattaacaatgagacattggtcactcactggggaggtgggcatggtgaaaacctttttttacccatagatctgggggaactgctgaaaagcctgaaatgcattcagttgatgcaccagacatcagttactgaagaagcagaggcaatgaacttcccttaacgttgacctaagtggataaacgcatggcaacatgctgagtgacttcaacaatgcagacacactcaatgtcaaaatgccacagggctacccggtgctgcaaggctgggactcggtttccgtaagactgtcttaaggcagtgagatttctgatggaactgtggacataagcatatgcccccatacgccactcccactactcactgtaggaacagcagtgtaacatttgtcccggctaatgatgacaaacaatccccaagtccctatgcaaaccaagtgctggggccacacagtggcctgagcaacatacctatgggtagtaactattgagaagacatttccaagggattgccattccaacaggcgtggggaatgctcaacatcaccaatcatcagagatgaggtaccggtgccatcacacgctggtcagagtggccatttgtcctaagtcaaaacataacatgctggtgtggcagcagagaaa

SEQ ID NO: 554996 - DNA, 1469 bp, Homo sapiens
tattcatcagaagaaaaattcaatgaacctttactcactgacaatagtgagaatcagaatgaatgaatcagaatgtctgtcctaactactccctctggttctacttcaattcctgctgcctccatatggttcatcagtgtgtggaagatgaatgtggtaaaactgaagtggctgcttgtacttggagaacaacaacaatgcactgaaaattcactgcttagaagctgttgaaagagtttggcaataaatacaacctaatattcacaataaagagcaatgatctataagcccattttcacatctattgtaaaggccaaccatgtgtttcagccaaaacaaactgattttattaatacaatgaccagacatatataaataataatatgagtttattttaccagaggaattggctctcacacttgcattctattgtaggtttttacacttatccaattctaacaagagttggataaactcagggttttcctaaaataacaatgacyattcctcacaaaagagtcacaagcaaagtctacacctgaaaatgtgtagattgccttccatgtcctgtgtgcattaagaaacgttttatttttacacctggtatacggacaacatggatgaatatgttggctaattagaacaagtttatcaagttctttgaaacccttggtagacaaagtaattcaaggattcagcccagattagtagtgtgaaagcctgcaacaaaccaaactgtagaaaagtaataatgtaaatacaaatgtgatttcaatctccgcttggcgactgacctccctcagaccactaaactctgtgcatcagatgcattaacaatgagacattggtcactcactggggaggtgggcatggtgaaaacctttttttacccatagatctgggggaactgctgaaaagcctgaaatgcattcagttgatgcaccagacatcagttactgaagaagcagaggcaatgaacttcccttaacgttgacctaagtggataaacgcatggcaacatgctgagtgacttcaacaatgcagacacactcaatgtcaaaatgccacagggctacccggtgctgcaaggctgggactcggtttccgtaagactgtcttaaggcagtgagatttctgatggaactgtggacataagcatatgcccccatacgccactcccactactcactgtaggaacagcagtgtaacatttgtcccggctaatgatgacaaacaatccccaagtccctatgcaaaccaagtgctggggccacacagtggcctgagcaacatacctatgggtagtaactattgagaagacatttccaagggattgccattccaacaggcgtggggaatgctcaacatcaccaatcatcagagatgaggtaccggtgccatcacacgctggtcagagtggccatttgtcctaagtcaaaacataacatgctggtgtggcagcagagaaa

SEQ ID NO: 554997 - DNA, 1364 bp, Homo sapiens
caaattaatcccaattcgtttacttttattttaagatgaaatgtaggccgagcatggtggctcacacctgtaatcccagcactttgggatgctgaggcgggcggatcatgaggtcaggagttcgagaccagcctggccaacatagggaaacctggtctctactaaaaatacaaaacaaactagccaggcatggtggcgggtgcctgtaatcccagctacttgggatgctgaggcaaggagaatcatttgaacctgggaggcggaagttgcagtgagccgaagtcgcaccactgcactccagcctgggtgacagtgcgagactccgtctaaaaaaaaaaaaaaaaaaaaaaaaaaaaaagatgwaatgtagcttagaaaccattcttccataaaaccaaaaccatatctctttaagaggatgttggaaaatcagcctttctcataaagtggtttcccccacaaatttaaacacattactccattataagtttagagagtattttaaaaaactattatgcttcagcttttcctgcacctttctctttcttgtctcttacttccttctctgtgatctggtccaacaattattgccatggcaacaaaggctctgtgacatctctagtaagctcattgtcttctgccgtattaaactttaatgggtagctggtagacaattaacactctgggagggctcaaaccacataaccaaatgtgccaagataatcctgagctcactcattgtcaggtaagacaaagtattttagcgcaatagcaaacaattaattaaacaaacaaaaacaggaagcctttcttgggccaggaagccattaattagctaagctcagagccactcattgaaactaggtcctgactgggtttctggatttgaccactgggcagaaactaggacccgaaaccaattagaatgaaatggtccccagatattgttttcatgtaaggataggtttggaagtatccagacttagtggtgggccaggcctcccctgtgagcagtacagttcaggacacctggactgccctttccctctgccttccctagggtaatgtgaatggcttagtctttcgtgttcccatctgtaacatggaggaggaagagaagagcctcattgcacatattgggtcattaagattgatcttagaaccataatttacaatattttgaagttaggtttgatttttaccattccactactcctctctcccaatatgttgtgccaaattgtaagtaatttgcaattagaacacattgaagacatatatttgagcggttagagagtctcacctacctttgaggtaactttttgtactttaggttttctcaattcagagtgttgagtccttaa

SEQ ID NO: 554998 - DNA, 1095 bp, Homo sapiens
tgggcctggtttgctggtcgtatttctattttcagatgagaaacttgagactgaggtccagaggggagaaaggacgcactcaggacagggcttgtttggggcacagctgggctggagtcggggtctctgacacccagccctggagaccctctctcggcaacctgggccatggcagttgtcaaaacaaatcggcaagtccttgatggagccccagaagggagagtggccagtgccacggtgagcagtgcccagggccacgctggctaggagcggggctgcctatgctgggagccctgtgcactgggctctgcacccgtagccatggcaacgatgctggctggagatggagtggacgctcaggtgccgctggatgatgccggccacctgcagttttggggcccagctggaggtcagcagggtggactcacaaccccctgagttcaggtacagggagctgtggagacaggcccacccaggctgaccttccccagagccttgctgtcacggagaggagggggcgttggaggaagggccacaaatgcaggagagggggcaatggcctgggacaagatggagaacagccacccgttccccagtacagccaggtcaggacacggatcccagcaagccctttggatggggagactgaggtacagctgatgactcaccctaggtgataccagctgtgagagccggagtggggatgcagacagggagggtggccagtggccacctgcgaggactcagcagccagggcgatgacgccagagagtcaaggcgtgagaacccccgagaagaagagtgagtgtcattcacctaacgacgcggtgactgcacatttgcccaagttgtaactgtggcaggtgcagcgcgcagaccaggcaggagatggagagacgtccagggggaggtctcgctgtgtcaaggtgctcagctccaggtrccagccggcccgagacaaaagtggaccagccttgacgccctggtctgccgcctccctccattgcctgcctccccggctgcatacacgttcagattttaggcgatcagtggtggaccctacaggcctctgtgggcagtggtcacctcgctctg

SEQ ID NO: 554999 - DNA, 1095 bp, Homo sapiens
tgggcctggtttgctggtcgtatttctattttcagatgagaaacttgagactgaggtccagaggggagaaaggacgcactcaggacagggcttgtttggggcacagctgggctggagtcggggtctctgacacccagccctggagaccctctctcggcaacctgggccatggcagttgtcaaaacaaatcggcaagtccttgatggagccccagaagggagagtggccagtgccacggtgagcagtgcccagggccacgctggctaggagcggggctgcctatgctgggagccctgtgcactgggctctgcacccgtagccatggcaacgatgctggctggagatggagtggacgctcaggtgccgctggatgatgccggccacctgcagttttggggcccagctggaggtcagcagggtggactcacaaccccctgagttcaggtacagggagctgtggagacaggcccacccaggctgaccttccccagagccttgctgtcacggagaggagggggcgttggaggaagggccacaaatgcaggagagggggcaatggcctgggacaagatggagaacagccacccgttccccagtacagccaggtcaggacacggatcccagcaagccctttggatggggagactgaggtacagctgatgactcaccctaggtgataccagctgtgagagccggagtggggatgcagacagggagggtggccagtggccacctgcgaggactcagcagccagggcgatgacgccagagagtcaaggcgtgagaacccccgagaagaagagtgagtgtcattcacctaacgacgcggtgactgcacatttgcccaagttgtaactgtggcaggtgcagcgcgcagaccaggcaggagatggagagacgtccagggggaggtctcgctgtgtcaaggtgctcagctccaggtgccagccggcccgagacaaaagtggaccagccttgacgccctggtctgycgcctccctccattgcctgcctccccggctgcatacacgttcagattttaggcgatcagtggtggaccctacaggcctctgtgggcagtggtcacctcgctctg

SEQ ID NO: 555000 - DNA, 1095 bp, Homo sapiens
tgggcctggtttgctggtcgtatttctattttcagatgagaaacttgagactgaggtccagaggggagaaaggacgcactcaggacagggcttgtttggggcacagctgggctggagtcggggtctctgacacccagccctggagaccctctctcggcaacctgggccatggcagttgtcaaaacaaatcggcaagtccttgatggagccccagaagggagagtggccagtgccacggtgagcagtgcccagggccacgctggctaggagcggggctgcctatgctgggagccctgtgcactgggctctgcacccgtagccatggcaacgatgctggctggagatggagtggacgctcaggtgccgctggatgatgccggccacctgcagttttggggcccagctggaggtcagcagggtggactcacaaccccctgagttcaggtacagggagctgtggagacaggcccacccaggctgaccttccccagagccttgctgtcacggagaggagggggcgttggaggaagggccacaaatgcaggagagggggcaatggcctgggacaagatggagaacagccacccgttccccagtacagccaggtcaggacacggatcccagcaagccctttggatggggagactgaggtacagctgatgactcaccctaggtgataccagctgtgagagccggagtggggatgcagacagggagggtggccagtggccacctgcgaggactcagcagccagggcgatgacgccagagagtcaaggcgtgagaacccccgagaagaagagtgagtgtcattcacctaacgacgcggtgactgcacatttgcccaagttgtaactgtggcaggtgcagcgcgcagaccaggcaggagatggagagacgtccagggggaggtctcgctgtgtcaaggtgctcagctccaggtgccagccggcccgagacaaaagtggaccagccttgacgccctggtctgccgcctccctccattgcctgcctccccggcygcatacacgttcagattttaggcgatcagtggtggaccctacaggcctctgtgggcagtggtcacctcgctctg

SEQ ID NO: 555001 - DNA, 536 bp, Homo sapiens
gcaagcctataatcatatgcattaatttatttaaattyctataataaaacaccactgaagtggctttcattttctcttggtgaaggcaggaattattttaacagagcagagagtgctcattggtgtaaacagacaagcttcaaacagttcatagaatcaggcacaccaatgccctgagtgcagggccgtgagcggaaggtaagggatgccgcccaggcagaatagaagagccagggccccatgaagaaaactttgagccattctcaggctggggaaaaaaacagacaagagcagcaccatgcagtaaatcacttgttgaggggccaagtcagggttagcagaatgaaggctgctagaatgaggaaatcccaccaggaaactagagtggctacccagaacgggtggaaattgaaaaggggagatcttttaagagaagaccatagaaataagttcagggagcctttgaacttgaattgctcagctgtctattgtatctatttattttacttaacaaggttccaaactctcagtctcaa

SEQ ID NO: 555002 - DNA, 536 bp, Homo sapiens
gcaagcctataatcatatgcattaatttatttaaatttctataataaaacaccactgaagtggctttcattttctcttggtgaakgcaggaattattttaacagagcagagagtgctcattggtgtaaacagacaagcttcaaacagttcatagaatcaggcacaccaatgccctgagtgcagggccgtgagcggaaggtaagggatgccgcccaggcagaatagaagagccagggccccatgaagaaaactttgagccattctcaggctggggaaaaaaacagacaagagcagcaccatgcagtaaatcacttgttgaggggccaagtcagggttagcagaatgaaggctgctagaatgaggaaatcccaccaggaaactagagtggctacccagaacgggtggaaattgaaaaggggagatcttttaagagaagaccatagaaataagttcagggagcctttgaacttgaattgctcagctgtctattgtatctatttattttacttaacaaggttccaaactctcagtctcaa

SEQ ID NO: 555003 - DNA, 536 bp, Homo sapiens
gcaagcctataatcatatgcattaatttatttaaatttctataataaaacaccactgaagtggctttcattttctcttggtgaaggcaggaattattttaacagagcagagagtgctcattggtgtaaacagacaagcttcaaacagttcatagaatcaggcacaccaatgccctgagtgcagggccgtgagyggaaggtaagggatgccgcccaggcagaatagaagagccagggccccatgaagaaaactttgagccattctcaggctggggaaaaaaacagacaagagcagcaccatgcagtaaatcacttgttgaggggccaagtcagggttagcagaatgaaggctgctagaatgaggaaatcccaccaggaaactagagtggctacccagaacgggtggaaattgaaaaggggagatcttttaagagaagaccatagaaataagttcagggagcctttgaacttgaattgctcagctgtctattgtatctatttattttacttaacaaggttccaaactctcagtctcaa

SEQ ID NO: 555004 - DNA, 536 bp, Homo sapiens
gcaagcctataatcatatgcattaatttatttaaatttctataataaaacaccactgaagtggctttcattttctcttggtgaaggcaggaattattttaacagagcagagagtgctcattggtgtaaacagacaagcttcaaacagttcatagaatcaggcacaccaatgccctgagtgcagggccgtgagcggaaggtaagggatgccgcccaggcagaatagaagagccagggccccatgaagaaaactttgagccattctcaggctggggaaaaaaacagacaagagcagcaccatgcagtaaatcacttgttgaggggccaagtcagggttagcagaatgaaggctgctagaatgaggaaatcccaccaggaaactagagtggctacccagaaygggtggaaattgaaaaggggagatcttttaagagaagaccatagaaataagttcagggagcctttgaacttgaattgctcagctgtctattgtatctatttattttacttaacaaggttccaaactctcagtctcaa

SEQ ID NO: 555005 - DNA, 536 bp, Homo sapiens
agcaattaggaaagggtaggtacatgcgaaataagtaaagagtggggctcaatcagaggaaagtgcaccaaacgggaagacaagttctcaattcagttggaagatttaacttgtagcttggctttcaggctttaaactgtcttcagcttggaggtggggtttcactggggaaacacccctatctgcccaggcatatttggctgcctcctacctctctcaagttcagaacaaaacaacggattagaaaggtcatagagaaagaggcagaggaatctcccctactacatttcccttacccacaagatgcttctgggctggtggggaaactttgatgctgatgggacatgatcttagaggaggtcaggaatagaggctcatcttgcccaatcatgtgggtagaattgtcgtcagcttctggaacrgaagtgacaaggaagcagggtgcaagcctggcgagcactatttgttgcctgttcctctgtcagtggttcagcacatgaatgttgcccatctgtagagggttgctttccttttgg

SEQ ID NO: 555006 - DNA, 590 bp, Homo sapiens
tggataaagaatgtaataactagatgaccaatttgagagtgcttattgggacttatgaagaaaaagaaattgaaaaaargtgagcctgtgtttaaaatttagaggggtatagatataacacagactgttaatgttttctttcaatatccattttgttttactattcttttttaaggtgttttattttagttgtttttacacgttacatgaacattcattcatcgtaatgcatattttatcacattttattgattgtccaatattcattttattgtttatccattttattgattgtccagtgctgacatctccctatgtcagcatttaataatttaataatttctgttgaacttttaaagggctttgggtatgtaatttctgttgaactttttaaagggctttgggtatgtaattatttaacaaagtgcaccaactagcagaattatctgtatacatagaagcgattttttttataatgatgatgatttagtcattcaatgattatttattgagtacctgttatgagccatggactgtcttaggtgctggtgatatagaactaaaagaaaaagacaaaactccttatcttt

SEQ ID NO: 555007 - DNA, 544 bp, Homo sapiens
ggttttaggaaaacagtgtacaggcatacgatcttgccctcattcttttctctaaagtatgctttcctgataatgagtgaatctctgaattttaatgtattttgctatttggagtagctaataatttcaaaatcatccaatcccgatccctttttttaaagcaagtctttcttctatttcttacttcttgcactttgagcagaaagaagtaatcaagccccaacttcaatattttgtttgaaaatctccttagctgtatgactaaattaattacttacaagttctactttcctcataagtgcargtgaaaaattttgtaaatattctgccactacatggcacaaatatttcttcccccagtttcaataacatgttgatttccttccaagctctcagcagcagcactttagcattcaaatctctgctaacagtctgttcatggtgatttaaactttctgtcttgctcttccagattgttctagtcttgaccccctgcctggtcccaaagccactctcacattttagacgtctcttccagcagcac

SEQ ID NO: 555008 - DNA, 1064 bp, Homo sapiens
cattctttgttacttctggtacatcattaaaattttaagactaccaaattagaaaattagaaatcaaaagagaccaatttcacaaccaaagaaagtagcacacagcaagctctgaactctccttcaaactctggctcctgagacaaagtggcacacctcccttcacaaaggctacaaagctgcagtcacattcccacccagacaagaacagggtatgtggtagccttgaaaaaccagacagagaacacaatgaacaggggttcttctccctgaggtgcccagagctggtgccctggctttgaaagggtagactttcatggtgtctatttcccagatgccattgcaaacagagctcatgcagagaaatgctgtaccaagcccgtattttaatattggagaatttacttcatatgagcttcaccagtagtttgcacaccagcctggctgtctaagacccacttgcggggggcttataaacaattgtatccactcagatatttattatatctctaacatgtgctagtactaacctgaatgctagatgcagggatacagcaattaacgaaatcaagttctgactcacatggaatttacacttgaatgtggggatataagtgataaatacataaatatatcccatgtcatatggtcacaaatgctatgaggaaacaaagcaggataaagcggagctgcttccatctctggctccaccatctcctacagctcagcatctacacctgcaagctggaggcaacgaaaagaggacatggagggggtacctccactttaaaaaagccttggtctggaagttttacaygtcatttcgttttgtattttcttagagtgaactagccacatggacacaactagttgcagggcagaaacttagaaatttaagctttatctgaacagtggactctcaaccacccctgcattcaatagaaggggacagttttttggtggatctctaattgtctttaccatagtccgtggtcatcttttcatcactattgtcctattgtcgtgaatacacagtttcatgtctaaattagaaattaatataa

SEQ ID NO: 555009 - DNA, 1473 bp, Homo sapiens
cacacaaattaatttgtaaaggtataccatatgtaacaatacatatacccaattctttattcaacagtttaatttaggtatattgagaatatagtaagtagaatttttgctttaaaaagtgctgaaaatatgcagcttaatttgtaaattaataaagttccatggctgtatataattacccatttttattctcagatacgcttttctggtgtaaataatcttatataatattttatgtgcatgacattaaatcctctcactttttttcatctgcttttatatagttacagatcataaatcacctccttatgacccatctatttaatcaactgaatgggtttcattactttaactaacttacaaaataagcctttaatcattgggaaaaaaagactatataatattttaaaagatgaatattaaggctatcttattaatagaccttataattttaaacttaatattaacttttaattgtagagaaaaaacattttaacaagtgttatatagagatgtcaaaccacttcactcttcattgtaacacttgtaataatatagactcatggttgtaattatttttgttagcattggtatatgtccagtcatgtttcaattattgctgatttggagtattttgttcccttcatttactataattcagagggcaataagaatacaactgaccaaattccaacaccaatataaaaaagaaaagaacaaaaggaactcttaattagaaacacagcaaatatatatatatatatatatatatatatatgtatttacatatacaactacatatatatatttactattcactatttaatgatatttcttttggttgaaattccaaagtgaagacagagaatttaattcagcatattaaacttaaatttatccttgctagttttcaaaataaatcagtatcataaaattgtaatgtctttaaatgtctcattaacttttatttcactagtgttttgaagatgccataattggattctggtacattgagatcttgcctaccaattaactgtgtattttttcacatctgactaaataaaaatgagttgggcttaatcagtcagtccttgaacttggagagtatttcctgttttaaaaagttttctcaggcaaggaaaacttgcttgagatgagactggttaacacacatatgcatgcactaaagtcttcatttccctatacaaatgtgtgcactcttcatattttagctcagacaactatgaaagtatttgccagtggttgtaggacagggccgctgatacgtgggaaaatattttaacgatgttgactctggtttcttgtaccgatttttgcattgtaaaaatgctcatacaatcaggccaccatgattcctgcaaatatttttgaatgtagtacataaccaaataaataaaatgttaagggtctacaaagtatatataatatyactaaaaaatattatttgttgcc

SEQ ID NO: 555010 - DNA, 1980 bp, Homo sapiens
gcaagatatatgcctacaccaactttaagaaatgcaaattataccatatgcctggaggaagaacttgtaaaactgggagaagagcatcagtgactagcacaccagcatgctctcccatccttggcactactgacatttgggccagacactttgttgtggggaactatcctgggcattataggatgtttagcagcatttctggtatctacccactagacgcaagtagaatcccctcccccaagttgtgacaaccgaaaatttctccagacattgccaaaggttccctgggtgacaaaattgtccccagttgagaactattagcttagagtaatgcacataagagtccatacatttctaggctttggagttagactgctaaggtttgaatctcagctcttttattttattttattttattttttagacacagggtctctatcatctggctggagtgtggtggcatgatcatgactcactgcagcttccaattcctgggctcaagtgatcctcccacctcagactcctgaggagctgagactacacacatgtgcgaccacacccagctgatttttaaattattttgtagagacagggtctctctacgttgcccagcctggtctcaagctcctggcttcaagtaagcctcacacctcacagcctcctaaagtgctgggattacaggcatgagccactgcacccagccagctctttcttttactaattgtgtgaccttgagcagttacttaacctttctgggcctggttttttaaatatgtaaaatgaggatactggttgtacttctctcataatgttacagagattgaatcaggtagtacaatacttgtaaagtgcttaaatattgcttgatatatagtaaaatatattaaaaatagacttcagacaaaaagcacccattcagagtggcctacagtctgcagcaatccatgtagtttcaggttcatttatattttatgtcacattgaatatgccatttcaacaagtgaatcgtcaacatttcatattaattacacacgatgggtccttaggaccctatggcttaccttggttaagaacgactccattcacttcgatagggtttgaaatgaaaaaaacaaacaaaacagggtgactaatgagagtgactcaatagacttatatttaacatactttgcttctgcccttttctttcatttgatgtttgtgggaaatatttgtggtgagctagaattaaaagtctatactttttcattggagcacttggtcagagcagagtgctcataagatttagatcaaatgtgtttgatccctaccagcccagaacctggaacaggctactatcccaggagagctaatcatggccacataggatagtggacaagagtcagggggacctcaggagccaggagactccagacagtcagcttaaatgtcttgctttagaactttcatgtggcagcaaccttttattcaatgtctattcatttgtccctgattagtgacaagcacaggactgacccattgtagctgtttaataataatgtttgggccgggcgcggtggctcacgcctgtaatcccagcactttgggaggccgaggcgggcggatcacgaggtcaggagatcgagaccatcccggctaaaacggtgaaaccccgtctctactaaaaatacaaaaaattagccgggcgtagtggcgggcgcctgtagtcccagctacttggsaggctgaggcaggagaatggcgtgaacccgggaggcggagcttgcagtgagccgagatcccgccactgcactccagcctgggcgacagagcgagactccgtctcaaaaaaaaaaaaataataatgtttgtgcatttaaagacgctgtgctttggaatcagccaattttgcagggcggaggaagaaaggaaactggtttgccatctggcatttacaaaatgggaaacaaatgcattgactttttcttcctctcaaaactt

SEQ ID NO: 555011 - DNA, 1498 bp, Homo sapiens
tgcagctttctttcctcaaacttttacatgtattcacaccctcctgtcgaggttagcacctttgcatcctccagatcccagctgaaatgccctgaggcctcttctgccacctaatctgaaatcattctccttcttgatctctatgtcttgttttctttcttcataacctagcagaggtcagagttgcttcatttactggggagtggtccttgatcctgtattcacttaccagtctcccagctggactataagctccatgaggtgacagccacatctattgtgtytccagctcttactcctgcacttggcatgctagggatgctcagcagatgactattttaaacgtcagtcatggccaggcgcggtggctcacgcctgtaatcccagctactcaggaggctgaggcatgagaatcgcttgaacttgggaggcagagggtgcagtgagctgagatcgcgccactgcactccagcttgggtgacagagtgagactcggtctcaaataaataaataaataaataaataaataaataaataaatgtcataatgagtgccaggagaatgtgagtcggcagatctcacaggagacccgggagagtagtagttgctgtttaactctgtttgctgtttaccttctgtgcgagctcaagcccagaagctcccatctctggaccatgatttcctcatgtgttaaataaaggctgattacttactttctaaatttcctccattctaattcccactcactaaattaaactaattcacaacaatgtgtgaatggctgatggcttattaccattcccagagggaggtgtatttttaaaagataatgttccacattaatctctatttttaggctatcagctcgatgagtgaaaacagtggaactgactggagagagataattttctgctgagagcaaatgaacctgagattctgcccctgtgagtcagctgcccgattagttcctgcttttctcagcttcttcccctctccttatttcaactcaggcttcaaaagaatggaaactttttttttaaacttttttttttccacctcacgccctccccaactgctacagtacatatggccatggggcttctgctgtgatcaacgttagagagttgtaagctatgctcaagtgaggccacagctttgtctgaagttgtatggtcccagtgggtttggtttctagaaaccccaggatttctttctgtttccaagtgtggggctctaggtggttgccaggcattgtggttttgcagacggggcagtatttatctctccctgagccttagttattcatcttgtcgtctttccggaactcagagtgtcctaccaggaaaatgagtgtctaggcagagaggacaaaggttggctcagaagaacaaacaaagagaggaagcactcagtagtaatcacaacattaggtagagcagcaaatagtaaaatttggcctgtgcttacagaatggctctgtacagccttttcttccgtt

SEQ ID NO: 555012 - DNA, 619 bp, Homo sapiens
ataatcacattgtacaccttgaatatatgacttttatttgccaattaaatattttaaaattaaaaaatccttgtttacatttcactattatgttgactgagtttgtggtggaattttgagaaaagtatccttgcatatkaaattattggttttaaagtctttttcttctctttttttatgacagcaatacatgtctactgagaaaaattatgaagaaaaagataaaagtagaaagatgtgtcaatgcaaatataacaaaggatgctacaaggatgattaggtattgtgcatatgccaggaaatatttttcaaatgagtgagtcaataaatgagagaataggttctggctgactcatggtttcagtaagctcctgatggattgaatttatggtatttcagtgcaaattaacatttagcattccttccaatagttatccttttataagcagtttccttgaaaacattgtgactataaacagccctcctcaaaaagcatataaattgcttatgaatgaggaaatgaatattttatttgctatagaattttatgttcaatagttttgtgatagagtgaagttaaaatggatggtatgggaatatgtactcctttgttttatcc

SEQ ID NO: 555013 - DNA, 619 bp, Homo sapiens
ataatcacattgtacaccttgaatatatgacttttatttgccaattaaatattttaaaattaaaaaatccttgtttacatttcactattatgttgactgagtttgtggtggaattttgagaaaagtatccttgcatatgaaattattggttttaaagtctttttcttctctttttttatgacagcaatacatgtctactgagaaaaattatgaagaaaaagataaaagtagaaagatgtgtcaatgcaaatataacaaaggatgctacaaggatgattaggtattgtgcatatgccaggaaatatttttcaaatgagtgagtcaataaatgagagaataggttctggctgactcatggtttcagtaagctcctgatggattgaatttatggtatttcagtgcaaattaacatttagcattccttccaatagttatccttttataagcagtttccttgaaaacattgtgactataaacagccctcctcaaaaagcatataaattgcttatgaatgaggaaatgaatattttattygctatagaattttatgttcaatagttttgtgatagagtgaagttaaaatggatggtatgggaatatgtactcctttgttttatcc

SEQ ID NO: 555014 - DNA, 619 bp, Homo sapiens
ataatcacattgtacaccttgaatatatgacttttatttgccaattaaatattttaaaattaaaaaatccttgtttacatttcactattatgttgactgagtttgtggtggaattttgagaaaagtatccttgcatatgaaattattggttttaaagtctttttcttctctttttttatgacagcaatacatgtctactgagaaaaattatgaagaaaaagataaaagtagaaagatgtgtcaatgcaaatataacaaaggatgctacaaggatgattaggtattgtgcatatgccaggaaatatttttcaaatgagtgagtcaataaatgagagaataggttctggctgactcatggtttcagtaagctcctgatggattgaatttatggtatttcagtgcaaattaacatttagcattccttccaatagttatccttttataagcagtttccttgaaaacattgtgactataaacagccctcctcaaaaagcatataaattgcttatgaatgaggaaatgaatattttatttrctatagaattttatgttcaatagttttgtgatagagtgaagttaaaatggatggtatgggaatatgtactcctttgttttatcc

SEQ ID NO: 555015 - DNA, 543 bp, Homo sapiens
ttttaaaaaaggtgaatggttaatggaattatctcttctaatgcgtgtttgcaatttttaaagggtggcgttagtacaggtaaatctctggcttattcctggaacatattttgagctaaatagattttttaaaaagtaccttaccgctatgcatctgctggaacataaaagtctggtaccagtcatccaatatcactttactttttgggaaatccccactgaatggagctctgtttaggcacttaactaaaaaaaatcaggctggtgtggtggcttatgcctgtaatcccagcactttgggaggccgatgcgggcagatcgcctgaggtcaggagttcgagaccagcctggccmatatggtgaaaccccgtctcttactaaaaataccaaaattagccaggcatggtggcaggtgcctgtaatcccagctactcaggacgctgaggcaggagaaatcacttgaaccagaggttgcagtgagctgagatggtgccattgcattccagcctgtgcaacaagagcgagacttcatctcaaataaaa

SEQ ID NO: 555016 - DNA, 603 bp, Homo sapiens
ctgtgatcttttaaaaaattcctcacttcaaaggttgagagctgcagatagtgggcattgttctccagcacttgctctgggaaacttccttataggattagtgagtaggtgtgagtgaccttcaaaaaggccttataggaatttacctcttaacagatcacattattaactgaaagtaacattataaattgcattttgtaaaataaaaaatgtgagatttgagatattcaaaagcaaacaaaaagaaaataagtaactgaagaaagtccaaaagctcttagctggtaaagctctcagtttttactgatgcttggagctcctctgtggctttatctttgagttaatgctgtcctgtgatggtttaggtagcgtcgataaaaagatctggtttctaagttayggtttttgttgctggtttttgtttttgtttggttttatagggagaggaggttgcaggcagaatggctttttctttccgtggagaaaatggtaggagactatttctgaagacatttaagattttgaaactgttaagaatttcaagaccatcaagtcaatccttcagggatcagtgtgaaattattccctcaggcaacatctctt

SEQ ID NO: 555017 - DNA, 1557 bp, Homo sapiens
ttctgtccatttgaagttctactttagtttttattgaaatttctttttcagcatagttccttgttattgttcagaataaataccttagacgaatatcttccagaagtcttgtgttttaaacatactgaagtaatgaaacgtgataaacttggtacattgtagtttggattttgcatggcacactgtgattttggacttctgtgttctgatagcttggtcatgagctgaaagggttcaaggctattgcccttcggagtaccgtgctgctgaataacgcaaatgtcagctcaggaacattggaaaagcagcagcagttgaattagcagaatgtatttgagattcatccatgtaaatgagtttgagattcattcattcaccttttgtaaaccagttgacgaaagaaaagaattattgtgcagaaaaggcagttttatatttttataacaatgaaaaaaatgagtaaaaaattttaagaacagttgaggtgaataggtaaattgacaggattagaaactgtgagaattgctttggggagcgcaaaggctactgyggtccagccatactgagctctcaataggtaccacgtactgagacctgtccatgtcctttccacacattagctcattgatcctccctatggcactctaggcaggagttactagctgcattttgtaaatagaacctcaggcactaagaggttagatgacttgcttagggtcacaccgatcctaggggtggagccaggatccaaacctagcacctggctccagaaaatcagtgaggccaactaaaatttacaagcaggtcaaaacaagactgggaaaaaaggacactattgggggttgagagacagggcagagagagttggcctggacctcacattcaggctttggacatttcttccaaatgagagtatataaacatgtatgacattttttggatgattttatataaaaaaattactttatatatgttgtatatatagcatatgctagatatttttgtatatataaattatatacaaaaatttatttatatataaattatatacttatatataaaattaaattaaattaataatcaattaaattaaaaattaattaaattaattaattaaattaaaaatgattaaattaattaaattaaaaatgattaaattaattaaattaaaaattagttaattaaattaaaaataaaattatatatttatatataaattatataaaattcatatataaatatatacaaaaatatatagtatatgctatatatacaaacataaatggtagaatatactatatatacaaacatataatgtatgctatataaagtatatactatattaaaaatataaatatagtataatttttgtcatcttttttagtgtgtttaatagaatgagaccctaaaaaaattggaagtgctgcatttctgtcttctcctgagaggccctatagcatattattgaagtaatatcattatttaatacatatagtaaataacaaccttgcataatgggtagttatttcactttttagtgtttcaccttgcagtatc

SEQ ID NO: 555018 - DNA, 669 bp, Homo sapiens
gagaactcaggccttgccttctcaggcttctgttggccccataagttatttggcttgtggctgcttcactccaatctcagtctccataatcacactaccttctcctcctctgggtgtcttcccctctgtatgtccatctcaaaattcccatctgtgtgtctcactggatttagagcccaccatgatagcccagaatgatcatctcatctcaagatccttaattacaaaaatcctttaaaagaaataaggtaacatttacaggttctggggagtaggatgtaaatgtatttttttggtggtggggrcaatattcagcccatcagaagcagcaagcagtggatgcaaaatcaggaaataataaaggaacattccagaaagatacctgtgcagctgacctaaagagtatctagtccagactaaagcagaagagaatctaggaggcagatctccagggaaaaaaaaagatttggtagaatcagtgggatgtttgagggagcaaatgaggcgattataaaggcaaatttttttaagtaagaaatgccaagtgtatctatggcagaaggtagatggaaaaatggaaaggagagctaaaagcagtggacaaggacagcagtctcttcttgctgtgtataaaatgaaagattatctaatcttgatagaaggaaaaac

SEQ ID NO: 555019 - DNA, 642 bp, Homo sapiens
atagcccaagcatgcctgtcttcttagaaagagtgcagaacatcgtccagtggcatggttgtgcgcaaaacacagggaggacccagaggctgtggaagcgcatgtagctatttgccccagcaccaaatgacaccaggcagtgaacaattcttattgattggatttggtttgtaagagattttccctatgacttcttcgtaaggtcaaggtacttgcccacattctctctgtccttagcattttcttttccaaatatgttgtggtctggaaacwagataatcaacactttggaaagcagactctgtaatttattcctctttgtgtccctggcaattagcctagtgtctgggctatacatgaaaaccaaacttttccctaactgataactgaaaattaggaagtttaattggaacttaagattcacatcacctcatctgaccagatgttcctaaaataaacctggcgttggctgtgtaacctggtccattctcccgggacactcgtctaatgacccccacactgagtgagcatacctggcctgttccatcagggtgctagggtacctctaaacctggctgagcacacctggtccattctgccctaacattttaaaaggccgaagaagcaaacacacaagtaaaa

SEQ ID NO: 555020 - DNA, 540 bp, Homo sapiens
aaagtacattatcgcaagggcggggagggtgtattgtcataaggtcaattgatcagttagggtgcggcaggaacaggtcacaatggtggaatgtcgtcagctaaggcaggacctggctatttgcacttcttttgtggatcttcagttgcttcaggccatctggatgtatacatgcaggtcacaggggatatgatggcttagcttgagctcagaggcctgacattcctgtcttcttctgttaataagaaaaacaaaacaaaatggtggtgaagtgttggggtggcaaaaatttttgcgggtggtatggagagataatgggcgatgtttctcagggctgctttgagcaggattaggggcagtgtgggaacctagagtgggagtgattaractgaagaaagattttggggtaaggggtgatattgtggggttgttagaagcagcatttgtcatatagagtgattagtgatagtctggatgcagttttgtaggaattgagagattaattggaagacacaagggccaagtaagagaaagagaaaa

SEQ ID NO: 555021 - DNA, 540 bp, Homo sapiens
aaagtacattatcgcaagggcggggagggtgtattgtcataaggtcaattgatcagttagggtgcggcaggaacaggtcacaatggtggaatgtcgtcagctaaggcaggacctggctatttgcacttcttttgtggatcttcagttgcttcaggccatctggatgtatacatgcaggtcacaggggatatgatggcttagcttgagctcagaggcctgacattcctgtcttcttctgttaataagaaaaacaaaacaaaatggtggtgaagtgttggggtggcaaaaatttttgcgggtggtatggagagataatgggcgatgtttctcagggctgctttgagcaggattaggggcagtgtgggaacctagagtgggagtgattaaaytgaagaaagattttggggtaaggggtgatattgtggggttgttagaagcagcatttgtcatatagagtgattagtgatagtctggatgcagttttgtaggaattgagagattaattggaagacacaagggccaagtaagagaaagagaaaa

SEQ ID NO: 555022 - DNA, 540 bp, Homo sapiens
aaagtacattatcgcaagggcggggagggtgtattgtcataaggtcaattgatcagttagggtgcggcaggaacaggtcacaatggtggaatgtcgtcagctaaggcaggacctggctatttgcacttcttttgtggatcttcagttgcttcaggccatctggatgtatacatgcaggtcacaggggatatgatggcttagcttgagctcagaggcctgacattcctgtcttcttctgttaataagaaaaacaaaacaaaatggtggtgaagtgttggggtggcaaaaatttttgcgggtggtatggagagataatgggcgatgtttctcagggctgctttgagcaggattaggggcagtgtgggaacctagagtgggagtgattaaactgaagaaagattttggrgtaaggggtgatattgtggggttgttagaagcagcatttgtcatatagagtgattagtgatagtctggatgcagttttgtaggaattgagagattaattggaagacacaagggccaagtaagagaaagagaaaa

SEQ ID NO: 555023 - DNA, 581 bp, Homo sapiens
ttttttttttttttttttttttttgcacatatccatccacaaatgtccctgttccattctccccacgggtacagtgatatctaataatgagttacaaattttttttgtttcctctttaataaatttagtactggtgtggctctgaataattactaaacagccaattttacgtctttaaagtatgtgtatccaggccgggcgcggtggctcactcctgtaatcccagcactttgggaggccgaggtgggcggatcataaggtcaggagatcgagaccatcctggctaacacagtgaaacctcgtttctactaaaaatacaaaaaatcagctgggcgtggtggcgggcgcctgtagtcccagctactcgggaggctgaggcaggagaatggygtgaacccgggaggcggagcttgcagtgagccgagatcgcgccactgcactccagcctgggcgacagagagagacctcgtctcaaaaaaaaaaaaaaaaaaaaaaaaattgcgtccacctcttccttatatgaaccgttgtgaagactagggataaagtaagtgaagagcccggatctatctgaaacactc

SEQ ID NO: 555024 - DNA, 650 bp, Homo sapiens
taaaaacaagtacataattagcttatttgaagtttaaaagatatatttagggctggccacaatggcttacacctgtaatcccagcattttgggaggctgagggaggaggattgcttgagaccaggagtttgagactagcctgggtaacatagtgagacacagtctttacaaaaaatttaaaacctagctgggcgtggtggcatgtgcctgtagtcttagctactcgggaggctgaggcaggaggatcacttgarcccaagagttagaggctgtggagagcaatgattatgctactgtgccacagaacaagaccttgtctcttaaaaaaagtatatataaaactgtatttaaatatacttgctttcattttcatcttatgtattttatctgtgttttttttcgcttgatttttggccctctgtggtgtctctcaccatatctggtaatttttgattaagtgatggatattaccatggtatttttggttaaatgcagaaggaaagccatttaagaaagtcactgggccaggatgtgtatcttaaatatattatactgttttacccccttactcttatcaatgtttctcaatttggctttattaaaaggattaaaccctagagaagatgaaatcattgtgtgaccattttcca

SEQ ID NO: 555025 - DNA, 555 bp, Homo sapiens
ccatacatatgtagacccacacagttcaaacctgtgttgttcaagagtctactgtgtatctggtgattgctaagacagtaggaacagcaagacagttatgtgagcagaataatattatattaatgaggggaagtkaataggcattttaaatgtgattattgtatttggacaaaagtttgatgtacctatggaatccaagaggaagtctcttgtagctagctgaaagtgcagctctgagcctatgagaaatctatgaaggcgctaaagagctggaagccagaggacattaatgatagctggagccatggctagtgatatgacgattcatggagactgggtggaaggaaagagaaatgataaggtcaagaatagaatctgggttgtcatgatggtattatgtgcctgtagtgacagctactagggaggctgaggaagaaggatcacttgagcccagatgttcaggaccaacctgggcaacatagcaagaccccatctctaaaaaattaattaattaattaattttattaaaggtaaaataaaaagaatagaaactgg

SEQ ID NO: 555026 - DNA, 555 bp, Homo sapiens
ccatacatatgtagacccacacagttcaaacctgtgttgttcaagagtctactgtgtatctggtgattgctaagacagtaggaacagcaagacagttatgtgagcagaataatattatattaatgaggggaagtgaataggcattttaaatgtgattattgtatttggacaaaagtttgatgtacctatggaatccaagaggaagtctcttgtagctagctgaaagtgcagctctgagcctatgagaaatctatgaaggcgctaaagagctggaagccagaggacattaatgatagctggagccatggctagtgatatgaygattcatggagactgggtggaaggaaagagaaatgataaggtcaagaatagaatctgggttgtcatgatggtattatgtgcctgtagtgacagctactagggaggctgaggaagaaggatcacttgagcccagatgttcaggaccaacctgggcaacatagcaagaccccatctctaaaaaattaattaattaattaattttattaaaggtaaaataaaaagaatagaaactgg

SEQ ID NO: 555027 - DNA, 970 bp, Homo sapiens
ttttttgaattcttatgccaagtgctgttaagaatttatctcacaatcacataggtcagtaaatagcagcgaccagatgggagttcaggcccttttagtcattgctcagtgatcattcccttacaataaacatctgtggatgcactaatccaaatatcaagtgtgtgattgccacaaatatttgagttataagatgttagaaatgtttaatatatatatgcaaaatttggaactgtattgatacttatggaatgytatgctaggaaaagaggttaagtgagccattctttttgtaaatagtcatcaatatttacagaatacctatgttcaatttttgttttgcctgaaggtcaaaaaagaagtgaggatcatatgggaaatataccttcttaagaaaaaagactatgatctccattcacaaaactactaatatatctatgagctctgcttcataatatttctggattttataattaaactttcctatgaattttctaggttatttttgtgaattttctgagatatatttcaaattttgacagggaagcttaaataagttggtttttcagtcaaaattattataatacagctagaaaataatttgaactatattaatggagctgcaataaaattaattgaaaattttatggacaataaaagcataagtggaaatttaaaactagattttgttttaatataatagctttttagaaatctataatgttataataaaatattgtaaaatgaatgatttggacacaatttcctacttgataggatccaaaacttgtgtggagttgaataaaaaagtacattatagatttcctttgctttaatttcattgagaactacattgtagactgcaataaaacagaggtcagattcagagaaaattgcattttactagtggtagcagcaaaaatatgaaccagaatttactacagttttatgagtttttattaatatcagt

SEQ ID NO: 555028 - DNA, 534 bp, Homo sapiens
ttgaactcgggaggcggagcttgcagtgagctagattgtgccactgcactccagcctgggcgacagagcgaaactctgtctcaagaaaaaaaaaaaaaaagaagagacatccacattctyaggtactgtttttcaggcttcagggatcataggtttacaattttggtatttagctaaattatgtcaatcttttttttagttgttttttgtttgttctgtttttgtttttagcaaatctggccatacttccactgaatacaaggattacttcggagaagttatactttgtaagaaaatagattctgtgtttgaaaatatgattaaaaaattaccccaatagaaatatttgggaacagttattgctagtaaataaaactgcctttaaaattatttttattattgaaaaatttcatcgaaaagaattttgctgttctcaaagttatgatgcaatttaaagtataagtgattattttggcccaaaacctatgagaattttctctccctaatatgtctataccatctgctggctattag

SEQ ID NO: 555029 - DNA, 634 bp, Homo sapiens
agtttcctcttgctggcgctctcttctcacgcatccttcacaccaaaatcataggaggaaatttgtctctctcactagtgagagacatgagtctagtgacattggtcttttctaagctctcagcacttttcacagaagagctctagtgcaaagttaaagctcaaacacatctagtgagctgaattagaacaaagagctgatgtcacttggtatattaagktcattaggagtggaataattataagtgagcttgaaagcaacttatcttttccactctgctttttcttagccagtgatgggagtcagccttccattacactctctgttaccctcatacaacttaggcgttgacccacagttaccaggtgcctaacttgacagcaccctaaagggtgagtgtggagaggagcagagtgtacataaaaactgaaaaatcacagagagaaggagagaaagaagaaaagcaaagagaaaaggtgagagaggaaaataaaaaatagttggagattagcagagatgagatattaagggaagattattcatgcagaaaatggaggaggcaaagaatatttattttgtctgatccctgaaatctgaatcttcacattatactttgaaaggtttaaatattgaa

SEQ ID NO: 555030 - DNA, 550 bp, Homo sapiens
cctttccccccgagtcccgaaagtccaatgtattattcttatgcctttgcatcctcatagcttagctcccwcaaatgaagtcttaacaacactgactaaatgtgcactgtctaactcagtagtcattagcacatgtggctatttcaatttaaactttagttcattaaactgaaataacatttaaaattcagctctgcagtcatgctaaccacatatatcaagtgctcaaaagccacatgtggttagtgactaccatattgggcagcacagatataaaacatttgtatcatcatagaaagttatattttccagtatataagactaactactaaaaaagggaaagggagtagaaaaaaatggtctttaaaaaaaaaaagaggtccaaaacctaagcatccactgtatacctctcttgcagcttcctggagcctcattcaaacacaataaacattcagttgacttgttatgagactctaggactaaataaccaatgttgttccattaaaagatagtagcagtacatgagccatgtcttattatttttgtaatt

SEQ ID NO: 555031 - DNA, 1112 bp, Homo sapiens
acttactgatgtaatgacttgctttcatagaatttacctttcctttgttacattttaaaatataaattgatgacttttacttaatttttttttttttgatgactcttaaaacactgaagaattaggctgggaaagaccatgtattgaatttacgtaacacgtgttatatggactaacgtgcagttatttgtaatatggtaagaaaacttgattgtgggaaaacagaccttcaccgtattttgatatttacacgactttattaaattaatctgaatattgggaattttaatttacttcaaagaaggaagcagataaaagataaatcaattaacaagagatgatttttagtccccgattatttatacatatatctaaataatgtaaaatcccttcttttgcattcaaacttagttcttaaacataaaatttaaaggtgcttgtgtgagaatatagatgtttacaattatccagttttcttttaaatgaaatggatgtggagcctatcagtttcttgcaggaataaaaatacgatagcacgctccctaagtaagacagatggttttgggttttgttttctgttttgataaggccgtttgtgagaaaaatttacttgcagagaaatgttaaacgttaactttctcgctgatcagcaggtagcctgtcacgctgaagtagttctgtccacggatgtgggtgtgggaagagtggttgttccctgggggctgtagagcccgccaatcctcacccctagcccggagcccgctctttgcagagcccagctggttgcgcagagcgaccagcgccagtctgtgctctggtactgtgcaccgccctgggttccctgcagtccaccgacgagagctgcccagcgcrgggaaggaacgcttcttgctcaacagcgccctcgcccgacaaagcaggacaattccccagctcccaagccctcttctgtatttctcaaaaatgccattggctggagtggcggtgaagaggactaacgcctggtgacctgtaccagggctcccggcaagcaaagcaaaactagaataaaacctcaagtaggccgggcgcgtggctcaccctgtaatctcagcactttgggaggccgaggc

SEQ ID NO: 555032 - DNA, 2006 bp, Homo sapiens
caaaaaaggattccatataattgcagcaaaaattatttgatccctaaatctaacaaaaaatctgcaagagaaaacttaaagctgatttaaataaaaacataccacgctaataaacagaaagactcaatatcataatgatgtcaattctgttctttccaaatgaatctgcaaatgcaatgccattttgagcaaagtttctaagggctttccaagtgtcttgccaagctgattataaaattcatatgaaaattagaagtccaagagttttaaagagggaaaattcatcttcctaggtatcataattcatcataaatacataaattaaaacagtatggaactgttcagagaacaacagacagaccaatggcataaaacagaaatccaagaaacagactttcaattggtggcaaattggtcctgaggccaggtagcgtgacaaaacagtgggggaatatttggtaaatgctactgaggcccagctttgtgaggcagggggttttgagagtggggaataccaaactggcctgaggcagaggaaagctgacttgctttctacctggcccccatccccaacactcccgagcctggggaccacttctattctagagcgacagatttgctctataaaaacagttgcagttagaactgggccatgctgggaggctgctggcagggaggctggcaagaactcagggctgggtagaggctcttgggggtgcacagacaggagacacctgtctccttttctggggtgccaggagtcctggccggtgatggacaggaataagcagaggccctgagagtggcagctgacttattttggcatgggtgcacagttgctgagctgtttcctctgtgggtggcccagctcccaacctgagacctatctgagcatccattgtagcctaggttctgctcttacctaaggaatccttacagccttcaaggtttgtggaatctctattttatagaaagcagcaaaggtgctcaaagaggctaagtaactggcttttttttttttttaatggagtcttgttctgtcacccaggctggagtgcaagggcacgatctggcctcactacaacctccacttccccggttcaaagggattctcccacctcagcctcccaagtagctgggactacaggtgcgcaccattatgcccagctaatttttatattttttgtagagccagaattttgccgtgttggccgggctggtctcgaacttctagcctcaagtgatccacccgccttggtctcgctaatgctgggattacaggtgtgattcaacatgcctggccccacatgctttttaaagcagcttggctgggatttgaatgcatgagyttctgacaacacaggtcaagaaacatctcccaccataccctctttaagaggccaccagcacttctgttagaagttgcagcagagaaaggatcctttaggcacatctcccagatccttgcgaagaggggcaaagggaacttggaggaggccaagctcctgggagaagaactgtatctaaatgcagatgtcctattgttgccgtcagagaagacacacccgaagctgagacagggctctcccagaagtgaaggaagatttcttagtaaaagtttgcaggtggggctggaaagataggcttctgaaatagggggcttctaacatccttgggtgagcccctaaagcaggtgggggcggggagagggtacttgcagtgagtgaggatagttttaaggtaatcaatagttagatcttcattttacaaatgggcctcccaacccaaagcaccctgccagagaggcatctgaggacacagcccccctccacttccacctcctgacctcacccagctccccctccccaaaagcgggaggaggtgattggggtgtggagacagcaagcaccccatgactaggtattgatcctgcaaaccagaaagtttccagttcttggctttaagcagggcagatgaaagccctacattcgttgccccctgagaga

SEQ ID NO: 555033 - DNA, 551 bp, Homo sapiens
ggggagggtgggcttgtatagccttcaacacccacctcaaaagccacagagcatgcaaaggaccagacacaaggaaaaccccctcccgccaggcaccttccagaaggcacaggtcaggcagatggtgatggcagaggaatgtatcaggggaagctgaggtataaaggaccttcaacaagtttggtgacaagggaagaggacaaagtgggactgtgctagcgaagcatgttgatgagaggagtttttaagggtggaaagttctgagcagccatgagggtggaggaggaggtcagtgacgaaaatgctgtatgtgaattgtatccacaaatgatatgtcccagtcctaamcccggtgcctgtgaatgagaccttatatggaaagagggtcttagaaacgaatcaagttaagatgcggtcatgatgggttagggtgggccctaagtcccataacactggtgtccctgtaggagggaagtttggacacagacctgagtagagggaggatgaagtgaggaggcacacagaagcgggcgggccaaggccaacgtggg

SEQ ID NO: 555034 - DNA, 551 bp, Homo sapiens
ggggagggtgggcttgtatagccttcaacacccacctcaaaagccacagagcatgcaaaggaccagacacaaggaaaaccccctcccgccaggcaccttccagaaggcacaggtcaggcagatggtgatggcagaggaatgtatcaggggaagctgaggtataaaggaccttcaacaagtttggtgacaagggaagaggacaaagtgggactgtgctagcgaagcatgttgatgagaggagtttttaagggtggaaagttctgagcagccatgagggtggaggaggaggtcagtgacgaaaatgctgtatgtgaattgtatccacaaatgatatgtcccagtcctaaacccrgtgcctgtgaatgagaccttatatggaaagagggtcttagaaacgaatcaagttaagatgcggtcatgatgggttagggtgggccctaagtcccataacactggtgtccctgtaggagggaagtttggacacagacctgagtagagggaggatgaagtgaggaggcacacagaagcgggcgggccaaggccaacgtggg

SEQ ID NO: 555035 - DNA, 551 bp, Homo sapiens
ggggagggtgggcttgtatagccttcaacacccacctcaaaagccacagagcatgcaaaggaccagacacaaggaaaaccccctcccgccaggcaccttccagaaggcacaggtcaggcagatggtgatggcagaggaatgtatcaggggaagctgaggtataaaggaccttcaacaagtttggtgacaagggaagaggacaaagtgggactgtgctagcgaagcatgttgatgagaggagtttttaagggtggaaagttctgagcagccatgagggtggaggaggaggtcagtgacgaaaatgctgtatgtgaattgtatccacaaatgatatgtcccagtcctaaacccggtgcctgtgaatgrgaccttatatggaaagagggtcttagaaacgaatcaagttaagatgcggtcatgatgggttagggtgggccctaagtcccataacactggtgtccctgtaggagggaagtttggacacagacctgagtagagggaggatgaagtgaggaggcacacagaagcgggcgggccaaggccaacgtggg

SEQ ID NO: 555036 - DNA, 551 bp, Homo sapiens
ggggagggtgggcttgtatagccttcaacacccacctcaaaagccacagagcatgcaaaggaccagacacaaggaaaaccccctcccgccaggcaccttccagaaggcacaggtcaggcagatggtgatggcagaggaatgtatcaggggaagctgaggtataaaggaccttcaacaagtttggtgacaagggaagaggacaaagtgggactgtgctagcgaagcatgttgatgagaggagtttttaagggtggaaagttctgagcagccatgagggtggaggaggaggtcagtgacgaaaatgctgtatgtgaattgtatccacaaatgatatgtcccagtcctaaacccggtgcctgtgaatgagaccttatatggaaagagggtcttagaaacgaatcaagttaagatgcggtcatgatgggttagggtgggccctaagtcccataacactggtgtccctgtaggagggaagtttggacacagacctgagtagagggaggatgaagtgaggaggcacacagragcgggcgggccaaggccaacgtggg

SEQ ID NO: 555037 - DNA, 632 bp, Homo sapiens
cttcctgatcctcctgcttcctatgcttatttctgtttaaaaaacaggaaaatatgttcacatcaaacgcgcatatgtgcagccatgcccatgtcccttgctgcagctgactgagggtctggagctgtgcctaggaagccccccaggaatagaccctggttgtgaggctgtctgaggaggccttttgtctcccggtaggagcacgtttgccgtggacgggaaagattgcaaggtgaataaagaagtggagcgtgtcctgaaggagttccaccaggccgggaagcccatcgggtgtgtacagccgtgcaggcctcggggagggagggaggagggtgcgtgggcccgcggcctctgttctcagccaggagctgccgctgatcctgaaaactcacagctgcttttcttgttttaactgaggggatttcacacgatgtcactggtgacttaacaggaaggagaggcacastgcacttccctagaggaggcctggaattctcttggctcccagaggtgtccctaggcagtccctcaggacccctatcctttaccagaccccttctcccaagccccttagccacagtacccccaaccccgctgacttctggccagtcactgcagcacgtgctccatcc

SEQ ID NO: 555038 - DNA, 516 bp, Homo sapiens
gacatgaaaaggcaatggggatccttcctgatggcagttgaattaataggtgaggaatttgaaatattcccaccaatcctccatagcctgattaaatgctcttctttccccccacaaggactaatagttaaagtcctattcatagaactcwtatgagaattcagtgagctaatacacatgaagcccttagaatggcactgcacactctaagcactcagtaagttttagctattatcatcatggtaagacaagagggagactatgaacacagtggctaccaaaaaaagatgtcacaacctcttctgacgtctgcatcccctgagtctgcatccatatttcacttgacacatgtaacttttactttaagaacttgcttgggaaccagactatgggaatttctagtccaaaaccactgtgctggggcggggttatctaggtatgaccatttttcacctgagttcctataacagctttgcaaaatttagattgtgattgtaacattctgtgctgaatgct

SEQ ID NO: 555039 - DNA, 1037 bp, Homo sapiens
ttcatcagtttgatagtacagaactccccaagctatatggtaaatgtgataattagtctttatatagctaggaatgtatcagtttaatttacatgtgcatgattttttgtacatcagcttgagggcatagtagagccctgactctcagaactttgcagtgacccctgctcccatggccctatttaatggataaatacaaatccttagacgtaggtggtgaaaacagtagtgtttaggagactctactaaacacttasataagcacatccaagtccatgactaatgctagctcacatattcatgtctggtcatatgttaatcattctttttgatcgggccaatttttctgatgatctctcctaaaacagttaagatcaaaatgtacttacaaattggaaacattagcttgtggcttaacagccttaaggttgatgatcttcccatcagctggttgtttctctattaattttcaggggttattgttagcaatttaaagaactttagtaattccttgagtgccaaggccaggttattttaaaattttgagtcctagaatcttagatatgtaagtcacttcatagtacatcaagaatgatgtagaatgctttgattaaagacattttttaaaatgttttccttttttttagaaaaataatcctgctatagtaattataggcaacaatggacaaatccattatgaccatcaaaagtaagtgtgtgttttttacattactcctgatttcagcttctttttggaatccttatgaaatacattgtttcaaatctgaacaccttccaaatgaaaaaaatactgttctttttcttgagacatattttgtaacttggtagaaaggttttattttatttggttctgttctgaagttctatctgtggaccatctcagattcaaccatggtatgtgtttttaatttaacctcaaattatttaataatatacttttgaaagtttatagactgttcctggctctcagtgatgccactaatcatgcatttttatcttcattaaaagggatcttt

SEQ ID NO: 555040 - DNA, 628 bp, Homo sapiens
accaagattaaaagaggccccttttccctccaccttcatcacagccatgctgttttttcatttgtttgtttttgggttttttccccaacttgcccagagaacaggcttgccaaaccatgtggtcaygtccacctggaggatgcagctttctccactgtgtacaagggcgttacgtgggctagctgtcgccccagatgtttttttaaattgttcacatcatctcacataatattttcacagcttgggcttttcaaaattgaacttcttaagtacttaactactcaaattcttttaactacttaactactcaaattcttttaacccaatatttatatgaatacatgaaataatcaagaaatgaaatcaaacaagtatgttaaacaaaagccatttaagtttaacaataaatatttatttttatgtgcagcacataaatccagggaattactaatgttggtatcttttgagaacattttttcctttgtgactttggtttatgcaaatagctacatcttatgagctcataccctgaagttacaacttgatgcctgaggattgattcttgtattccctttaatcttcctccagtctgacctggtacttatatagtttaatccttgcattaata

SEQ ID NO: 555041 - DNA, 628 bp, Homo sapiens
accaagattaaaagaggccccttttccctccaccttcatcacagccatgctgttttttcatttgtttgtttttgggttttttccccaacttgcccagagaacaggcttgccaaaccatgtggtcatgtccacctggaggatgcagctttctccactgtgtacaagggcgttacgtgggctagctgtcgccccagatgtttttttaaattgttcacatcatctcacataatattttcacagcttgggcttttcaaaattgaacttcttaagtacttaactactcaaattcttttaactacttaactactcaaattcttttaacccaatatttatatgaatacmtgaaataatcaagaaatgaaatcaaacaagtatgttaaacaaaagccatttaagtttaacaataaatatttatttttatgtgcagcacataaatccagggaattactaatgttggtatcttttgagaacattttttcctttgtgactttggtttatgcaaatagctacatcttatgagctcataccctgaagttacaacttgatgcctgaggattgattcttgtattccctttaatcttcctccagtctgacctggtacttatatagtttaatccttgcattaata

SEQ ID NO: 555042 - DNA, 598 bp, Homo sapiens
tttttctgaagctatctgtactggtaataaaaatattcctggtttccaattatattctatttgcaaaactcctaaaacatgcttttaaacaatagttcagctacatgaactcagcatattgaataaggagggcagacctggcattgactaaagattttgcctgcataccaccaagcatctgtttccacatgttcaaaggtttgctagtcatggagaaataaaaacatcagcaacagcacaacacaatttactagtacattacaatatgtaaagtgctatcctctgtatattctctctcattccagcctcacaaaaattctatgaagtaggtacattacctttttttwaaaaaaaaaaaaaagagagagagaaagaaggcaactggggcttagaaaaaataaagtaacttgcccgaggggtaaagtcaaaatttgaaacaaaatgaaacacaagagcatatccattgttacttatctcaaaggacaggaatgtcatgctaaaactacagagagaataaaggaaaatatgggatgagaaactaaatgaatggcaggaagtggggaaaagaggtggcagacactctagtagtagggagagc

SEQ ID NO: 555043 - DNA, 2304 bp, Homo sapiens
atgactgaatgatttaaaaaacgtttacaatgattctatcttctttttgatgttaagaagcaaccagcttgttttttctgacattttccacatcccaggtactagatgtgcttaaaagattaaatagtggtcatttcagaggggaaaaccttccatttcaataatgcacatctgtacactgttacaatatagaatggtggcataaattgatacaatttccatttcacaaaccattaactcagttgggsctgctccctagaaagagaggtttctgtgtagtatgttagatccctctagtagagtgtacccctgagtttagcaccgtggtgttctgcagtttgacacagagtgcctaccccagacccttcacaatcagaatggggtgaaaaccatgcctctgtggcagggatcagacatgtaaaggatgccccaactgtctcattctcttgctttgtcatggagttcctctaagataccttctgatccactattttagttatacagtgctcccatgtcagggatcccaggaactgatgcatagaaatgttccacctggaagattcttaggggttgggggattagtaagactaggatcaatgattctaggtaaaatgttcaagcacagccttgatcaatagaaacaaaggtcaaaaacattaggaacaatgttacatagaggagacgcaggaccaagaagaaatgaaaagagaagatacaacaaaagagaggaggaaaagtctaaagtaaaattaaaataactgggatttgaagcagggaataaatgttgcagaagaagaagatagtttcatggtgtgaggacccagactacttcttggggaagaaacctgaggaaatatccccactgacatgaactccccaatttgcaaacgtgtcagtcacaacatatcagaaggaagttcaataaaaagaaaatacaagcattattttttaagctacaccatgtaaacttagtatataagccctgcaatgtattatacaacttcaatatccccataaggaatactcctcaagttaggagatagaagttgaagtggggtttgagcctcacacccttctattcatatcctcgaacacaaaccttttctcctagaattctcaattatggaatacatccataaggaatgctaagtggcagccaggtggaaaatgctgcattgctttatgggcaagtctcccacattctcccaggaggcttccctggtaatcagcctaggggtagacaccagagtgaggcctcctgctccttctctggcccactgagaataccacctgactgcccacacagatggaaaggtggcaatgaggaaggcagaagttgggcctcatcaggtgtgtccaccatatgggcacaggaagcacaagagagggcaggccctcctaccacccaactgcaaagaagcaaggaagtggggggaaggggatgggatacaatgactgactagcctgttgaggtgtagtgatcctgccccagagtgaggaaaggacacagagattctccttccacaggtaggggtgtcttccagtcctgggtgaagaaaacatttatgcatagcaccctgctcatagcaggggttccacagttccagcagtaatgtttgagataaggactgctctgtcgttgaggcttatccccctctttgtgtctacatgttggagttacccagaaataagaacatctgggttcttaaaaagtagcatcccaacacaccaactttgatgcccactccctccttcgatgctcaactttgccctcagctataggagatccgagaacagtgactattccaagactaaaacctgactccctccttggtacattctaattctcctcaacagcaccactgagtaacaaggacgctgcctaaggtaagtaagggtcctcaattccccccaagtttactagcacatgcataaaatattattaacaccatgaatggaagaggatgacgggataaaagaaattaggcttaataaagtgaatgtctataaaggaagaccagatcctgaaatgaaaaggcaaaacttatttgtgagctttggttaaatttatcatgaaaattacacttattaatgttttattgttattaacagcgtccgaacaatcctcatcttttgaagatgccaggagcaattcggaatactatctgattgaatgtgaacctgcctggttaatttattacctgatttgatgaaccaaggaaagccatgcgtttaaacaaatatttacatttaatatgggaacataaaagagctttaaatattatagactttgtacctgttata

SEQ ID NO: 555044 - DNA, 2304 bp, Homo sapiens
atgactgaatgatttaaaaaacgtttacaatgattctatcttctttttgatgttaagaagcaaccagcttgttttttctgacattttccacatcccaggtactagatgtgcttaaaagattaaatagtggtcatttcagaggggaaaaccttccatttcaataatgcacatctgtacactgttacaatatagaatggtggcataaattgatacaatttccatttcacaaaccattaactcagttgggcctgctccctagaaagagaggtttctgtgtagtatgttagatccctctagtasagtgtacccctgagtttagcaccgtggtgttctgcagtttgacacagagtgcctaccccagacccttcacaatcagaatggggtgaaaaccatgcctctgtggcagggatcagacatgtaaaggatgccccaactgtctcattctcttgctttgtcatggagttcctctaagataccttctgatccactattttagttatacagtgctcccatgtcagggatcccaggaactgatgcatagaaatgttccacctggaagattcttaggggttgggggattagtaagactaggatcaatgattctaggtaaaatgttcaagcacagccttgatcaatagaaacaaaggtcaaaaacattaggaacaatgttacatagaggagacgcaggaccaagaagaaatgaaaagagaagatacaacaaaagagaggaggaaaagtctaaagtaaaattaaaataactgggatttgaagcagggaataaatgttgcagaagaagaagatagtttcatggtgtgaggacccagactacttcttggggaagaaacctgaggaaatatccccactgacatgaactccccaatttgcaaacgtgtcagtcacaacatatcagaaggaagttcaataaaaagaaaatacaagcattattttttaagctacaccatgtaaacttagtatataagccctgcaatgtattatacaacttcaatatccccataaggaatactcctcaagttaggagatagaagttgaagtggggtttgagcctcacacccttctattcatatcctcgaacacaaaccttttctcctagaattctcaattatggaatacatccataaggaatgctaagtggcagccaggtggaaaatgctgcattgctttatgggcaagtctcccacattctcccaggaggcttccctggtaatcagcctaggggtagacaccagagtgaggcctcctgctccttctctggcccactgagaataccacctgactgcccacacagatggaaaggtggcaatgaggaaggcagaagttgggcctcatcaggtgtgtccaccatatgggcacaggaagcacaagagagggcaggccctcctaccacccaactgcaaagaagcaaggaagtggggggaaggggatgggatacaatgactgactagcctgttgaggtgtagtgatcctgccccagagtgaggaaaggacacagagattctccttccacaggtaggggtgtcttccagtcctgggtgaagaaaacatttatgcatagcaccctgctcatagcaggggttccacagttccagcagtaatgtttgagataaggactgctctgtcgttgaggcttatccccctctttgtgtctacatgttggagttacccagaaataagaacatctgggttcttaaaaagtagcatcccaacacaccaactttgatgcccactccctccttcgatgctcaactttgccctcagctataggagatccgagaacagtgactattccaagactaaaacctgactccctccttggtacattctaattctcctcaacagcaccactgagtaacaaggacgctgcctaaggtaagtaagggtcctcaattccccccaagtttactagcacatgcataaaatattattaacaccatgaatggaagaggatgacgggataaaagaaattaggcttaataaagtgaatgtctataaaggaagaccagatcctgaaatgaaaaggcaaaacttatttgtgagctttggttaaatttatcatgaaaattacacttattaatgttttattgttattaacagcgtccgaacaatcctcatcttttgaagatgccaggagcaattcggaatactatctgattgaatgtgaacctgcctggttaatttattacctgatttgatgaaccaaggaaagccatgcgtttaaacaaatatttacatttaatatgggaacataaaagagctttaaatattatagactttgtacctgttata

SEQ ID NO: 555045 - DNA, 1380 bp, Homo sapiens
accaaaactttgggtaaagtggtctttggtgggggtttggtttttttaaaaaagagcttttttgcctttttttttcttcagtttcaaatgagtttctaatgttcacattttagccagaattggttgaactctacaagaaaaacaaaatctccaagtaactttgaacaataagctttatctcaatgccagtagcctaataacagcagattcaaaacaggcagaaagaaaagagagaaacagagaacttcagatgtggtaatcagatggcaagcatgaaaagtgaaagtagtgaagcgyttgcccagccatacaaggccagcatagagctgcagtaaaagcaaaggcatcaagctggaaaatgatgagaactatagcttttccatacctggcaaaggggatcaggtggattaatccaaagcacacaatggcaaagatcttgcaaggctacttccatttttattataccccagggactctaacctcatgtgcctagtctctaacctgaatatcagctttgcctaaacctaatagaggacaccaagatggacccaacttaccagaggggccaatgagtgttgtgcagactgaatttccttggcattaggtaacatcttaaggtccttttatagtgtccccagaagatgatgctagaaaggggtcttttcggccgggcgcggtggctcacgcctgtaatcccagcactttgggaggccgaggcgggcggatcacgaggtcaggagatcgagaccatcccggctaaaacggtgaaaccccgtctctactaaaaatacaaaaaattagccgggcgtagtggcgggcgcctgtagtcccagctacttgggaggctgaggcaggagaatggcgtgaacccgggaggcggagcttgcagtgagccgagatcccgccactgcactccagcctgggcgacagagcgagactccgtctcaaaaaaaaaaaaaaaaaaaagaaaggggtcttttcaagatccagaccccaagaaaaggttcttggatctcacccaggaaggaattcaaggtgagtctcagatttctgtgagaagagatagtttactgaaagccactctgtcacccagtaaagcatcctcaaaatgaaagcagaggaatgcactgtctttaagtttttcttatataggggtcttgcctatgtaaagattaaactaagctgtgcctatgtgcaggtgggctgacagcatgactaaatgtattattctactgatttaaagaaaactatccttgatatcttaatgtgtaagtccatcgaagcataactatatcttgaaagcatatattgttataggtgttgtaacatctggacttttctgttgtaggactttgtccttgcaggcattaccaagctgct

SEQ ID NO: 555046 - DNA, 1380 bp, Homo sapiens
accaaaactttgggtaaagtggtctttggtgggggtttggtttttttaaaaaagagcttttttgcctttttttttcttcagtttcaaatgagtttctaatgttcacattttagccagaattggttgaactctacaagaaaaacaaaatctccaagtaactttgaacaataagctttatctcaatgccagtagcctaataacagcagattcaaaacaggcagaaagaaaagagagaaacagagaacttcagatgtggtaatcagatggcaagcatgaaaagtgaaagtagtgaagcgcttgcccagccatacaaggccagcatagagctgcagtaaaagcaaaggcatcaagctggaaaatgatgagaactatagcttttccatacctgrcaaaggggatcaggtggattaatccaaagcacacaatggcaaagatcttgcaaggctacttccatttttattataccccagggactctaacctcatgtgcctagtctctaacctgaatatcagctttgcctaaacctaatagaggacaccaagatggacccaacttaccagaggggccaatgagtgttgtgcagactgaatttccttggcattaggtaacatcttaaggtccttttatagtgtccccagaagatgatgctagaaaggggtcttttcggccgggcgcggtggctcacgcctgtaatcccagcactttgggaggccgaggcgggcggatcacgaggtcaggagatcgagaccatcccggctaaaacggtgaaaccccgtctctactaaaaatacaaaaaattagccgggcgtagtggcgggcgcctgtagtcccagctacttgggaggctgaggcaggagaatggcgtgaacccgggaggcggagcttgcagtgagccgagatcccgccactgcactccagcctgggcgacagagcgagactccgtctcaaaaaaaaaaaaaaaaaaaagaaaggggtcttttcaagatccagaccccaagaaaaggttcttggatctcacccaggaaggaattcaaggtgagtctcagatttctgtgagaagagatagtttactgaaagccactctgtcacccagtaaagcatcctcaaaatgaaagcagaggaatgcactgtctttaagtttttcttatataggggtcttgcctatgtaaagattaaactaagctgtgcctatgtgcaggtgggctgacagcatgactaaatgtattattctactgatttaaagaaaactatccttgatatcttaatgtgtaagtccatcgaagcataactatatcttgaaagcatatattgttataggtgttgtaacatctggacttttctgttgtaggactttgtccttgcaggcattaccaagctgct

SEQ ID NO: 555047 - DNA, 1380 bp, Homo sapiens
accaaaactttgggtaaagtggtctttggtgggggtttggtttttttaaaaaagagcttttttgcctttttttttcttcagtttcaaatgagtttctaatgttcacattttagccagaattggttgaactctacaagaaaaacaaaatctccaagtaactttgaacaataagctttatctcaatgccagtagcctaataacagcagattcaaaacaggcagaaagaaaagagagaaacagagaacttcagatgtggtaatcagatggcaagcatgaaaagtgaaagtagtgaagcgcttgcccagccatacaaggccagcatagagctgcagtaaaagcaaaggcatcaagctggaaaatgatgagaactatagcttttccatacctggcaaaggggatcaggtggattaatccaaagcacacaatggcaaagatcttgcaaggctacttccatttttattataccccagggactctaacctcatgkgcctagtctctaacctgaatatcagctttgcctaaacctaatagaggacaccaagatggacccaacttaccagaggggccaatgagtgttgtgcagactgaatttccttggcattaggtaacatcttaaggtccttttatagtgtccccagaagatgatgctagaaaggggtcttttcggccgggcgcggtggctcacgcctgtaatcccagcactttgggaggccgaggcgggcggatcacgaggtcaggagatcgagaccatcccggctaaaacggtgaaaccccgtctctactaaaaatacaaaaaattagccgggcgtagtggcgggcgcctgtagtcccagctacttgggaggctgaggcaggagaatggcgtgaacccgggaggcggagcttgcagtgagccgagatcccgccactgcactccagcctgggcgacagagcgagactccgtctcaaaaaaaaaaaaaaaaaaaagaaaggggtcttttcaagatccagaccccaagaaaaggttcttggatctcacccaggaaggaattcaaggtgagtctcagatttctgtgagaagagatagtttactgaaagccactctgtcacccagtaaagcatcctcaaaatgaaagcagaggaatgcactgtctttaagtttttcttatataggggtcttgcctatgtaaagattaaactaagctgtgcctatgtgcaggtgggctgacagcatgactaaatgtattattctactgatttaaagaaaactatccttgatatcttaatgtgtaagtccatcgaagcataactatatcttgaaagcatatattgttataggtgttgtaacatctggacttttctgttgtaggactttgtccttgcaggcattaccaagctgct

SEQ ID NO: 555048 - DNA, 521 bp, Homo sapiens
aaagctcatctctactaaaaatacaaaaattagccgggcctggtggtgcgtgcctgtagtcccagctactcgggaggctgaggcaggagagttccttgaacccaggaggcggaggttgcattgagctgagatcgcgccactgcactccagcctgggcgacagagcaagactccgtctcaaaaaaaaaataataataataatacaaaattagccaggcgtagtggtgcatgcctataatcccagctactcgggaggctgaggcaggaaaatcgcttgaactcggaaggcggaggttgcggtgaacggagattgtgccactgcagtccagcctaggcaacaagagcaaaaactccgtctaaaaaaaaaaaaattgttccctgcactccagcctgagtgacraaatgacaccctgtcactttttaaaaaattgttgctgttattttttaaatttgctgttattcaacaaactatattttgtgaaaagtcttgttgtttccctaatttttctgtcttgtaaattg

SEQ ID NO: 555049 - DNA, 382 bp, Homo sapiens
gcccttgtttcccttacccccatccatcccttttcctggcaccaagcttcagattgcagggtcacctcagccactggacagtcacagggagccaaggacaaaaggaccagtgacatcacttgggaatgagaccaggaagttcaagcctggctgacggggccagggaggggagagctaaccaggagatgacaggttcaccaacctgtcaacaagagtgtatctagacccagcaatgctaggctgtggctgagcaagtcacatggactgttaaccaaggggtctatcggggcagcagcagcaagggacctcccctgtaatgcaagacttctgtcacctcaagcttcttctccagggaatcttccatcygtactggggagggggg

SEQ ID NO: 555050 - DNA, 1188 bp, Homo sapiens
tcaaagaggggaagcaatgtagttaatgatgtatgtgaccaataaattcactgatgtttggtgactaggcaaacatctctgagacaatatgagaaccttacttgatagttaaacacatttttttaaattttttttctttttttgagacagagtcttgctctattgtctaggttggagttcagtggtgtgattttggctcactgtaacctctgcctctcgggttcaagcaattctcatacctcagcctccctagtagctgagattacaagcgtgcaccatcacacctggctaatttttgtattttcttttttagtagagacaggrtttcaccatgttggccaggctggtctcaaactcctggcctcaagtgatccacccacctcagcctcccagagtgcttggattacaggagtgagtcaccgtgcccagctggtaaatgtattccttatttcactattgaaaatttttaccaaaaaatgtaaaaagaacatctttgtaacatcagtgtctaagaatggtgtttggcataagtgtgggttgggagaaagacttaatatgtactgattaataagagatgataatgtattttgtaaccatttataactaagttcaaatggactactctgcttatgtggtacaatgttattcagtggattctttgtgaagaaactgatcaattatcaagaaaaactataaaataacagggccgatcatatctaatagcttaataaaagtgccgataaccttagctccaaacaactatcaggttaattcttatatcctgaaggcattttttcaaccaactaaaacatactctgaaatacaacattaaaaaataaatgttggccaggtgcgatgggtttatgtctgtaatcccagcactttgagaggccaaggtgggcagacagcttgaatccaggagttcaagaccagcctgggcaacatagcaagaccccaccccgtctctacaaaaaaacacaaaaaattagctgggcatggtggcatatgcctgtagttccagctacctgcaagtctgaggtggaaggatcatctgagcctgggaagtcaagactgcagtgaaccatggtcatgccactgcactccaacctgggtgacagtgacaacctgtctcaaaaaaaaaaaaaaaagttgatcaaataatttaggtccagataatattaagtacag

SEQ ID NO: 555051 - DNA, 1188 bp, Homo sapiens
tcaaagaggggaagcaatgtagttaatgatgtatgtgaccaataaattcactgatgtttggtgactaggcaaacatctctgagacaatatgagaaccttacttgatagttaaacacatttttttaaattttttttctttttttgagacagagtcttgctctattgtctaggttggagttcagtggtgtgattttggctcactgtaacctctgcctctcgggttcaagcaattctcatacctcagcctccctagtagctgagattacaagcgtgcaccatcacacctggctaatttttgtattttcttttttagtagagacagggtttcaccatgttggccaggctggtctcaaactcctggcctcaagtgatccacccacctcagcctcccagagtgcttggattacaggagtgagtcaccgtgcccagctggtaaatgtattccttatttcactattgaaaatttttaccaaaaaatgtaaaaagaacatctttgtaacatcagtgtctaagaatggtgtttggcataagtgtgggttgggagaaagacttaatatgtactgattaataagagatgataatgtattttgtaaccatttataactaagttcaaatggactactctgcttatgtggtacaatgttattcagtggattctttgtgaagaaactgatcaattatcaagaaaaactataaaataacagggccgatcatatctaatagcttaataaaagtgccgataaccttagctccaaacaactatcaggttaattcttatatcctgaaggcattttttcaaccaactaaaacatactctgaaatacaacattaaaaaataaatgttggccaggtgygatgggtttatgtctgtaatcccagcactttgagaggccaaggtgggcagacagcttgaatccaggagttcaagaccagcctgggcaacatagcaagaccccaccccgtctctacaaaaaaacacaaaaaattagctgggcatggtggcatatgcctgtagttccagctacctgcaagtctgaggtggaaggatcatctgagcctgggaagtcaagactgcagtgaaccatggtcatgccactgcactccaacctgggtgacagtgacaacctgtctcaaaaaaaaaaaaaaaagttgatcaaataatttaggtccagataatattaagtacag

SEQ ID NO: 555052 - DNA, 1353 bp, Homo sapiens
tcgggctgggacgccagcaagcttgttctgtgcaaactccagtcagccatcttagtttccaccgattctagccaggtttttcttgatgtcagcgtcagagtctcagcaagttgtttcttttcttacctgctgtcctgcaaacaagaatttttgttagtcgttggtttctttaactctttgggacacaattccaatgtgccctacttggaggaacagttagtagcagatcctctcttcttcctcctctatgagaaaaagtaactttttgttaagtccacttcctttcaatgtgcttcgaatttcagtgtctcctgggatacgttgtcctaactctgtcttttcattttagctacactcactctttttctttctacttccttttactatccaccctcttcttccttagctccagaatgattttcaaaccaatggtggtactaagtcgctctctctattgtcactaatgatgtcataatcatctcattcacattcaaagttctgttttagttctcatcctccttgatgtccctgtcattgttgttcgccatttttaaaaaattatttaatatcatcattgtttatttttaaaagaacatctgcaattgcactataatgccactacacagatatctttttgaccttgtctagtctcttgacatacttactttttttttttacaaagttggaaacaatgtacatattgtttcttgctttgttctttcatgtaatattatttctagacacatcatacaagggtaaagctgaaggaagcctacagatctcatatgccctctatattttacaggtgagaaaactaagatttgttggaaatgctcagtggaaagcaccagtggccaggaccagcaattcccaaatcccagtcagccctctaccttggctatagaacccacaggagggtttccccagttkggagagagcacttggggtgtttatttaaaatgtaatttcctgaacctaccacatcactgaatcaggatcttcaataatggggcatacacatttgtagtttttaaaaagatacctaggtgactcttcagcatattacgatttgaggccaggtgcaatgattcatgactgtaatcccaatgctttggaagggcaaggtgggaggatttcttgaacccaggagtttgaggttacagtgaggtgttacagtgccactgcactctaccctaggcaacagagggagaacttgtctcaaaaaaataaaaatacacatatacacatgtacccctgaacctaaaataaaagttaaaataaataaataaaaataaataaaattcaagaaccaccgtttgaagagtttaagtcacagaagacacagaggcaaat

SEQ ID NO: 555053 - DNA, 550 bp, Homo sapiens
ggcaacccaagtgggatgtagggagaagtgcatctgggtaaggatttaaggagtgactgtatgcacgtgagtctccaggccaaactcccattttacacctttactagttgcctttktgtgtttgtgtttaccatgaaaggcaagaggcaaagactactttgctgtaactcactggaattcatgaacagttttggctaaactgtgtgcagcaggatgaactttttattatcataatagcttgcaggagaattcttcttaggaatttttgcttgggacaataataagccaaatgaatgaaattgagagaatcaaggtatagttagagtactctgtcatagaaataaataggagtttgtaggtgatggagaaggaggaaagaaaggggaaaggagagggtagtcaaggagatgatgtgaagctcgggcattatatggggtgaaatagctagcgaaaagtccttggtggagtagccaaaggacttgtaggaacaaggatgtcccatgttcaatttgttaagttggcatagtggggctgtaaggccctcttcttc

SEQ ID NO: 555054 - DNA, 1153 bp, Homo sapiens
ttttgtgtatttttagtagagacggggtttcaccrtgttagccaggatggtcttgatctcctgaccttgtgatccgcccgcctcagcctcccaaagtcctgggattacaggcatgagccaccgcgcctggccacacctctgtttctaataactgcccgatccacacctctgcactgttgtgagaatcaaataaactatgtgaaatactttgtatgcttatttatctcttcacacatacacacgtatgtcttgtttttgacataccgtcttggttgctgccatattgaatcagcccccaaatcctgctgattgtggtcttgtttgtatccctcgcatacattcttgcttttccatattcattgctatcactgccctccaaatatattccttcaagttgaccttcactgtaggtcattcaagattacagtattaggttcttagccttctggcagccatcagtggttagaggggtgaaggccacagtctcctccccaccacctctcagccaggtggtctgctgtaatgagatcaagactcagaccaaactctgacacatagagagacctatcagccagcagcaacgaaaacatcagaccacctggtttgcaagctcagcaaacataggaccacctggtttatcctagctctctgtcctttcattccaagcagatgtgacaaggagctagcagcagggttcagttaattggtcaaatgacacgattctccttaagcaaatgaacacagaatctagcagaattctaagacttgggggacactccagagggtgtgagctgctcatgccctaatcacacaaaggcaaggacccctgtgcagccttcctaaccgatccaacaaacaccactcgtttcaccaataaaaaataaaatctaacacccagtatgctaataaacaaaagttctggtgtccattggaaataaatataactgaagtgctagtatcacagtctggaacataacagaactacccctaatacttctgaaatattaggaaacttcaaatactaaataactgtgcttagagcattaagcaaactgaaatacacatcatcaacatatgttttaacagagctgctttaaagtaaattatagataatataacaatattgtcttagtccattggggctactataata

SEQ ID NO: 555055 - DNA, 1153 bp, Homo sapiens
ttttgtgtatttttagtagagacggggtttcaccgtgttagccaggatggtcttgatctcctgaccttgtgatccgcccgcctcagcctcccaaagtcctgggattacaggcrtgagccaccgcgcctggccacacctctgtttctaataactgcccgatccacacctctgcactgttgtgagaatcaaataaactatgtgaaatactttgtatgcttatttatctcttcacacatacacacgtatgtcttgtttttgacataccgtcttggttgctgccatattgaatcagcccccaaatcctgctgattgtggtcttgtttgtatccctcgcatacattcttgcttttccatattcattgctatcactgccctccaaatatattccttcaagttgaccttcactgtaggtcattcaagattacagtattaggttcttagccttctggcagccatcagtggttagaggggtgaaggccacagtctcctccccaccacctctcagccaggtggtctgctgtaatgagatcaagactcagaccaaactctgacacatagagagacctatcagccagcagcaacgaaaacatcagaccacctggtttgcaagctcagcaaacataggaccacctggtttatcctagctctctgtcctttcattccaagcagatgtgacaaggagctagcagcagggttcagttaattggtcaaatgacacgattctccttaagcaaatgaacacagaatctagcagaattctaagacttgggggacactccagagggtgtgagctgctcatgccctaatcacacaaaggcaaggacccctgtgcagccttcctaaccgatccaacaaacaccactcgtttcaccaataaaaaataaaatctaacacccagtatgctaataaacaaaagttctggtgtccattggaaataaatataactgaagtgctagtatcacagtctggaacataacagaactacccctaatacttctgaaatattaggaaacttcaaatactaaataactgtgcttagagcattaagcaaactgaaatacacatcatcaacatatgttttaacagagctgctttaaagtaaattatagataatataacaatattgtcttagtccattggggctactataata

SEQ ID NO: 555056 - DNA, 1153 bp, Homo sapiens
ttttgtgtatttttagtagagacggggtttcaccgtgttagccaggatggtcttgatctcctgaccttgtgatccgcccgcctcagcctcccaaagtcctgggattacaggcatgagccaccgcgcctggccacacctctgtttctaataactgcccgatccacacctctgcrctgttgtgagaatcaaataaactatgtgaaatactttgtatgcttatttatctcttcacacatacacacgtatgtcttgtttttgacataccgtcttggttgctgccatattgaatcagcccccaaatcctgctgattgtggtcttgtttgtatccctcgcatacattcttgcttttccatattcattgctatcactgccctccaaatatattccttcaagttgaccttcactgtaggtcattcaagattacagtattaggttcttagccttctggcagccatcagtggttagaggggtgaaggccacagtctcctccccaccacctctcagccaggtggtctgctgtaatgagatcaagactcagaccaaactctgacacatagagagacctatcagccagcagcaacgaaaacatcagaccacctggtttgcaagctcagcaaacataggaccacctggtttatcctagctctctgtcctttcattccaagcagatgtgacaaggagctagcagcagggttcagttaattggtcaaatgacacgattctccttaagcaaatgaacacagaatctagcagaattctaagacttgggggacactccagagggtgtgagctgctcatgccctaatcacacaaaggcaaggacccctgtgcagccttcctaaccgatccaacaaacaccactcgtttcaccaataaaaaataaaatctaacacccagtatgctaataaacaaaagttctggtgtccattggaaataaatataactgaagtgctagtatcacagtctggaacataacagaactacccctaatacttctgaaatattaggaaacttcaaatactaaataactgtgcttagagcattaagcaaactgaaatacacatcatcaacatatgttttaacagagctgctttaaagtaaattatagataatataacaatattgtcttagtccattggggctactataata

SEQ ID NO: 555057 - DNA, 1052 bp, Homo sapiens
gctagaattatcataggatccagaaactccacctttgggtacatccctaaaataattgaaagcagggtctcaaagatacacttatacacccatattcatggcaacgttgttcatgatatctaaaatgtggaagcaacgaaagtatccatggactgaaaaatggataagtaaaatattgtatatagatataataaaatataatttagcatagaaaggagggaagttctgacatatgctaaaatatagaggaactttgaggacattatgccaggtaaaataagccattcacacacacaaaaatacaatatgatcacacttatatgaggtacctagattatcagattcacagagacagaaagtagaatggtgattgccaggtgctagggcaggagaaaatgaagtgtcatttaatggttataaagtttcagatttacaagatagaaagaattctggaggtagatgggtgattgttgtgcaaaattatgaatgtattttaatactatttggctgtacacttaaaattgttaagcttgtaattttgttatggcattttactacgataaaaattgcaaaaatataatgatataattgaaagtgagaaggtatgagggcaacattaatcaacttacatagagaaaatttaactactgagcaacattgatgaaagaagaaattaggattaaatatattatttattgttccacaattaatcaataaaaagtatgaacatcatgacatcatcaaatattaggtagaatagaccagatatgtggctatgtaagtgagctgcatctcatttttcatatcaggtagtcaatggcattgtttatgttctatatttcgggaaacacagaggtataatagtcattattgagaattccaaatgttactgccaaacaaaacaaaacaaaaataattgaaggaaattacctctagtatgtgggactaaaggtggggagagttgtactgggaaatatgatttttattgtattcttttctgtactatggactgtctcatgaatgtattactttgacaaaayatttaaaattat

SEQ ID NO: 555058 - DNA, 632 bp, Homo sapiens
aaactattccattcataacatcaacagaaaaaataaaatactttggaataaatttaacaaaagaaatgcaaatcttgtatactaaaaactaaaacattactgagagaaattaaagacctaaattccatgttcatggattgaaagactcaatgttggtaagatggccatttgtttttaaatgcacatggaattttcctacaatttatcaaccaaattaaygcaaagcgactgctatcaaaatcctagctgatgttttttggtaaaaattaataagctgatcaaatatatatatggagggaaagaacctaaatagccaaaaagccttgaaaagaataacaaagttgaaggatttatgtgactccatttcaaaacttactagaatttcacagtaatcaagacactgtggcattggtccaaggataagtatatagatcaatggagcagaattaagagcactgaaattaactccttatacttatggtcattgattttttttttttttttactacatcctatgattcattcatcttttattctcaggacccagagtcaatgtctggcacctgggagtcagtgtctggcacctggtgggtgctcaatgaaaggtttattcctttggataaatgcccagt

SEQ ID NO: 555059 - DNA, 1255 bp, Homo sapiens
gcaacctttattcacaaaatacccttccctctcccccaccactatccctacttccattccaaaggaacacattacattttggtttctcagaggaagctaacgctggaaaaccaagttagaatataaactttttagaattctcaaatttctacaccaggaaattccagcacagcgacagcagtccccagcccccagtttatgcatttcgttttctagccccagctccttcttacctcatgagagccctgagtgcatgcctacaatactacaacttgtacacctaaactccacctactttttcttcaaatagttgccctttggtcacttttgagcctagggttattcataaagctggcactgtcaacccttagaggtatgaactgtggagaaaggttcacatatctactggagtgaactgcggccctctggtcaaggaattcctgattatgtctgttggggtgaatgagagtaaagcctctctgggatcttgtagactttccatgaagtgatcacttaaatgctaactatatttatttagttttaaggcacagtaaaaataaaataaataggtattctctttctgttactatataacagaaataaataaaataaatagatattcatttttggttactgtaacaggatactacagactgggtaatttataaagaaaagaagtttcttaggctcatggttctggaggctggcaagtccaagagcatggtaccagcatctgacaaaggccatcccttggtgaaagggcagggcagaagcaggatcaagtacacaatacagagagagatactataggccagacttgctttataaccaccttctctctaaataactaaccactgtcatgataatattaatccatttatgaggactctgcccgaatgacccaatcacctgttattaggccygacctcccaacactgttgcattgggaattaaatttccaacacatgaacttttgggggacacattcaaacaataagactgtgactggtagagttcttggcttttagtttctcatattaggttttgtggtggtagttgtggctttcatcccagattaatagagcaatctttcctttgtcttaatgataccacatttatttacattagatgactgttattttctttcttttttattttccaagatggagtcttgctctgttgcccaggctggagtgcagtggcatgatctcagctcactggaatctccacctcctgggttcaagcgattctcctg

SEQ ID NO: 555060 - DNA, 741 bp, Homo sapiens
tgcataaaatgaaacttggtttataagctttctctcatcactccaggcagtttccctgtcctgcctctcccatacaactttgtacctaactcrgataatagccattttcacacaattctacaattattgatcaaagtatttcacacattgcactgatcctgaaggcaaaaatctcattctattgatatttaaattatttagccccctagggaaccatggttcagtggttaaggtctaggaaatcagagttgcagcctaggtctatgactttttgacgtgggcaattactcaaactttcttagattctttatctgtaaatggggaagatagaaaagctaatcatgactgcagggcttgctaaaacacagatggctggaccctaccaggatttctgatttagtacatctgggagaggtggggttcaagagctacatttctaatatgttccctggtgatgcggatgctgctggtcaaggggcgcagggtgagaaatacaacaccttgtgaatcatcacaaccaagtggttcatacattcattcaacatgtatttactaaggacccttatgtgtcagctctgggtaggcattagggatacaggagtgaataagtaaaatttcatttcctcagagaccttaaaaatctcttggaaacagatgtaaaacaataaacaacaaaaccaacaaaaataacttaggattaatgtgagggagataagacagtttcttagggagccaatgatt

SEQ ID NO: 555061 - DNA, 741 bp, Homo sapiens
tgcataaaatgaaacttggtttataagctttctctcatcactccaggcagtttccctgtcctgcctctcccatacaactttgtacctaactcagataatagccattttcacacaattctacaattattgatcaaagtatttcacacattgcactgatcctgaaggcaaaaatctcattctattgatatttaaattatttagccccctagggaaccatggttcagtggttaaggtctaggaaatcagagttgcagcctaggtctatgactttttgacgtgggcaattactcaaactttcttagattctttatctgtaaatggggaagatagaaaagctaatcatgactgcagggcttgctaaaacacagatggctggaccctaccaggatttctgatttagyacatctgggagaggtggggttcaagagctacatttctaatatgttccctggtgatgcggatgctgctggtcaaggggcgcagggtgagaaatacaacaccttgtgaatcatcacaaccaagtggttcatacattcattcaacatgtatttactaaggacccttatgtgtcagctctgggtaggcattagggatacaggagtgaataagtaaaatttcatttcctcagagaccttaaaaatctcttggaaacagatgtaaaacaataaacaacaaaaccaacaaaaataacttaggattaatgtgagggagataagacagtttcttagggagccaatgatt

SEQ ID NO: 555062 - DNA, 512 bp, Homo sapiens
atacatatatgtatgtatatattcaggaattttagcagttgctcaattcatacttctccagttcctaggcttaattatattaaaataataaaaccttcctcaagaaattactcagagaaattctatacccaacctgatgaaaaatctaatttaaaaattcaataacagggttattatggttacaaagaactggtggtaagcatttaaagcaattaaataaaacaagaatatacatttgatatyaatattgtcacaaaaaataatacagatgacaacactgaaatatgcatctaatataaataatatgttagtaatactcattctacctaaaatcacctattactagtaataaaaattaggatgttggcaggggaatattgacaaaaacagaacatgttaactttgtcaatttttctagagaaaagaatcaacattcttcaaattattctgactataactcataataaaaaaccctttttaattttgtattactatccagcacaaacatcttt

SEQ ID NO: 555063 - DNA, 512 bp, Homo sapiens
atacatatatgtatgtatatattcaggaattttagcagttgctcaattcatacttctccagttcctaggcttaattatattaaaataataaaaccttcctcaagaaattactcagagaaattctatacccaacctgatgaaaaatctaatttaaaaattcaataacagggttattatggttacaaagaactggtggtaagcatttaaagcaattaaataaaacaagaatatacatttgatattaatattgtcacaaaaaataatacagatgacaacactgaaatatgcatctaatataaataatatgttagtaatactcattctacctaaaatcacctattactagtaataaaaattaggatgttggcaggggaatattgacaaaaacagaacatgttaactttgtcaatttttmtagagaaaagaatcaacattcttcaaattattctgactataactcataataaaaaaccctttttaattttgtattactatccagcacaaacatcttt

SEQ ID NO: 555064 - DNA, 553 bp, Homo sapiens
tctgaaaaaaatctaagcttaaagttaaacatattttgttgcatagttttcttaaatcttatcaattgtttggttaatttaatctgtcaattaccaatataatttttttcattgtcttcttaaccttccttgtttctgatgagaagttaatagttatttgaatcatcatttyctctctgtatgcaatgtgttgtatttctctgactgctttcaaaatattggtttgtagcaatttttgtgtgatatgttgaggtatgatcatcttcatgtttagcctctttgggtggctgaatttcctgattctttaaatttctgaattgcttcaaatttgtaaacttcagttgttaattgtttgaaaatttttttttgccattctgtatcctcattgtctgagatttcaaataatcatattttaaaacatttaatattgtcctacaggtctccaatacttccgccactattctttttctctgggttcttcagattggatactttatattgattcatcttgatgttcttatgttattttcattgcttagttcaaaccacctca

SEQ ID NO: 555065 - DNA, 852 bp, Homo sapiens
aagagaaactatacagaaaaaaaaggaaaaaaatagtagagaagcacacttggaaataaaacacataataatgaaatcaaactcaacggttcagaacagtggaatcaacaacaatgtaaactgaaatgataaactaaaaaaagcatattaaagaatttactggccaggcacagtggctcacgcctgtaattccaacactttgggaggctgaggcaggcggatcaccggaggtcagaagttcaagaccagcctgaccaaacatggagaaaccctgtctctactaaaaatacaaaattagccgggtacagtggcgcatgcctgtaatcccagctacttgggaggttgaggcaggagaatctcttgaacccgggaggtggaggttgtggggagctgagwttgtgccattacactccagcctgggcatcaagagcaaaactccgtctcaaaaaaaaaaaaaaaagaatttactcagaatacagaatagaaaaacaaagaaattgaaattacaaaagaaaaggtataggaaaaatagatccagaaaatccaacatttagtataacagactagagtgtatagaagaagtaaagaaataatggaggaaaaaaaaaaatccctgagccaaaaacagctgatacttcaaactcccaccgaagatcagcaagaatattgaaagaaaacacatacctagacatatcctggtgaaattaaaaacagaaagaaaattttaaaggtttgagcatgaaaaataagctgtagggaagagaaccagactgacataaaacattcaactgtaacattaaatactaaaagggaacatagcagaggcagagagtctctatgaacctattctgg

SEQ ID NO: 555066 - DNA, 767 bp, Homo sapiens
attaaggtctcataagtagttgttttgcataatctagtgatacatggaggatggcattcctcctgtggacagcaggaggcactgtgggtgtatcgtttggggatgctaatagctccaagtcccccagtagagctcacgtgcaaagggtgtgactgatgtttcctttcaggtccagtctttttgagtacaatccactctccactcctgacacccacttggcccttctcctgcctttgagaaatgactaccctgaggccatcagctccagggctcagctatgagctcagacagacacgcttgggaatagagaacagatttggattcaatgctccttccttcttgagcttcaagaagaggataagataggagctggttgtgtccaggctccactgggcagcctcgatcagagctctcggaagtgcctcccaccacggcctgtgtctccttctacctcctgcccttcatattctccacaggttggagcatccagagaattcagggaaaccctttcactgctatttccccccagcactggtcctcagtggcattctttccagttctcctgtgcattcagcatcattcatgaaattatatgtttccaggtctctgtgctctgtctgtgctgacccagmccccgtctgcatctgcctggctgtgagcctcagccaaggtcacctacaccagtgaatagtatcaacagagaccaaggaggtccccctagtgtataatggaggttaagagtaatggcagcgacagcaaggggaaca

SEQ ID NO: 555067 - DNA, 544 bp, Homo sapiens
tggtaaattttcgttcattcctttatttttagctatttcaattgctgcattttcggtgtgtatcttgtgtgcagcacacagttgagtttttgctatacgagccaatccgaaaataatcttttttaataggcaaattaagccgatctagttttgatataactaccatgtttgatgtcaattctgtcatattttagattgtaattgctgaatgtattatatttactgygtctatcctcttgcgttttcttttggcttatgaattttgtgtcttttatttatttatttatttatttatttatttatttatttagagacggggtctcactctgtcgcccaggctgcagtgcactggtgtgatctcggctcactgcaacctccacctcccggattcaagcgattctcccgagtagctgggactacaggcacgtgccaccacacccaactacttttttatttttagtagagacggggtttcaccatgttggccaggctggtctcaaactcctgacctcaggtgatccacctgcctcagcctcccaaagtg

SEQ ID NO: 555068 - DNA, 1485 bp, Homo sapiens
cagccacagaactaatcatattttatatcttcttcgaaaccacacttatccccaccttggctatcatcacccgatgaggcaaccagccagaacgcctgaacgcaggcacatacttcctattctacaccctagtaggctcccttcccctactcatcgcactaatttacactcacaacaccctaggctcactaaacattctactactcactctcactgcccaagaactatcaaactcctgagccaayaacttaatatgactagcttacacaatagcttttatagtaaagatacctctttacggactccacttatgactccctaaagcccatgtcgaagcccccatcgctgggtcaatagtacttgccgcagtactcttaaaactaggcggctatggtataatacgcctcacactcattctcaaccccctgacaaaacacatagcctaccccttccttgtactatccctatgaggcataattataacaagctccatctgcctacgacaaacagacctaaaatcgctcattgcatactcttcaatcagccacatagccctcgtagtaacagccattctcatccaaaccccctgaagcttcaccggcgcagtcattctcataatcgcccacgggcttacatcctcattactattctgcctagcaaactcaaactacgaacgcactcacagtcgcatcataatcctctctcaaggacttcaaactctactcccactaatagctttttgatgacttctagcaagcctcgctaacctcgccttaccccccactattaacctactgggagaactctctgtgctagtaaccacgttctcctgatcaaatatcactctcctacttacaggactcaacatactagtcacagccctatactccctctacatatttaccacaacacaatggggctcactcacccaccacattaacaacataaaaccctcattcacacgagaaaacaccctcatgttcatacacctatcccccattctcctcctatccctcaaccccgacatcattaccgggttttcctcttgtaaatatagtttaaccaaaacatcagattgtgaatctgacaacagaggcttacgaccccttatttaccgagaaagctcacaagaactgctaactcatgcccccatgtctaacaacatggctttctcaacttttaaaggataacagctatccattggtcttaggccccaaaaattttggtgcaactccaaataaaagtaataaccatgcacactactataaccaccctaaccctgacttccctaattccccccatccttaccaccctcgttaaccctaacaaaaaaaactcatacccccattatgtaaaatccattgtcgcatccacctttattatcagtctcttccccacaacaatattcatgtgcctagaccaagaagttattatctcgaactgacactgagccacaacccaaacaacccagctctccctaagctt

SEQ ID NO: 555069 - DNA, 832 bp, Homo sapiens
tccctgcctagagctgcagctggaactgtcctgggaatcggccccaagaggaaaggaagctgcccctctgggcaggaggggcattgggagtggccccagcaagcagcttacctagcccgtgacctccgattgacactgaggtgagagggcagagagcaaggagaaaggtcaggtgagtcactcaagggggcggcccccactcccacacgccgccccaagcagcgagcccttgcacacaggcacaacccaagccccgtgccgagcgccgcagcggccaacagcgggcgggctcacctgtgacagtgcacttgctggcgtccccggtgggcacggcacgcacgcggtayggggagaaggggatctcgtcaccaccgtacttgatgaggatggtgtagcgacctgtcacgtctggcacgtaggccactgtatacgtgccgtcatggttgtcttggatgtgtgtcttcttcggcttgccttcgggatcctgtgtggcagaggcaggggaggcagttggcccaagcccgagtagccccgggcctgcctcaggcgctcccagagtgcccagcgctgctgctacagggacagtctctgggcctcaggcatcttaactgctatggcccaaaagggctgcctgcacctggcagagtccagaatggagactaaaacatcccacacttcccacatgacaacaggcgcggccagccagcttggcacccatcctcagccccagggcctggccagcactaggaggagctcaccggggtgatctcaagcttctatcctatacctgccccatgagaatattacaggtggggaaactgaggcacagaag

SEQ ID NO: 555070 - DNA, 543 bp, Homo sapiens
acgttcctggtgccccttttcgtgctctcccagcttgcgccactatggccctggccctttaaggctgagcgcgaggccccgcctcgcccggcgccccgcccctcccgctggatcccgcagccgcggctcttcccgacgcgttccgacttccccagctgtgcactctccatccagctgtgcgctctcgtcgggagtcccagccatgtccgacgagagagaggtagccgaggcagcgaccggggaagacgcctcttcgccgcctccgaaaaccgaggcagcgagcgacccccagcatcccgcggcctccgaaggggccgccgccgccgccgcctcgccgccactgctgcgctgcctagtgctcaccggctttggaggctacgacaaggtgaagctgcagagccggccggcagcgsccccggcccctgggcccggccagctgacgctgcgtctgcgggcctgcgggctcaacttcgcagacctcatggctaggcaggggctgtacgaccgtctcccgcctctgcctgtcactccgggcatggaggg

SEQ ID NO: 555071 - DNA, 1981 bp, Homo sapiens
  misc_feature 159, 737, 739, 1408, 1513, 1626: n = A,T,C or G
tgtcctagacctgccctgcccagtatggtagccactagtcacacgtggccacggagcacttgaaatgtgactagtgtgactgcggatctcaatttttatttcattttattttattttattttttcttttttgagacaggctctcactccaatgcccagnctggagtgctgtggcatgatcttggctcattgcaacctcaacctacaggtctaggtgattctcccacctcagcctcccaagtagctgcagctacaggcatgtgcgctacactcagctaattttttgggttttgtttgtttgtttgttttgtttttgtttttgtaaagacagggtttcgtcatgttgcccaggctgatctcaaactcctgggctcaagcgatccgcccacctcggcctcccaaagtgctgggattacaggcatgggccaccttgcctggcctttattttaattaattttaatttaaatagctacacatggctagtagctagcatgctgaacagaatagaattagaagaagctcccgttttccaaaggcacacaacaaggcccagaaagaatgacttctccaagcaggattagaagccaggtttttgttttgtttttgtttgagacagggttttgctctgtcgcccaggctggaatgcaatgcacaatctcggctcactgcaacttctgcctcccgagttcaagcaattcttatgcctcagcctctggagtagctgggattacaggcgtncnctgccactggctaatttttgcatttttaatagaggcggggtttcaccatgttggccaggctgttctgtaactcctggcctcgagtgatccactcacctcagcctcccaaagtgctgggattacaggcatgagcaccgcaccagaagccagttttttaattcactccaccctgcatataaccgcagtgatctccatggaaatgaaattgacctaaggagcatgaagaaggaggctgactgggaaatgtcaaatctgggctcccctctctacatcctttgtatctgactttctgggacacagggaggtacctaatggagctcagaaactttaggctgggatcctgctccttattacagtgaacaggagataggatttgagagcagatttttagaagttttttaaactgaaaacctagttcagctgtgtcactctaggtatgttgcttaacctctcagagtcttcatttcctcttccagaaagtgcctgcttcgtgaggttatcctgaggattaattgatacaaattctggaaagcactttgcccagaagctagaacctggtagacactcaacattacagctaatatgacaattaatatccaggtcaaagtaaattagatgtcatcaaagtcagccttgaaagcagacycactgccgactgctttcccttgnctggggatgtagtgagagaggcagcatgttatcagtgaataaactattccagtaataatgatcacaacaataaaggttaacattgtactttatgtatgttttacntgatttacaagcaatccctcatttcatcctcaccacaaccccatgagttggattctgtattggccccattttacagatgagtaaactgagactcagaaaggaaaagtcacttncccagaattgctcagctagccctggtgtcatctgcctctctccatatgtaataagcctctatctggttttagcatcaactggccaggtggcattgcattcttcccagcttgggaaagagaggtgacaaagactaagaaacatttgctgaacagttggactcaaagattctttctttggggtaggcaggcaatttaagtgcgtctgccacagggattgagtccctctgggccctgggatgcatggagcaagagatagggtaaggaataatggaggggattgaggtgttgttcactggggtgggcacttgtgagacagcagaattagtgttcagtctctgcctggattaattcattc

SEQ ID NO: 555072 - DNA, 605 bp, Homo sapiens
atatattatttcattttgtcctctgagcacactcaaatatagttcttattaccctcttcatcttccaacaaggaagcaaagacacaaagaaatacacttcccagcgtcaacaattcatgaaggatggagctaattctcacattcattacattgatttgttctaaagctatgttttctgtctccacatctatgttcttaccataacagtgtcagctggcacagagaggtataatgagtcattgtattttaaaatgttcttaatgtcagtctactgttttgataataaaatttaaaatgttaaatcggtacattcttgttagaacctttatctattctctttacaactcacagtatttgaaaagaaatacttgattttgatgcctttcttttcccagtttcatttctcagctgcttcagacagatgtgtttttatccgagcaggtgatgagtgtgaagtcaccgaaggtgaactcctgcaggtccccagattaatcatgctgtgttttgtcaactgtcacccaaagacagacacttatattgtttgctcagtgaaaaggaaattttatgcattttgattttktttgcttttcgaatgtgaatcattt

SEQ ID NO: 555073 - DNA, 1386 bp, Homo sapiens
catcaccaccacttgaaatttttgcagccagaagagtgtacttaaatacttgtgtattcagacttcactttaataaatttcaataaatagcttcccataggagaggtttcttctgttgaatctgtagaagttgacgacggtacaagcatcagctttctcaggcagcttttctaaacacctgcagggtggaaaagagatccttctctcaaaatactgaatattgctggcatgaccactcttgtcactggtgcctgctgttttccatcttatctgggttgcaggtttcttcacagtgatgggacaccgaagtgcaatgggatgaaagcatgcctgtggcatttttaccctagctgtggggaaatgaccactatcctgtgtccatgacactcttcctcctcaggactttcaaactaggcttcagaagccatcactgggggcagtcctggcatttataatggggatagggacaatttccaggaaaagtttctatatcaaggacatctcagttctgcagcagagaaatctttgaaattacctgcaaaccatctttttgcaagcacaaccaactttatttctgttttaattaattccaaaaatgctttatttccagaatgttaatatttagttagcagtaggctctaagtttcccaacccctcagccttttcagagggtataataataaatgtgtaaatgtgctaggggatccccgtgatttatggaagctttatattgaataattttgaagaggaaagaccttttggtaataatattcattttttgactcttctgtaatatgcaacctgagggtgggtgtgggggaacgtggagaaatgccattctcctactgagcacagactgtatacacctattttacagggaagtcacgggctcctaagcattcagtttaaaaatgagcagaattagatgggtacccttcattggcccttcatggctaggggagaaatgggagagggaacgcagctcattttggcttcagtccttacgctttcaagagacaaccctactccatacttcattattttttttaaagctttctataatggttggtgaaatttacatttcaactcttgcctacaacagttttctgccttattttctcttcccagcgctttgtgccgcctccttgacaacctgctcataggtattacaattggcctcagaaattgcagtgcttcccttttgttcagctggttggcttgataggttgtatctgcaaatttgagagcagcgtgttttattttttrcggcatctaaacaataatgtaaccacatcacggcattctgagtcacatcattgacctccaccagcagtttatccccctacaacacttgaatacattaatatcactgtctgtagcatttta

SEQ ID NO: 555074 - DNA, 657 bp, Homo sapiens
tgctgtcagccaagctgtgggcaggtgtgcctggatcccggctgctcccctctgtcaggctcagcagtcccaccccatgtgtgcattcagcagaaatgccctcgtatgttcttcaagagagatacacgaagatgctgggtcacagcagccaaaacctgtcgggtgtaacagataaaggaactacgtatatttaccccatggaagayggtgcagccacaagaatgaatgacctatggcaacgtgctttatgatgggtgaatcttacgaaatagcgttgccagatctagtaatacaacagcagaaagcccagttcagttagaatttcagataaacaaaaaactctttttagtgcatgtcccaaatgggcagcatttggagtacacttacaactatttctaatgacattttaaaagtacttatttgttgtttatctgaaattgaaatttaactgggtgtcctatattttatctggagattctacacaaatataacatcagcaaacaaatcctgccacaagagagtgtagactgagaattcccatttcctcagagaagcagagcaggtgcgtgcctcggcctatggagtcaggatggtgtcatgcgagagccagggtgccgggggcctggttggggtttcacttctaaatctgggtgctat

SEQ ID NO: 555075 - DNA, 1208 bp, Homo sapiens
ctgacatagtttyctcttccacatagtaaaaggctccatttttttaatggaggctgtcagtattcctacacactgggaatgcccaattttccactcagacttctagaaaactctgtagggcggggcttgggccacaactcctccctcccactttcctactgtgatgttcaagctgcatgcagttcaggcttcagtcacgagggggcaccaccgtaccaccattgtcaaacttctccacagacgtgtttgcatggagcaaaaaaaaaatacctcacttaaaacccagggtatgaatttacatatagaatgactctaattctgtcagaataaaattgataagtgtaaaagaagacagtaaaatcctctactctggggcatccataagatgaaacatgagatacctctggtgcacactggcagcccgtggcaggcagaattattgtaatttggtatatttttgaaagtttagtgactatgtatattgcattttatgtgaattatctgttcatatcttttgatgatttctctactcattattaagacttcttccatatcaaggatattatgtattaaccattcgaaatactaaatatagatagcaaataaacatatgaactagtgaaagactatacaatttctgtgtttaaaagcaatacaacagaattgaacacaaatgagcaaagacatcaatcatatcaataacaataaattggcttaactcatctattaaaagtatttcagattgcctattgaagaaaaatccaaagctgtgcttttccaagtgatacacgtaaaacaaacgtattcatataggttaaaaatgtaaggataaatatatactaggcagttgacaatataaagaaagtaagggttacaatcttgataattaaaagaaaaaaactgagaccaaaatggatttaaagagacaaaaaaacacagttgataaagtcaaaggctacaattcacaaggaagatgggagctactcatatatgcagtcatgtggtaaaaatattgatagagcaaaaactacagtagtgcaaagagaagtaggaagaagcacaccatttaataatagaaattctaccacatttcctataatccaaaaacgttcaggtggagaaaaatttaacaactgtagagaagacttaagcaacataattccaagggtagatcttacagatacacttattctaaattgtgaagccta

SEQ ID NO: 555076 - DNA, 534 bp, Homo sapiens
aaacttttgtgttataaaataagacataatcacacacattagtgtagacctacacagggtcagggtcattcatatcactgtcttccacctccacattttgtcccactggtaggtcttcaggggcactcacacacatggagctgtcatctcctatgataacaatgccttcttctggaatacctcttgaaggacctgcctgaggatattttacacctaaaagttttttttttccataagtaggagaagcacactgtaaaataatgataatatgtatagtatagtaaataaataaaccagtaacatagtcatgcattatcattatcaartgttatgtactgtacataactgtatattttagactattatacgactccaggtgcagtttgtttacactagcatcatcacaaagatgagcaatgagttgcactatgatggccatactgtcattaggcaacaggagtttttcagctctattataaccttatgggtctgttgtggcctgaaacattacacagttcataactgtatatgaaa

SEQ ID NO: 555077 - DNA, 536 bp, Homo sapiens
ttttgttttcattgagcttttccttaaaattttggtcaaactgatatgttcttatattggcaattattgaacaatgstatctttattatctaaaattgaatgaaaatgataactgggatatgacagaacacagacacttagtaaggattcttaagaaaacgttttttgttcccctttgttccttttctttcccctgttgctgaaagactttctgatactacagctatttaacccttttcccatttacaaaaaaagtgcagctcgttgccagtgctcatttatttttacataaacatgctgtttgaggctgaagcaaatctgatatttaatgtgaaaataaaatattaaaactactttttggagttatttctaaagagaactaacatcagaatcatctatttcagaaaagtcacattcatcaaatgcatcttcagcaaacaactgttcgagaatgatgtttacatcacgtgtaggaatgctaccttttccaggatttttactcttgtttccaaagtcgatatactagaatgatgtga

SEQ ID NO: 555078 - DNA, 518 bp, Homo sapiens
gaagaagtcacaaaaataattggcatttgaactcctgaaaaaggtctgctatcagctgggaaatactatcatagtcactcacagagccaaagtcatctaactctgatgattcagagttttctgcttttccaaagcttaattcgcttccattgggatttttaaattcacctcttaaagtaagaaaataagacttagaggtccagacaaggcaactagcacttgcattatactatgcaaaaattgacatttwaaaaaaaagcgcaagttcaaaaaagtgtgatcttcacatacttgttattcagcatgtaatattaaagagtaagtggacatatataaagtgtaactgttgaggcaacattgagattctccagaagaagatggcatgctctttcttatataagttggacatctgatataaaccaaaacctactagctgacatcagtcacatagctcacctctattcatcatccatcttggaaaggtactgaaaaccgtaagacataatttgacatgaatg

SEQ ID NO: 555079 - DNA, 617 bp, Homo sapiens
ttttaaggcaaactaccagaaagctactatttgaggtaaatttaatgttaaggattgagaggcaaagcaacttattagttatatttttctaaaagctttttttttttttttgagatggagtttcactcttgttgcccaggctagagtgtaatggcacgatctcagctcactgcaacttccacctcccaggttcaagcgattctcctgccgcagcctcccgagtagctgggattataggcatgcaccactacgcccagctaattttgtatttttagtaaagacaaggtttcaccatgttggtcaggctggtctcaaactcctgacctcaggtgatccacctgccttggcttcccaaagtgctgggattacaggcatgcgccacggcgcccgacctctaaaagctatttttaaagaatgattaataatatatatttaagtttggctgttatggtcatttttattagagttattggattattcatgcttaatttgacagtcctgcacaatactttctctctgcctagaacggtcatctccccttgtccctgggctacactcccagttacattcaaagccctgactgrgtgtcacttcagttagtaaagccttctgttact

SEQ ID NO: 555080 - DNA, 633 bp, Homo sapiens
ttgtatttttagtagagatggggtttcaccgtgttagccaggatggtctcgatctcctgacctcgtgatccgcccgccttggcctcccaaagtgctgggattacaggcgtgagccaccgcgcccggccaatccctgtatttttaaacacagtactctattattctgtcagttatattcaagatctcttgagttttctccttgtagatgaagctactgctaaccctattctttcctgctctacttttttctttatttcatatcccaacttctggcatttataatttatctttaatattttcaaacccgatagtatttatggtttgtttgtaaccaggtattttttaaacacgtatgtgctcattattgagaatatatttcctttgttgggcatcttttaatttttatgaagrttctatttgcaatttcttttccctcatatatgtagtctactttttaatcatatcctcagatgttttgaatatctcaacaatactgtaaaatttatgggatcatacttatcatgtttatccacttcctggtgcccttagttctctagtttcaatctaaaagaaatgatttccaggactgctgagcagatgtcatcttgggattctcttcattgttttctttgg

SEQ ID NO: 555081 - DNA, 1023 bp, Homo sapiens
tcccaccgtctccaatctgttgtttcccaatcagtactcctaaaacattctctctggttgtgtaatttactcaactaaaaaaatctttgagggcttcctattgcctactcaattaacttgttatcctggcattcaaaatctgagcataatcaacctttatatgtgtctcttcctttcccttgatcatcmttgtccagattccagctatattcctgcttccactcctttgctcaagtacattttccacccaaactgccttggtgtccactttgaaaatccaactggttgtttaaggcccatctcagaggccatgatttcatacatccttcacagggccactaattatccacagggccactaatgatcccctctcagatcctgatggatccttccttcccccttgtttagggcacttttctcattctgttgaatattatagccatcctgaagtttttcttaaaatttttaccaagacaagcgtgcctggaggacagagtctgtgccttccttcctgttttcattcaacacacatttttcaatattgtttgtatgcttggccctgtgctttgtgctgagtatagttaatattattagataatatgcaaaacactgaagaccttaatgtacattagctcatatgattcttaaaagaattctacaaagtaggtattgctgttcccattttacagatgaagaaacagaggcacagagaagttaagtaacttgcccaaagttacacagctagtaagtggcatagttggcatacaaacccatgcagtctggccccagagactgtgcccttaagcactacacaaggctacctttgaaagccgtctcctcagagtgattcaagatggctgattagaggcagctgtggtctgtaacactcacagagaggaatgaaaaggggcaagtgaattcagcactttcaactgagatatccaggttcttgcattggggctgactggaggaacagctcgacccttggagaatgaagaaaagcagggagttggtgatggccca

SEQ ID NO: 555082 - DNA, 1023 bp, Homo sapiens
tcccaccgtctccaatctgttgtttcccaatcagtactcctaaaacattctctctggttgtgtaatttactcaactaaaaaaatctttgagggcttcctattgcctactcaattaacttgttatcctggcattcaaaatctgagcataatcaacctttatatgtgtctcttcctttcccttgatcatcattgtccagattccagctatattcctgcttccactcctttgctcaagtacattttccacccaaactgccttggtgtccactttgaaaatccaactggttgtttaaggcccatctcagaggccatgatttcatacatccttcacagggccactaattatccacagggccactaatgatcccctctcagatcctgatggatccttccttcccccttgtttagggcacttttctcattctgttgaatattatagccatcctgaagtttttcttaaaatttttaccaagacaagmgtgcctggaggacagagtctgtgccttccttcctgttttcattcaacacacatttttcaatattgtttgtatgcttggccctgtgctttgtgctgagtatagttaatattattagataatatgcaaaacactgaagaccttaatgtacattagctcatatgattcttaaaagaattctacaaagtaggtattgctgttcccattttacagatgaagaaacagaggcacagagaagttaagtaacttgcccaaagttacacagctagtaagtggcatagttggcatacaaacccatgcagtctggccccagagactgtgcccttaagcactacacaaggctacctttgaaagccgtctcctcagagtgattcaagatggctgattagaggcagctgtggtctgtaacactcacagagaggaatgaaaaggggcaagtgaattcagcactttcaactgagatatccaggttcttgcattggggctgactggaggaacagctcgacccttggagaatgaagaaaagcagggagttggtgatggccca

SEQ ID NO: 555083 - DNA, 647 bp, Homo sapiens
gactactgagagttctaaggcaartgatctgaaatctgcccgtgaaatggagctaatagcactctccccaccccaaccaaacaggactacactgatccaatggaaaccctgtgtaaatgtcagagcctccaacccacccttcctttcttcccaggtggcgccacctccaggctctggagaagaaaaatgatagcctgacagctactgagtgctcacgacttgcctcggccaagcaccttcatgtggcacttcataaagtcctgccaatgacccagcaagggccatactctcattatcatccccactgtaccgagaaggcagcggaggcttgcagaggttgaggatcccacctaaggtcatacccagctagtgagtggctgagctgagctttgaaccaaagaaacttgatattgtcactgtgaccaaaggtgcctgggatggggctaggggtgtggggagcagcagtcccagttctactgggtcctgggcctcctactggcagattaagaacaagaggtggggagggcgcagtgactcatgcctgtaatcccagcactttgagaggccaaggtgggtgaatcacttgagcccaggagtttgagaccagcctgggcaatatggtgaaaccttgcctctagcaaaaatac

SEQ ID NO: 555084 - DNA, 647 bp, Homo sapiens
gactactgagagttctaaggcaaatgatctgaaayctgcccgtgaaatggagctaatagcactctccccaccccaaccaaacaggactacactgatccaatggaaaccctgtgtaaatgtcagagcctccaacccacccttcctttcttcccaggtggcgccacctccaggctctggagaagaaaaatgatagcctgacagctactgagtgctcacgacttgcctcggccaagcaccttcatgtggcacttcataaagtcctgccaatgacccagcaagggccatactctcattatcatccccactgtaccgagaaggcagcggaggcttgcagaggttgaggatcccacctaaggtcatacccagctagtgagtggctgagctgagctttgaaccaaagaaacttgatattgtcactgtgaccaaaggtgcctgggatggggctaggggtgtggggagcagcagtcccagttctactgggtcctgggcctcctactggcagattaagaacaagaggtggggagggcgcagtgactcatgcctgtaatcccagcactttgagaggccaaggtgggtgaatcacttgagcccaggagtttgagaccagcctgggcaatatggtgaaaccttgcctctagcaaaaatac

SEQ ID NO: 555085 - DNA, 1056 bp, Homo sapiens
ccttgccactaatcccaaagccccctctatctatgggggtccctcccctcaagcctgattgaatctctcgagttcctcttctgggttcttccaaagaaaaactcacaggcatttgcctttatgattcttagtcatgatggaaacgaatacaaatggaaatattcaaggaataagacattatagaagaatattacaaaaatccccaagtttttcaggtctcaaaatcatggtcttcagttcacaacttgtttgccaaggtagtgcttagaatccacagtaaactgttgatctcctctttagttcctaagaacatattcactccccaaatcttttcttttctttttttttcttttctctgcctgtagtcctgtaaaagccagcaaggtggacccacaggtgtgacctagtgtacactgacgtgtttattgatattactgagataactggaatttctgtgaccggactaggggagacaaagatgaatctcacatatttacctatttggcaaatattcactgatcactgctctttgtttatcccatggtcataggaggcaaaagcagatagaagaaaatgtgttattccctcacraggttcctagtttactcaaaaaagatgctaaattactgaggaagaatttagaatgctatttacattaattatagtatttatgtaattatgtaaatatatcttaaatatatataagatatataaattatagtatttatatataatattatatataaatatataaataagtatatatacttatatataagacagtatatcagagtatttatataaatatagtatcttatatacatataagatatatgtgtatatctattatataagtatatctattatatagatgtaataatagatatctgtattatatacatatattcatatatctattatatacatatatacatataaatatagtatcttatatatatgtaacatgtattatatgtatttatttatatgtattatatacatatcaatatagtatcatatataaatactcttccaaatttttcctcagtttaccca

SEQ ID NO: 555086 - DNA, 1406 bp, Homo sapiens
atactgaccttgccttaaccaagagacagcgtagtagcaaactgctggcccacagcctgctatgaagtaggagttcattaccttcttcgctccaggtcttgacatggtccaaagacttgtcttttgawgcagccctgttgtatcctcttgagttgtcatgacattgtctgctggtcttccagtggcaaaatatcctagactttcagagctgaaaaaaaaaggtactttgccattcatcattgcagcctcccatttcacagataagaaatccaaggctcggggtgaaggaacagccttctccagctttcccggaccatgcacgacagcccctcccaacccagcccacccagtgggaaccatgcaaaagcttgaggcagtttttcagatggttcaagccaaaacgtctagaaaattcttgctaagaaacacaaactcccagaccatctgcagaactgaaacaaaagcctttttcgccctcattttaactgcaactcaataggtgtcggctttgagctctcccccagagctgagctcctctgaacaagctggaggggggcgggtgctgggactggggctctgagctccaccagctcatagaaccagctcacagattgcagctaacaggacatttttgcacttcttaatgccaaaagctgccttggatgctggtttgcttccaaggcgcgctttgaaagagggatggaaggctctagatgatcctgaaatctctgcgctcaagatgctcttagttaagacacggggtgagatttggtgtcagcaaaaggatactggggtcaaagtagatggtgcaaagttggggtgagtggggaaggcttcagatgattgcaagaatctgactcttctaggcctcagtttcctcatacatatagtggggctaacagcctccttccgagtgaggatgtggggagataatatgagagtaaagtgttcatcctcaaatcaggcagagggtaagtgattaaaaaacaagagtcgagccgggcgcagtggctcacgcctgtaatcccagcactttgggaggctgaggcaggcggatcacctgaggtcaggagtttgagaccagcctcaacatggagaaaccctgtctctactaaaaatacaaaattagcggagcatggtggtgcatgcctgtaatctcagctactctggaggctgaggcaggagaattgcttgaacctgggaggcggaggttgtggggaaccgagatcgcgccattgcactccagcccgggcaacaagagcaaaactccgtcttaaaaaaaaacaaaaaacaaaaaaaaaaacaagagccgctgtcgatgttattgctggtggttttattatcattggctgggtcggcaaggtcaccttggctgcaggtggcctacagtgggagaaaaagttaaa

SEQ ID NO: 555087 - DNA, 1052 bp, Homo sapiens
gatctatccacattcaccagtctctctaatttgtggtgaatttcaaagaaagttgcagacatcagtatattttacccctaaccactccagcatgcatatcattagcgaaaagtcagtatttgtttatggttgtttttaaaaaataggtttaatgagatataattcttatgctgtataattcgccctatatttcttttttacataaaaacttttagtgaagaaaacatagaacatttttttcttctgtcattattgtatgtatcagataatacttgtggctttcagatctgctgataaacacaaagctacaagttttggaaaaaatcaaatcttcaagtttggaaaagaccacagactcttcctccaatcctaataaaatgagaaatttcattattagaatkataaaaacataattataaacctcaacttcaaatctgagccattaagacaaatgatgtttcatctataaccattccacaaaaactctgccactgtatgccatgcatccacatacttcaaactaccacagttttatgcctatttacaggtacagattttcttttctttcttttttttttttctttttcagggtcttgctctgtcacccaggctggagtattgcagtggtgcaacatgcctcactgcagtctcaacctctcgggctcaagagatcctcccctcagcctctcagagtagctgagaccacaggcacacaccaccacacctggctaatttttaaattatgcgtagagacgaggtcccaatatgttgcccaggctggtctcaaactcctgggctcaagtgatcctcccaccttgctctcccaaagtactaggattacaggtgtgagccactgtgcccaggctgtactttccaaatataactgtacagcatcacccattgcatatactcttgtacactgtgaccttgctcctccacaattaagtgtcagggcttaatttttctccccttgaatctgagtgaacttgttattgttctaatccataaagtacggcagatgtgatagctttgtcagttttgagatgagtcat

SEQ ID NO: 555088 - DNA, 920 bp, Homo sapiens
ggagcgacacagccagctgccttctgggaccttgaggatgccatagcaggcctggaggtatgaggaggagaggggagaatggtcagcaccttctcaccagggttggtatctgttctgatacacagtcacagagtatcctctgcttttgggagaaaggcaaataaagccgaacaagcttatatccagtatcgagtgatttaaaaatactcaaaaaagcaacttccagcatctctcctaagatcagcatgtctgtccatgagaactgactttaaggatgatagaacaagacgaggagatacagccaaccgttaacccaactgttatctgagtgttgtgattacagcattttttggtctgttttctaaagcttcttcaatgactatgtattataattagtcaaacacttattgaacatttcctaaaagtcatacactgttgtgatcaagaaaaaagttttagaaaataaagagaatgaaacttctgaggagcaaatgaactgacgtttataaaaagcctattaacgcctggtgcataaaaagtactcagtaaatcgtagcaattgcttgcttgggttgaagaaacagggacttgtgaawgaatcttgaatagaatattacactaatcacaataattcataatgagttctggaaggtgcttcaaatcctttatggaatgaagttggacaaataattactgtgagaaactggagattagtttgggaaacattctagactccctttttgctatccccaattttgcccatcatttcctccttactgctctactctattagagactaactgattcaatatggcagcttcaaaatttctgtctgcctcaggagattcaccctcaactcagattcaagttataacagttaccataatatcggtccccccacaacctggtccttttccaag

SEQ ID NO: 555089 - DNA, 994 bp, Homo sapiens
aaaayaaaataagacaatacatactttaattatttagcctttttagcatgatcttcacctgaattttaataaatttaaaaataaaaggaataaagttctccttacatatatttacatacacatatacccctaaatcttactccttattattcttggttattaaaccaatctgttaaatacaaaactgaacttcaaagaccattttaaattacaagtgtaacttcaaaaaacaaatacaaattaaatggccttctttgtactagaggaagtattttaaaaagggaatcttgcatttcataactatgttaactttacaatattgatctgataaagtgacactggacaaaggttctctttcagcttcaaaagatgaaaagctggtcctgtcagttgataatagttgctgagaataaaacaatccactataggttggtgcaaaagtaattgcggattttgcaattaaaagtaatggcaaaaatcgcaattgcttttgcaccaacctaatagctactacctagtcactagtcctggtattaccagaaaatctagatggtccctaatggactaggaaaaaactcttggctacagtaaatcaaagaggcactactccctgttattgaaatgaacatcctaaaacaaacaaactgatacgactgaatgtaacagcaagtagattttttttaatccttcataaaatgttgcaatttcaaggacagctgctatcatattcatgtaccagtatcaccatcaaaaagtttccagtttccctggttttctatggaaaattttatcatcctcctattacaacaggtttaggaggagataatgagaagttaagaagacgggataatgacgtccaaagagttgaatatgagggtagtgtcaatgttgaaagaatatatcataacacttctgaatatctaagctggaaggaaatgagggctggagagggattcaattaatagcccacaggggatatcataatctacttagt

SEQ ID NO: 555090 - DNA, 994 bp, Homo sapiens
aaaataaaataagacaatacatactttaattatttagcctttttagcatgatcttcacctgaattttaataaatttaaaaataaaaggaataaagttctccttacatatatttacatacacatatacccctaaatcttactccttattattcttggttattaaaccaatctgttaaatacaaaactgaacttcaaagaccattttaaattacaagtgtaacttcaaaaaacaaatacaaattaaatggccttctttgtactagaggaagtattttaaaaagggaatcttgcatttcataactatgttaactttacaatattgatctgataaagtgacactggacaaaggttctctttcagcttcaaaagatgaaaagctggtcctgtcagttgataatagttgctgagaataaaacaatccactataggttggtgcaaaagtaattgcggattttgcaattaaaagtaatggcaaaaatcgcaattgcttttgcaccaacctaatagctactacctagtcactagtcctggtattaccagaaaatctagatggtccctaatggactaggaaaaaactcttggctacagtaaatcaaagaggcactactccctgttattgaaatraacatcctaaaacaaacaaactgatacgactgaatgtaacagcaagtagattttttttaatccttcataaaatgttgcaatttcaaggacagctgctatcatattcatgtaccagtatcaccatcaaaaagtttccagtttccctggttttctatggaaaattttatcatcctcctattacaacaggtttaggaggagataatgagaagttaagaagacgggataatgacgtccaaagagttgaatatgagggtagtgtcaatgttgaaagaatatatcataacacttctgaatatctaagctggaaggaaatgagggctggagagggattcaattaatagcccacaggggatatcataatctacttagt

SEQ ID NO: 555091 - DNA, 931 bp, Homo sapiens
caaggaagtgtgaggatgccagtgtggctaaagcagaggaagtgcaggggcgagtggaatcattctagaggtaagtgccatggtgagccccactggactgaaagggaaaccaaggcagagtgtgtgggctgagtggggtgaggactcaccgaggtcggaattgcagaaggccgtctgtgggtggggtgggacacaggtgcaggccctgctgggggctatcagccacagcaacaacaggatgccagaagccaggggctcaaagggggccatggtgggttctgtggggaarggggatgtcaggcaggccccggcccagctgatctgctgacctgggcaggtcatccaccccatcttgccccggggcagcctatgggggggattagggggctggatttgggcttgaggggttggtaagcttagggattttaaggggattggggagcgcagaggaatttagggtttagagagttgggagagtttaaattattgagggactgagtgagttgcggggttatggggttgtggcacttgggggagaagggggctgaggaagtttgaggaatgaggggattggggaattctggaggttgaggagtttgggggtgaggaatttgggattgggggctggaggagtttggagacggcagagtttaggggttgtgtatattaagagatataagaggctgggggaatttagggaggttgaggaatttggaggaggttgggggtttagggagctgggggagtttggaggttgaaggggttgggggaatttgggggcttaaggcaatggggatacttgaggaatttgagggcaaaagaagtttgggagctggggaactggggattggggagctgggggagtttagggagctgcaggggttagcggtgggtatttagggggcgatgagggaaatttcgggatgaagga

SEQ ID NO: 555092 - DNA, 817 bp, Homo sapiens
taggtttcttattctctaacaacaactcccaaaggcgagaaaaggatactccttctttcctgtgtgcctttataaggagcaactacactgtttcagagtgttctcagtaaccactttctcactggaatgaccgtgggatcacacagactcagacaagccaggattcaacctggctttgtagagtgggcctgaagcacatggggagaaaaggagcaaaatcatatatttttaaaaataaagaaatggtggatggagtaggagaggttgatttcagagtagggaaatgatagattgtggtactcttaggttgttagtatttgtagttaaattycacatgaaggcctagagattcctgataggcaccctccattcagcgttttgggtcttttttaatacatatgtattgagcattaaatgtctgccattaactcaattagaataaaacaaaaaagcaaggagaaaggattgattttagaactcaattaggtatgctgacatgttgtttttacagggaaatttttgaaaaaagtagaataaggaatgactagctctataaggtgctaaaacatactatacatttatttttaaaaatacatttgttggccgggcacggtggctcacgcctataatcgcagcactttgggaggccaaggcaggtggatcacaaggtcaggagatcaagaccatcctggttaacacggtgaaaccacatctctaccaaaaatacaaaaaacaaaattagccgggcatggtggtgggcacctgtagtcccagctactctggaggctgaggtgggagaatggcgtgaacccgggca

SEQ ID NO: 555093 - DNA, 817 bp, Homo sapiens
taggtttcttattctctaacaacaactcccaaaggcgagaaaaggatactccttctttcctgtgtgcctttataaggagcaactacactgtttcagagtgttctcagtaaccactttctcactggaatgaccgtgggatcacacagactcagacaagccaggattcaacctggctttgtagagtgggcctgaagcacatggggagaaaaggagcaaaatcatatatttttaaaaataaagaaatggtggatggagtaggagaggttgatttcagagtagggaaatgatagattgtggtactcttaggttgttagtatttgtagttaaatttcacatgaaggcctagagattcctgataggcaccctccattcagcgttttgggtcttttttaatacatatgtattgagcattaaatgtctgccwttaactcaattagaataaaacaaaaaagcaaggagaaaggattgattttagaactcaattaggtatgctgacatgttgtttttacagggaaatttttgaaaaaagtagaataaggaatgactagctctataaggtgctaaaacatactatacatttatttttaaaaatacatttgttggccgggcacggtggctcacgcctataatcgcagcactttgggaggccaaggcaggtggatcacaaggtcaggagatcaagaccatcctggttaacacggtgaaaccacatctctaccaaaaatacaaaaaacaaaattagccgggcatggtggtgggcacctgtagtcccagctactctggaggctgaggtgggagaatggcgtgaacccgggca

SEQ ID NO: 555094 - DNA, 668 bp, Homo sapiens
ccacctcgtccacgtccacgtccacctgggggcctcgggaggctaggcccctcctcaaaggcccaccagcccggcgctcatgctgagccccaggcacgcagggccggccacctctctcctgaagccattggccgctcctccacccagtgcttctgcccatgcctgccccagcagcccctctgcacggtcaccatcgcctgggcctgcccacagcactggtgctcacctctacctcctgtcctcaggccgtgcggcacgacatggccagcaygcagaaggagccctcccgggacccaggaccccccgtggtggactccgcggcacatgcttcccaaggtggtcccacggagggtgttactgggcaccagtggactcgccccatggcccgttcctgggagatgagggccgtggcctgcatgaactaccagatgagtaagggaaccccaggcaggcggccctgccacagcccccaaagacactggcctcctgctccagcttccctgtcctggccccacctgtcctgttgctgccagcagggcccttgtttgggattatgaacaaacctcacagactttgaggacctggatggtcctgcattcacggcatcaacactacccgcgctgctgttagacactccgccattcctggttctctccgaaccgttcttt

SEQ ID NO: 555095 - DNA, 648 bp, Homo sapiens
tgcgatgacatccaaatatggaaaaatgttacgtgcagattctctaaattaaaaatgaggagggacaaaggggaacacacattcagttcagtcaaagacaacttcaaatgaagaagttactgctatttttctgcactgaaaattgatttctggttcaccaagagaccagcctgattctaagtgtggtctcagtattggggtctctacaagcatcactagccarctcattcctgcccactgagcccaaggaccagggtaaatcaataaaaagtacaaataatcttaggttggtacagattctctgcatggcatcaaaaagtatgatgaacagagactattacagaatagctgcctggaaatatacccactattcagggctgcaatttatcaattaagaacacaacttttattttggacagaatgtctaagaagctaatgggtgttaatttggaggagcaaagcctttgttttgtaaagtacaggacggacagcactctggatttaatcacagtccaccattatggtgggccccaaaagtctcggaggcagcaaatctctgaatattttgtttagcttcagcgttgaatcaactctataaaatgaggggatatttgacttagctgatacttttgttcatattttacttgc

SEQ ID NO: 555096 - DNA, 1269 bp, Homo sapiens
tctaattttatttgttatatatattcattaaaaaaagtttaaaccatgtagtattaacagtggttatctctgagtggtagggttatcttgagtgatagtattatgagtgatatttattttattcattgtgctccttcatagtttccaaatttgaacaaatgaacctaattgactttataaccaggaaaaaaactatacatataacaagcatttaaaaaattgattctctctaagtaaaaaaaattgaaatcaagtggaaaaaggccgtcccattttgatggatcacggtcaaagataaaacagtctcattgcagaggagcaaaaaaactctaaggctcaatccaaggtatctgaagagaaaagagaacaatatgggattcagattaaaatgtgtatgatcttaaccgcaaaacaaaaaatgtgtgaccttacataagcaaatcaatatccatgaccgtcagctcctcatttctaagttcaggctagttggtggctgaattgaatgggcaatgtatgaagtatataaagagttaagcacacagaaagcattcagtaataatacctctatcttataacagtccattttgtatcttcactactcactaaataaaaaatataagaaaattatatatagcttcctgccataaactggaaattaagtaaggtcataaatgtaataaataaataaacaatctttattacatttattagtatttgagtccagagttcaagaatgggctccatttttttaaagaaactatctctagctggtctctatttatttatttatttttattttttgttatactttaagttctagggtacatgtgcacaccttgcaggtttgttacatacgtatacatgtgccatgttggtgtgctgcacccattaactcgtcatttacattgggtatttctcctaatgctctccctcccscagccctccaccccgtgacaggccctggggtgtgatgttccccttcctgtgtccaagtgttctcattgttcaattcccacctatgagtgagaaaatgcggtgtttggttttttgttcctgtgttagtttgctcagaatgatggtttctaccttcatccatgtccctgcaaaggacatgaactcatccttttttatggctgcatagtattccatggtgtatatgtgccacattttcttaatccagtctatcattgatggacatttgagttcgttccaagtgtttgagttcatctcaaaacgtatgtcctctgggacaagacctaccaggcgtat

SEQ ID NO: 555097 - DNA, 647 bp, Homo sapiens
ccaagaccrgggatctgaaagattcccaaggggcatggtcaaggccctctcagaccaggcacctcactgggagactggtccagaaaaccttcgggagggacaggacagcaatgacttcctctggcctctgcagctagactaggtggtttctaaatcttgcttcccctttccttcacagtctgctgctggcagtccttcctggtatgaccgaagtgcatttcacatgactcaagtgccagcccctgccccaactagcagccctgcatctttattttctacaaaaccctgcccctgccgtcaccacgtcggccctcccctcccaggggccaagcctgcccccagccctggatctcacttggctgggactgagaacactcactgggcctcaggggtcacaggctgcagggccctgctcccagcccccaggcagccaggatgttcttgccaaagggccctgccccaggcctatagccgctgctcaccgtgtctccagggcaggtactccgggtccaccaggctgacctgctccctcccagacacgcatttggaaagtgatgatgcaactgtcggacggcaggagcactgcctcgggcggcagcacgacggtgcactcactgcctcgcaaggtgcacttacgtgtgccacca

SEQ ID NO: 555098 - DNA, 647 bp, Homo sapiens
ccaagaccggggatctgaaagattcccaaggggcatggtcaaggccctctcagaccaggcacctcactgggagactggtccagaaaaccttcgggagggacaggacagcaatgacttcctctggcctctgcagctagactaggtggtttctaaatcttgcttcccctttccttcacagtctgctgctggcagtccttcctggtatgaccgaagtgcatttcacatgactcaagtgccagcccctgccccaactagcagccctgcatctttattttctacaaaaccctgcccctgccgtcaccacgtsggccctcccctcccaggggccaagcctgcccccagccctggatctcacttggctgggactgagaacactcactgggcctcaggggtcacaggctgcagggccctgctcccagcccccaggcagccaggatgttcttgccaaagggccctgccccaggcctatagccgctgctcaccgtgtctccagggcaggtactccgggtccaccaggctgacctgctccctcccagacacgcatttggaaagtgatgatgcaactgtcggacggcaggagcactgcctcgggcggcagcacgacggtgcactcactgcctcgcaaggtgcacttacgtgtgccacca

SEQ ID NO: 555099 - DNA, 647 bp, Homo sapiens
ccaagaccggggatctgaaagattcccaaggggcatggtcaaggccctctcagaccaggcacctcactgggagactggtccagaaaaccttcgggagggacaggacagcaatgacttcctctggcctctgcagctagactaggtggtttctaaatcttgcttcccctttccttcacagtctgctgctggcagtccttcctggtatgaccgaagtgcatttcacatgactcaagtgccagcccctgccccaactagcagccctgcatctttattttctacaaaaccctgcccctgccgtcaccacgtckgccctcccctcccaggggccaagcctgcccccagccctggatctcacttggctgggactgagaacactcactgggcctcaggggtcacaggctgcagggccctgctcccagcccccaggcagccaggatgttcttgccaaagggccctgccccaggcctatagccgctgctcaccgtgtctccagggcaggtactccgggtccaccaggctgacctgctccctcccagacacgcatttggaaagtgatgatgcaactgtcggacggcaggagcactgcctcgggcggcagcacgacggtgcactcactgcctcgcaaggtgcacttacgtgtgccacca

SEQ ID NO: 555100 - DNA, 647 bp, Homo sapiens
ccaagaccggggatctgaaagattcccaaggggcatggtcaaggccctctcagaccaggcacctcactgggagactggtccagaaaaccttcgggagggacaggacagcaatgacttcctctggcctctgcagctagactaggtggtttctaaatcttgcttcccctttccttcacagtctgctgctggcagtccttcctggtatgaccgaagtgcatttcacatgactcaagtgccagcccctgccccaactagcagccctgcatctttattttctacaaaaccctgcccctgccgtcaccacgtcggccctcccctcccaggggccaagcctgcccccagccctggatctcacttggctgggactgagaacactcactgggcctcaggggtcacaggctgcagggccctgctcccagcccccaggcagccaggatgttcttgccaaagggccctgccccaggcctatagccgctgctcaccgtgtctccagggcaggtactcygggtccaccaggctgacctgctccctcccagacacgcatttggaaagtgatgatgcaactgtcggacggcaggagcactgcctcgggcggcagcacgacggtgcactcactgcctcgcaaggtgcacttacgtgtgccacca

SEQ ID NO: 555101 - DNA, 647 bp, Homo sapiens
ccaagaccggggatctgaaagattcccaaggggcatggtcaaggccctctcagaccaggcacctcactgggagactggtccagaaaaccttcgggagggacaggacagcaatgacttcctctggcctctgcagctagactaggtggtttctaaatcttgcttcccctttccttcacagtctgctgctggcagtccttcctggtatgaccgaagtgcatttcacatgactcaagtgccagcccctgccccaactagcagccctgcatctttattttctacaaaaccctgcccctgccgtcaccacgtcggccctcccctcccaggggccaagcctgcccccagccctggatctcacttggctgggactgagaacactcactgggcctcaggggtcacaggctgcagggccctgctcccagcccccaggcagccaggatgttcttgccaaagggccctgccccaggcctatagccgctgctcaccgtgtctccagggcaggtactccgggtccaccaggctgacctgctccctcccagacacgcatttggaaagtgatgatgcaactgtcggacggcaggagcactgcctcgggcggcagcacracggtgcactcactgcctcgcaaggtgcacttacgtgtgccacca

SEQ ID NO: 555102 - DNA, 2107 bp, Homo sapiens
gaaaatcattttgaaagcgagagcaagattgcttaagaggaaaatctcttgatagagagagaagtacagtttctactgtaataattaactggaaagaaaattgtactcacaataaaatgaatgagatgaatgtattctcctaagatagtgcacacaccccagtttcctagttcatgtaatttttcatgtaatatttcatgcaatattgcctttgctgtcgtgtttctctctcccagcaccaatggcaacattagaaataagggacacatgtggctgctagaatttttgctcatgctcttagcacgaatcgcagtttggggaaaagtattcactcatgctaattgaagcttaaagaatgggaattttagtgggtgagcttctatgctctgatattggttatgcctcctcttaggcatcatctccagctcttcctaagatatataccgcaactaactgtagtggtgagttcaccactctctcttgtccataaaggactcgaactcgaagatgatgggttgcaagatgaaaatgacccagatcccagtaagtgttgaattagaaccgccaaggagaactcacagacctgcatcagattgtgagcaaaaaccaaacttttgttgtgtaaatcactgagctattggggttatttgttgctgcagtatggtctatcctatcttgactcatataatatctggtgatagagattaatggaagaagaagtaaaatgtctataagtgtggcccaaagaaagcaacccctaaagtgatgaggtaggttttccaagagtatggccccagctcaaagtccagcacctcaatttatgaagtttcaggcagaggaacttggccaatgcaaaggaaaaaagatatccttcctttcaggctttttttgtggctgaagattgaaatttatctataatttgtcatttaacatccctttgcatgatttaaataaaaagtaagtttgattccaaagcacaaaaccaagaaaagccaaagcataaaaccaatctttttttaaagaattttatatcagatgggaaaaacttcataaaaccctagagctatccctttgtgcatatcatgagtctactcatttttttcttcaagaatgaattttccttgctttgagtcaatccaggcagtcaaaaacactgtaaaagaccatatagttttcctgatcaaatgtgcatggattatagactgtgccagctatggaatgcactttgtttgaactttaaactcatttcagtccccagttttactatcaggtggtcttttttttttttccatacaattttctctaagtttctactctgttcagggaacaattgaaaaggtggtatgcagttaaaattaaaacctgccacttcccacataaaatatgtaaatagtgcaaggcagtttgcatttctaaaggcagcaacttcaaattatcttaaggagtatcagaaaaaccatggattaatttacccaatgtcctccaacccttcactttccacaggatttttattctaattaatgggaagcattaaacatctgccattttgtagagttagtttattatctgcatatggctgagtggatcccttaatcacattcttcaacttatatgaaaagcaaccaaaatggaaaatttcttatggctcctgccttggaaaagaatacactagtcaatatgaaaagattcaggctatggggagatctggtgtgcttatagctaccttgagtcttaggtgtctaactgagacactagagcctcagggagactatgcagaactgaacattgttgaaaagcacctgtggaggtcacagccaaaaggcataggctcattgaaagactgacacctaatcacaggactacagaacacttcccctcttcccaaactttaccaccacatcactagggctcccatataacagcaaagaaatacaactgaaataactgcatgtctcagaccttattaaagaagcctctaagaaaacacaaagacaacaggggagacaaaaacaagaacacgagagaaaattttagcctttaacacctactgctacagcaaaccataaagacagcytaagtcccagccagataaacataaaaccttaca

SEQ ID NO: 555103 - DNA, 622 bp, Homo sapiens
aaatgcactgatgtttaagccctccagcacattgatgcrccccctttttttttgcttaagagcattaagtgtttcctctctcagagcactttccccaagctgttgtaacttagacatgttgggtttacttggccaagtctctctagtgagaatggtaagtcaccctattcatctctctaatgccagtgtctagcacaggcctccctcctcatcattgctgcttaacagataaattataacataatatgagggtgagtgaaccacagttgtggactttatttatccattcaatcattcattattttgccattgagtggccatgtgctgtgtgctaaactatgctgtctgtagagtcagagattctgttcctagaaggacttctggatgaggaattttattcattcctttcacaagctaatggcaaaaccaactcatcaaattccagggctgactgagtagactcttctcatctacagcccagagaattcctgaaagagttggccaccatctcttcagcagggctggtctgacatttagggatggggggacgagggctggttctgaggagctcccatgcagcccccatttcccaggctggagacatgatttctgagatgtggct

SEQ ID NO: 555104 - DNA, 838 bp, Homo sapiens
tgtggttttgtcgttgtgcatgtgtctatatatttacacacatacacatacatacttgggtcatcgcttttctctgtactttaaatctacggttatatgcctacttacgtttaccacttttatctccttggaagcagtctatgaaactatggatgctgccagtaaattcagggaacagagtagaattgcccagttctgttgtgtgtgtatggggagggtttgctgttaaaaatatcaactctgtaacaaaaagatacatctgatttctaactattcaaccctgtaataggttaaacgatagcaaaccattcattgattttgttttttaaaaagagtaataaacagaaacatgtaccaactgaaagagccaggcaattcaattayaattaggaaaacaaaagtgatgagcctgaacaatgctgccttagttttggggataagtgttgaaaatgccaaccacgtaataatgcagcgtttgtcttctcattactaaaggccccagtactaatcacctcatttttgaaagctgtgtaccaacagaacgaagtacagaactcagtagatgggtctaatagacatgcttaaaaaatacccacataaacatagacccaaatataagaaaaacatatatcaaaagaatatttgagtaaatttatatccatcactccactgatcaaagtaccagtccatccttttacaccattcatccacccatccatccattcagtaaatatgttttaaacttttactctattttacgcactgtgctactaatatacaccctagaatgtatgttctagatgcaaatgactccggtgaaaataacaattctttcttg

SEQ ID NO: 555105 - DNA, 943 bp, Homo sapiens
cttcacaggggatagaaagcagaccaagggccagaccccccagggaaaatctggataaacaattaaagccatctgcaggccccaactgagaagcaggaagacaaagttcaatttaacaaaaatggacagtttcttgactacttgggcccaggcatggtgcttaatcctacagattcctaaggatctcacagtctgggtaagcgtggtggggcagacattcaatcaagtattaatctaaaaagtcctttaacagagctatagacatgatgtcttggaagacagcaggagtgtgggagacatgggaatagtcacaaaaggcatccaggaggaatcaatatccaaactcattattaaagattgagccttacaaatgtgggggtagaagagatgaagcaggaactttgggtagaagggaaaggaacaaaagcacagaggtattcattagctgggtggcaccacatgctaagaaaactataagccactggacatggacttggaggtggaatgtggaaagagacggagcttgaaagttacgcagaagtcaggccaaacaagagaacagacaatcctgagaaaaaacacaagctctcaaaagattttaagcgtggagtaacaaattgactcttttgttttatttttgagacagagtctcactctgtcatccaggctgaagtgcagtggctcgatctctcctcattgcaacctccacctcctgggttcaaacaattctcctgcctcagcctcccaagtagctgggattacaggcatgcgccaccacgcccagctaatttttgtatttttagtagaaacagggtttcatcatgttggccaggctggtctcgaacttctgacctcaagtcatctgcccgcctcrgcctcccaaagtgctgggattacaggcatgagccaccgcacctggccagattggctcttttagatagat

SEQ ID NO: 555106 - DNA, 640 bp, Homo sapiens
aagttatagcagcccaagcagactaagacagaacccttagcatattaatcatagttactttaaatctctggtcccataattccaaaatatctgccacatctgagtctggttctagtgcttgctttgtttcttcaagactgtggttttttttctctttttagcatatcttataatttttctgttcaaagcaaggcatgatgtactgggtaaagggaactgaactgaggtagataggtgtttagaatgaaatttagaggcaacttaagaaagtactcaaaaaacaaaattatgggagcatgctaaatggacacaggagccagcctgaaagagcttgcaatggacaaagttggaacaatttgagcaacaaaataagttattcttccttatagaggaattctaaataatttatatagatacttgccttccaggaagtggcacttaatccccrtcaaaccctcataagtgtgggctggacttggtaacttccttccaaaaaatagagtatggaaaaggggtgaagtaacttcatagtggaaaaacctggcaaacactaccttggttagctgagcaaagccttgatatggtgtgatgagaatggaatattacctttgtgatctttctctcaaacacttataatccc

SEQ ID NO: 555107 - DNA, 1490 bp, Homo sapiens
gaacacaccctcctgccctgtggaagcttccaggctcccgggcaggtcgctgaaggatcctcttcctggcccctggagtccacaggtgcgacatcccgtcccgacatgggtgcctgccccagccactcagtcgtcacctgtgagcacctgaaaaccaggccacagcccagactcacaaggagccacgggcctgggagatttattaaacattcrcacgtaattttccattaacatttcctattttggcatcttaaagagtgaaagttgatttcggttcaacatcctgtggggaaattagttcattttgctaacgcatcttaataattacagtgacatcaaggttaattgcttaatctggattgccacagtgcaggccgccgaattccccacgcaatctgtgctataattagtaccggggcatccagatttagaaggctctttcaccggaacagcggaatcaggcaaggtgatcgatggatgtgaccaagaggacacttcgcgcacaggtctggggtcgggctctgtgaggccatcagccagggaatgtgtggggtgagtgtgtctccccagaccacaggaagtggccagcctgccccgtgggtctgctgcccacgcagggtgaccagtgcaaatgaaactctcccaaactttctgctgcgggctcatctccccgcagccaggacagcaatggcccgtgccaggggtccaggacacccagctgaccacggctgcagcctgcgtggcagggcccaagattgctgtgaaatggagcctcaggcagtgcctcggagtcacgtcaaggactgtcatgggatcagggcagaagggagtgccctgggagggagttggccagtgatggggatgaacagctgccaggggcaccaagactccgctcagccaggctgtggtgtaaagggggactcggactcaccttcagaggcaaaggcctggatgaaggtgaacagagcagattctggggacacgctcatcccagaggcctggaaggtcgttctgggaagagccgggaggcgcctccccttgttcccggaaggtcatcctgggaagagccgggaggcgcctccccttattcccggaaggtcgtcctgggaagagcctggaggcgcctccccttgttcccggaaggtcatcctgggaagagccgggaggcgcctccccttgtgcccggaaggtcatcctgggaagagccaggaggcgcctccccttgtgcccagggcaggcaacagatccggttctcaggctgcacacttggtggcccaaggaaaaggaaactcctgaaatgttggcttagtcgtttccgggctaactcgctcatctccgggttcaaacaatccacgtctggggtgagacgcagccttcaggtttgttgctcatcccttctccctcctgtcacggggaagcatccccggccccgctcctgtccaggcagcaaggactgtgctgagggctgcgctctttccccaggaccaggc

SEQ ID NO: 555108 - DNA, 1490 bp, Homo sapiens
gaacacaccctcctgccctgtggaagcttccaggctcccgggcaggtcgctgaaggatcctcttcctggcccctggagtccacaggtgcgacatcccgtcccgacatgggtgcctgccccagccactcagtcgtcacctgtgagcacctgaaaaccaggccacagcccagactcacaaggagccacgggcctgggagatttattaaacattcgcacgtaattttccattaacatttcctattttggcatcttaaagagtgaaagttgatttcggttcaacatcctgtggggaaattagttcattttgctaacgcatcttaataattacagtgacatcaaggttaattgcttaatctggattgccacagtgcaggccgccgaattccccacgcaatctgtgctataattagtaccggggcatccagatttagaaggctctttcaccggaacagcggaatcaggcaaggtgatcgatggatgtgaccaagaggacacttcgcgcacaggtctggggtcgggctctgtgaggccatcagccagggaatgtgtggggtgagtgtgtctccccagaccacaggaagtggccagcctgccccgtgggtctgctgcccacgcagggtgaccagtgcaaatgaaactctcccaaactttctgctgcgggctcatctccccgcagccaggacagcaatggcccgtgccaggggtccaggacacccagctgaccacggctgcagcctgcgtggcagggcccaagattgctgtgaaatggagcctcaggcagtgcctcggagtcacgtcaaggactgtcatgggatcagggcagaagggagtgccctgggagggagttggccagtgatggggatgaacagctgccaggggcaccaagactccgctcagccaggctgtggtgtaaagggggactcggactcaccttcagaggcaaaggcctggatgaaggtgaacagagcagattctggggacacgctcatcccagaggcctggaaggtcgttctgggaagagccgggaggygcctccccttgttcccggaaggtcatcctgggaagagccgggaggcgcctccccttattcccggaaggtcgtcctgggaagagcctggaggcgcctccccttgttcccggaaggtcatcctgggaagagccgggaggcgcctccccttgtgcccggaaggtcatcctgggaagagccaggaggcgcctccccttgtgcccagggcaggcaacagatccggttctcaggctgcacacttggtggcccaaggaaaaggaaactcctgaaatgttggcttagtcgtttccgggctaactcgctcatctccgggttcaaacaatccacgtctggggtgagacgcagccttcaggtttgttgctcatcccttctccctcctgtcacggggaagcatccccggccccgctcctgtccaggcagcaaggactgtgctgagggctgcgctctttccccaggaccaggc

SEQ ID NO: 555109 - DNA, 1490 bp, Homo sapiens
gaacacaccctcctgccctgtggaagcttccaggctcccgggcaggtcgctgaaggatcctcttcctggcccctggagtccacaggtgcgacatcccgtcccgacatgggtgcctgccccagccactcagtcgtcacctgtgagcacctgaaaaccaggccacagcccagactcacaaggagccacgggcctgggagatttattaaacattcgcacgtaattttccattaacatttcctattttggcatcttaaagagtgaaagttgatttcggttcaacatcctgtggggaaattagttcattttgctaacgcatcttaataattacagtgacatcaaggttaattgcttaatctggattgccacagtgcaggccgccgaattccccacgcaatctgtgctataattagtaccggggcatccagatttagaaggctctttcaccggaacagcggaatcaggcaaggtgatcgatggatgtgaccaagaggacacttcgcgcacaggtctggggtcgggctctgtgaggccatcagccagggaatgtgtggggtgagtgtgtctccccagaccacaggaagtggccagcctgccccgtgggtctgctgcccacgcagggtgaccagtgcaaatgaaactctcccaaactttctgctgcgggctcatctccccgcagccaggacagcaatggcccgtgccaggggtccaggacacccagctgaccacggctgcagcctgcgtggcagggcccaagattgctgtgaaatggagcctcaggcagtgcctcggagtcacgtcaaggactgtcatgggatcagggcagaagggagtgccctgggagggagttggccagtgatggggatgaacagctgccaggggcaccaagactccgctcagccaggctgtggtgtaaagggggactcggactcaccttcagaggcaaaggcctggatgaaggtgaacagagcagattctggggacacgctcatcccagaggcctggaaggtcgttctgggaagagccgggaggcgcctccccttgttcccggaaggtcatcctgggaagagccgggaggcgcctccccttattcccggaaggtcgtcctgggaagagcctggaggcgcctccccttgttcccggaaggtcatcctgggaagagccgggaggcgcctccccttgtgcccggaaggtcatcctgggaagagccaggaggcgcctccccttgtgcccagggcaggcaacagatccggttctcaggctgcacacttggtggcccaaggaaaaggaaactcctgaaatgttggcttagtcgtttccgggctaactcgctcatctccgggttcaaacaatccacgtctggggtgagacgcagccttcaggtttgttgctcatcccttctccctcctgtcacggggaagcatccccggccccgctcctgtccaggcrgcaaggactgtgctgagggctgcgctctttccccaggaccaggc

SEQ ID NO: 555110 - DNA, 508 bp, Homo sapiens
ctttattattgtgtagattaaatgatataatccatgctaaattttaatttgagcttgtaagaatgttatttacacttactacggaagcaaagattggaaggtcctctmctttcttttgaaaactttaaggatttttctaagaggatgaaccattgtacttccatctgagtcctatggacaggatctagcaatcacatctcatatcctctcccccatttaagttctcccacaagagaagggtttctcccttgcagactttctgtctccagagagctgccacagttctaagggccccagggcatgtgtgggtggagcagtgggaattggggaggcatccaggaggaagtctgcttgaaagcaatcgtgtgtgtttgcctggttaagcagggagtcctgtatgagacctgacaggggcagctcacaagaatgcaggcagcttgcaagctcactagaccaaaagaggaaagaaggagaggagagaaaatgcccggagccccagagctgcgcc

SEQ ID NO: 555111 - DNA, 505 bp, Homo sapiens
ggggtaaatggattgagtgaacaaatgggaggtgactgcccagtgtgaattggtccagagtgatggatagatgagaggtgcgtctaagcagagacagaagagcacaggcttacacagaaggcctcaataatccacttgatccctttctagatacctagttcctcccatggtaacaattctgatgacagagcagatgctctggaagaccagctttccagcaagcctttaccatactgatgagggcattagcaatgccatagactggctaagcctggtgttataggactcgccacctccaaggggtgagttatattctggcctaaatctgagccttaaagatgtggcttggattctgctggcagacatacttctctgtacccactkctcagtcctcatcattgcagacttttcttctctcatcagttagtcccaaattatatccttggtcataagggaaccaggaggaaaaagtatatgggtgcaacttgttaatgaagaaccaaat

SEQ ID NO: 555112 - DNA, 1020 bp, Homo sapiens
tcgcgagctcctctagggagagctgcgctttgctcatctccctgtgcgcagaccctgcccgtcctggagttccatgtcactggcgttttctgcatctctgccgactgaggtccgttccgtttcttgcatgaagagcctggtttgggtcccctggcgctcttgtgggactggacgacagtccattgcctgcacactgtgacctccaatgctgcttctgttgggagcacgattcctttgcagcccttcctgctgaggggacactttggaggccttttaagaccaggagcttagcaggcagttgtctatggaragatgggggcctgagaggatgacggggcctttgctgagcatccgtgtgtgtttccaaagcatttgcccctctctgccttcatcctcggctctgcctcccctcgtccatcctttcatgctccatcagcaccccagcctggtcatatttctcacctgctgtggtggggcaggggtgacagaggcacctctaggatctgagcagaaccttgggaacgttgaaagcaggcgagaggcatgaagccgcctccttcaggatgttctactcaaccgtaccgtggaaggatgggcgcaggaaatcttgaacatttgaaaaaaatgtcctttacgtgagggtaggccccacgcctggctctgtgcccacgtggctggccttgactctttcgggggcttcctccagcctccaatagaggatcagcgtgagggagtgagggcttcacgtcagctgctgtgagggatgacgtgagatacgggtgttcttaaagtgctgtttcccttaaaatctggtttttacttacttcgctgaaactggtcaccaaagacaccacatttgcctcattgtacttgagagcggaacaggaacggagaaattaattaattcagttttatagatgaagaaggggagcctgaagaggttcattgttcaacagatacttactgagcactcactcgaggcagggcctcgtcctctgggccctggagactcagcagtga

SEQ ID NO: 555113 - DNA, 1020 bp, Homo sapiens
tcgcgagctcctctagggagagctgcgctttgctcatctccctgtgcgcagaccctgcccgtcctggagttccatgtcactggcgttttctgcatctctgccgactgaggtccgttccgtttcttgcatgaagagcctggtttgggtcccctggcgctcttgtgggactggacgacagtccattgcctgcacactgtgacctccaatgctgcttctgttgggagcacgattcctttgcagcccttcctgctgaggggacactttggaggccttttaagaccaggagcttagcaggcagttgtctatggagagatgggggcctgagaggatgacggggcctttgctgagcatccgtgtgtgtttccaaagcatttgcccctctctgccttcatcctcggctctgcctcccctcgtccatcctttcatgctccatcagcaccccagcctggtcatatttctcacctgctgtggtggggcaggggtgacagaggcacctctaggatctgagcagaaccttgggaacgttgaaagcaggcgagaggcatgaagccgcctccttcaggatgttctactcaaccgtaccgtggaaggatgggcgcaggaaatcttgaacatttgaaaaaaatgtcctttacgtgagggtaggccccacgcctggctctgtgcccacgtggctggccttgactctttcgggggcttcctccagcctccaatagaggatcagcgtgagggagtgagggcttcacgtcagctgctgtgagggatgacgtgagatacgggtgttcttaaagtgctgtttcccttaaaatctggtttttacttacttcgctgaaactggtcaccaaagacaccacatttrcctcattgtacttgagagcggaacaggaacggagaaattaattaattcagttttatagatgaagaaggggagcctgaagaggttcattgttcaacagatacttactgagcactcactcgaggcagggcctcgtcctctgggccctggagactcagcagtga

SEQ ID NO: 555114 - DNA, 1020 bp, Homo sapiens
tcgcgagctcctctagggagagctgcgctttgctcatctccctgtgcgcagaccctgcccgtcctggagttccatgtcactggcgttttctgcatctctgccgactgaggtccgttccgtttcttgcatgaagagcctggtttgggtcccctggcgctcttgtgggactggacgacagtccattgcctgcacactgtgacctccaatgctgcttctgttgggagcacgattcctttgcagcccttcctgctgaggggacactttggaggccttttaagaccaggagcttagcaggcagttgtctatggagagatgggggcctgagaggatgacggggcctttgctgagcatccgtgtgtgtttccaaagcatttgcccctctctgccttcatcctcggctctgcctcccctcgtccatcctttcatgctccatcagcaccccagcctggtcatatttctcacctgctgtggtggggcaggggtgacagaggcacctctaggatctgagcagaaccttgggaacgttgaaagcaggcgagaggcatgaagccgcctccttcaggatgttctactcaaccgtaccgtggaaggatgggcgcaggaaatcttgaacatttgaaaaaaatgtcctttacgtgagggtaggccccacgcctggctctgtgcccacgtggctggccttgactctttcgggggcttcctccagcctccaatagaggatcagcgtgagggagtgagggcttcacgtcagctgctgtgagggatgacgtgagatacgggtgttcttaaagtgctgtttcccttaaaatctggtttttacttacttcgctgaaactggtcaccaaagacaccacatttgcctcattgtacttgagagcggaacaggaacggagaaattaattaattcmgttttatagatgaagaaggggagcctgaagaggttcattgttcaacagatacttactgagcactcactcgaggcagggcctcgtcctctgggccctggagactcagcagtga

SEQ ID NO: 555115 - DNA, 640 bp, Homo sapiens
tctagatatactctagaaaactaatgaagctttgtcataaaagagaatactaatatttttctattgtttcttaatactccattttaagatrttagtaattaaggcccaagttctgatgatactgataacttacatggccctaaaatagttgttcttgctactaatttgtgcacttgtagagggcaatgatccatgatgatatgtgaatctcatctcttcaccagaaaagcaagtacactagtgaatatttaagatgctccatttgtaagtagggtactaggattccttttttccagaaaaactttgcttcaccatttcttcccctctactttcaagaagggaagcagaaagctttgccatttttgaggacatttctaggactgaaaattccccaatgggctcagaatatagaaattattatttaatgacatttgtgcagttttatcaagtattttgataaaaaaatataatactccagggactactttaaaacattagaagtactgccttcattttggagtggataaccaccattaataaaaaaaggccgggcgcggtggctcacgcctgtaatcccagcactttgggaggccaaggaagccggatcaactgaggtcaggagtttgagaccagcctggcc

SEQ ID NO: 555116 - DNA, 585 bp, Homo sapiens
ctttcagggttcagagcccaccggaaccggaagccgatctgccgcgcctggccctcctcccaccgctgactggctgtaaaagccatccgtctaccccctcgtcccgccccgcttccgtctttagggaccgtaaaaaacaccccacatacagcagcagcagctcaaggcaccgttagctacgtgcggccccggcgtttccgcgaagggcggcacgggcggggcggkgcttgttctcccgggccccacttaccctacccgggaaggagcacagaaaaaatgtaaaaactcgtttagtttgaaaaatcaatgtagaatattaaattcaccaaacacagatagatcagatctacataaaaatatgtcttaatatcttagaattttcctttactccaaaaaaccccatatatatatgtttctcctttataagcttagagattgctttggtggtcaagtgcagggcggctgggggaggtaagaccttcaggaaggccatatcccggacaagacccagaagggaagcccccagagccaagggtaggagggccccacccgggtctcagccactcacttctccagggcggatcc

SEQ ID NO: 555117 - DNA, 585 bp, Homo sapiens
ctttcagggttcagagcccaccggaaccggaagccgatctgccgcgcctggccctcctcccaccgctgactggctgtaaaagccatccgtctaccccctcgtcccgccccgcttccgtctttagggaccgtaaaaaacaccccacatacagcagcagcagctcaaggcaccgttagctacgtgcggccccggcgtttccgcgaagggcggcacgggcggggcggtgcttgttctcccgggccccacttaccctacccgggaaggagcacagaaaaaatgtaaaaactcgtttagtttgaaaaatcaatgtagaatattaaattcaccaaacacagatagatcagatctacataaaaatatgtcttaatatcttagaattttcctttactccaaaaaaccccatatatayatgtttctcctttataagcttagagattgctttggtggtcaagtgcagggcggctgggggaggtaagaccttcaggaaggccatatcccggacaagacccagaagggaagcccccagagccaagggtaggagggccccacccgggtctcagccactcacttctccagggcggatcc

SEQ ID NO: 555118 - DNA, 644 bp, Homo sapiens
acaggcatgcgccaccatgcctggctaacttttttgtattttagtagagacggggtttctccgtgttagtcaggctggtctcgaacttcagacctcaggtgatctgcctgcctcagcctcccaaagtgcagggattacaggcgtgagccaccgcgcccggccattttaatttttttttttttttaatagagacagagtctcactatgttgcccaggctggttttgaactcctgagctcaagcaaccctcycagctcagccttccaaagtattgggattactggcgtgagccaccatgcctggcctacagggctgtggctggcagaggcacacatgcattgttagagaagccagagacacacacacagcagatgcggcggacagggactggctgggaagcggggtggggagcagagatggcttctagagaagacatcagatggtgcctgtctgaggagggagcgctgggttgacacctggaggggacaaggggccaggtggaccttgtgaagaaaccaaaggaagctcgacttgctggagccgagcaagtgaaggagaagggggcccagaggaggctgtgggcagaggacagcgggcagcaattggacctcttagccccatggccttggggaggggtctgcgctt

SEQ ID NO: 555119 - DNA, 644 bp, Homo sapiens
acaggcatgcgccaccatgcctggctaacttttttgtattttagtagagacggggtttctccgtgttagtcaggctggtctcgaacttcagacctcaggtgatctgcctgcctcagcctcccaaagtgcagggattacaggcgtgagccaccgcgcccggccattttaatttttttttttttttaatagagacagagtctcactatgttgcccaggctggttttgaactcctgagctcaagcaaccctctcagctcagccttccaaagtattgggattactggcgtgagccaccatgsctggcctacagggctgtggctggcagaggcacacatgcattgttagagaagccagagacacacacacagcagatgcggcggacagggactggctgggaagcggggtggggagcagagatggcttctagagaagacatcagatggtgcctgtctgaggagggagcgctgggttgacacctggaggggacaaggggccaggtggaccttgtgaagaaaccaaaggaagctcgacttgctggagccgagcaagtgaaggagaagggggcccagaggaggctgtgggcagaggacagcgggcagcaattggacctcttagccccatggccttggggaggggtctgcgctt

SEQ ID NO: 555120 - DNA, 521 bp, Homo sapiens
atttgttttgttgggaattacgatacatagcatgggatttaacagggaggatracccggaaacagattctagttagaacacaagttatactgcagtggttataaagtgctcagggtttcacaggagaaataagttttatcttaatgggaaatgaggaaatgcatgaacaaaggtcctatttaagtttggacttaaaagatggatagatgatctaagaagaaggaagaggggagggcaggggcaggagcgcagacgggcgcaggggcaggaacgcgaggggcagatgtggaaatactacctggtcctgctgggtttggtgtggagcagactctgagtggtgcgagatgaagcttgaggctggtgtgacaaatgaggccacgtttggaatagcagcttgaatttattgagtcacattttgtggtacagatgattgaagggcagagcagtggagagggataatgctttggtaacatattgactagactggaggaggggcgaaggaaggagcccattagtagggc

SEQ ID NO: 555121 - DNA, 521 bp, Homo sapiens
atttgttttgttgggaattacgatacatagcatgggatttaacagggaggatgacccggaaacagattctagttagaacacaagttatactgcagtggttataaagtgctcagggtttcacaggagaaataagttttatcttaatgggaaatgaggaaatgcatgaacaaaggtcctatttaagtttggacttaaaagatggatagatgatctaagaagaaggaagaggggagggcaggggcaggagcgcagacgggcgcaggggcaggaacgcgaggggcagatgtggaaatactacctggtcctgctgggtttggtgtggagcagactctgagtggtgcgagatgaagcttgaggctggtgtgacaaatgaggccacgtttggaatagcagcttgaatttattgagtcacattttgtggtacagatgattgaagggcagagcagtggagagggataatgckttggtaacatattgactagactggaggaggggcgaaggaaggagcccattagtagggc

SEQ ID NO: 555122 - DNA, 541 bp, Homo sapiens
actgagtgacatggtacaagttaatttctctgtgtctcgttttcctcatatatggaacatgggtagtaacagcacttatcccctagagctgttgagagtaggaaatgaatatgtgattaggagatttcttggtacatgttgagaaaagtattaatagttgttggtgttgatgttgttagcatactttctattactataaaatgtatcttattttatttcttaggatagatgattttggtaaatgaacacgatttatttttacaaagaaatccaattatttttcatttagtttctcacttaatacataatatataaaaattattctcttgcatgtaatttaaaaatcactatgttcctaagcagtttaggctttaaacaccctattataattaaggagctgtctttgtctgtttgtgttgttataacaggatgcccaaaactaagtaatttataaagaacagaaatktattttcttacagttctagaggctgagaagtccaagatcaacgcactggtaggttcacttgtctggtgaggattg

SEQ ID NO: 555123 - DNA, 1279 bp, Homo sapiens
cctggctatgtgaatcttttgctcttaccagattggtctaatttttgtccctccataaggtcttgtgaatacagactctgagctatgctcacaccatttcctctgcccagaatatcctctcaattcattgtacattctgctcccacttgaaggttcagtttaatgtggctgaaaatccattatttttatttttcagggaaagcttgctatttgttatgtatatggaaggtaaaggagttgatatgtggggcataggaagtgggatcttgaacttcaaaccttcctctatctagttgactacttgaaataccaataatctaccaagaatgaacaaaacatgtgkaatggcttccgccctaggattgatcagtttagtctatactgaccttggaaactctgattttatattcattatttggtaataaattgttaattgctctgtgttataagattacttcttaagcgtgctttccttgtctctgctgctagatttttagctcctttggggagcagagcccatattctctaccttcttttgtctcctttgtttagaactatactttgcacataatatgttattatatgcttaaaatataatattatatataatataaaaataatatagtattaggtactcagttggcattgaataaataataatatcaaaacctataaatttctaccataattgctttgtaattataaaataactttgttctttcttaacatggccttacatttttattgtgatctaagaggactagtctgaatttatccaaacatgtcacataaaatttgaaaatatatagttaaaataatttactgcattattgtgagtatatgtttaatgcaacacttcatatgttttcttctctgtgcatatcatcaattacaagcgtttaaaaaactaatataattaataaatgatttccgggagataaaaatgacagtgacagcctaaaaatgactaaaatcgtttttagccaagtcttttcccaagttaatacaaattggtgttttttatgcagagggtgccagaggatgtctgggttcctttagatgattccctgatctgactctgctttcagttattttctgacttaacaatgtcagaggcgacagccctggacatcatgtgtgaaacaagcatcatcactaacaaacgatgaacacgattcaaatgatcaggaaagcaccttccatagaactcactttaatggactgaaaactaattttgcaagtgctgcttttcttactgttcacttcaggggcaagagca

SEQ ID NO: 555124 - DNA, 1279 bp, Homo sapiens
cctggctatgtgaatcttttgctcttaccagattggtctaatttttgtccctccataaggtcttgtgaatacagactctgagctatgctcacaccatttcctctgcccagaatatcctctcaattcattgtacattctgctcccacttgaaggttcagtttaatgtggctgaaaatccattatttttatttttcagggaaagcttgctatttgttatgtatatggaaggtaaaggagttgatatgtggggcataggaagtgggatcttgaacttcaaaccttcctctatctagttgactacttgaaataccaataatctaccaagaatgaacaaaacatgtggaatggcttccgccctaggattgatcagtttagtctrtactgaccttggaaactctgattttatattcattatttggtaataaattgttaattgctctgtgttataagattacttcttaagcgtgctttccttgtctctgctgctagatttttagctcctttggggagcagagcccatattctctaccttcttttgtctcctttgtttagaactatactttgcacataatatgttattatatgcttaaaatataatattatatataatataaaaataatatagtattaggtactcagttggcattgaataaataataatatcaaaacctataaatttctaccataattgctttgtaattataaaataactttgttctttcttaacatggccttacatttttattgtgatctaagaggactagtctgaatttatccaaacatgtcacataaaatttgaaaatatatagttaaaataatttactgcattattgtgagtatatgtttaatgcaacacttcatatgttttcttctctgtgcatatcatcaattacaagcgtttaaaaaactaatataattaataaatgatttccgggagataaaaatgacagtgacagcctaaaaatgactaaaatcgtttttagccaagtcttttcccaagttaatacaaattggtgttttttatgcagagggtgccagaggatgtctgggttcctttagatgattccctgatctgactctgctttcagttattttctgacttaacaatgtcagaggcgacagccctggacatcatgtgtgaaacaagcatcatcactaacaaacgatgaacacgattcaaatgatcaggaaagcaccttccatagaactcactttaatggactgaaaactaattttgcaagtgctgcttttcttactgttcacttcaggggcaagagca

SEQ ID NO: 555125 - DNA, 1279 bp, Homo sapiens
cctggctatgtgaatcttttgctcttaccagattggtctaatttttgtccctccataaggtcttgtgaatacagactctgagctatgctcacaccatttcctctgcccagaatatcctctcaattcattgtacattctgctcccacttgaaggttcagtttaatgtggctgaaaatccattatttttatttttcagggaaagcttgctatttgttatgtatatggaaggtaaaggagttgatatgtggggcataggaagtgggatcttgaacttcaaaccttcctctatctagttgactacttgaaataccaataatctaccaagaatgaacaaaacatgtggaatggcttccgccctaggattgatcagtttagtctatactgaccttggaaactctgattttatattcattatttggtaataaattgttaattgctctgtgttataagattacttcttaagcgtgctttccttgtctctgctgctagatttttagctcctttggggagcagagcccatattctctaccttcttttgtctcctttgtttagaactatactttgcacataatatgttattatatgcttaaaatataatattatatataatataaaaataatatagtattaggtactcagttggcattgaataaataataatatcaaaacctataaatttctaccataattgctttgtaattataaaataactttgttctttcttaacatggccttacatttttattgtgatctaagaggactagtctgaatttatccaaacatgtcacataaaatttgaaaatatatagttaaaataatttactgcattattgtgagtatatgtttaatgcaacacttcatatgttttcttctctgtgcatatcatcaattacaagcgtttaaaaaactaatataattaataaatgatttccgggagataaaaatgacagtgacagcctaaaaatgactaaaatcgtttttagccaagtcttttcccaagttaatacaaattggtgttttttatgcagagggtgccagaggatgtctgggttcctttagatgattccctgatctgactctgctttcagttattttctgacttaacaatgtcagaggcgacagccctggacatcatgtgtgaaacaagcatcatcactaacaaacgatgaacacgattcaaatgatcaggaaagcaccttccatagaactcactttaatggactgaaaactaattttgcaagtgctgcttttcttactgttcacttcaggggcaasagca

SEQ ID NO: 555126 - DNA, 638 bp, Homo sapiens
aatgattttcagcagaacatgagacatgtaaccgatcatgaactgccattaagtgcaaaatatttgaaagattaatatatgmctttcacttgattctaaggacattggttacataacagctgcatttggtcaggtgattcttcagagaatatgttcaagaactgtgtgtttgaatttagcttaataaaaaattagttacatatgttaaaatatagatagattatagataaacaaaaaaattaaggtagaaaatagtgcaaattaaagtgttttttcccttctctttccatgtttctaattttatttactttatttcttttgaaactgaaatatctagaataaaatttgtttaagttaatgcataagcacacaaaattatttgggccagagagaaaagttgtgagggcctgtagttaccttatatatatgcttgtatgctaaacttctgctcctaatagtgtgttgctccaatgtacttcttttttttttaattttattattattatactttaagttttagggtacatgtgcacaatgtgcaggtttgttacatatgtattcatgtgccatgttggtgtgctgcacccattaactcgtcatttagcattaggtatatctcctagtgctatccctccccc

SEQ ID NO: 555127 - DNA, 628 bp, Homo sapiens
tgtattttttaattagaaaaactctcctcttaagcctgagatacacagatctgggcctgggtcttgaattaatttagtcagtacctttagaagatgaactgacctagaacgcaagtatcattgaatacacatttttaaaaggtcattattaagaaggataaaaatattttatctttttcactataaaccagtgacaatgaaaactacgcatcagaagcatctgagaaatttaaaacatacaggggtacctaagccyctctcaaactaccgaaacagagtatctgggaatgggcacagttatttgtatagaagcacaactgcgcctagggttaagaaccacactaaagagccaacccttaactacaaagaccttaaaaagcaacttgctggacgtgccctcttcaggtagtttgacagttgaaagcagaaatacattatccataaagacaaactattaaaaatccatgatctcaaacaatacactaaaattctttaaaaaaatggaagtagactcactctttttctttgcactccttttcaacctgggtcaggtaatcccaccttgtgttttccactttctttctacacaatataagaactgtatcagtcttgacctggaagaaaagca

SEQ ID NO: 555128 - DNA, 1488 bp, Homo sapiens
aggttctccgtatagccctgttcatttcttttttttttttttcttttttcttttccttttttttttttttttttttttgagacagagtctcgctctgtcgccaggctggagtgcagtggtgcgatcttggctcactgcaacctccgcctcccaggttggagcaattttcctgcctcagcctcccgagtagctgggactacgcaccaccacacccagctaatttttgcatttttagtagagagagggtttcaccatgttggccaggatggtctcgatctcttgacctcgtgatctgcccacctcggcttcctaaagtgctgggattacaggcatgagccactgtgcccatccaagccctgttcattttcatatcactcctgccctacctccctcaccgggtgatggcaaatgtcagagatagtggggaagaaagcactgtataaacgccatgtatcacatagctatcctcttttttttttttttttgagatggagtcttgctctgtcaccaggctggagtgcagtggcacagtcttggctcactgcaacctctgcctcctgggttcaagcgattctcctgcctcagcctcccaaatagctgggattatgggcatgcgccaccatgcccagctaattttgtatttttagtggagatgggggtttcaccatgttggccaggctggtcttgaacccttgacctcgtgatctgcccgcctcggcctcccaacgtgctgggattacaggcatgagccactgcgcccggcccacagctatcctcttgaactctacagaggcatgtcacatacctaggcctggcaccaagaatgtaatggaaaagaggatgtccctgcatcagaagagctcacaaactggggttacagaagtataaacagacaaactattattattagtagtagtattttttgagagggagtgttactctgttgcccaggctggagtgcagtggtgtgatctcagctyactgcaacctccgcctcccaggttcaagcgatcctcctgcctcagcctcccgtgtctgggactacaggtgcgcgtcaccatgccagggtaatttttgtatttttagtagagactgggttttgtcatgttggtcaggctggtctcgaactcctgacctcaagtgatccgcccaccttggcctcccaaagtagtgggattacattgtgcctggccaacagacaaattataaaactgtacctgcagcaagagaagtatgtgtgcagaactggaaacggaaccgaagaagtgcctagtttttggggaagggggttgtcaaggaaggcttcccggaggacatgactattaatctgggttctggaggtggaataagagttttccctgcaaagggaaagaaggctgcaagtgttaagccatggactctggagagaacctagtcctttttgaggactgtgagtggtgtggccaaaagacagaatgcaagtgagccagtggcaggagggcaggcgga

SEQ ID NO: 555129 - DNA, 551 bp, Homo sapiens
tatgttttgttttgtatatcttatcacaattttgaaaagcacattagaaaaaataataacaggttccttayaagctctcaactctatcctgtattctgagaggcttttagaaaaattcaatgataccccctaacttttacttttttaggagaagagaatagtaggaggacagaaggagaagtttctttccagaacactgcaaatccaggacctattgattccataattctatagccatgtagatggacaggaagaccaagaataatggattctttttaagcttttgcttcctcttgtgggggaagctaaaaaggcaaccctccatgtgatggggcttttatagagtaggagtaggatactctttgatagagtcagagtatggagtatgagtggagaggatgcagacaaagtggggactttaccctactctagggcttcacatttatgggaactgaagagcagaagctctttcctcctgttacaagaaaaaagataaataataatgttaaaagtagatgccatcagtgttttcaagatggactatagccata

SEQ ID NO: 555130 - DNA, 520 bp, Homo sapiens
aacatgtttatattttattcattatattatattcattatattatattcattatatctaaacttatgcttctattgctaccaatcacctacagaaagaacttcaagctcttcagcatgtctatggcccctgtcatctggttccaccttttctacccagatttccctcatcttttttcagtaccaacacccttcctggtatccatctcttctacctcccaaatgtgttatactaactcccaactctgcatttgctggagctatctgcctttttctccctctgaacagattccccttcccccgccctctgctttttcaaattatgttgcwactcaagctcctggcaaatgactgagttgggaagtcaagaagctatgcccagactcagtgcttgaactcaataatgtagtatgtttctacatcctgtcattatattttagaaaaacaatttagtaacagatggtgaatgcttttcatttcttagctatacacttaacaattttcttttggcctagcttattag

SEQ ID NO: 555131 - DNA, 590 bp, Homo sapiens
ggatattgtgttaagtgaaataagccaggaacagaaagttaaacacagcatgttctcaatcacgtgggagctttaaaaagtggatttcatagaagtaaaaagtagaagagaggatactagagactgggaaggkcaagggaaggaagggatagggagagatttgttaaagtacacaaaactgcagctagataggaggaagaagttctagggttctctagcactgtaagatgactatagctaacaagaatatattatatagcttcaaatgacggcaaggaggatattgaatgttcccaacacaaacaaatgataaatgtttgagatgatggatgtgctaatcactctgatctgaccactatacattatatacatcaaaacatcactatgcacccatgaatacatacaattagtttttgccaatttacaaaaataaaatttgtaaattaaaaacaaaaacaagtaatggggaaagcaaaaaaaaggaaaaagataaatcttagaagccacatgagactggtgtcagtctctacaaagctggaagtgggtaaaatctgtcctcaccttctccagtttccctctctgctcttctt

SEQ ID NO: 555132 - DNA, 509 bp, Homo sapiens
gccaacatggtgaaaccccgtctctactaaaaatacaaaaattagctgggagtggtggtgcatgccagtagtcccagctatgcgggaggctgaggcaggagaattgcttgaacccaggaggtggaggttgcagtgagccgagattgtgtcactgcactccagcctggtgacagagcaagactccatctcaaaaataaattwaaaaaaacaaacttggtagtttgacatattcttgacatattccatttctttttaattttataaaaaatacattcccaaatcatgtgatttttctattacatatgcttaagataactattttcaaagtaaagaacaaaatcaagatatatgatgagggtttatgtttgcctttagtagtattaaataggattccctagtaacactcgttatcattattaatataatactagatttcctaaatctttcctagacaatagggaacataagtaatataaaatcaattctaccattttgtgctaagccttgta

SEQ ID NO: 555133 - DNA, 605 bp, Homo sapiens
gcgggaggatcgcttaagcccaggagttagagaccagcctggcaacatggcaaaacgccctctcaaccaaataaaaaaaaattagccgggcaggatggcgcgtgcctgtggtcccagctacrggagaggcgggggcggggggcgggatggcttgggtccaggaggtgaagcgtttgcattaggtctccggggattgcagcagcttgattctaggggatgacaagaaagggatagaaacgtgatctttaactagtcacataagtggtatgatcatatatatctgtcccatagttaagaggcatcacccaacgtgaaactaaaatatgaaatgccacagtttataaattaatgtaaaataagttatgatacttctgtgatagtgtttgttatgcagccaataaaaatcacattttatataaaatttagttgtatggaatatgcttaagcaacaaaaaagaagtattttgaaatgtgatattttaacagtgggctgtaacagtgcaattatgaatgatttttattttattcttttgtatactttgcaaaatttgtaaattaagtatataaaactttaataagcagaaaaattttgaaacgcagtaaga

SEQ ID NO: 555134 - DNA, 605 bp, Homo sapiens
gcgggaggatcgcttaagcccaggagttagagaccagcctggcaacatggcaaaacgccctctcaaccaaataaaaaaaaattagccgggcaggatggcgcgtgcctgtggtcccagctacgggagaggcgggggcggggggcgggatggcttgggtccaggaggtgaagcgtttgcattaggtctccggggattgcagcagcttgattctaggggatgacaagaaagggatagaaacgtgatctttaactagtcacataagtggtatgatcatatatatctgtcccatagttaagaggcatcacccaacgtgaaactaaaatatgaaatgccacagtttataaattaatgtaaaataagttatgatacttctgtgatagtgtttgttatgcagccaataaaaatcacattttatataaaatttagttgtatggaatatgcttaagcaacaaaaaagaagtattttgaaatgtgatattttaacagtgggctgtaacagtgcaattatgaatgatttttattttattcttttgtatactttgcaaaatttgtaaattaagtatataaaactttaataagcrgaaaaattttgaaacgcagtaaga

SEQ ID NO: 555135 - DNA, 605 bp, Homo sapiens
aaccataccttacagatctttcatttaaatgcatttcatgtagcatttaagcgaattccatgggggaaaaaaggggcttttgttatagtaagttagctattacaataataataaaaatattagctgtattgcaatctaataatagctaatgataattttgtcacttactgaactcagacagcatgctaagtgctgtttatttttccatcaaatccttacaaagatcctgggttagatattatcccattttaccaataaggaaacagacaatgagtgtctgagctagacctagatctttaaacctaaatctgtctgagaccagagcytgtgcttccagttacatatatattctgatgattcctaaagttttatctccaggtcagacctgtttctagagcctctaaattctgtttgtaactgtccataagacagaccatctaaatttccccaggcatgtcaaaagtagccagaccaaaactgaatttatcttctcaccaaacctgttcttcctcttccagattttggtaacagtgttgctatcgattcgggcacccaaggtagaagccttggagttatagagaggagcatctgcaaagatgcaaagt

SEQ ID NO: 555136 - DNA, 504 bp, Homo sapiens
taccactgcactccatccagcctgggtgacagagcaagactccatctcaaaaaaacagaaaaaagaaaaactcgtccttggagcattgtaggctttttatctttcttatgatttcctgaatgtgtttgctggtctggactctgatgcaagagggtggagagagaaatgtggtggccttgaggcacaggactcaggataatggatcagataagatgttctaggttcatccacctgctggtatgtaccaaaagcaaggctaggaatgtgtcattacagacaggacgggcagaacctagctgcacggttgaggaggggacaggaaaagactgctttttcatcagaggacttcaaagggctcagcctggcytgagggtgaaacaaggtggccaaaaagagtggctcctacttcaggtctgagaatcaaaaaggagagtgatgaaaggatctggaaggagctgtgaaatgtgttacactttgacctcaatttcctcaactgtgtatatt

SEQ ID NO: 555137 - DNA, 357 bp, Homo sapiens
aaaaaggctcacagaggtaccatatcagtgggagggtgtgtaagggaggatcagggggttgattgaaaatctggctggtcgsgatggctcacgcttgtaatcccagcacttgggaggccgaggcaggtggatcacctgaggtcaggagttcaataccagcctgaccaacatggtgaaaccctgtctctactaaaaatataaatagccgggtttggtggcgtgctcctgtagtcccagctgctcaggaggctgaggcatgaaaatcgcctgaactcgggaggtggaggttgtggtgagccaaaattgcaccattgtactccagcctggatgacagagtgagactctgtctcaaatata

SEQ ID NO: 555138 - DNA, 357 bp, Homo sapiens
aaaaaggctcacagaggtaccatatcagtgggagggtgtgtaagggaggatcagggggttgattgaaaatctggctggtcgggatggctcacgcttgtaatcccagcacttgggaggcygaggcaggtggatcacctgaggtcaggagttcaataccagcctgaccaacatggtgaaaccctgtctctactaaaaatataaatagccgggtttggtggcgtgctcctgtagtcccagctgctcaggaggctgaggcatgaaaatcgcctgaactcgggaggtggaggttgtggtgagccaaaattgcaccattgtactccagcctggatgacagagtgagactctgtctcaaatata

SEQ ID NO: 555139 - DNA, 357 bp, Homo sapiens
aaaaaggctcacagaggtaccatatcagtgggagggtgtgtaagggaggatcagggggttgattgaaaatctggctggtcgggatggctcacgcttgtaatcccagcacttgggaggccgaggcrggtggatcacctgaggtcaggagttcaataccagcctgaccaacatggtgaaaccctgtctctactaaaaatataaatagccgggtttggtggcgtgctcctgtagtcccagctgctcaggaggctgaggcatgaaaatcgcctgaactcgggaggtggaggttgtggtgagccaaaattgcaccattgtactccagcctggatgacagagtgagactctgtctcaaatata

SEQ ID NO: 555140 - DNA, 611 bp, Homo sapiens
gtgtattgtaactatgtgggcacttcctagaatgacattctttacaaagcattaatgatacagaaagtataaacctgactcagtaagtggtacctcatagaaaacctcaacattgctcatgtaacccactgagcaggaaataaatgcaccgcaggaaaatggaagcttcactctaacctatgttcttaattctgagtatgttttaaagaaaagtaaaaatgaacagaaaatttttactttatcacaaaaattacagagtgctaaaatgtcacaaattactgccctactgatttggaattgtgaaaaatcyagattttttttttctttgttgaagtttgtatttgatccagtatagaaagaagtcattctcctttaaattcttttcaacccgtatagcatggtcagaaataaggcttagtttagtatctatatgtctttttttttctttttgccatggagttgcactctgtcacccaggctggactgcagtggtgtgatcttggctcactgcaacctctgcttcctgggttcaaggatccccctgcctcagcctcccaagtaggtgggactacaggcatgcaccaccacacccaactaatttttgtattttt

SEQ ID NO: 555141 - DNA, 506 bp, Homo sapiens
gtgctgtcttcaagatagtgagttctcacaaaatctgttcatttaaaagtgtgttgcacctcctccccttgctcctgcttcaccttctgccatgattgtaggcctcctgaggcctccccagtagtggatgccactttgcttcctgtacagcccatagaaccatgagccaataaataaacctcttttctcataaattactcactttcagggatttctttatagcaaagcaggaatggtctaacacacctccattgtctagaaaactaaggataaaataaacaccctatgatttgaaataatcatgtgtctatgtcaaaccttccaattttgtctcccataattcactaaacaaactatgctccagtcagaaaaactgtgctatytgctgataccaaatatgtttttttccttctccagcaataatcctatagtcaagagatgccttgggatgacactataacagctgggatatcaaggggctatttgtctttaccaagtgtctcctg

SEQ ID NO: 555142 - DNA, 379 bp, Homo sapiens
aaaaaagactcgcttgatcattgctggctttgaagatagaaggggaccatagccaaggaatgctggcagcttctggaagctggaaaacagagcaaaatagattaagaaaggagcacagctctgctgaataattaacacaccttaattacagcccttaattattgggcttctaacatccagaaatgaaagataataaatctatcttgtttaaagccactagatttgtggtcatctgtaatagcagcataggaaactagcacatcccccrtccccaagaaccaattttggtcaccacggtggcaattctgccaccactgagaatgtatagtctaactcagtcattgtaatctcactcctttcccaggtattaatttaaaag

SEQ ID NO: 555143 - DNA, 575 bp, Homo sapiens
gtttacagtcccaccaacagtgtaaaagtgttcctatttctccacatcctctccagcacctgttgtttcctgactttttaatgactgccattctaactggtgtgagatgttatctcattgtggttttgatttgcatttctctgatggccagtgatggtgagcattttttcatgtgttttttggctgcataaatgtcttcttttgagaagtgtctgttcaaacaaatttacaagaaaaaaacaaccccatcaaaagtgggcaaaggacatgaactttttacatttttaaaattgtataaatgaaacctttttaratgacattttccattatgtactccaagttgtcttttcattattctgttacctcattagaggtagtatggaaataaagtgctttcccctcaaatagtataaatgtaattttatttttttagaaaaacaaaacactatggagtcatggcatttataatgaagtaatcaaatattccaattaaatattcaggtaaccaaatattccagttaaatattcaggtaaccaaatactccaataaaatttgactgattttataggacaca

SEQ ID NO: 555144 - DNA, 575 bp, Homo sapiens
gtttacagtcccaccaacagtgtaaaagtgttcctatttctccacatcctctccagcacctgttgtttcctgactttttaatgactgccattctaactggtgtgagatgttatctcattgtggttttgatttgcatttctctgatggccagtgatggtgagcattttttcatgtgttttttggctgcataaatgtcttcttttgagaagtgtctgttcaaacaaatttacaagaaaaaaacaaccccatcaaaagtgggcaaaggacatgaactttttacatttttaaaattgtataaatgaaacctttttaaawgacattttccattatgtactccaagttgtcttttcattattctgttacctcattagaggtagtatggaaataaagtgctttcccctcaaatagtataaatgtaattttatttttttagaaaaacaaaacactatggagtcatggcatttataatgaagtaatcaaatattccaattaaatattcaggtaaccaaatattccagttaaatattcaggtaaccaaatactccaataaaatttgactgattttataggacaca

SEQ ID NO: 555145 - DNA, 575 bp, Homo sapiens
gtttacagtcccaccaacagtgtaaaagtgttcctatttctccacatcctctccagcacctgttgtttcctgactttttaatgactgccattctaactggtgtgagatgttatctcattgtggttttgatttgcatttctctgatggccagtgatggtgagcattttttcatgtgttttttggctgcataaatgtcttcttttgagaagtgtctgttcaaacaaatttacaagaaaaaaacaaccccatcaaaagtgggcaaaggacatgaactttttacatttttaaaattgtataaatgaaacctttttaaatgacattttccaytatgtactccaagttgtcttttcattattctgttacctcattagaggtagtatggaaataaagtgctttcccctcaaatagtataaatgtaattttatttttttagaaaaacaaaacactatggagtcatggcatttataatgaagtaatcaaatattccaattaaatattcaggtaaccaaatattccagttaaatattcaggtaaccaaatactccaataaaatttgactgattttataggacaca

SEQ ID NO: 555146 - DNA, 575 bp, Homo sapiens
gtttacagtcccaccaacagtgtaaaagtgttcctatttctccacatcctctccagcacctgttgtttcctgactttttaatgactgccattctaactggtgtgagatgttatctcattgtggttttgatttgcatttctctgatggccagtgatggtgagcattttttcatgtgttttttggctgcataaatgtcttcttttgagaagtgtctgttcaaacaaatttacaagaaaaaaacaaccccatcaaaagtgggcaaaggacatgaactttttacatttttaaaattgtataaatgaaacctttttaaatgacattttccattatgtactccaagttgtcttttcattattctgttacctcattagaggtagtatggaaataaagtgctttcccctcaaatagtataaatgtaattttatttttttagaaaaacaaaacactatggagtcatggcatttataatgaagtaaycaaatattccaattaaatattcaggtaaccaaatattccagttaaatattcaggtaaccaaatactccaataaaatttgactgattttataggacaca

SEQ ID NO: 555147 - DNA, 579 bp, Homo sapiens
tgtcatgcattcctgtcatatctttacatgactgaccacttcttgtcactcaggtcttatctcaaatgtcacctcctctggcgaggcatactyagaccacacagtctaattaccttcctcctcctaatacccaggttagtctttcacagttaatctgttgtatttcttctaagcacatctcagcatctgaacacatctgttcatttatgtttattatggagtgtccatctccccacactcaaatgtaagcccgtgagcatgaatattgcctttcttcactcaacccagctcctggaaaagtgcctggcacatggaagcctgaaatcagattcttccacagtgtggcacccatttccacctccttgttctgtctctgtttatatgtctgtgctagcttttagtatattacatcttttatttgaacagctatttccaaagaaagtgaggaggagggaaaggaggacatatcaaagtctgggggtggcagggtagaagaaggaatgaatcatttctaaaacacacattcaagttgtgtagttttcagtgtaaaggatttgtgcatttttgttaaaattgacc

SEQ ID NO: 555148 - DNA, 579 bp, Homo sapiens
tgtcatgcattcctgtcatatctttacatgactgaccacttcttgtcactcaggtcttatctcaaatgtcacctcctctggcgaggcatactcrgaccacacagtctaattaccttcctcctcctaatacccaggttagtctttcacagttaatctgttgtatttcttctaagcacatctcagcatctgaacacatctgttcatttatgtttattatggagtgtccatctccccacactcaaatgtaagcccgtgagcatgaatattgcctttcttcactcaacccagctcctggaaaagtgcctggcacatggaagcctgaaatcagattcttccacagtgtggcacccatttccacctccttgttctgtctctgtttatatgtctgtgctagcttttagtatattacatcttttatttgaacagctatttccaaagaaagtgaggaggagggaaaggaggacatatcaaagtctgggggtggcagggtagaagaaggaatgaatcatttctaaaacacacattcaagttgtgtagttttcagtgtaaaggatttgtgcatttttgttaaaattgacc

SEQ ID NO: 555149 - DNA, 579 bp, Homo sapiens
tgtcatgcattcctgtcatatctttacatgactgaccacttcttgtcactcaggtcttatctcaaatgtcacctcctctggcgaggcatactcagaccacacagtctaattaccttcctcctcctaatacccaggttagtctttcacagttaatctgttgtatttcttctaagcacatctcagcatctgaacacatctgttcatttatgtttattatggagtgtccatctccccacactcaaatgtaagcccgtgagcatsaatattgcctttcttcactcaacccagctcctggaaaagtgcctggcacatggaagcctgaaatcagattcttccacagtgtggcacccatttccacctccttgttctgtctctgtttatatgtctgtgctagcttttagtatattacatcttttatttgaacagctatttccaaagaaagtgaggaggagggaaaggaggacatatcaaagtctgggggtggcagggtagaagaaggaatgaatcatttctaaaacacacattcaagttgtgtagttttcagtgtaaaggatttgtgcatttttgttaaaattgacc

SEQ ID NO: 555150 - DNA, 579 bp, Homo sapiens
tgtcatgcattcctgtcatatctttacatgactgaccacttcttgtcactcaggtcttatctcaaatgtcacctcctctggcgaggcatactcagaccacacagtctaattaccttcctcctcctaatacccaggttagtctttcacagttaatctgttgtatttcttctaagcacatctcagcatctgaacacatctgttcatttatgtttattatggagtgtccatctccccacactcaaatgtaagcccgtgagcatgaatattgcctttcttcactcaacccagctcctggaaaagtgcctggcacatggaagcctgaaatcagattcttccacagygtggcacccatttccacctccttgttctgtctctgtttatatgtctgtgctagcttttagtatattacatcttttatttgaacagctatttccaaagaaagtgaggaggagggaaaggaggacatatcaaagtctgggggtggcagggtagaagaaggaatgaatcatttctaaaacacacattcaagttgtgtagttttcagtgtaaaggatttgtgcatttttgttaaaattgacc

SEQ ID NO: 555151 - DNA, 456 bp, Homo sapiens
tgttagactaataaaaggccacaagaataggattatgggaggaacctgaactcttctgagatgtaggcatagtttctctaatctcttactgctctggagtcatgtggccagaagtcacaagatctctgacttctccaattgctcctatagataacatcattattgtagaacctaagattggtttttgagtactttttcagatgaatcccaccaaaacttgtgactcatgactcaactggccccatggcyccacccagaggaagactcagcacacaaaggctgttttccacacccctatgattttattcccaaccaatcaacagcatcaattccctagccccctgcccaccaaacagtccataaaaaccctagcctccaagctattagggaggttgagtgatagctccagttctcccacatgggctgaactcatgtcagttaaactctatactgcaa

SEQ ID NO: 555152 - DNA, 661 bp, Homo sapiens
ctgttacccaggttctcactcaggctttgtagtttcakgtatgttggtttacaacatggtttactgaatattttaaacatatcattgggatgaacttctcataaaaaaagattccctttaaaatattactggtctttgacaaggtacttagtcaccccaaagctccagtggagatatatagagagatcaatgttgttttcatgcctgaatatacaacatccaatctgtaggccaaatatcaaggagtaatattgaatttcatgtcttattacttaagaaatgcacttcttgccaggagtggtggctcatgcctgtagtcccagcactttgggaggctaaggcgggtggatgacctgaggtcaggagtttgagaccagcctggccaacatggtgaaaccccatctctactaaaaatacaaaaattagctgagtgtggtcatgcgcgcctgtagtcccagctacttggaaggctgaggcaggaaaattgcttgaacccgggaaaggaggttgcagcaagccaagattgtaccattgcactcccagcccgggtgacaggagtgaaactctgtctcacacacacacacataaaataataaaaataaaaaaataagaaagaaaagaaaagtaatacatttcttaatgctgtagctgccatactgat

SEQ ID NO: 555153 - DNA, 443 bp, Homo sapiens
tttttatttgtcaattataccttaataaagttgaaaaaagaaagtagcataaagaagacaacaaaaagaaagatgataatgcttcrgtcaaattcacctataataaaaattagataaatatgttattctaatatatacatgtggagattaagcttagcttacacagtaaaaccaagctatgtggttcaggtaagaggtagtgtcgtgacatggtcacgaggacacatgtacaacagtggcactacattctgaaaatgtgaaatgaaatatgaattgtcaacaaaactcataggcagagaagaaacaaagtgctttagacctcatcttttcgccattttgtagcaaagaatatttctgggcttgacacaccattgtaaaggttatatgagaggaaacatgtcccaaaacactttcatatttacagagaaaggtgggaagcaacc

SEQ ID NO: 555154 - DNA, 587 bp, Homo sapiens
ctgtggtttcaatttgcatttccttgataattagtgatgttgagcatttttttcatgtgtttgttggccatttgtatatgtcctttagagaattgtttattcatgtccttggcccacttactgatgtgattatttcctttttgcttgctgatttgtttgagttccttgtagattctggatattcatcttttgtcagatgcatagtttgcraagattttttcttactctgtgagttgtctgtttactctgctgattatttcttttgctgtgcagaaagcttaattaactccaatctatttatctttgtttttgttgcatttgcttttgggtgcctggtcataaactctttgcctaaaacatgtctacagggatttttccaatgttagcttctataatgtttattgtttcaggtcttagatttaagtttttgacccatcttgagttgatttttgtatgaggcaagaaacaaagatccagcttcattcttctgcatgtggcttgccaattaattcagcaccatttgttgaataggctgtccttttcccactttatgcttttatttgctttgttgaatatcagttggctat

SEQ ID NO: 555155 - DNA, 597 bp, Homo sapiens
tttcctgttggactagtccttttattattatataatgtccctctttgtctttatcaactgctgttgctttaaagtttgttttgtctgatataagaatagctactcctgcttgcttttggtgtccatttgcatggaatatctttttccacccctttaccttcagtttacatgagtccttatgtgttaggcgagtctcttgaagagagcagatacttagttggtgaaatcttatccatctgccattctgtatcttttaagtggagcatgtaggccatttaaattcaatgttagtattgagatgtgagttactattctattcgtcatgctatttgttgcttgaataccttggatttttttcattgtgttgttattttatagatcctgtgaratttatgctttaaggagattctattttggtatagttttaggatttgtttcaagattttgaactcctttttgcagttattgtaatgctggcttgatagtggcaaattctctcagcatttgtttgtctttaaaagactttatctttccttcatttacgaagcttaatttccctggatacaaaattcttggctgataattattttgcttgag

SEQ ID NO: 555156 - DNA, 633 bp, Homo sapiens
ggttatatgtattgatatttggtttgctataaatttacactgtaaaaaattaaaacattgaacaataaacattaaaataataacttcaaactttcatttcattaaaaactaactttttcatatatttaaaatttctctaaaagagtctgttaaataaatgtktgtattatacagatgaggatatattaaaattttactgtctttcacaaaataacagatgtgtcatactttaacaaaaatatattttataaaaagtattatagatttcaaaacaaaattaatttagtgaaagagtagcattgcttcacatttttacaaatctattaatgtctggcttaataagagacagccggattctcagatttatttctgtgtttaatttgttgtgatatgtttatgaggaaaatctaatatcatgcacatgtattttgaatagggagggatatgttgtactctttttaagtggcagtttttataagttattttcaatgtggaatatgaaaccctataaatcagctttatactattgcattcactttgaataagtctattgtcgatgcatataatactaaatattggctaagagtggaagtaataagatctggtaagtattgctggtggcagaaaaaaaag

SEQ ID NO: 555157 - DNA, 633 bp, Homo sapiens
ggttatatgtattgatatttggtttgctataaatttacactgtaaaaaattaaaacattgaacaataaacattaaaataataacttcaaactttcatttcattaaaaactaactttttcatatatttaaaatttctctaaaagagtctgttaaataaatgtttgtattatacagatgaggatatattaaaattttactgtctttcacaaaataacagatgtgtcatactttaacaaaaatatattttataaaaagtattatagatttcaaaacaaaattaatttagtgaaagagtagcattgcttcacatttttacaaatctattaatrtctggcttaataagagacagccggattctcagatttatttctgtgtttaatttgttgtgatatgtttatgaggaaaatctaatatcatgcacatgtattttgaatagggagggatatgttgtactctttttaagtggcagtttttataagttattttcaatgtggaatatgaaaccctataaatcagctttatactattgcattcactttgaataagtctattgtcgatgcatataatactaaatattggctaagagtggaagtaataagatctggtaagtattgctggtggcagaaaaaaaag

SEQ ID NO: 555158 - DNA, 633 bp, Homo sapiens
ggttatatgtattgatatttggtttgctataaatttacactgtaaaaaattaaaacattgaacaataaacattaaaataataacttcaaactttcatttcattaaaaactaactttttcatatatttaaaatttctctaaaagagtctgttaaataaatgtttgtattatacagatgaggatatattaaaattttactgtctttcacaaaataacagatgtgtcatactttaacaaaaatatattttataaaaagtattatagatttcaaaacaaaattaatttagtgaaagagtagcattgcttcacatttttacaaatctattaatgtctggcttaataagagacagccggattctcagatttatttctgtgtttaatttgttgtgatatgtttatgaggaaaatctaatatcatgcacatgtattttgaatagggagggatatgttgtactctttttaagtggcagtttttataagttattttcaatgtggaatatgaaaccctataaatcagctttatactattgcattsactttgaataagtctattgtcgatgcatataatactaaatattggctaagagtggaagtaataagatctggtaagtattgctggtggcagaaaaaaaag

SEQ ID NO: 555159 - DNA, 633 bp, Homo sapiens
ggttatatgtattgatatttggtttgctataaatttacactgtaaaaaattaaaacattgaacaataaacattaaaataataacttcaaactttcatttcattaaaaactaactttttcatatatttaaaatttctctaaaagagtctgttaaataaatgtttgtattatacagatgaggatatattaaaattttactgtctttcacaaaataacagatgtgtcatactttaacaaaaatatattttataaaaagtattatagatttcaaaacaaaattaatttagtgaaagagtagcattgcttcacatttttacaaatctattaatgtctggcttaataagagacagccggattctcagatttatttctgtgtttaatttgttgtgatatgtttatgaggaaaatctaatatcatgcacatgtattttgaatagggagggatatgttgtactctttttaagtggcagtttttataagttattttcaatgtggaatatgaaaccctataaatcagctttatactattgcattcactttgaataagtctattgtcgatgcatataayactaaatattggctaagagtggaagtaataagatctggtaagtattgctggtggcagaaaaaaaag

SEQ ID NO: 555160 - DNA, 560 bp, Homo sapiens
catttatttttaagttaattcttcaatattttatgttttgtagctttataaaatgatttattttcattaactggtataatttataaatttctatttatttttaatactcaacgtttttctctcatttaaattctacacatcctagcaagcccagattaagtcctacctcttctacacaacacggaaaaatataaaatagcatgggttttgagaccagattaagattttaggctctgcctccaagtctctgaattcttcactcataaaataggaatttatgacctatgttgcatggctgctgtgaggattaaatgagacaatgtaaggcatctggcaccttatgtagtaaataaatgaacatcactatttgatatgtgaggctataaaatacttaaccttctataacatacaacactttttcaattatacaaatgaaagagattacaacagaaagttaaactcagtrtatattcatatattcaattactaagcatgagaaaggtaatttagttctgtgattgagaccaaccaccctgcttccgatctgcctaggttcaaat

SEQ ID NO: 555161 - DNA, 534 bp, Homo sapiens
tgtaatcccagctactcaggaggccgaggcaggtgaattgcttgaacccaggaggcggaggctgcagtgagccgagatcacaccactgcactccagcctgggcgacagagagagactcggtctcaaaaaaaaagtcagcgggtggctgacagggtgatcatgtccgcagcctmctgctccccacagtggtcggctgtggggggtgtaatgacaatgccctgcttgtccccctgtgaccacttcatgaaagccgctgcagctcaagaaggctcagtggggagtggagctctttagggggccttggaagggcccaaaccagctgtgtgaccccaacgatgacgtgggtgtttgtggatgccctgcaggacaggcatacagcaggtgccaaatcaatgcacacctgttgttctgtcgttctcctgcctgcatggaaggcagtggtccttgggcatgagaaggccagagacccacaggcagcccccgccccagccctcagccccagagtatcctcctcccctaccagggctggccagg

SEQ ID NO: 555162 - DNA, 534 bp, Homo sapiens
tgtaatcccagctactcaggaggccgaggcaggtgaattgcttgaacccaggaggcggaggctgcagtgagccgagatcacaccactgcactccagcctgggcgacagagagagactcggtctcaaaaaaaaagtcagcgggtggctgacagggtgatcatgtccgcagcctactgctccccacagtggtcggctgtggggggtgtaatgacaatgccctgcttgtccccctgtgaccacttcatgaaagccgctgcagctcaagaaggctcagtggggagtggagctctttagggggccttggaagggcccaaaccagctgtgtgaccccaacgatgacgtgggtgtttgyggatgccctgcaggacaggcatacagcaggtgccaaatcaatgcacacctgttgttctgtcgttctcctgcctgcatggaaggcagtggtccttgggcatgagaaggccagagacccacaggcagcccccgccccagccctcagccccagagtatcctcctcccctaccagggctggccagg

SEQ ID NO: 555163 - DNA, 636 bp, Homo sapiens
ctaggcagtcagacttgcaacttgaaggctttgtgaattctgaacaggcatatagttaagaaaagatacagactcagactttcctcgtcaaactttggaaaaaggcaagaaacactctaaagagtaatgatcagaaagagaagccaggccagactgctttttagatcaggtccctgatcccattcttcctcactgggtgggacctcccaaccaactgggtggcctccagccaccccaaccgttgttctccaactgacagaaatttgaaatctccctggaacagcactcccagactgacttagccactccagccttcaggctttggagagtccaagccgaccagaggtggaggcagtgccccaacatagttctcaagagagrtggaggcagtcctccaactgctctgcaaaatgtggtcagactgcttttttaagtgggttcctgattccattcctcttcactgggcagtacctcccaaccaggatctctagccacccccagtggggttctctggccaacagaggtttgcaacctccctgggacagatctcccagaggaaggggcagcccaccatctttgctgtttgatgacttaaccaatcctgccttcaggctttggagtatctgaggtgatcgg

SEQ ID NO: 555164 - DNA, 636 bp, Homo sapiens
ctaggcagtcagacttgcaacttgaaggctttgtgaattctgaacaggcatatagttaagaaaagatacagactcagactttcctcgtcaaactttggaaaaaggcaagaaacactctaaagagtaatgatcagaaagagaagccaggccagactgctttttagatcaggtccctgatcccattcttcctcactgggtgggacctcccaaccaactgggtggcctccagccaccccaaccgttgttctccaactgacagaaatttgaaatctccctggaacagcactcccagactgacttagccactccagccttcaggctttggagagtccaagccgaccagaggtggaggcagtgccccaacatagttctcaagagagatggaggcagtcctccaactgctctgcaaaatgtggtcagactgcttttttaagtgggttcctgattccattcctcttcactgggcagtacctcccaaccaggatctctagccaccccyagtggggttctctggccaacagaggtttgcaacctccctgggacagatctcccagaggaaggggcagcccaccatctttgctgtttgatgacttaaccaatcctgccttcaggctttggagtatctgaggtgatcgg

SEQ ID NO: 555165 - DNA, 510 bp, Homo sapiens
gaggcagcacgtaagttaattagcttgattgtggaaatcattttgttcctggaccaaactgagagttgggctgctatttctcatggcccaataatgagacacagatgtactggggaggaagagagtttttatttctgtaacaggttacagggagaaggcctggaaatgatcaccagaccaactcaaaattacagagttttccagcgcttatataccttytaagctatatatctacgtgtaagtgtccattcacctaaagacataagtgattagcttcttttaatctataactaaggtctgagtcctgaagaccttcctctggagcctcagtacatttactcaatctaaatgagtccaggtgctggggtgattgcccttgtctcctgctaaatcacggagatttggggcgttccttcagacctccaattaacttgtttgtggaggcctggggagtttcttcacacacataataaagcttgtttaatcctaaatgggtcctgttaagaattc

SEQ ID NO: 555166 - DNA, 510 bp, Homo sapiens
gaggcagcacgtaagttaattagcttgattgtggaaatcattttgttcctggaccaaactgagagttgggctgctatttctcatggcccaataatgagacacagatgtactggggaggaagagagtttttatttctgtaacaggttacagggagaaggcctggaaatgatcaccagaccaactcaaaattacagagttttccagcgcttatataccttctaagctatatatctacgtgtaagtgtccattcacctaaagacataagtgattagcttcttttaatctataactaaggtctgagtcctgaagaccttcctctggagcctcagtacatttactcaatctaaatgagtccaggtgctggggtgattgcccttgtctcctgctaaatcacggagatttggggcgttccttcagacctccaattaacttgtttgtggaggcctggggagtttcttcacacmcataataaagcttgtttaatcctaaatgggtcctgttaagaattc

SEQ ID NO: 555167 - DNA, 558 bp, Homo sapiens
ttgttagcaattgcagttttcagtctctgtccctgctaagtttcttcaaggtaaatcatttagtcattcacaaacaaatatttactggccaactttatgggcatagcactttgttaagtagagaaacttgttattatggaacttaaaaaaamaacttgcatcaaatcactataatgcaaaatagaaagtaataagtgccattaaagaattatatgttacaggaattcaaaaaaagtaaaagatatattcttcctagtgacattaaagaagttctcatggaggagcatgtttgagctgagccttgaatgatggttacacatctacttttcatattataaataacacagtttcagaatagaaaaactagccaccattaatatcattagtaagaacagtttaaaacacattttaataccctctccttattatcctacctattttttagacttatacccacattaccagaggatatacccattatatatcataatcttttccttttaagccttatttttgtaaaaatcacatgtctcatagtcaccacaagtcccgaagtca

SEQ ID NO: 555168 - DNA, 558 bp, Homo sapiens
ttgttagcaattgcagttttcagtctctgtccctgctaagtttcttcaaggtaaatcatttagtcattcacaaacaaatatttactggccaactttatgggcatagcactttgttaagtagagaaacttgttattatggaacttaaaaaaacaacttgcatcaaatcactataatgcaaaatagaaagtaataagtgccattaaagaattatatgttacaggaattcaaaaaaagtaaaagatatattcttcctagtgacattaaagaagttctcatggaggagcatgtttgagctgagccttgaatgatggttacacatytacttttcatattataaataacacagtttcagaatagaaaaactagccaccattaatatcattagtaagaacagtttaaaacacattttaataccctctccttattatcctacctattttttagacttatacccacattaccagaggatatacccattatatatcataatcttttccttttaagccttatttttgtaaaaatcacatgtctcatagtcaccacaagtcccgaagtca

SEQ ID NO: 555169 - DNA, 558 bp, Homo sapiens
ttgttagcaattgcagttttcagtctctgtccctgctaagtttcttcaaggtaaatcatttagtcattcacaaacaaatatttactggccaactttatgggcatagcactttgttaagtagagaaacttgttattatggaacttaaaaaaacaacttgcatcaaatcactataatgcaaaatagaaagtaataagtgccattaaagaattatatgttacaggaattcaaaaaaagtaaaagatatattcttcctagtgacattaaagaagttctcatggaggagcatgtttgagctgagccttgaatgatggttacacatctacttttcatattataaataacacagtttcagaatagaaaaactagccaccattaatawcattagtaagaacagtttaaaacacattttaataccctctccttattatcctacctattttttagacttatacccacattaccagaggatatacccattatatatcataatcttttccttttaagccttatttttgtaaaaatcacatgtctcatagtcaccacaagtcccgaagtca

SEQ ID NO: 555170 - DNA, 558 bp, Homo sapiens
ttgttagcaattgcagttttcagtctctgtccctgctaagtttcttcaaggtaaatcatttagtcattcacaaacaaatatttactggccaactttatgggcatagcactttgttaagtagagaaacttgttattatggaacttaaaaaaacaacttgcatcaaatcactataatgcaaaatagaaagtaataagtgccattaaagaattatatgttacaggaattcaaaaaaagtaaaagatatattcttcctagtgacattaaagaagttctcatggaggagcatgtttgagctgagccttgaatgatggttacacatctacttttcatattataaataacacagtttcagaatagaaaaactagccaccattaatatcattagtaagaacagtttaaaacacattttaataccctctccttattatcctacctattttttagacttatacccacattaccaraggatatacccattatatatcataatcttttccttttaagccttatttttgtaaaaatcacatgtctcatagtcaccacaagtcccgaagtca

SEQ ID NO: 555171 - DNA, 512 bp, Homo sapiens
ccggacatctacctggtaaatactatatattagtttttattgttaaggttttagggtaagtcatggctgggaaaaatatgagaccatcaaggtctcgtattcctgtcacttttctttatctatgtgtctataaaaggcgtggtgatagatatcagaaaagtgtgggtattttgactctcttggggtgataaggaagtgttgctaatactctgattcttargttgggtagtggataatgagtgttagtttcattattatgttccataatatacacatatacagtatgtattattttgcctgcattaaatatttcataaaaacaatgggatttgggaaattctacttctgaatatgcatgatattttatatatagatgtgcaagtctaataagaataaatttgtaacattaaaaaatcataggacgagcaccctgataaacccaattgctgagtgacatccgagaagctgagttaaattcaatgttgatttgctttgcctagaagaatgggact

SEQ ID NO: 555172 - DNA, 575 bp, Homo sapiens
tttatgccctgggtaggggaattcctgtttcccactctcctggcacactggtagcttcagtcaagcatattccattggcacctgcccacacagacgaggaattccctacttctattacaagtataatcacaagccttaccagctaaaaccaacaggcagcataggaagaatggagagtyattctgagccctgccagggactgggctgcaggaacaatatgagttcaatgtgctgagcacatggagagaggcactgacttgggtagaagcaggagtctttagctctcccccttctctgtactcttcgtggtgtgatagctaattagtgcccttcgtgcttaagggcaatgctctggaagaaaacctgtcagaaggcaaatgacccaatgaccatagtttcctgggtaaataaatgtttccactgctctctgggctaagtgccagcatgaattgccacgtgctaaagttagaaagaagccctctgtggagtagcacaaacagcacaggcctcagcgtgcagtgacagagtgctaatgccaggcaggcaggcactgtgccaacttaagcaagtttcat

SEQ ID NO: 555173 - DNA, 564 bp, Homo sapiens
attatactgccagtgaatacaagtcttatctcctctactcaagactacttagctgtgtgaccttgggaaaattgcatttatcttgctgattttgttccttaatctgtaaaatggagatagtaaaaatctgtatatcagagagttgtaaagtttgaatgaaataatatatgtcagtgatcaggacctgtcatggaacattgcaagaagttaataaacatcagcaattattcttggatgcacacggaaaacaatatccatgtcatgttcrtaatttattctacataatactatataaactatatgacaacagaatgaaggaatggattaaagaaaaaaacaaagactaacaaagttatcatatcagtgctctgactccctgtacctcagagaaacaatacaaaagaatttgggtttcatgagaaaggttgacagaaaacaatcagaagacatttggtctacccccacacatagacttagtgttttgtatatcaagaaaagcaaaatccccagatcttctccacatactcaaagaaaatagaaaatatcaaagggccagggggcttc

SEQ ID NO: 555174 - DNA, 505 bp, Homo sapiens
catgtcactcttttgtccccaccctgcatcttgactgtgagtgtaaatagttcaaaaaccttctccaatggatgtttatatcgccagtgcctcaaatggtacctagcacaagtaaacactcaatggaaaaaaatctgtgtaaggatggtttcattgataataagaagaaccatagtgtaggaatcaggagttctggtgaattaaccagctaagtggtcacgaatggttcacctaccctctctaggtttctgttttcttatctgtaaatagactrtatctaatacctgcccccaaattcaatgattctatatgtttaatacctcctttagaagcctcaaaatgccttatgacaagccaagtcaacttcagatgttaattttttaattctcaaagatttgcttatgaaaagcaaattcaaatgcctttgaaattatcttatttgcaggtctattgttaaaaaagaacttctaaaaactttctaaatgacatggagacatttaaatta

SEQ ID NO: 555175 - DNA, 554 bp, Homo sapiens
gtgatgagaaaacagaggctactaaataaacttgattgaaaggaaagctgacggccaaatggagcttggtagctatatctgtatttacagagccattcatgtaggcaattattttataaggctaaaaaattaaatctaagaaataaaagggaaaatcacaattatttcccaaaaacctttctctcacaataaaagaggtccaatttaactgggtaaatggtgagcatttcagctctatttcacctccaatacacaycactgtaacattatgtcttataaaatagaggtttgacttgcctcatcactaccaacaccaccaccaccaccaccacccgatccctcaatcaaacttccaaacagtattgtagatgagttttaaatggctactagtctatgtctctttgtcagcagctgctctacaatgttctctctcaatctctctgtctctgtttctctctctctctcaaacacacagaaacacacacacacacacacacaaacacacacacacacacactgctgctatcactgccaccaacattatttggtaaact

SEQ ID NO: 555176 - DNA, 523 bp, Homo sapiens
gaaagtggaactggtctctttcctatttccttttaatattaattgcctgatcaaacacattactatcacartgggtagaccaggtatatcagtgactcaaagcttcaaagtgacagcttataaagggatacaaggaatcttgcattgcaaagaaaaagaaaaagatctagaagctgtgcctctgccctacctccactctgccctaccactgccactgctgaaaagaaggaaggaaaggagagacagaagggcgtttaaccacactttacgattgctgtggggagagggaaaaaaaactcaacacttttggcataagattatttccaagcgactgtttgcagctgttgcagctgccatcagcatgagctggtgggaaaacagcgcccagtggtgcatcttacctgaagagcagagaagtgcaggcagatgtaggtgaagcacaggagcagccccagtccctgaattacagaggccaccagcaatagcttgttcctctcgaatcttggcctggctgcatttccca

SEQ ID NO: 555177 - DNA, 622 bp, Homo sapiens
aagctttgaagattatttctttctttgaggtcgtggctggcctcagaacttggaaagtaagagtattctatcaatagacaccaggtaccctttaccactaaaataaacaatgaaatgaaataaatgataaaattacttataatgtaaagttcaaatgggcaaatatttactgagtacatcacatgagsctggcactgtactggacaacataaggatgctggggaaaagctgtttaagacggaattgtctctctttgtggccaagtatgtctctctcagctccccatgaggcacccagcagatatgtaaagaaaggagggagaaatattttggatattgacagtatgagttgttataccacttcacagaaaaaatggaaatgaggcatacttaaaagagaaagtttgtgggaaatgtaaagtacatttatgactacagtattaatcaattaaaatatgaattaataccttcactacaataattatgccttgcattaggagaacatactggtgttgagaaatttaagttttatctgaaagataaggtaactaaggcacaatatcatagactccaagccaaaactagaaatcaaattgtatccaaacatatttgtcatagttatt

SEQ ID NO: 555178 - DNA, 576 bp, Homo sapiens
cagggaggacacaaatggagaagacacttacagtggctcttcattcaccagacattctgagagtgtactcagtgccaatctctgagcatacacagggagtcatagataaactctgccctgggacaagtgatagagtgatgtcggaggtgayagaaacaaatgcattttcaaatgtcaaaatctgatttgtaatctgccttttcaacctattcctgatcctaatgtcactgtcctggttaatgtttttgtactccaggacctcaaaatccaagaatcaactttgaatcatcctcgttcccagtcatcaagctttgtaggctagccctgcaatgcagttttttctttcctcctctttgccattcctattgcttctaatccaaactcttattactcctcacttgagctcctgcagtcagctctccaagcccttcatcctggcacaggtttcctcctgcaggagttccaagttttccttccaaacttatctccctctattttctgattatttctaatattcactctgcctcaaacacccttaccctccacctctgactatcaaaaccctacacgttacac

SEQ ID NO: 555179 - DNA, 580 bp, Homo sapiens
ttcttctttaaatctttggtaraatttcctgttaagcctcctaggccaggagatttcatttccagaaaatttttaaccatgattccaaattatgtaatagacatactcttattttgggtttctatttcttcttgagttggtcttcatatatttttctaattcaaataattggtccatttaatctactatatcaaaattattggcaatattgtttattctctcattttatctctcatatctgtggcatctgaagtggtgtccattctttcatttctgctattagctattcttacctaccctctttttgtcctggatcatctgtagaggtttatcaattttaatgatatttttatgaagttatatttttgattcattggtttctggtattatattcctgttttaattttatgtatccctcagtttaatattttcttccttctgctttctgtgcattaatttgttttttatattttaggttcttgaggtaaagcttatgttttttatttgagcccttgattctcttccactataagaaaatagtgccataaatttatctacaagcagtgcttgggtgcatgat

SEQ ID NO: 555180 - DNA, 581 bp, Homo sapiens
agagcttctgcacagcaaaataaaatatcaacagagtaaacagacaacctacagaatgggagaaaagttttgcagactatgcatatgacaaaggtctaatatccagcatctataagtaacttaaacaaatttataagaaaaataaatgaatagtagtaacagtagtagatgaataatgagaaaaggtacagacaggtacaaaaagagatgtgtgagatacttaaagacactactttcattcaacaataatttaggggttttgttcgtttttaagttttgtgtgtcttcacatctgtgttttctaacttaaatwttaaattcttagatggtaaaattgtgccagctcaaataggctggcatcatgcctactatagtaaaatacacaaatagataacaaataattaaaacacacacacacaaatacacatacacacacagttgttttaaggtgttttaaaatggagttattttaaattttttaaaatcaatattaataaaaactccatgttactataagtagcattattcaaagattattcattaatcattggctttttcagaggtatttgaactggagcaac

SEQ ID NO: 555181 - DNA, 584 bp, Homo sapiens
tcccgacatccagcacagggcatggtggcctgggggtaggggaagaggaatagggaacaacaaaaaatgaatcaattaagaaacaccggctgggtgtggtggctcacacctgtaatcccagcactttgggagaccaaggcaggcggatcacctgaggtcagaagctcgagaccagcctggccaacatggcgaaaccccatctctactaaaaatacaaaaattagcaaggcatggtggcgcatacctgtaatcccagctactcggaaggctgaggaaggagaatcgcttgaacttaggaggtggagattgcagtgagccgagattgcgccactgcacttcagcctgggtgacgggagcgagactccatctcaaaaaagaaagaaaaaaaaaaaaaagaaaagaaacaccaagaggaagctaggcacagtggctcaagcctgtagtcccagctactgaggaggctgaggcaggaggatcgcttgaggccaggagttcaagatsagcctgggcaacatagagagatctcatctctacaaaaaagtaaaaataatagaaaataaaaaatagccggatgcagtggctca

SEQ ID NO: 555182 - DNA, 584 bp, Homo sapiens
tcccgacatccagcacagggcatggtggcctgggggtaggggaagaggaatagggaacaacaaaaaatgaatcaattaagaaacaccggctgggtgtggtggctcacacctgtaatcccagcactttgggagaccaaggcaggcggatcacctgaggtcagaagctcgagaccagcctggccaacatggcgaaaccccatctctactaaaaatacaaaaattagcaaggcatggtggcgcatacctgtaatcccagctactcggaaggctgaggaaggagaatcgcttgaacttaggaggtggagattgcagtgagccgagattgcgccactgcacttcagcctgggtgacgggagcgagactccatctcaaaaaagaaagaaaaaaaaaaaaaagaaaagaaacaccaagaggaagctaggcacagtggctcaagcctgtagtcccagctactgaggaggctgaggcaggaggatcgcttgaggccaggagttcaagatcagccygggcaacatagagagatctcatctctacaaaaaagtaaaaataatagaaaataaaaaatagccggatgcagtggctca

SEQ ID NO: 555183 - DNA, 360 bp, Homo sapiens
aatgatagcaatgtaacgtgtttaagtcatacataaaaaaaccaatggaacaatatgaacataaaaactgagtaaaagttgtatactgtctatgaagttgcatgatattgtttgaagctacggtgttaaaagataaaaatgcatattataatatttgtagaaaccattaaaaattacaaaagagatgtagctaaaatggtaatataggaaataaaatatacaaacctcaaatatgcacaattcactmaaaagggggtagaaaaaacaatatcagactgataattataaaacaaatgtccaaatgagaaattccttgtatgaggccaaaataacactttctatcaaaacatgaaaaatatt

SEQ ID NO: 555184 - DNA, 360 bp, Homo sapiens
aatgatagcaatgtaacgtgtttaagtcatacataaaaaaaccaatggaacaatatgaacataaaaactgagtaaaagttgtatactgtctatgaagttgcatgatattgtttgaagctacggtgttaaaagataaaaatgcatattataatatttgtagaaaccattaaaaattacaaaagagatgtagctaaaatggtaatataggaaataaaatatacaaacctcaaatatgcacaattcactcaaaagggggtagaaaaaacaatatcagactgataattayaaaacaaatgtccaaatgagaaattccttgtatgaggccaaaataacactttctatcaaaacatgaaaaatatt

SEQ ID NO: 555185 - DNA, 503 bp, Homo sapiens
acagcacaaagaaatctccccacctcccccrcatctccccaccagttctcggtgatggacagattcacagcaacacagaaagggctgggaagggatggagggggacatctgcagccagtgtttaggggctgaccctgtgggaagacacctgccttgcagaggacctctgcatcttgcagatgcagagctgaagtctgatatgagggagaggacagggagtgctttggactttcctgattaagaagaatagagatcagtctgcttctggggttaagtgacccctggggagattggactgaattaatgaagaataaatgaactgggaatgaggatgagtaaagcaagtatcagcatctcccattatcagttcagactgattggtagatggggaggtgggatagttcctgaccctgttgtgaggttccttttaactttctggccttggggcacagatgggtggtgctcttcttggtcagggtagcctcggctccactcaggtaagg

SEQ ID NO: 555186 - DNA, 503 bp, Homo sapiens
acagcacaaagaaatctccccacctcccccacatctccccaccagttctcggtgatggacagattcacagcaacacagaaagggctgggaagggatggagggggacatctgcagccagtgtttaggggctgaccctgtgggaagacacctgccttgcagaggacctctgcatcttgcagatgcagagctgaagtctgatatgagggagaggacagggagtgctttggactttcctgattaagaagaatagagatcagtctgcttctggggttaagtgaccmctggggagattggactgaattaatgaagaataaatgaactgggaatgaggatgagtaaagcaagtatcagcatctcccattatcagttcagactgattggtagatggggaggtgggatagttcctgaccctgttgtgaggttccttttaactttctggccttggggcacagatgggtggtgctcttcttggtcagggtagcctcggctccactcaggtaagg

SEQ ID NO: 555187 - DNA, 573 bp, Homo sapiens
tgtgtagcattactttttgctawtttttaggtaagaaaattctgtctgaattacaccagggtatctatgcgtgaccttccatcaatccaaggattctactaacagttgtaactatgatgtattttttccatctttctattgagtttccatttttgttgcttggcaaaagtttattatatatatttatcacaataatatcttattttaattttttaattttgtttttttttttaaatctttaattttttttcttgttttgagtcagagtcttgctctgtcatccaggctggagtgcagtgatgcaatcataactcactgcagcctctaattcctggtctcaagcaatccaccaatatcatccccccaaaattttgggattataggtatgagccattccacatacaaataattccttattttatatactgctaatatattataaataaataacatttattgcatgctcattatgtataagttattgttctgagttcttcacatatattagctcatttaattctcacaaaaacccaatgtaaaagtattaaaattattcctttactacaagaaaac

SEQ ID NO: 555188 - DNA, 573 bp, Homo sapiens
tgtgtagcattactttttgctattttttagrtaagaaaattctgtctgaattacaccagggtatctatgcgtgaccttccatcaatccaaggattctactaacagttgtaactatgatgtattttttccatctttctattgagtttccatttttgttgcttggcaaaagtttattatatatatttatcacaataatatcttattttaattttttaattttgtttttttttttaaatctttaattttttttcttgttttgagtcagagtcttgctctgtcatccaggctggagtgcagtgatgcaatcataactcactgcagcctctaattcctggtctcaagcaatccaccaatatcatccccccaaaattttgggattataggtatgagccattccacatacaaataattccttattttatatactgctaatatattataaataaataacatttattgcatgctcattatgtataagttattgttctgagttcttcacatatattagctcatttaattctcacaaaaacccaatgtaaaagtattaaaattattcctttactacaagaaaac

SEQ ID NO: 555189 - DNA, 485 bp, Homo sapiens
cacattgcaattcaagtatgagtcatgcataaccctggcactaagagamaagagggaaagtccttctctcctaaaattttgcaaagcttctgggttctttttccactgagtgggaacaagtcagctagtgaggaacatgaggtctttggcctcatcgaaaggtgattcatctcccaactgtgagaagcactgaccactaggaagacctccctgcctggtccctggacccctacaccatggtagaggctatcttccctcccactgcaaagtggtatcccagatagcaagctggttagctgctgccagctcttgggtagttttgtcttctaaggcatgggtttttatctgaaaatcttccccttcccagatgacccaaactggggccacccactcttttctgagccacctctgcccagagacctgtggctatgtcctccagtcacaacagaacaccctttcagaacaccctgcaggaagctgagatc

SEQ ID NO: 555190 - DNA, 485 bp, Homo sapiens
cacattgcaattcaagtatgagtcatgcataaccctggcactaagagaaaagagggaaagtccttctctcctaaaattttgcaaagcttctgggttctttttccactgagtgggaacaagtcagctagtgaggaacatgaggtctttggcctcatcgaaaggtgattcatctcccaactgtgagaagcactgaccactaggaagacctccctgcctggtccctggacccctacaccatggtagaggctatcttccctcccactgcaragtggtatcccagatagcaagctggttagctgctgccagctcttgggtagttttgtcttctaaggcatgggtttttatctgaaaatcttccccttcccagatgacccaaactggggccacccactcttttctgagccacctctgcccagagacctgtggctatgtcctccagtcacaacagaacaccctttcagaacaccctgcaggaagctgagatc

SEQ ID NO: 555191 - DNA, 485 bp, Homo sapiens
cacattgcaattcaagtatgagtcatgcataaccctggcactaagagaaaagagggaaagtccttctctcctaaaattttgcaaagcttctgggttctttttccactgagtgggaacaagtcagctagtgaggaacatgaggtctttggcctcatcgaaaggtgattcatctcccaactgtgagaagcactgaccactaggaagacctccctgcctggtccctggacccctacaccatggtagaggctatcttccctcccactgcaaagtgrtatcccagatagcaagctggttagctgctgccagctcttgggtagttttgtcttctaaggcatgggtttttatctgaaaatcttccccttcccagatgacccaaactggggccacccactcttttctgagccacctctgcccagagacctgtggctatgtcctccagtcacaacagaacaccctttcagaacaccctgcaggaagctgagatc

SEQ ID NO: 555192 - DNA, 485 bp, Homo sapiens
cacattgcaattcaagtatgagtcatgcataaccctggcactaagagaaaagagggaaagtccttctctcctaaaattttgcaaagcttctgggttctttttccactgagtgggaacaagtcagctagtgaggaacatgaggtctttggcctcatcgaaaggtgattcatctcccaactgtgagaagcactgaccactaggaagacctccctgcctggtccctggacccctacaccatggtagaggctatcttccctcccactgcaaagtggtatcccagatagcaagctggttagctgctgccagctcttgggtagttttgtcttctaaggcatgggtttttatctgaaaatcttccccttcccagatgacccaaactggggccacccactcttttctgagccacctctgcccagagacctgtggctatgycctccagtcacaacagaacaccctttcagaacaccctgcaggaagctgagatc

SEQ ID NO: 555193 - DNA, 566 bp, Homo sapiens
atatttgccaaaaaagcgcagctaaaactggtgaattttattacatataaatgccctaataagcaaaaataaataaataaataaaagggggggaggggaggcaaaaataaagacatttttagataatcaaagccataaaattaatttcctaggggtcctgtactacatttaatttwaaaggaagtgcttcagggtgaaggaaaatgatactagatggtgacccagatatacagaaaggaacaattaacaacagaaatgatgcacatacacatgtcacattcacactcattttcttaatttcctgaagacatatggctacttgtttaaaacaaaaagtattacactgtatcattgagcttataatataggttgatgtaatatatacaacaataatagcacaatggtaggttacaagaaactacactgttagaagtgtcctttattttctggatgcagcttaatataacctgaacttcactgtgaaaagtcaaggaatcgggtttccattctttgctattgtgtaaagaaatatagccaaaagccactaggagaattaaaaccataaa

SEQ ID NO: 555194 - DNA, 566 bp, Homo sapiens
atatttgccaaaaaagcgcagctaaaactggtgaattttattacatataaatgccctaataagcaaaaataaataaataaataaaagggggggaggggaggcaaaaataaagacatttttagataatcaaagccataaaattaatttcctaggggtcctgtactacatttaatttaaaaggaagtgcttcagggtgaaggaaaatgatactagatggtgacccagatatacagaaaggaacaattaacaacagaaatgatgcacatacacatgtcacattcacactyattttcttaatttcctgaagacatatggctacttgtttaaaacaaaaagtattacactgtatcattgagcttataatataggttgatgtaatatatacaacaataatagcacaatggtaggttacaagaaactacactgttagaagtgtcctttattttctggatgcagcttaatataacctgaacttcactgtgaaaagtcaaggaatcgggtttccattctttgctattgtgtaaagaaatatagccaaaagccactaggagaattaaaaccataaa

SEQ ID NO: 555195 - DNA, 528 bp, Homo sapiens
cgagactagaaagtgggagttactggtttggttttggcacttgtttagtcagcttgtgctgccataacaaaacaccacagatggattggttaacaacagacatttctttctcacaattctggaccctggaaatctgaggttagggaaccagcagattcagttcctggtgagggccctcttcctgcctggcagacagctgccttcttgccatatcctcacgtggtgaagagagtgggagctccagtctcttctttttcttaaaaggacactaatcccatcatgggggccccaacctctcaacctcttctgaatctaatcacttcccaagatggccaccagtctcaaggagtttactgtcacagtgggagcaaagatgctacagcaggttgtaaaattargtgtcatcccagtcagtggggagaggacaggtaattcagggaaggggacctggatagagctcacccataggatatggcaggtcccagaactctactgaaatcaagtctggataaaagtcaataatattct

SEQ ID NO: 555196 - DNA, 528 bp, Homo sapiens
cgagactagaaagtgggagttactggtttggttttggcacttgtttagtcagcttgtgctgccataacaaaacaccacagatggattggttaacaacagacatttctttctcacaattctggaccctggaaatctgaggttagggaaccagcagattcagttcctggtgagggccctcttcctgcctggcagacagctgccttcttgccatatcctcacgtggtgaagagagtgggagctccagtctcttctttttcttaaaaggacactaatcccatcatgggggccccaacctctcaacctcttctgaatctaatcacttcccaagatggccaccagtctcaaggagtttactgtcacagtgggagcaaagatgctacagcaggttgtaaaattaggtgtcatcccagtcagtggggagaggacaggtaattcagggaaggggacctggatagagctcacccataggatayggcaggtcccagaactctactgaaatcaagtctggataaaagtcaataatattct

SEQ ID NO: 555197 - DNA, 579 bp, Homo sapiens
cacagctgatgtaaactagtgatgtgtttaaragacttgtttaaactcagcaaatattaagtgtgatgtgtcatggattatgaaaagagtaaactcatggtttgtgctatttacctcagtattactgaagaaggatcctagaagcccactgatccagctagacctttatgtttttttaacttttattttaagttcaggggtccgtgtgcaggtttgttatataggtaaacttgtatcatggggatttattgtatacattatttcattactcaagtattaagcctagtacccattagttatttttcctaatccttgccctcctcccagcctccaataggccccagtctctgttgttcccctctttgtgtccatgtgttataatctaacttccacttataagtgagaatatgtggtatttggttttccattcctgccttagttttctaaggataatgacctccagctccattcatattcctgcaaaggacatgatgttgttcttttttatggctgcataatattccatgatgtatatgtaccacattttctttatctagtctaccattggtaggcatttag

SEQ ID NO: 555198 - DNA, 579 bp, Homo sapiens
cacagctgatgtaaactagtgatgtgtttaagagacttgtttaaactcagcaaatattaagtgtgatgtgtcatggattatgaaaagagtaaactcatggtttgtgctatttacctcagtattactgaagaaggatcctagaagcccactgatccagctagacctttatgtttttttaacttttattttaagttcaggggtccgtgtgcaggtttgttatataggtaaacttgtatcatggggatttattgtatacattatttcattactcaagtattaagcctagtacccattagttatttttcctaatmcttgccctcctcccagcctccaataggccccagtctctgttgttcccctctttgtgtccatgtgttataatctaacttccacttataagtgagaatatgtggtatttggttttccattcctgccttagttttctaaggataatgacctccagctccattcatattcctgcaaaggacatgatgttgttcttttttatggctgcataatattccatgatgtatatgtaccacattttctttatctagtctaccattggtaggcatttag

SEQ ID NO: 555199 - DNA, 579 bp, Homo sapiens
cacagctgatgtaaactagtgatgtgtttaagagacttgtttaaactcagcaaatattaagtgtgatgtgtcatggattatgaaaagagtaaactcatggtttgtgctatttacctcagtattactgaagaaggatcctagaagcccactgatccagctagacctttatgtttttttaacttttattttaagttcaggggtccgtgtgcaggtttgttatataggtaaacttgtatcatggggatttattgtatacattatttcattactcaagtattaagcctagtacccattagttatttttcctaatccttgccctcctcccagcctccaataggccccagtctctgttgttcccctctttgtgtccatgtgttataatctaacttccacttataagtgagaatatgtggtatttggttttccattcctgccttagttttctaaggataatgacctccagctccattcatrttcctgcaaaggacatgatgttgttcttttttatggctgcataatattccatgatgtatatgtaccacattttctttatctagtctaccattggtaggcatttag

SEQ ID NO: 555200 - DNA, 585 bp, Homo sapiens
atattttaagtaagaaagaaacaaaagtggatttttgtttcagcaggattcctgcaattgtagggcactgacccaagtcttgcttgggtcagagcaagactggaggcaataaaatgagttgggagattttgaagaactctgaacaacagaaagagtgacaagatctagggctgtggagactacgctgggatccaggaggacaggcactagagatggtgcagctacaraggctcgggggcagggtcgggaaagcctgaagctcccacttgtggagcagaggagaggtctaacacctgcacaccccagtgaaggggcagaatgggagtgaacaagggagcccctgggctgggattttccatgtttctggcactaggacggggtgggcaacacagtgtggagcccagagtagagtagaattgcaggttgtcactcaacaagatgtgcagcagctaaaggttgtgggagtcatgtaggggaaggtaaatccaaagtagctagaagatgcacaagacaataacccctggctcagaacctctgcacacttgcaggcatttggtctactctgtaattgatttgccactggga

SEQ ID NO: 555201 - DNA, 518 bp, Homo sapiens
gtaataaaaataccatatgctagaaattawggtactttgtaaaagcagggctcaacaatccataaaagtaggagggaaaaaagggacaggcaaatagaagagataaaatagaactacacagctgagtgtggcagtatgtgcctgtattcccaggtacttgggagtctgaagtgagaggatcgcttgagcccaggagcccaggagtccggcctgggcaacataaggagacccttgtctcttaaaaaaaaaaaaagaaaagaaaagaaaagaaaagaaaagaaagaggggggcgggcgtggtggctcatgcctgtaatcccagcactttgggaggctgaggcgagcagatcacaaggtcaggagttcgagaccagcctggccaacatagtgaaaccccatttctactaaaaatacaaaaaataattagctgggcatggcggcgggcacctgtaatcccagctacttgggaggctgaggcaggagaatctcttgaacccaggaggcggaggttgcagtgag

SEQ ID NO: 555202 - DNA, 593 bp, Homo sapiens
agaattcaaaatgggtgaggagggaggacaggacacccagggtgagggacagtgagtagatggcaggatcactggattgggaatcccaggagggtggaacgattgttggaattgatgtactacagggtagactccaagcatggaaagcaagcacatatgcratgagtggtccactgatattacatcacagcatatgataaaatgatagtatctgtgtcctcagagcctgtggccaccttgcaaggggatgagtggaaagatggtcagagagtgggaagtgtgagatagagagtatggaagggctggggttcttagccatgatgaggcctaggggataacaagggcatgagattcaggcagacaggagaagatcatggaggagaggagttccaggatctgagaggccaggaagcgagggcatcttctctgctgtgtgggtgtctattgctgccataaaaattaccacaaaccaaatggctttaaacagcacctatgtatcatggcacagtcgtgtggattgcaagtccacccagtctcatggggctaagatcaacatacgggaaggtctgcattcctttccatagactctgggg

SEQ ID NO: 555203 - DNA, 593 bp, Homo sapiens
agaattcaaaatgggtgaggagggaggacaggacacccagggtgagggacagtgagtagatggcaggatcactggattgggaatcccaggagggtggaacgattgttggaattgatgtactacagggtagactccaagcatggaaagcaagcacatatgcaatgagtggtccactgatattacatcacagcatatgataaaatgatagtatctgtgtcctcagagcctgtggccaccttgcaaggggatgagtggaaagatggtcagagagtgggaagtgtgagatagagagtatggaagggctggggttcttagccatgatgaggcctaggggataacaagggcatgagattcaggcagacaggagaagatcatggaggagaggagttccaggatctgagaggccaggaagcgagggcatcttctctgctgtgtgggtgtctattgctgccataaaaattaccacaaaccaaatggctttaaamagcacctatgtatcatggcacagtcgtgtggattgcaagtccacccagtctcatggggctaagatcaacatacgggaaggtctgcattcctttccatagactctgggg

SEQ ID NO: 555204 - DNA, 611 bp, Homo sapiens
tagtaagaaaaattcaaaagataatgtgacagagagactgtggggtgagtcagcctcaggtaggatgctcagagacagcctctctgaggaggtgacagcatctgaggagagtggcatggtcagttggtgggtcttgtggggtgggtcaagggctattcccatcttygagtgggcacatggaatgtggaacatggaacactgggctcagattccatcctcagaacctaagcttctgtctccctgcgtggcattcattctttttcttttcttttctttttttttttttttgagaaggagtcttgttcttgtcacccaggctggagtgcagtggcctgatctcagctcactgcaacctccgcctcccaggttcaagtgattctcctgcctcagcctcccgagtagctgggattacaggcacatgccatcacgctcagctaatttttgtatttttagtagagacaggctttcaccatgttggccaggctgatcttgaacccctgacctcaagtgatccatctgcctcggcctcccaaagtgctgggattacaggtgtgagccaccgtgctgcgacccacccccgtcgcccgccctccctccccccagcccctgca

SEQ ID NO: 555205 - DNA, 664 bp, Homo sapiens
tcctgaccttgtgatctacccgcctccacctcccaaagtgctgggattacaggcatgagccaccgcacccggccaacattagaytttttattatgggtttgtttattatttctctcccatcagggagcactcaccttccattcttagtttaagtggctcctatcttgcctagcttttcctcctcttttgaaaattggggttttaatatcaccttagggatatctgggctaaacagtttaaatttttcctccagggagacttgcttagcagccttatccacaagcctgttccctacagcttctatagtgtttcttttctgatggccatttacatgaactatggctgtctctgctggaaacaggaggctttctaaaacttgttccccatgtaccaattattttgccctgctattttctaggccctgctctgtctagattttttcaaaggtgtgtactactttataggcatatttggaattagtatatatagtgtcttcttgatcttctaggagctttagggtctggttaaaagcataaaatttacaggtttgggctgaccagttattgagtaatttaactttttcacataaggattgtttgtttttgttcatgacagcacagccattgtgtcttttaccatttattactcaggatgacccattcat

SEQ ID NO: 555206 - DNA, 549 bp, Homo sapiens
caggggtggtcttaggagcggggatcatccatcatcactggtgggaargctgaggatacaagtgcagatttggggatagtaatgggatggtgatgcatttctcacctgggtcctcctttttttcctgcgtgaaagagaaataaatgtataacctaaaaatagggagtgtggaaggagtggagggatgtgagggcagagaacaaagtgagaaacagccccctgaggaattgtaagagtgaactgacctgggagatggcatttggagagtgcagggctgtgggccactgaggtctgtggtcataactttgggggtgggagagagagagagagagagagagagagagatagagagagagagagaatggcacacatccagtaatggggcagcagcaggaaaatatataactgactagaaggaaatgaaaccacatatctctgctgtaaggatcatgggatagtttaaatttgtaattgatcatttgaaatatttggtaatttttctgcagtgaatatatattacattataatgagaaaaagttatatttacaa

SEQ ID NO: 555207 - DNA, 573 bp, Homo sapiens
tctccaccaggccctgtgagggtgggtggaggctctctccaagccctcgtttggccccaccccagcatgtctccaggttcctctcagccctggttccttttggccctgcagtcacaatgggcaacactgtgacgcaccctgtcctgtgtcacagtgtcatacactcaggctcacattgcccctaggccacttgccagccaagggacatggccacattttgtgtcttctgcacctcagccttgctttcaagtgcaggtgatgatggcacccacgcagaacaaatgttatttgctatcttcgtcragtttagtcatccaattttccaaccctcactgggcaaggaagagtgtggtttccaccagaaggcaggatgtcagcagtcacaggggcaaccaacagggaaagccactggaaaatagaccccacaggaagcacaggtgtccagtggagatgggaaccctgcagatttgaccgtctttaagcagattagagagattaccattactaacaacttagccataaaagtttattagctattttcaaaaagcataaaattatgtaatataatttttt

SEQ ID NO: 555208 - DNA, 573 bp, Homo sapiens
tctccaccaggccctgtgagggtgggtggaggctctctccaagccctcgtttggccccaccccagcatgtctccaggttcctctcagccctggttccttttggccctgcagtcacaatgggcaacactgtgacgcaccctgtcctgtgtcacagtgtcatacactcaggctcacattgcccctaggccacttgccagccaagggacatggccacattttgtgtcttctgcacctcagccttgctttcaagtgcaggtgatgatggcacccacgcagaacaaatgttatttgctatcttcgtcgagtttagtcatccaattttccaaccctcactgggcaaggaagagtgtggtttccaccagaaggcaggatgtcagcagtcacaggggcaaccaacagggaaagccacyggaaaatagaccccacaggaagcacaggtgtccagtggagatgggaaccctgcagatttgaccgtctttaagcagattagagagattaccattactaacaacttagccataaaagtttattagctattttcaaaaagcataaaattatgtaatataatttttt

SEQ ID NO: 555209 - DNA, 312 bp, Homo sapiens
caagtgattctcctgtctcagcctacctagtagctgggaytacaggcacaggcacataccaccatgctgggtaatttttgtatttttagtagagacgaggtttccccacgttgaccaggctggtctcgaactcctgacctcaggtgattcgcccaccttggcctcccaaagtgctgagattacaggcatgagccaccacacccggcttcaaagctaagttttaaattacatgtgtacaccttgagttacttcagaatttcaacaagaaaaaatacctggatagaagtgtttttgtaaaacccaaagtaaaga

SEQ ID NO: 555210 - DNA, 509 bp, Homo sapiens
aggctgagagaggtgaggaagctgcagaagaaaagtttgaactagcaaaggttggttcatgaggtttaaggaaagaagccatctccgtaagataaaagtacaaggtacaacagcaatgctgatgtagamgctgcaagttatccagaagatctagctaacataactgaggtaggttgctgcactaaacaacagggcagatgaaaaaaccttctactggaaaaagatgccatctaggactttcctagtcagagagaagtcagtggctggcttcaaaacatcaaaggacaggctgactctcttgttagacctaatgcaaccagtgactatcttgaagccaatattcattgaccattctaaaaatcctaggacccttaagaattacactaaatatactctgcacgtgatctacaaatggagcaacaagcctagatgactgcacatctgttttagcatgattgaccagatattttaagcccattcttgagacctactgctcagaaaaaaagatt

SEQ ID NO: 555211 - DNA, 247 bp, Homo sapiens
atgctggccaccaccagcccagtgatgctaggaaagttgcagtgcttatctgtgtgyacctccctttgctcaaatgtaatgtagaaacaataatattgcctgtcaggatcttcttgtaagaactaaattacttaatattttaaaacatagtggtgtcatatttgagctcacattaccctaagattcaccctaccatcaggctgctacaaggaattcaaagattcctgggtagagacctgatgaaaat

SEQ ID NO: 555212 - DNA, 247 bp, Homo sapiens
atgctggccaccaccagcccagtgatgctaggaaagttgcagtgcttatctgtgtgcrcctccctttgctcaaatgtaatgtagaaacaataatattgcctgtcaggatcttcttgtaagaactaaattacttaatattttaaaacatagtggtgtcatatttgagctcacattaccctaagattcaccctaccatcaggctgctacaaggaattcaaagattcctgggtagagacctgatgaaaat

SEQ ID NO: 555213 - DNA, 247 bp, Homo sapiens
atgctggccaccaccagcccagtgatgctaggaaagttgcagtgcttatctgtgtgcacctccctttgctcaaatgtaatgtagaaacaataataytgcctgtcaggatcttcttgtaagaactaaattacttaatattttaaaacatagtggtgtcatatttgagctcacattaccctaagattcaccctaccatcaggctgctacaaggaattcaaagattcctgggtagagacctgatgaaaat

SEQ ID NO: 555214 - DNA, 537 bp, Homo sapiens
cacatttgacaaaaagcttttaaaggaagagataaaatatgtaaatagatattytaatgtattatttctacatgccaatggatatttttgggtgccttcagggtatatgatttggaaaacataatttttcttttcacaataagaactcgcaatgaagaaaaaatagatttaaactacacacacacaaaatctaaattctgctttgaatatcatctattagacaccaggcttttccctaggcatatatgaatatccttggccttgaggggctagtggtccaataggggagaaggcatataaaaatataacttcaatgtgatatggtggtgccaccaagatggaaatgggagcaagacatcttgggaattcttcctgcaggaaagaaaacctgagaggagatttgaatcttaacaaagaacttggcatgcaagtaaatataagaaagatattcccaaccgttttgggttgaattgtgtctccaaaaagatatgccgaaatcctaaccctggtacctgagaatgtgaccttatttggaaa

SEQ ID NO: 555215 - DNA, 537 bp, Homo sapiens
cacatttgacaaaaagcttttaaaggaagagataaaatatgtaaatagatattttaatgtattatttctacatgccaatggatatttttgggtgccttcagggtatatgatttggaaaacataatttttcttttcacaataagaactcgcaatgaagaaaaaatagatttaaactacacacacacaaaatctaaattctgctttgaatatcatctattagacaccaggcttttccctaggcatatatgaatatccttggccttgaggggctagtrgtccaataggggagaaggcatataaaaatataacttcaatgtgatatggtggtgccaccaagatggaaatgggagcaagacatcttgggaattcttcctgcaggaaagaaaacctgagaggagatttgaatcttaacaaagaacttggcatgcaagtaaatataagaaagatattcccaaccgttttgggttgaattgtgtctccaaaaagatatgccgaaatcctaaccctggtacctgagaatgtgaccttatttggaaa

SEQ ID NO: 555216 - DNA, 558 bp, Homo sapiens
tgtacccacataaattaaaaactttragaaccctgagagtttactttccagtataactaagcattctaaatgcaactttgaatgaaaatttctttatatgcctcaaatttgaaaatatgtaagctagtcaaagaatgtgtatttattattggagactcaataattaatgatgacaagctgttaagctagagaagtggttctcaggcaggcatgattttgctccctagggagcactatcaacttctggagacatttttcgatgtcatgctatggggaggagggaggagatgctgttggcatcttgtagatagaggccaaggatttcttgtaatacataggacagcctcaatgtcaactgtgctaaggttgggaaatgctgagtaagaagaattgaaagcccagggccagggtcttccaaaaaaaactaggcacacctgtccagcaagagctggacccagtgagttgtcacctatggcagacagagaggaagaaataccctcccactccactttctatctttttggctgtgaagtaaatgagcataacaaggaaaaatca

SEQ ID NO: 555217 - DNA, 533 bp, Homo sapiens
ttttgagtgccaacatgatgtgttatagtcaaaacacaggtaatggccaggcatggtggctcaaacctataatcctaccaccttgggaggccaaggcagaaggactgcttgagcccaggagtttgagactagcctagacaacaaaaccccatcactacaaaaaatttaaaaattagccaggcgtggtgctatgctacttaggaggctgatgtgggaggatcgcttgagctcaggagtttgaggctgcagtgagctatgaccaccccatcgcactccagcctgggtgacagagtgtctgactctgtctcaaaaaaaaaaaaaaacaaaaaaaaaggcaggcacacaacacacagtttattcagcttctccaagagaaaaattcaattatcagccagacgcagtcactgacacctataatcccagcactttgggaggctgaggcgggcggatcacctgaggtcaggagttygagaccagcctggccaacatggtgaaatgtctttataaaaatacaaaaattagccgggtgtggt

SEQ ID NO: 555218 - DNA, 557 bp, Homo sapiens
agagaaagacttattttctcctacagctgtttgaccccaggtatttaacactattgtctttgccaactacagaccctcaggggtccttgccgagggccccmctggagagccagaatttgtccctgggacaggatgaggagtccaggagaagcagcagtagacaggctgtgctgggagtcatcaggggccaccaggatacaaggggtggggggagcccagctgccttgctgacttgcctttcaaccctgatgtctgctctcttggtagtaagccagaagtggggcgtgggacgatgtgacaggagcaccaacgtccccaccaagccatcacagcaacaggctttgtccaggatcttctggaaaggatccaaaatgaattgtgcttcctaacactcgtttcaggaataggtgccaaagtctctatttagtgcatttctgtattgaaaggaacatttgtccaagggaatccacaatttacaataagcataatcactggctatactgcacctgaaaattccaaagagatgatgatatgtttcagaacagcaccctctgtcc

SEQ ID NO: 555219 - DNA, 538 bp, Homo sapiens
gaaacctactacctgggagtgttcagtgaggttagtgtttatgatttacaagagggaatggagaatcttgcttaattctgtatattgttcaagyggaggtcaacaaccattgtacagcattgcttaagaagaaaaatgtcatgcagagggaagaaaatcccttcccagcatgtgacagctaaaatggtcatataagagaataatggcgacttatggtcagtcactccataaatggtccattatgatagacacttcataaataatttgaggcctttcctctgggtcccagactagccgtgcactgcacacttccaatggataatgtacaaacttactcaaactcaacctgctccaaatggcacgtcttattctcttgccccaaacttgtttgtcctaaggtgttctccactgaagtgactgacaccatcatccacctaggatccatgccagaaagccaagcagcatccaggaggctgctctcctcagcatcccttatattcaactggacatcaagccatgtccatttgcactttacact

SEQ ID NO: 555220 - DNA, 538 bp, Homo sapiens
gaaacctactacctgggagtgttcagtgaggttagtgtttatgatttacaagagggaatggagaatcttgcttaattctgtatattgttcaagtggaggtcaacaaccattgtacagcattgcttaagaakaaaaatgtcatgcagagggaagaaaatcccttcccagcatgtgacagctaaaatggtcatataagagaataatggcgacttatggtcagtcactccataaatggtccattatgatagacacttcataaataatttgaggcctttcctctgggtcccagactagccgtgcactgcacacttccaatggataatgtacaaacttactcaaactcaacctgctccaaatggcacgtcttattctcttgccccaaacttgtttgtcctaaggtgttctccactgaagtgactgacaccatcatccacctaggatccatgccagaaagccaagcagcatccaggaggctgctctcctcagcatcccttatattcaactggacatcaagccatgtccatttgcactttacact

SEQ ID NO: 555221 - DNA, 573 bp, Homo sapiens
caacacataatagagcctattgtcagacaaagccactgtcaaagggtagctattgttgtggttattattatctcttttgaattagtaaaatgattctgttattctacttttataattgttattttaaagcctttatttcaagacttaataccttgagacataaacaccaggtgtgacaaaaatgaacctttggtttatcttcttgtagaatttattgaaatggcgttatttaagagaayactactagtaattacatagctagtaatttaaatgccaacttggcaatgtttgaaaatgatttggaaaatggaaccacaatgcaactgtgaccaaaggttatcatctagttattttcaaactttaatgtgcataggaatcatatgatcttattaaaaagcagattctgaggtctggaatggggtctgagatcctgcattttatttatttatttatttgagccagagtttttctctgtcccctaggctggagtgcagtggtgcaatctcggctcactgcaacctccacctcccagtccaagtgattctcctgcctcagcctcccgagtagctgaga

SEQ ID NO: 555222 - DNA, 573 bp, Homo sapiens
caacacataatagagcctattgtcagacaaagccactgtcaaagggtagctattgttgtggttattattatctcttttgaattagtaaaatgattctgttattctacttttataattgttattttaaagcctttatttcaagacttaataccttgagacataaacaccaggtgtgacaaaaatgaacctttggtttatcttcttgtagaatttattgaaatggcgttatttaagagaacactactagtaattacatagctagtaatttaaatgccaacttggcaatgtttgaaaatgatttggaaaatggaaccacaatgcaactgtgaccaaaggttatcatctagttattttcaaactttaatgtgcataggaatcatatgatcttattaaaaagcagattctgaggtctggaatggggtctgagatcctgcattttatttatttatttatttgagccagagtttttctctgtcccctaggctggagtgcagtggtgcratctcggctcactgcaacctccacctcccagtccaagtgattctcctgcctcagcctcccgagtagctgaga

SEQ ID NO: 555223 - DNA, 611 bp, Homo sapiens
aagaaacttgtcaaatttctacagaacttgtcttaagtcacttaaattgtagacctttatatttttattgctgtcaaaagtttgtaaaatatgtttcagataattatggaaaatcataaaacctgcctgtggtaggaaacagtaagagttcacaaattatacttaccgttaatcagttcagacataactgaactgcaaatgaacttacttttatttttttctgcctcaagcaagccccatgttctccaatacattgtgaactcattggaaacaacaggctgccttttgtcttttctctgcagtggtgacaaatataagagcttctgacagtttcaaaatactacaaataacacaragcattgtttattactctaagagcactgtaataaaacaccatctacaaatagactaatacctgcatgacattaccacacatgatgccttatattgaatcatagtgttctaaccattataacaactgttagtggcgccactgaagaggaaagaagactgatgcaatgttcacaagtctcctatccccttgatggaaatttcaaaagcaaatggttatttattattttgtgtgctttaggtcccattgcaaagtgtta

SEQ ID NO: 555224 - DNA, 611 bp, Homo sapiens
aagaaacttgtcaaatttctacagaacttgtcttaagtcacttaaattgtagacctttatatttttattgctgtcaaaagtttgtaaaatatgtttcagataattatggaaaatcataaaacctgcctgtggtaggaaacagtaagagttcacaaattatacttaccgttaatcagttcagacataactgaactgcaaatgaacttacttttatttttttctgcctcaagcaagccccatgttctccaatacattgtgaactcattggaaacaacaggctgccttttgtcttttctctgcagtggtgacaaatataagagcttctgacagtttcaaaatactacaaataacacaaagcattgtttattactctaagagcactgtaataaaacaccatctrcaaatagactaatacctgcatgacattaccacacatgatgccttatattgaatcatagtgttctaaccattataacaactgttagtggcgccactgaagaggaaagaagactgatgcaatgttcacaagtctcctatccccttgatggaaatttcaaaagcaaatggttatttattattttgtgtgctttaggtcccattgcaaagtgtta

SEQ ID NO: 555225 - DNA, 564 bp, Homo sapiens
gtatcagtaaagagatagaaaacctacaaagaaaccgaaaaataattctggagctgaaaagtataataacaaataaaaaatgcactggagggattcaaagcaaatttgaacagagaaaagaatctgtgaacttggagatagaacaatggaaattaccaaatctgaggaacaaaaccatctggggatgcagtccagtaggtctcagccttattttactcagcctctattcaagatggagttgctgtgattcaaatgcctctaacacaagtgagatgaactcagagaggagatccacactgacacataattaaactcttattttttatttttttgagacactctcatcctgccacccaggctggagtacagtggtatgatcttggctcactgcaacctccatctcccaggctcaagagatgctctcacctcaggcacccaagtagttaggactacagacatgcattagcatacccggctaaattttttttgagggtggttagagatgcggttttaccatgttkcccaggctgatctcaagctcctgggctcaagcaatccacccca

SEQ ID NO: 555226 - DNA, 521 bp, Homo sapiens
tttatattgctgaattccaacctccctggggcggaacctggaggtcctgtttcttacggacttggttrccacagtccaggagcatttgaaggcacaatgcaggggctcagattggcacagaattcttttgtgaaatatcagtgccacagattgtaacagatagcttcatgcacactctgcattttattggtttgtttggaaaatgttggccattgaattattcatagatttatttcaaatagtttggaaattgttgtacttttgaaaacatgctgttcctgtagttttttgatgagagttatagttgttatatatacataaagataattttcttttcatttttgagacaattctttttatcctaaatattttatcatctttaaatttgtttctgtattattatatgtgctcctgaagcgagcactctttttatctatgatacttccataataatctcttctatttatagctattggtagttcccctaaattctgacgatagaaatttttatttgctgttta

SEQ ID NO: 555227 - DNA, 521 bp, Homo sapiens
tttatattgctgaattccaacctccctggggcggaacctggaggtcctgtttcttacggacttggttgccacagtccaggagcatttgaaggcacaatgcaggggctcagattggcacagaattcttytgtgaaatatcagtgccacagattgtaacagatagcttcatgcacactctgcattttattggtttgtttggaaaatgttggccattgaattattcatagatttatttcaaatagtttggaaattgttgtacttttgaaaacatgctgttcctgtagttttttgatgagagttatagttgttatatatacataaagataattttcttttcatttttgagacaattctttttatcctaaatattttatcatctttaaatttgtttctgtattattatatgtgctcctgaagcgagcactctttttatctatgatacttccataataatctcttctatttatagctattggtagttcccctaaattctgacgatagaaatttttatttgctgttta

SEQ ID NO: 555228 - DNA, 416 bp, Homo sapiens
ctcagattggcacagaattcttttgtgaaatatcagtgccacagattgtaacagatagcttcatgcacactctgcattttattggtttgtttggaaaatgttggccattgaattattcatagatttatttcaaatagtttggaaattgttgtacttttgaaaacatgctgttcctgtagttttttgatgagagttatagttgttatatatacataaagataattttcttttcatttttgagacaattctttttatcctaaatattttatyatctttaaatttgtttctgtattattatatgtgctcctgaagcgagcactctttttatctatgatacttccataataatctcttctatttatagctattggtagttcccctaaattctgacgatagaaatttttatttgctgttta

SEQ ID NO: 555229 - DNA, 521 bp, Homo sapiens
tttatattgctgaattccaacctccctggggcggaacctggaggtcctgtttcttacggacttggttgccacagtccaggagcatttgaaggcacaatgcaggggctcagattggcacagaattcttttgtgaaatatcagtgccacagattgtaacagatagcttcatgcacactctgcattttattggtttgtttggaaaatgttggccattgaattattcatagatttatttcaaatagtttggaaattgttgtacttttgaaaacatgctgttcctgtagttttttgatgagagttatagttgttatatatacataaagataattttcttttcatttttgagacaattctttttatcctaaatattttatcatctttaaatttstttctgtattattatatgtgctcctgaagcgagcactctttttatctatgatacttccataataatctcttctatttatagctattggtagttcccctaaattctgacgatagaaatttttatttgctgttta

SEQ ID NO: 555230 - DNA, 414 bp, Homo sapiens
aatatcagtgccacagattgtaacagatagcttcatgcacactctgcattttattggtttgtttggaaaatgttggccattgaattattcatagatttatttcaaatagtttggaaattgttgtacttttgaaaacatgctgttcctgtagttttttgatgagagttatagttgttatatatacataaagataattttcttttcatttttgagacaattctttttatcctaaatattttatcatctttaaatttgtttctgtattattatatgtgctcctgaagcgagcactctttttatctatgatacttccataataatctcttctatttatagctattggtagttcccctaaattctgacgatagaaatttttatttgctrtttaggtttgtgactgaattgtgagaattc

SEQ ID NO: 555231 - DNA, 450 bp, Homo sapiens
cgtctaatatatactattttattggtttattttgaaaaacatgggtatagaattatttaaatattattttatttattkaaatatttattaaatatatttatttatttaaatgttattattactttaaatattattttaaatattttggaaatactggtatttttgaatagatgctgtttctataaagctgtgtgatggtattataactgttatatacacatacatataattttgttttcctttttaagagaggattcttttcatcctaaatcttttacctttcaatctttgtatctattattacacgtgctgctgaagggagcatggtttttatctatgatacttagttaacatatatattacatttatagctatgtagtagttcccctaaattcttgtaaaaataaatttttatttgatatttcatctatgtttgaaatgtgagaattc

SEQ ID NO: 555232 - DNA, 450 bp, Homo sapiens
cgtctaatatatactattttattggtttattttgaaaaacatgggtatagaattatttaaatattattttatttatttaaatatttattaaatatatttatttatttaaatrttattattactttaaatattattttaaatattttggaaatactggtatttttgaatagatgctgtttctataaagctgtgtgatggtattataactgttatatacacatacatataattttgttttcctttttaagagaggattcttttcatcctaaatcttttacctttcaatctttgtatctattattacacgtgctgctgaagggagcatggtttttatctatgatacttagttaacatatatattacatttatagctatgtagtagttcccctaaattcttgtaaaaataaatttttatttgatatttcatctatgtttgaaatgtgagaattc

SEQ ID NO: 555233 - DNA, 459 bp, Homo sapiens
atatactaacacgtctaatatatactattttattggtttattttgaaaaacatgggtatagaattatttaaatattattttatttatttaaatatttattaaatatatttatttatttaaatgttattattactttaaatattattttaaatattttggaaatactggtatttttgaatagatgctgtttctataaagctgtgtgatggtattataactgttrtatacacatacatataattttgttttcctttttaagagaggattcttttcatcctaaatcttttacctttcaatctttgtatctattattacacgtgctgctgaagggagcatggtttttatctatgatacttagttaacatatatattacatttatagctatgtagtagttcccctaaattcttgtaaaaataaatttttatttgatatttcatctatgtttgaaatgtgagaat

SEQ ID NO: 555234 - DNA, 459 bp, Homo sapiens
atatactaacacgtctaatatatactattttattggtttattttgaaaaacatgggtatagaattatttaaatattattttatttatttaaatatttattaaatatatttatttatttaaatgttattattactttaaatattattttaaatattttggaaatactggtatttttgaatagatgctgtttctataaagctgtgtgatggtattataactgttatatacacatacatataattttgttttcctttttaagagaggattcttttcatcctaaatcttttacctttcaatctttgtatctattattacacgtgctgctgaagggagcatggtttttatctatgatacttagttaacatatatattacatttatagctatgtrgtagttcccctaaattcttgtaaaaataaatttttatttgatatttcatctatgtttgaaatgtgagaat

SEQ ID NO: 555235 - DNA, 450 bp, Homo sapiens
cgtctaatatatactattttattggtttattttgaaaaacatgggtatagaattatttaaatattattttatttatttaaatatttattaaatatatttatttatttaaatgttattattactttaaatattattttaaatattttggaaatactggtatttttgaatagatgctgtttctataaagctgtgtgatggtattataactgttatatacacatacatataattttgttttcctttttaagagaggattcttttcatcctaaatcttttacctttcaatctttgtatctattattacacgtgctgctgaagggagcatggtttttatctatgatacttagttaacatatatattacatttatagctatgtagtagttcccctaaattcttgtaaaaataaatttttatttgatatttcatmtatgtttgaaatgtgagaattc

SEQ ID NO: 555236 - DNA, 545 bp, Homo sapiens
tcaccttcacagcaattgtgatcatattggtctggattgattatttgctgcccagtgatatttttccttaatggggttgtggttatttgaacatatttattagctctgraagataatcctgtgccgttttttatgtagaaaaaaacataaggctgggtgcagtgctcacacctacaatccctgcagttttggaggtcatggcgggaggatcacctgaggccaggagtttgaggccagcctcagcaacatagcatctacatctatttttaatttttattttttaaagaaaaacaatagaagagaaggctgatcccaagctacagggtttttttgtttgtttgtttgttttggagacagagtcttgctctgtctcccaggctgcagtgcagtggcacaacctcggctccctgcaactttcacctctgggttcaaacaaattctcctgcctcagcctcccaagcagctgggactacaggcacccgtctgtacgtccgactaacttttgtaaaaatagtagagacaaggtttcaccatgttggccaggc

SEQ ID NO: 555237 - DNA, 545 bp, Homo sapiens
tcaccttcacagcaattgtgatcatattggtctggattgattatttgctgcccagtgatatttttccttaatggggttgtggttatttgaacatatttattagctctgaaagataatcctgtgcygttttttatgtagaaaaaaacataaggctgggtgcagtgctcacacctacaatccctgcagttttggaggtcatggcgggaggatcacctgaggccaggagtttgaggccagcctcagcaacatagcatctacatctatttttaatttttattttttaaagaaaaacaatagaagagaaggctgatcccaagctacagggtttttttgtttgtttgtttgttttggagacagagtcttgctctgtctcccaggctgcagtgcagtggcacaacctcggctccctgcaactttcacctctgggttcaaacaaattctcctgcctcagcctcccaagcagctgggactacaggcacccgtctgtacgtccgactaacttttgtaaaaatagtagagacaaggtttcaccatgttggccaggc

SEQ ID NO: 555238 - DNA, 497 bp, Homo sapiens
tgggttagaaaaacaagatccaggcgaggcatggtgactcacaactgtaatccccatgctttgggaagctgaggcaggaggatgtcgcttgagttcaataccagcctgggcaacagagcaagaccactagctctaaaaaaaaaaaaaaaaagctgggcctcgtggcatgtgcctktagtcccagctactcgggaggctaagacatgagggttgtttgagttcaggagttgaaggctgcagctgagttatgattgccactgcactacaacctgtgtgacaaaacaagaccttgtctctaaaataaattttgtaaaatgaatttaacaaaaacaagatccagctatatgctgcctataaggaactcactaaaaagatgcatacagactaagtgatgggatgaaaaaagatattccactcaaatgtaaactaaaagcatgcaggactagctatacttatatcagacaaaatagactttaagtcagtcaaaaaacaaaaag

SEQ ID NO: 555239 - DNA, 497 bp, Homo sapiens
tgggttagaaaaacaagatccaggcgaggcatggtgactcacaactgtaatccccatgctttgggaagctgaggcaggaggatgtcgcttgagttcaataccagcctgggcaacagagcaagaccactagctctaaaaaaaaaaaaaaaaagctgggcctcgtggcatgtgcctgtagtcccagctactcgggaggctaagacatgagggttgtttgagttcaggagttgaaggctgcagctgagttatgattgccactgcactacaacctgtgtgacaaaacaagaccttgtctctaaaataaattttgtaaaatgaatttaacaaaaacaagatccagctatatgctgcctataaggaactcactaaaaagatgcatayagactaagtgatgggatgaaaaaagatattccactcaaatgtaaactaaaagcatgcaggactagctatacttatatcagacaaaatagactttaagtcagtcaaaaaacaaaaag

SEQ ID NO: 555240 - DNA, 588 bp, Homo sapiens
acctcaattcttgccacctccaatttccaccctaattctcaggatcggtggttttccactaagcactcatagctttgttgcaattagaaatataaaatcagtattactctgcactttactgccaatggtagatgagaaactggaacctcaaaaagataatttagcaaactgcaaaacaaagtccattcaagatctggtacaatcaactcttgatcatttggaattttgttttgatttgcttgctgaacaatgcagtccctggttctctccctggctgctggggacatgcccttacaggctcgggggaaaaaagcagtggttcaatactgtttcctgacaactgcactggttattaaacacaactacgaaataaacttaggaagatgtataactaccaaactatgttttatgatgataactgttcattttaggcctaccatttctttcacctgtgacccaagtaattyagaggtgagatgtacgagcctgtctgaggcattttagacaagggagaaggtgcctacacaagtaccaaacaatgcagtgttaaaactgctttccataggtggcaatcttctatgatgctta

SEQ ID NO: 555241 - DNA, 599 bp, Homo sapiens
gctttttcctgtcatattgtagccaaactgttaaaagtcaaagacaaagaaagaattttaaaacagcaagagaacagtacctagtcacatataagagaatcctcaccagactaaaaattgacttctcagcagaaacatgacaggccaaaagagagcggaatgatatattcaaagtgctaagtgaaaaaaatggctactcaagaatactatacccagctaaattatccttcataaatgaagaaaaagataaagactttcccagacaaggaaaagctgaggcaattcatctctactagaccagacctacaagaaatgcataaaggagttctgtgcttggaagcaaaaggaccatatctactatcatgaaaacacatgaaagtataaaactaatgaatagagaaaacacacacgagaaagagaaaggactcaaatgttacaactacataaaatcaccaaaccataaagataaaaaataagagaggaagaaaataacaaaggatatacaaaacaaccagagaacaattaacagaatgacaggaataagtcctcacatatcarcagttaccttgaatgtaaacaaattaaaatttccacctaaa

SEQ ID NO: 555242 - DNA, 609 bp, Homo sapiens
ggacgtggggcttactttccctccacctgagtgtgggctggacctacttactcactatgaagaagtatgaataagataatgatcaaagagtgcaaatgaaaaaacagtwaatttaacaatgagggaatctggcaaacaccaccttaactgagtgattaaaataaatattagcagtaataagtcatattgatatcatgtgcaaccaatatgatttgatgagaaggatacatcatctctgcagtattcttacccagaatccacaactttggcctaatcatgagaaacgttaagcaaagtcagattgaggatgttctacaaaatattagaccatgattcttcaaaagtgccaaggtcatgaaaggcaaagggcaaccaagaaactgccatagactggggaggctaaagagacctaacaaatacttgtagtatcctggactggatcctagaacagaaaaatggtattagtggaaaaactggggtaagcctaacaaagtccatagtttagtaggcagtcttgtagcaaagttaacttcttagttttgataaatattccatgtttaagatgtcatcattagagaaatctaagtgaaagtacatatgagaacactt

SEQ ID NO: 555243 - DNA, 421 bp, Homo sapiens
tggaaatagcgcttcaaggaacatccttgcaygcacacctgattctgcttctgttttgggccttatgaacgtgtcccaaggatagagttcgtcttcctttaaaagctcactgtataatcaggacgcaaaggccagggttccttcattacaaggacaggagaggctcttaacttgaagcttcattaagttacaaacaattacctggtattattacataagcatgatctcgttagattgcccagatacatcaggagtctgatggtaactcccaatggctccttacagaaaatggtgaacctgttaacctgtagctgctgaaactggctcggtgctccctggcaatttccacacgcctctcttcctcccctgctgtctggttcctattcatcctcttccctgagttccaagtcattttggccct

SEQ ID NO: 555244 - DNA, 421 bp, Homo sapiens
tggaaatagcgcttcaaggaacatccttgcacgcacacctgattctgcttctgttttgggccttatgaacgtgtcccaaggatagagttcgtcttcctttaaaagctcactgtayaatcaggacgcaaaggccagggttccttcattacaaggacaggagaggctcttaacttgaagcttcattaagttacaaacaattacctggtattattacataagcatgatctcgttagattgcccagatacatcaggagtctgatggtaactcccaatggctccttacagaaaatggtgaacctgttaacctgtagctgctgaaactggctcggtgctccctggcaatttccacacgcctctcttcctcccctgctgtctggttcctattcatcctcttccctgagttccaagtcattttggccct

SEQ ID NO: 555245 - DNA, 472 bp, Homo sapiens
taaattccataggctgggctcggtggctcatacctgtaatcccagcactttgggaggccaaggcaggtggatcacctgaggtcaggagttcgagaccagcctggccaacatggtgaaaccccgtctctactaaaaatacaaaaattaaccggcatggtggtgagcacctgtaacttcagctactccggcagctgaggcagragaatggcttgaacctgggaggcggagtttgcagtgagccaagatcgtacctctgtactccagcctgggtaacagagtgagactctgccaaaaaaaaaaaaaatatgtatatatatatatatatatatatatatatatatatatatatatattccatacccattagtactcattctcactctgtccattcacttatttcttaaaaaaaaaaagtctacttagatcctttgtcaatttttaaatttggttatatgtccttttacttttgagt

SEQ ID NO: 555246 - DNA, 471 bp, Homo sapiens
agatgtattcctaggcattgtatttttgtgtgtggctattgtaaatgggattgcattcttgatttggctctcagcttgaatgttactggtgtacagaaatgctgctgacttttatacattgattttgtatcctgaaacttcactgaagttgtttattagttccaggagccttcggcagcatctttagagtttactaggcatagaatctcatcatcagcaaagagagttagtttgacttttcttttcctatttggatgccttttatttttttctcttgcctgatttctctggcaaggacttccagttaaacatcacacttttaaaacacagaatagttgcaagtaatgaaacatgagaactaaaagtctttccccaacctgattcctcayatgtactccttccccagggctaactaatccttctgacttgttcaaaatccttccaacatgtctgaatgaagatttgagtgta

SEQ ID NO: 555247 - DNA, 441 bp, Homo sapiens
ggaattctcgtgggagtaaagtaaaagttaaacttatttttataaataaaaactacagttagcagttggagtttacagagctcctgctgtgacccaggcacgactcttggtgttggggatccactgtgaactaacgaagtgaactcaggaaggtaaccctggaaaccaccgcatgcaccctccctgagggattcacatcccattgctgcatccaccccactgggcctgaactgggggaccaggacccccacaactgcytgggtgaaactcagaggcgccttgcattttcagaaggccactttactagaagtgacatctccaggagctgtgctatgtgagcctcgccttttactacatctcttttaactagaagcacatcctgtaagagcctaggatggcgtccttgtggcgatgtttgtggcagtccctgttttggtcctg

SEQ ID NO: 555248 - DNA, 618 bp, Homo sapiens
gagatgcacatcttctagactataatccaaaaggctctgtccatcctaccccactggccacactgaggcccacgaacactgcatcctgggtatgttgcatccaacacactaacaactcggtgccgatgcccctgagccagagatcagccgtttctggcctaagccatcctcctcagctcaactatgctcttcccacctgggtccagcctcaagcacggggtaggtgctcactgatatttgctcagtgaaaacctccaatgcctcctcccagttcccagtgccgaccacggctctgtcccctcccttgtcccacacgcaaggccattaaagccacaggcatttcggaaggcctctgcttgttgtccccagttcctcctaataattctttctaccgggtaccacatcagacagaactaagcacatttgccgcttcaggaaattccagtgtcagttttcacggtagccccctctcactycctccaactccgggagctgtaaccttcccacccgggacattcctgtccggctttctgctgacctgggtctttctcctcctccagtttcctccctgaccatcccttcgaaggacatctttctgggactcttcctagatgccca

SEQ ID NO: 555249 - DNA, 586 bp, Homo sapiens
agatctccagagccccaagcaagttcatgaggaggatttgtcttttagcaaccgccccgtatctgcccctccctacaaacacccaggagattacctacctgggaacaggcatgtgtctctttggccctgkcacccaccactcagaagcgctgggcatgactgtacgggttgttcaaggtaccagagtatccaccaagggggagggaggggctgagatcctgccagagatgtgtctgccaagccaccccacagggcacgcaggggcctagcctgctccaatccccaccgcgggcgctctgtggccggttctgtcctgtcccatctatgcccagccccagcacggggtctaattcaccgtggtcctcaacaatgatgcattgggaaggtttcattctgcatacctggctggggtcagtacacactcctcaccagcttcccccaggtgtgactgtaagggcccacccctgccgagacccccacacacctcccctctttgacacgccctgatctgttgccagaaccgctcacttgcctggtgaagaaaagaaagcagggaggagctagctcctgctagtgagtatcttgc

SEQ ID NO: 555250 - DNA, 626 bp, Homo sapiens
cttctttttgtaaaattgagactatactgttataattgttcaattttactagttgttgtcaatctcttactgtgcctgatttataaattaaactttatcccaggtgtggatggataggaaaaacatagtgtacatggggctcagtactatctgtggtttcgggcatcctctgggggtcttggaacgtaccccctgaggatagagggatgactgtattgaattaatagaaaaccttttggccagtcacaccgactgtgtgcatatgtgtcacttaaggagactaggtgatggcaaggtgagaaacaaaaatcttggtggcttaaaataaagctctttctctcgtattctatgtccacagccgaccggcccgtcctgctgaccccagccccaggtgaatggagcagctggagcctggatggtgctggtcactgcagcaggaagccactttctctgatggccgcctcccaggcaccagtgccccagcctggaaactgccacattccaccacaacatggtcttgaaacacaagttcatttcagagygagcgcgcaagatgctgggatacaatcagcatcacagaagcactgcgtcctggaggacagtgtgcggtgacagaggcacccatc

SEQ ID NO: 555251 - DNA, 397 bp, Homo sapiens
aaaatcacaactgaattctcacaattcagtcacaaacctaaacagcaaataaaaatttctatgaccagaatttgggggaactaccaatagctataaatagaagagattattatggaagtatcatagataaaaagagtgctcgcttcaggagcacatataataatacagagaaaaatttaaagataataaaakatttaggataaaaagaattctcacttaaaaatgaaaagaaaattatctttatgtatatataacaactataactctcatcaaaaaactctacaggaacagcatgttttcaaaagtacaacaatttccaaactatttgaaataaacctattaatgattcaatggccaacattttccaaacaaaccaataaaatgcatagtgtgcatg

SEQ ID NO: 555252 - DNA, 397 bp, Homo sapiens
aaaatcacaactgaattctcacaattcagtcacaaacctaaacagcaaataaaaatttctatgaccagaatttgggggaactaccaatagctataaatagaagagattattatggaagtatcatagataaaaagagtgctcgcttcaggagcacatataataatacagagaaaaatttaaagataataaaagatttaggataaaaagaattctcacttaaaaatgaaaagaaaattatctttatgtatatataacaactataactctcatcaaaaaactctacaggaacagcatgttttcaaaagtacaacaatttccaaactatttgaaataaayctattaatgattcaatggccaacattttccaaacaaaccaataaaatgcatagtgtgcatg

SEQ ID NO: 555253 - DNA, 557 bp, Homo sapiens
gcaaatctgacctccccagctcaatacccttcactggctccctattgcctgcagggtgtggtcctaggtcctcagcctgagtctgaaggccctggggacctggccctccctcccctcctggcttagtgggctcagcaagacaagcccatgttttgttttgtttttttaatttttttaattttttgagatggagtctccctctgtctctcaggctggagtgcagtggcgtgatcttgactcactgaaacctctgcctcctgggttcaagcaatcctcctgcctcagcctcccaagtagctgggattacaggcacccgccaccatgcctggctaatttttgtatttttagtggagacaggccaggctgrccaggctggtctcgaactcctgacctccaatgattctcctggctcagcctcccaaagtgctggaattacaggattgagccaccgcgcccagcttcaagtccatgcttttccctctttcctctccatgccttcttcctgctcacccccacaccctgaccaggacatccttctcctcctcctttgtcccgcc

SEQ ID NO: 555254 - DNA, 477 bp, Homo sapiens
tgtggacacaggctggagggagagactccagaggaactgggaggccaggtagtggctgtcacagaggagcagtgagagagaatgaccactgaccccagcagtgggagcagggataaggagtagataaccggactttggtccctaaactgagactgggcttagggtgggagagggaggggagtagagacgtcaggggcttccatttgaggcccagatatcagccaccccctaccccaagccagcagcagaaagaagcaatgaaactaccccttgccccccgataacccccctacaagccacttggcagccttacccttgcagaaatgggggtgctttgacgacctcccatggctatatgaggatgggatgtcayggaggccaggaaggcagaaaaggctgtgtatgtttcaaagccagaattctcactcttcccctaaaattctcgaaagagcgactgcagtctggatgtgggaggga

SEQ ID NO: 555255 - DNA, 458 bp, Homo sapiens
ctgaattcaatatctaaaaattatttcaacacaagtccactgcttattagcctagtgattgctgaccccagctagaatatagctaaacagttaaacacccctgctgcttttctaatttcctttttctttctaagacttccttactgcatagaaggaactttyggagctaattctgagtttaatggttatagaatgttacaacagaattaatccctatttacaaaatgaattcctttacaggcagtcttatgaattattgccactgaaattatgggtcagaaattatggataaaagaaacaggtgtggaagtcacaactacttgacattggcaaaatctagctgtgtaaccttggacaagtcacttatcctctttggctctcaacttcctcatctataaaataaagggactgaaactccatagttgctaaagtccctttcattgtctaaattctgtcct

SEQ ID NO: 555256 - DNA, 458 bp, Homo sapiens
ctgaattcaatatctaaaaattatttcaacacaagtccactgcttattagcctagtgattgctgaccccagctagaatatagctaaacagttaaacacccctgctgcttttctaatttcctttttctttctaagacttccttactgcatagaaggaactttcggagctaattctgagtttaatggttatagaatgttacaacagaattaatccctatttacaaaatgawttcctttacaggcagtcttatgaattattgccactgaaattatgggtcagaaattatggataaaagaaacaggtgtggaagtcacaactacttgacattggcaaaatctagctgtgtaaccttggacaagtcacttatcctctttggctctcaacttcctcatctataaaataaagggactgaaactccatagttgctaaagtccctttcattgtctaaattctgtcct

SEQ ID NO: 555257 - DNA, 458 bp, Homo sapiens
ctgaattcaatatctaaaaattatttcaacacaagtccactgcttattagcctagtgattgctgaccccagctagaatatagctaaacagttaaacacccctgctgcttttctaatttcctttttctttctaagacttccttactgcatagaaggaactttcggagctaattctgagtttaatggttatagaatgttacaacagaattaatccctatttacaaaatgaattcctttacaggsagtcttatgaattattgccactgaaattatgggtcagaaattatggataaaagaaacaggtgtggaagtcacaactacttgacattggcaaaatctagctgtgtaaccttggacaagtcacttatcctctttggctctcaacttcctcatctataaaataaagggactgaaactccatagttgctaaagtccctttcattgtctaaattctgtcct

SEQ ID NO: 555258 - DNA, 458 bp, Homo sapiens
ctgaattcaatatctaaaaattatttcaacacaagtccactgcttattagcctagtgattgctgaccccagctagaatatagctaaacagttaaacacccctgctgcttttctaatttcctttttctttctaagacttccttactgcatagaaggaactttcggagctaattctgagtttaatggttatagaatgttacaacagaattaatccctatttacaaaatgaattcctttacaggcagtctyatgaattattgccactgaaattatgggtcagaaattatggataaaagaaacaggtgtggaagtcacaactacttgacattggcaaaatctagctgtgtaaccttggacaagtcacttatcctctttggctctcaacttcctcatctataaaataaagggactgaaactccatagttgctaaagtccctttcattgtctaaattctgtcct

SEQ ID NO: 555259 - DNA, 314 bp, Homo sapiens
aacacgtctttgccctcatgaagctcataaccaaaagtacacgcagactgaaaaacacggaaaaagagaaagtgttaggaaactgttggggagtaacrcacatacaaattctgacctagggagtacagagagaccacttggggatgctggtgatagaccttaaagagccttgtgttgaaagggtcttggaaagatgacagaaagaggaaggatattctggacaggaagaatgcctttcacaaaaagctcagaagcaggaaggcaaatgtaaaatatgaatgatgtagtatagacagaagataaactaaagaagt

SEQ ID NO: 555260 - DNA, 314 bp, Homo sapiens
aacacgtctttgccctcatgaagctcataaccaaaagtacacgcagactgaaaaacacggaaaaagagaaagtgttaggaaactgttggggagtaacgcacatacaaattctgacctagkgagtacagagagaccacttggggatgctggtgatagaccttaaagagccttgtgttgaaagggtcttggaaagatgacagaaagaggaaggatattctggacaggaagaatgcctttcacaaaaagctcagaagcaggaaggcaaatgtaaaatatgaatgatgtagtatagacagaagataaactaaagaagt

SEQ ID NO: 555261 - DNA, 314 bp, Homo sapiens
aacacgtctttgccctcatgaagctcataaccaaaagtacacgcagactgaaaaacacggaaaaagagaaagtgttaggaaactgttggggagtaacgcacatacaaattctgacctagggagtayagagagaccacttggggatgctggtgatagaccttaaagagccttgtgttgaaagggtcttggaaagatgacagaaagaggaaggatattctggacaggaagaatgcctttcacaaaaagctcagaagcaggaaggcaaatgtaaaatatgaatgatgtagtatagacagaagataaactaaagaagt

SEQ ID NO: 555262 - DNA, 314 bp, Homo sapiens
aacacgtctttgccctcatgaagctcataaccaaaagtacacgcagactgaaaaacacggaaaaagagaaagtgttaggaaactgttggggagtaacgcacatacaaattctgacctagggagtacagagagaccacttggggatgctggtgatagaccttaaagagccttgtgttgaaagggtcttggaaasatgacagaaagaggaaggatattctggacaggaagaatgcctttcacaaaaagctcagaagcaggaaggcaaatgtaaaatatgaatgatgtagtatagacagaagataaactaaagaagt

SEQ ID NO: 555263 - DNA, 600 bp, Homo sapiens
atgacaggatttcattcttttttattctgttttcgttatgtacatatatcacattttctttatccactcatccattgatgaacacttaggttgattccatatcttggctatgatgaataatgctgcagttaacatgacartgcagatatctcttcaacatacagattttatttcctttggatatttacccagtagtagggttgctggatcataagaactaatatctttctaatgttcagacattctatccaagaatggaggatgcttttccattggttcctgtctacttttgtatctttcagaagtgttttaaaattttcctgattaggtttgcaaattgttaaatttattcctaagtactttatctttttgttggttctctaaatagatttttgtctatcataatatcctctaattggttattgtttgtatacattaaggctattgatttttgtttgttaattttatatcctaccaccttattattttttgttagtttgttgattctgtaggattttctcattagattatcatattatctgcaaacagacaattctatttgatgtgtctaattaatttatcttgtctaattgcactggt

SEQ ID NO: 555264 - DNA, 600 bp, Homo sapiens
atgacaggatttcattcttttttattctgttttcgttatgtacatatatcacattttctttatccactcatccattgatgaacacttaggttgattccatatcttggctatgatgaataatgctgcagttaacatgacaatgcagatatctcttcaacatacagattttatttcctttggatatttacccagtagtagggttgctggatcataagaactaatatctttmtaatgttcagacattctatccaagaatggaggatgcttttccattggttcctgtctacttttgtatctttcagaagtgttttaaaattttcctgattaggtttgcaaattgttaaatttattcctaagtactttatctttttgttggttctctaaatagatttttgtctatcataatatcctctaattggttattgtttgtatacattaaggctattgatttttgtttgttaattttatatcctaccaccttattattttttgttagtttgttgattctgtaggattttctcattagattatcatattatctgcaaacagacaattctatttgatgtgtctaattaatttatcttgtctaattgcactggt

SEQ ID NO: 555265 - DNA, 600 bp, Homo sapiens
atgacaggatttcattcttttttattctgttttcgttatgtacatatatcacattttctttatccactcatccattgatgaacacttaggttgattccatatcttggctatgatgaataatgctgcagttaacatgacaatgcagatatctcttcaacatacagattttatttcctttggatatttacccagtagtagggttgctggatcataagaactaatatctttctaatgttcagacattctatccaagaatggaggatgcttttccattggttcctgtctacttttgtatctttcagaagtgttttaaaattttcctgattaggtttgcaaattgttaaatttattcctaagtactttatctttttgttggttctctaaatagatttttgtctatcataatatcctctaattggttattgtttgtatayattaaggctattgatttttgtttgttaattttatatcctaccaccttattattttttgttagtttgttgattctgtaggattttctcattagattatcatattatctgcaaacagacaattctatttgatgtgtctaattaatttatcttgtctaattgcactggt

SEQ ID NO: 555266 - DNA, 443 bp, Homo sapiens
gaattccgtgttctttcattttgagttataagaacaaaacatacaatttactactagaaaagctaaggcatcaagatgaatctgagtcaaaatgttcaaaatcaacttttatgtataaggcattccaaattctatcatatttgctgctgttttctttcattaactataattaggaaaatgaaatacttactgacgacggtgcattccaagtatcttttgaaattctttcaattctttttcaagtattggatattcataaacatcatccagtacattcctatatatggtctggagaaaaaagacaaatgasagctcagtggttgaatgcccattttgtagggattaagactcataccatggctatcctaacacaggaaataaggagggattcaggacaatgtacgggtttcaccaggtgccaatgagatccagaatgggatcat

SEQ ID NO: 555267 - DNA, 470 bp, Homo sapiens
aaaatcctccacagtctggtcccaatctcatttctcatgaaatcttccttctcctgcctcccctcccacacccccaattcttggtattctggaaacatgaaatcgtttcagagttccaaaaaacatctaatattttggtatctctgtgcattttctaatgctattcttcccactaggaatactcttcttcaatgtggattctttaaatccaacccaaaacctaatttaaggtccaggtcaaactacttctgccctatgaaagaatcctgctttctcaggtgtaaattcttcttcaaactcctatgtgtctctcttgggattctcttcactgcttccttgtatctcagttagttgtgttgatatctttcctccacaactagactakacttcttgagggcaggagccacatagttgggagccaccatagttagcctggctcctctatgacatcggcttgaacaaaagttagc

SEQ ID NO: 555268 - DNA, 408 bp, Homo sapiens
cctgccccgcagggaggcagctgaggcctgcggagaattcgagcatggtrcgggcgggccagcagtgctggggacccggcacaccctccttagctgctggcccaggtgctaatccccttcccctcactgcctggggccagtggcaccggctggctgctctgagttcggggcccactgagcccgcaacggatcccggagaagccggcaggatccctggggagagttttctttgtgaagggcagggcgccctggaatgggtttgctgagcccgcacccacccagaactcgcgctagcctgcgagcagccctggttcctgcccacgcctctccctccacacctccccacaagcagagggagctggcttcggcctccgccagcccagagaggggttcccacagtgcagcagc

SEQ ID NO: 555269 - DNA, 336 bp, Homo sapiens
tgcctgtaatcccagttacttgggaggctgaggcaggagaatcgcttgaactcaggaggcagaggttgcagtgagctgagatcgcgccattgcactccagcctgggtgacaagagcaaaactccgtctcaaaaaaaaaaaaaaaaaaaaaatcaaacccctcagattgtctcatagagcagtcctcaacctttctggcaccagggaccagtttcacggaagacaatttttccatggacttggagaggaagggggagawgggatggttttgggataaaattgttccacctcagatcatcaggcactagattatcataaggagcacgcaacctagatc

SEQ ID NO: 555270 - DNA, 509 bp, Homo sapiens
atgcatgtttagagaaaactgcagactcagaaaggcctgaaaataytttaagtttacacctcaagctaatcattggcacaaatacagtcaatgacaacccaaaaagcaaaacaatgaacaactttttaaaaagcaaaccctgaggaagagggagaatctgatttgctattagataatttatgaggttacaataattagataaattattagattcaaatacccacttttcaacaataaattacatggcatacaaagaaacaggaaatatggcacatgccaaagaagcagaaactgtccctaaaaatgacatgatgacaaatctaccagacaaaggctttaacaaaaatgtcttaaagattctcaaataactgaaggaagatgtggagaaagtcaagaaaacaaggtatgaataagttcaaatattaataaagacaaaacttaaaaagaaaacaaagagaaattctgaagcttaaaggtataataactaaaatgaaaaatctactacagag

SEQ ID NO: 555271 - DNA, 509 bp, Homo sapiens
atgcatgtttagagaaaactgcagactcagaaaggcctgaaaatattttaagtttacacctcaagctaatcattggcacaaatacagtcaatgacaacccaaaaagcaaaacaatgaacaactttttaaaaagcaaaccctgaggaagagggagaatctgatttgctrttagataatttatgaggttacaataattagataaattattagattcaaatacccacttttcaacaataaattacatggcatacaaagaaacaggaaatatggcacatgccaaagaagcagaaactgtccctaaaaatgacatgatgacaaatctaccagacaaaggctttaacaaaaatgtcttaaagattctcaaataactgaaggaagatgtggagaaagtcaagaaaacaaggtatgaataagttcaaatattaataaagacaaaacttaaaaagaaaacaaagagaaattctgaagcttaaaggtataataactaaaatgaaaaatctactacagag

SEQ ID NO: 555272 - DNA, 617 bp, Homo sapiens
ctttctcttaattcccccggacactgcctaggttaagcactcatttcttattgggatgaccacaagaacttcccagactggtctctctgcttccagactgtctcactgcattttccttgaggttgactgtaggaagctctaaaggcagatctgatgcattactcctctgctaagcctttttttttttttttttttttttgagagagttttgctcttgtttcccaggctggatggagtgccctggcgcgatctyggctcaccgcaacctctgcctcctgggttcaagcgattctcctgcttcagccttctgagcagctgggattatgaaggggtggcctgcccctccacatctgtgggatatctcatcaggtgggacaagagactgagaaaagaaataagacacagagacaaagtatagagaaacaacagtgggcccaggagactggcacttagcataccaaggacctgcaccagcactggtctccgagttccctcagtttttattgattattattttcattatctcagcacaaggaatgcggtaggagagcagggtgataataaggagaaggtcagcaaaaaaacatgtgagcaaaggaatctgtgtcataattaag

SEQ ID NO: 555273 - DNA, 617 bp, Homo sapiens
ctttctcttaattcccccggacactgcctaggttaagcactcatttcttattgggatgaccacaagaacttcccagactggtctctctgcttccagactgtctcactgcattttccttgaggttgactgtaggaagctctaaaggcagatctgatgcattactcctctgctaagcctttttttttttttttttttttttgagagagttttgctcttgtttcccaggctggatggagtgccctggcgcgatcttggctcaccgcaacctctgcctcctgggttcaagcgattctcctgcttcagccttctgagyagctgggattatgaaggggtggcctgcccctccacatctgtgggatatctcatcaggtgggacaagagactgagaaaagaaataagacacagagacaaagtatagagaaacaacagtgggcccaggagactggcacttagcataccaaggacctgcaccagcactggtctccgagttccctcagtttttattgattattattttcattatctcagcacaaggaatgcggtaggagagcagggtgataataaggagaaggtcagcaaaaaaacatgtgagcaaaggaatctgtgtcataattaag

SEQ ID NO: 555274 - DNA, 533 bp, Homo sapiens
gctgggattacaggcatgagccaccgcgtctggcatatttcttayatttttaatagagatgagggtcttgctatgttgcccaggcccgtctcaaactcctggcctcaagtgatcctcctgctttggcctcccaatgtgctgggattccaggcgtaagccaccactctcggccaccagttgggtttttgtctccatcctgaaggagtgggagacacccttgatcaggtctctgtccagcagagccctcctgaggaaggcgtggctctctgcagggtgggtgccagtcctgagctagggacggtcccttaccttcctctctgggaagctgacctcagccggaggcctctcttggtggtgcccctgagcagcaacctgatttctgtcctcagctacctggccaatgacatggaggaggacgacgaggaccccaaacaaaacatcttctacttcctgtatgggaagacccgctctcgcatacccttgctccgtaagcgtcggttccagttatgccgttgcatgaacccgagggccag

SEQ ID NO: 555275 - DNA, 533 bp, Homo sapiens
gctgggattacaggcatgagccaccgcgtctggcatatttcttatatttttaatagagatgagggtcttgctatgttgcccaggcccgtctcaaactcctggcctcaagtgatcctcctgctttggcctcccartgtgctgggattccaggcgtaagccaccactctcggccaccagttgggtttttgtctccatcctgaaggagtgggagacacccttgatcaggtctctgtccagcagagccctcctgaggaaggcgtggctctctgcagggtgggtgccagtcctgagctagggacggtcccttaccttcctctctgggaagctgacctcagccggaggcctctcttggtggtgcccctgagcagcaacctgatttctgtcctcagctacctggccaatgacatggaggaggacgacgaggaccccaaacaaaacatcttctacttcctgtatgggaagacccgctctcgcatacccttgctccgtaagcgtcggttccagttatgccgttgcatgaacccgagggccag

SEQ ID NO: 555276 - DNA, 335 bp, Homo sapiens
cactgcactccagcctgggtgacagagtgcaaccctgctcttaaaaaaatagaaagttcatttataaacagaagtgaacaggaatctgactcttgtactttggtgggagtttgggttatcttttacttgaggctgaggytatgtcaaaactagggatataacaacaagcaccatgtaccgagtgctgcttctgtgccacaggctctcctacatgcttgccacgcattcgtctatttcatcctcccaatagtcctactccatgtccagcaaggagtgaaaaggctgaggcgagtcacagggagaagagggccccagtgaacagacgaaatgaggaa

SEQ ID NO: 555277 - DNA, 335 bp, Homo sapiens
cactgcactccagcctgggtgacagagtgcaaccctgctcttaaaaaaatagaaagttcatttataaacagaagtgaacaggaatctgactcttgtactttggtgggagtttgggttatcttttacttgaggctgaggttatgtcaaaactagggatataacaacaagcaccatgtaccgagtgctgcttctgtgccacaggctctcctacatgcttgccacrcattcgtctatttcatcctcccaatagtcctactccatgtccagcaaggagtgaaaaggctgaggcgagtcacagggagaagagggccccagtgaacagacgaaatgaggaa

SEQ ID NO: 555278 - DNA, 557 bp, Homo sapiens
acacctgggcaacaaagcaagacttcatctcaaaaaaaaaaaaaaaaaagaaacttttattcatgtttaattatacatgaagtagaattttaatattaatctaaactaataaaaattatatcactgaaaaggagtcacggtaaaaaaattaagtaaattattaatatttaataacttttgctgcaatttaaccccacatttagattcctatttctttaataaatgaatctctaagatatcactcactggtcacsgttcagttttaaaatgaccaattttcaccattactcaaagcttttgtatatactgagttctaaaaatgccttttgaactggtggaaaagcagcgtgcccaagcacgtcaagagctttactctgacacagtaattctattttggataacctaccttaagaagacaacatggggactcattgttaagtgctcctagctacagagaccatggtgagtcaagatggtttaagggcagcgtattggggttgaaaggatatcacctcttgtttctaggtgaagtaaacactccaaagccttaaaaataa

SEQ ID NO: 555279 - DNA, 436 bp, Homo sapiens
tcactcactttgcagtttattttttatcctacagttcttttgaggaactgaagttcctttcatcaaatttatcagtttttcttcatgactggatttttctatcttgtttatgaaatcatttcttattctaagtgactttttctatattataygctgaacactttataaatttgtctttcatatttgagtgtttaatccaacttggatttattacttatatagttccaatttctccttgttccatatgatctcccaattatttcagcactatttattaaaatgcctgtccttactcaccaatctgcgatacccactcttccatatatcaaatgcctttaaatgtacatttctgcttctgggctctactctattgcagttatctatttgtctattgctatgccaatatcatagtgtctttttacattagctttataat

SEQ ID NO: 555280 - DNA, 436 bp, Homo sapiens
tcactcactttgcagtttattttttatcctacagttcttttgaggaactgaagttcctttcatcaaatttatcagtttttcttcatgactggatttttctatcttgtttatgaaatcatttcttattctaagtgactttttctatattatatgctgaacactttataaatttgtctttcatatttgagtgtttaatccaacttggatttattacttatatagttccaatttctccttgttccatatgatctcccaattattycagcactatttattaaaatgcctgtccttactcaccaatctgcgatacccactcttccatatatcaaatgcctttaaatgtacatttctgcttctgggctctactctattgcagttatctatttgtctattgctatgccaatatcatagtgtctttttacattagctttataat

SEQ ID NO: 555281 - DNA, 436 bp, Homo sapiens
tcactcactttgcagtttattttttatcctacagttcttttgaggaactgaagttcctttcatcaaatttatcagtttttcttcatgactggatttttctatcttgtttatgaaatcatttcttattctaagtgactttttctatattatatgctgaacactttataaatttgtctttcatatttgagtgtttaatccaacttggatttattacttatatagttccaatttctccttgttccatatgatctcccaattatttmagcactatttattaaaatgcctgtccttactcaccaatctgcgatacccactcttccatatatcaaatgcctttaaatgtacatttctgcttctgggctctactctattgcagttatctatttgtctattgctatgccaatatcatagtgtctttttacattagctttataat

SEQ ID NO: 555282 - DNA, 436 bp, Homo sapiens
tcactcactttgcagtttattttttatcctacagttcttttgaggaactgaagttcctttcatcaaatttatcagtttttcttcatgactggatttttctatcttgtttatgaaatcatttcttattctaagtgactttttctatattatatgctgaacactttataaatttgtctttcatatttgagtgtttaatccaacttggatttattacttatatagttccaatttctccttgttccatatgatctcccaattatttcagcactatttattaaaatgcctgtccttactcaccaatctgcgatacccactcttccatatatcaaatgcctttaaatgtacatttctgcttctgggctctactctattgcagttatctatttgtctattgctatgcyaatatcatagtgtctttttacattagctttataat

SEQ ID NO: 555283 - DNA, 636 bp, Homo sapiens
gcaattcctttttcatgaggttagtatgaaaattacagtggatcatgaagaaaagttcttaggaccatgtctgatatgtgagtcctcaatgaatgatgaattcattgaatattatgatatcaccaggtttttttaaaccgctggccaggtatcccctcacaatcctttatctctcctcctctgtaaatgtccaacacaggccacttctcccctttgtacacctgctgtgcaattcctgccactttggaatgggagcatcacagcttaagggtcctaattcctttctcagcctctgggtatcccaagtctctaacttgccattgcctgctttgcaccaagaccagagtgtcaggggcagattacaggagtcctacagtcactgctctgctaatgagtgcttcccttagaggtgaagaagcgaggcagtgcctgcyttggaatgctttaataaacaccagaaagtcctcactgccagggatattttactcatttactttctaaagcctaaaattctagaagataggacacattcatttgctaaaatacaaaatttccagggagaggatgtataatgagtcttttttgtttgattgttttttgagacagagtttcgctcttgttgcccaggctgcagtg

SEQ ID NO: 555284 - DNA, 436 bp, Homo sapiens
ttgaattcatgagggagaaaggatgggaaaggcactagagcagagccctgaggaataaggagacagcttggaagtactgggatatggaaatagagggtactcaagaggcacagcaaagggagatgaaggaatgtttcagaaaaaaagaacaacttattttcataagttcgcctttactaataatccaaaagaattactatactgtgtggtagtcagtctccaccgtggcccccaataacctcacttytgaaaattgatgtactcctgtggcccgctgccactttgaatagggctagtctgtgtaaacaatagtatattccagaaatgatgatacgtctcttctgaggccaggtcataaaaggcattttggtttcggccttgctctctgctggataattcactcgagtggaagcactccagtgtcactgatgcagga

SEQ ID NO: 555285 - DNA, 451 bp, Homo sapiens
ggaggcacaccagactggctcaaaacagcatagtgaatgatcccatctgtgcatattgatccatcacctctttctttctggtgttatttgctttagtttcaggtgaaattctgtgtagctttgtaaactctcaacttgcacataaattcaaactcgccatcatggaattatcaaaaaacaatgagaatctgggaatttcttgttaaatggcgtttctacrcatagactccatgtcatctacattattctcccaggtaaaaccaggcaagtaattatataggcaattcccactttttacatttttgtgttgcccaattactagatgctggtaagtgtatcagaaatcatcttgttatcactgtagataaaattctgcttctcctattacccattttagctcttttttctttggcaagttatttgctgtcatttcttggcctatgaacagctg

SEQ ID NO: 555286 - DNA, 451 bp, Homo sapiens
ggaggcacaccagactggctcaaaacagcatagtgaatgatcccatctgtgcatattgatccatcacctctttctttctggtgttatttgctttagtttcaggtgaaattctgtgtagctttgtaaactctcaacttgcacataaattcaaactcgccatcatggaattatcaaaaaacaatgagaatctgggaatttcttgttaaatggcgtttctacgyatagactccatgtcatctacattattctcccaggtaaaaccaggcaagtaattatataggcaattcccactttttacatttttgtgttgcccaattactagatgctggtaagtgtatcagaaatcatcttgttatcactgtagataaaattctgcttctcctattacccattttagctcttttttctttggcaagttatttgctgtcatttcttggcctatgaacagctg

SEQ ID NO: 555287 - DNA, 422 bp, Homo sapiens
cacaccagactggctcaaaacagcatagtgaatgatcccatctgtgcatattgatccatcacctctttctttctggtgttatttgctttagtttcaggtgaaattctgtgtagctttgtaaactctcaacttgcacataaattcaaactcgccatcatggaattatcaaaaaacaatgagaatctgggaatttcttgttaaatggcgtttctacgcatagactccatgtcatctacattattctcccaggtaaaaccaggcaagtaattatataggcaattcccactttttacatttttgtgttgcccaattactagatgmtggtaagtgtatcagaaatcatcttgttatcactgtagataaaattctgcttctcctattacccattttagctcttttttctttggcaagttatttgctgt

SEQ ID NO: 555288 - DNA, 489 bp, Homo sapiens
ttacttgtgctattataatttagctattaaatcctaaaattatcaactgaaagctactggaaaaataaatacttctctttcttttctccatattgaaagtaaagagaatgaggatccttagctaagattttaattaaatcttttctgagccagaattgcaaagcttttctttgtataaataaggactcgagttataaagcatagaactagcaatgagtctatcttggtccatttggattgctataaaggagtacctgaggctgggtaatttayaaagaaaagacgtttattcgacacatgattctgcaggatgtacaagaagcatggcaccagcatctgctcttggtgaaaacttcaggtggctttgactcctggtggaagaagggaagtctagcttgtgcagagctcccatggccagagaaggaaggggggtttgaggaggtgccaggctctttgaatagagcgagaactcactcattaccaagagaa

SEQ ID NO: 555289 - DNA, 615 bp, Homo sapiens
gctatctatgatttaaaccatagtgtctttcagaattaatgtatgtccttggcgggtgtgtgtgtgtgtgtgtgtgtgtgatcccaaaacaccaataattaccagtgaaaaatttaggagattaaatwtgtgtactttaatccacattgggggaagagagagatataaaaggtgctgagaaccttgaagtggtgcccctcctgatctgccttctacctcttcaacatacgtgctgtgcaccatgaaagacttgaagtgcaatggcaatctgtgatcctttgtggaaacctttccctaatttgccccagagtgaatgtttcacacttggattcacatttgctgagagaggtggaaaaatcttagggacaattagaacagtaataacaacattcatattattattcaatgacagcaacattcatattcattctttcattcagcaaatatttattgcacacttgctatgtgctagaactataaaatggcaatgatgtgttaggtaatttgtaatcatggggaaaaaatcagttagggaaagacaaaactgccttcccttatagagattatattcattgaggagacaaataataaataaaatgaatagtgtaacatagg

SEQ ID NO: 555290 - DNA, 615 bp, Homo sapiens
gctatctatgatttaaaccatagtgtctttcagaattaatgtatgtccttggcgggtgtgtgtgtgtgtgtgtgtgtgtgatcccaaaacaccaataattaccagtgaaaaatttaggagattaaatttgtgtactttaatccacattgggggaagagagagatataaaaggtgctgagaaccttgaagtggtgcccctcctgatctgccttctacctcttcaacatacgtgctgtgcaccatgaaagacttgaagtgcaatggcaatctgtgatcctttgtggaaacctttccctaatttgccccagagtgaatgtttcacacttggattcacatttgctgagagaggyggaaaaatcttagggacaattagaacagtaataacaacattcatattattattcaatgacagcaacattcatattcattctttcattcagcaaatatttattgcacacttgctatgtgctagaactataaaatggcaatgatgtgttaggtaatttgtaatcatggggaaaaaatcagttagggaaagacaaaactgccttcccttatagagattatattcattgaggagacaaataataaataaaatgaatagtgtaacatagg

SEQ ID NO: 555291 - DNA, 615 bp, Homo sapiens
gctatctatgatttaaaccatagtgtctttcagaattaatgtatgtccttggcgggtgtgtgtgtgtgtgtgtgtgtgtgatcccaaaacaccaataattaccagtgaaaaatttaggagattaaatttgtgtactttaatccacattgggggaagagagagatataaaaggtgctgagaaccttgaagtggtgcccctcctgatctgccttctacctcttcaacatacgtgctgtgcaccatgaaagacttgaagtgcaatggcaatctgtgatcctttgtggaaacctttccctaatttgccccagagtgaatgtttcacacttggattcacatttgctgagagaggtggaaaaatcttagggacaattagaacartaataacaacattcatattattattcaatgacagcaacattcatattcattctttcattcagcaaatatttattgcacacttgctatgtgctagaactataaaatggcaatgatgtgttaggtaatttgtaatcatggggaaaaaatcagttagggaaagacaaaactgccttcccttatagagattatattcattgaggagacaaataataaataaaatgaatagtgtaacatagg

SEQ ID NO: 555292 - DNA, 520 bp, Homo sapiens
ttgttcttttaagccactaattttttggtaatttgttacaatagcaacaggaaattaatagaggagtgaaagccagaggcccacgaaccaactctactacaatagtamtagtggaatgagggaggggcatggctttttttcatagtgtttgtctcaagtacaggcaaattaccttccaaattccctcacattgttggcagaattcatttcctttcagttatcagactgaaatccccattatcttgctagctgtcagatggggaccactctgctcttagaggccactttcaggcccttgccaaatggacccttctatcttagctcaagaaaaccttcttcatgtctaatctctctcattttgaatctcccgacttcctcttctgcaagtagccagagaaaacagcttttaaagggctcatgtgattagaccaggaccacctggataatcttcctatcttaatgtcaactgtaccatatagcgtaacctaatcacaggaataaactccatcgaatacatggt

SEQ ID NO: 555293 - DNA, 553 bp, Homo sapiens
ttactcagtaactttggatttcccacagttcctggctggtgtattttcagtagtagcattgatgatttttcatattcatgtacattaaaaatacaacttttgatctaattgtatcctcctaagtctaaatatagtgcagaatcagaaagactttaagctccaaggcaaaactttagtgagttaaatttaatcttcctgcaacataaaaaaaaattaaactgttatttcttctttgtaggactattagagctaattcaatagcactgtcttatatcctttttaaagaaatctttsattattgtatttgctcggaaacattgtgattaaaaatggatcaaattaaactctgcatcataatcttcacttttaatctcatgaatttggctggaaagaagtggctatattttcattaattctactgaaactagatttttatgaaataaattaatactatttatttcacaggaggtttttttccataggttttgtgtagtacacccatttatacattatgcatctgtgctcctgactttcatttatccttcacgctgtc

SEQ ID NO: 555294 - DNA, 574 bp, Homo sapiens
caccctcctttatatatttcttgtayccttgtttttctgcttgatttgttcaagagtctgttgtcacagcagaagtgagctgacagcttcacatttttaaaggtcatttccacttaaagttctccattatcaagctggatctgtcattacttaggggagaaatattttgcctcaacctgcctacagcccagaacagactttgaaaagtcttcctaatcatggagcatatcagagggtgtgatttaaacacataaccacccaacaacagcaacaacaacaatcaaagtctttagggactgtctgaatatcccaactttttaataaaaataagactcagattccttttggacgatctctggctatgaatggagcaattaaaccacaaggaccttgctcggtttgtgaaattcacctttccctggaaaaggatgacctctttttgcactctggccacaaagacgttaatatttcctagttttgctcatagcataactgagaagtcttttgctttgagacaggaaggtcacaaagggggaaaactggatacagggtcttcaaagtcagaagcagagtt

SEQ ID NO: 555295 - DNA, 514 bp, Homo sapiens
tggcaactgtgccattcttgcttttacctgcaactaaagcaatgaccagatrcctaactggtttgagttaacaaaatatacagcatctttaggagggtcctgacgcctccagaatgtggatccaggatgaatacagaaatttctgtttcagtcagaggataagaacagagatagaataagttgatttaaagtaattaagcattagtgaaaatatatatcagtatcaaaagttcgatcattttaaaataccttaatctcatcttaatgtttaatgtttgtattacttgatggtgcaatgtccttttgttttgttttgtttttgtgacggagtcttgctctgttgtcaggctggaatgtagtggcaggatctcggctcactgcaacctctgcctcctcagttcaagcgattctcctgcctcaacctcccaagtagctgggactgcaggtgcatgccaccccacccagctaatttttgtatttttagtagagatggggtttcaccatgttggccagg

SEQ ID NO: 555296 - DNA, 429 bp, Homo sapiens
gtcccttatatttagtcagaactcggtatgttttaaggaaagaatggttacacgaagacatacattcattcatttatacaacacattttcagtgttgaatgataaattttggaatagttaacagatgataaaagtgttgktttcagtcatccctatccaatgaagtaaaaaaaaaagtgttgaatgggaagaaatcaagaatagttatacgaatatcaccattgcattaaagctctcttccttgtttctaaaagaatatcttgacacacattaagctcactgacccccacaccatgaatgagggcatcttcaacaatggtggatgacgtcttagtttccgtcaactcagttaatctaagtaagctcatggtatcactttcctgtcctagagggaacatatttcctgcatttttctttttttccttactt

SEQ ID NO: 555297 - DNA, 564 bp, Homo sapiens
agaatgacatataaataaataagaaatatgaattttttaaaaggtacaaaaaaattctgaggctgaaaagtacaataactaaktaaaaagttactttttacttagggttccaatagaagatttgagcagctggaaaaaagaatcagtgaacttgatagatcaaatgaaatgattcagtctgaagagcaggaaaatgaaagaatgacaacaaaaaagaatagagcctaaagacctgtgtaacaacatcaagaatgcctacatacagaatcctggtggggagtgaggggcaggaagactatttgaagaaatgtgtttgaaagcttcccaaatttcactaaaaacaaatatatacattcaaaaagctcagtgaacttcaaggaaatatacaaagatattcacaccaagacacactatgtttcaaattgtcaaaaggcaaagcgaatgtttgaaagcagcaagagaaaggcaacgcgtcatttacaaaggatcctcaataagtttgacagcagatagtgcattataagccatggatgccagaagagcttaggaaaaaggcaacgcgtc

SEQ ID NO: 555298 - DNA, 564 bp, Homo sapiens
aaggctaaaattcacatggaaccaaaaaagagcccacayagccaaagcaagactaagcaaaaagaataaatctagaggcatcacattactcgacttcaaactatactataaggccatagtcaccaaaacagcatggtactggtataaaaataggcatatagaccaatggaatagaatagagaacccagaaataaagccaaatactttcagccaactgatctttgacaaagcaagcaaaaacataaagtggggaaaggacaccctattcaacaaatggtgctggtataattggcaagccacatgtagaagaatgcaactggatcctcatctctcaccttataaacaaatcaactcaagatggttcacagacttaaatctaagacctgaaaccataaaaattctagaagataagattggaaaaacccttctagacattggcttaggcaaagacttcacaatcaagaacccaaaagcaaacacaacaaagataaatagatgggacttaattaaactgaaagccttctgcacatcaaaataaataatcagcagagtaaacagacaacc

SEQ ID NO: 555299 - DNA, 564 bp, Homo sapiens
aaggctaaaattcacatggaaccaaaaaagagcccacatagccaaagcaagactaagcaaaaagaataaatctagaggcatcacattactcgacttcaaactatactataaggccatagtcaccaaaacagcatggtactggtataaaaataggcatatagaccaatggaatagaatagagaacccagaaataaagccaaatactttcagccaactgatctttgacaaagcaagcaaaaacataaagtggggaaaggacaccctattcaacaaatggtgctggtataattggcaagccacatgtagaagaatgcaactggatcctcatctctcaccttataaacaaatcaactcaagatggttcacagacttaaatctaagacctgaaaccataaaaattctagaagataagattggaaaaacmcttctagacattggcttaggcaaagacttcacaatcaagaacccaaaagcaaacacaacaaagataaatagatgggacttaattaaactgaaagccttctgcacatcaaaataaataatcagcagagtaaacagacaacc

SEQ ID NO: 555300 - DNA, 326 bp, Homo sapiens
aaaaaaaaaaaaaaaagaaaaaagaaaaaaacctcagatgcatctgaggcaggatttctcaacctcagcactatcagcttcttgcatgggataattctctgcagaggaggctcctgtgcaatgtaggatgttgagcagcatctctggcctccacccaccagatgcaatagcactttccccactgtccctacccattatgacagccacaatagtctccaggcattgccaaatttcctctggggggcaaaattgccygctattgagaaatgatctattgcaatggctgtcaaaatgtggtccctgagtaacatcgacatcactgggga

SEQ ID NO: 555301 - DNA, 686 bp, Homo sapiens
ttaaccattcacttttttattgttttcagtttggggctattacagaaaatgctgtcttttctttcaatctgcttatattgctgtatttaaaataaggttcttataggcagcttataatttgatttgccatttcatgtttttcttttytctgtcttcctgtggattgaatatttttttaacttattaatagtgtattttagcacatctctttatatacaaatttaaagtaatttctctaggtgttttgttatacatacataacttatcagagtctattgatattgacattttgctagttcttgtaaactgtagaaactttacttcactttaaattcctttaccttttcttgttcataatataattgccttagctatttcctctaaatatattgataaccatataaaataatgttatagtttttggatcaaacatcacacaatttaaaaaaccaaagaaaagaaaagtctatggtacttactcatatttacacttgccattttctaacttttatttatttatttatttgagaaggtgtctcacccttgttgcccaggctggagtgcaacagcacaatctctgcttactgcaacctctgcctcctgggttcaagcgattctcctgcctcagccttccatgtagctggaattacaggcacctgccaccacacctggctaattttttgtat

SEQ ID NO: 555302 - DNA, 686 bp, Homo sapiens
ttaaccattcacttttttattgttttcagtttggggctattacagaaaatgctgtcttttctttcaatctgcttatattgctgtatttaaaataaggttcttataggcagcttataatttgatttgccatttcatgtttttcttttctctgtcttcctgtggattgaatatttttttaacttattaatagtgtattttagcacatctctttatatacaaatttaaagtaatttctctaggtgttttkttatacatacataacttatcagagtctattgatattgacattttgctagttcttgtaaactgtagaaactttacttcactttaaattcctttaccttttcttgttcataatataattgccttagctatttcctctaaatatattgataaccatataaaataatgttatagtttttggatcaaacatcacacaatttaaaaaaccaaagaaaagaaaagtctatggtacttactcatatttacacttgccattttctaacttttatttatttatttatttgagaaggtgtctcacccttgttgcccaggctggagtgcaacagcacaatctctgcttactgcaacctctgcctcctgggttcaagcgattctcctgcctcagccttccatgtagctggaattacaggcacctgccaccacacctggctaattttttgtat

SEQ ID NO: 555303 - DNA, 686 bp, Homo sapiens
ttaaccattcacttttttattgttttcagtttggggctattacagaaaatgctgtcttttctttcaatctgcttatattgctgtatttaaaataaggttcttataggcagcttataatttgatttgccatttcatgtttttcttttctctgtcttcctgtggattgaatatttttttaacttattaatagtgtattttagcacatctctttatatacaaatttaaagtaatttctctaggtgttttgttatacatacataacttatcagagtctattgatattgacattttgctagttcttgtaaactgtagaaactttacttcactttaaattcctttaccytttcttgttcataatataattgccttagctatttcctctaaatatattgataaccatataaaataatgttatagtttttggatcaaacatcacacaatttaaaaaaccaaagaaaagaaaagtctatggtacttactcatatttacacttgccattttctaacttttatttatttatttatttgagaaggtgtctcacccttgttgcccaggctggagtgcaacagcacaatctctgcttactgcaacctctgcctcctgggttcaagcgattctcctgcctcagccttccatgtagctggaattacaggcacctgccaccacacctggctaattttttgtat

SEQ ID NO: 555304 - DNA, 409 bp, Homo sapiens
atgaattgagaaactaaatggaataagagaaggagaaaaacaggtataaaaggtctaagaattgggaggacctakgacatctgattagagagtgcctaaggagattcagcatagtcctgccagcaaagattatttatttacttcaagagtttagagtggcagtttggggatagcaccaggagatatcagctgtgatggcttggagaaacagtgtaaaccggcagtgtaaacaagagcagggcatgtatgagtagttgagaatggtgaataggagtatgactagatgaaagatagtagggatgacaagtttttttggggcacagtctaagttggtctggtgtcgaatgagactggggcctaataaaaaggagcgtctatacaggagcttaaatgggctgtaccttgtagc

SEQ ID NO: 555305 - DNA, 409 bp, Homo sapiens
atgaattgagaaactaaatggaataagagaaggagaaaaacaggtataaaaggtctaagaattgggaggacctaggacatctgattagagagtgcctaaggagattcagcatagtcctgccagcaaagattatttatttacytcaagagtttagagtggcagtttggggatagcaccaggagatatcagctgtgatggcttggagaaacagtgtaaaccggcagtgtaaacaagagcagggcatgtatgagtagttgagaatggtgaataggagtatgactagatgaaagatagtagggatgacaagtttttttggggcacagtctaagttggtctggtgtcgaatgagactggggcctaataaaaaggagcgtctatacaggagcttaaatgggctgtaccttgtagc

SEQ ID NO: 555306 - DNA, 409 bp, Homo sapiens
atgaattgagaaactaaatggaataagagaaggagaaaaacaggtataaaaggtctaagaattgggaggacctaggacatctgattagagagtgcctaaggagattcagcatagtcctgccagcaaagattatttatttacttcaagagtttagagtggcagtttggggatagcaccaggagatatcagctgtgatggcttggagaaacagtgtaaaccggcagtgtaaacaagagcagggcatgtatgagtagttgagaatggygaataggagtatgactagatgaaagatagtagggatgacaagtttttttggggcacagtctaagttggtctggtgtcgaatgagactggggcctaataaaaaggagcgtctatacaggagcttaaatgggctgtaccttgtagc

SEQ ID NO: 555307 - DNA, 409 bp, Homo sapiens
atgaattgagaaactaaatggaataagagaaggagaaaaacaggtataaaaggtctaagaattgggaggacctaggacatctgattagagagtgcctaaggagattcagcatagtcctgccagcaaagattatttatttacttcaagagtttagagtggcagtttggggatagcaccaggagatatcagctgtgatggcttggagaaacagtgtaaaccggcagtgtaaacaagagcagggcatgtatgagtagttgagaatggtgaataggartatgactagatgaaagatagtagggatgacaagtttttttggggcacagtctaagttggtctggtgtcgaatgagactggggcctaataaaaaggagcgtctatacaggagcttaaatgggctgtaccttgtagc

SEQ ID NO: 555308 - DNA, 563 bp, Homo sapiens
aggatgaaaggcaggaggataagttatcatccctaataaattaagaattttggacttttggtcagctgacatgacagggatttgtgattctaggacaaggagaaaacggaagacaggagaaatatcttagcagagagagtaaagattgatcccaaacagtaaagactgggacctagggaagaagatgctgccagtgagagtctgtttctaattgtaaaagctgatgaacttaaacagtgtcactgtatggtattgcatataagttgtttcttatactgtgttttygtagcatgtatgaatttcagaagctataaagtcaaatgtgcaaaaaaaattcatttttttctaaaatgaaaattaacttttctcttgaatccctgtcacctggggctagaaacttagtcttattctatttcataaccaagagaggaaaaccatagttttactatattttgcctctccctagatgtgcatctgtgtttcaagaggctaatggagccccaaagcatcaggagaataaggacatttacatccattgtgattgcattgggctgcaagtaaga

SEQ ID NO: 555309 - DNA, 582 bp, Homo sapiens
cctaacatattattaatttacttcaggtaaacactaaaaatcccaacacaaggaaaatcttaaaattgatggtcctgagaatttatgcatttgtataaatgatcaatttctcttaacagagattttaagaagagggcagaactataaatggaaatatattgcagttgcaaagcaaacaaaacaattttttgtatggatgacagagaaaggacagacggttcatgtcattcgttstagccacactaccattcacagggcattttctttgaaaatgacagccactaatacaatcaattctacctttgttcattatgtgaattttctttgtcaaaaaactaaacattagtggaagcaacagaaaaagccaattctagattcttttaaaaataattgggaggcggaggtgggtggataaccgggtcaggagattgagaccatcctggctaacacggcaaaaccccccgtctctactaaaaatacaaaaaaattagccaggcatggtggcaggtgcctgtagtcccagctactagggaggctgaggcaggagaacggcgtgaacctgggaggcggagcttgcagtga

SEQ ID NO: 555310 - DNA, 357 bp, Homo sapiens
cattgcactccagcctgggcaacaagagtgaaactctgtaccccctcccacccccccaccccaaaaaacacatacagtacctacatatacttgaataaatatgattggttattcaggcatctttttgagtatctaattagatattaaaaccactttctcragcatttctctagaaatcttactcatttcataatttctaagtacatagaatttattaaaagcctaaacttcctacagatatgtgtgctgcaagaatatgtgttgaagaagcagggcaagtctccaaaatacatatttctttcttacagaaaagaatagtttgagctgaaggcaattgagaaaaaaaaagaatagaaa

SEQ ID NO: 555311 - DNA, 570 bp, Homo sapiens
  misc_feature 228, 230, 234, 254, 256, 295: n = A,T,C or G
tatacacatatgtatatatgtgaatatgtgtatatgtgtatatatgtatacatctatgtatatatgtgtgtatatatgtatatatgtatacatakatgtatacatctatgtatacatatgtgtatatatgtatatatgtatatatgtatacatatatgtatatgtgtgtatatatgtatatatggatacatatatgcatccatacacgtgggcgcacatagacacgcngnctgnataagtccatgtgtgtatananacacacgcgcctctatatattttttttcacacgcaaagngccacgagggcgcgcctgcatttagacgataactcttacaaaggcatacgggtgtattctgcatcacttgactgaccaaaatgtacacttgcataacataagtgctcaagtttgtgtttatgtttacaatgaagtcaacaacaagtagcattactttaaatgtcagggtctgataaataaagaccagagaaagctaaagaaagaacatgatactttgaacaatcctctctattaaatgggaaaattgggctttagatctgagtgttttaatttct

SEQ ID NO: 555312 - DNA, 570 bp, Homo sapiens
  misc_feature 228, 230, 234, 254, 256, 295: n = A,T,C or G
tatacacatatgtatatatgtgaatatgtgtatatgtgtatatatgtatacatctatgtatatatgtgtgtatatatgtatatatgtatacatagatgtatacatctatgtatacatatgtgtatatatgtatatatgtatatatgtatacatatatgtatatgtgtgtatatatgtatatatggatacatatatgyatccatacacgtgggcgcacatagacacgcngnctgnataagtccatgtgtgtatananacacacgcgcctctatatattttttttcacacgcaaagngccacgagggcgcgcctgcatttagacgataactcttacaaaggcatacgggtgtattctgcatcacttgactgaccaaaatgtacacttgcataacataagtgctcaagtttgtgtttatgtttacaatgaagtcaacaacaagtagcattactttaaatgtcagggtctgataaataaagaccagagaaagctaaagaaagaacatgatactttgaacaatcctctctattaaatgggaaaattgggctttagatctgagtgttttaatttct

SEQ ID NO: 555313 - DNA, 636 bp, Homo sapiens
tgatttccaaactgggacaggcataatcctgaaccttaatcattttattcttagtgcttcagctttctattgaattttagtgaaagataacatggctctggacaaactttcgtctcttggagagagcaagttgacacagatctgaagtattttgtacatttgttgaatatgccacccagtcttccacaatgtgggagtgcaacatttaagtatcaaaatgaagcgaagttatcttggtgaccttctgacttctagcttataaaccattcatatggaagccagaaaatacagtcaaagatttaattttccaattgatcttgtatttagcatcatttagaataacaatctggatacttaatctagttttttttttaaatttcaatcagtttgtttgaaatcatgtaaacaaacaaagcctatattgtgaagaaaatacatttaattattaccgcctctaaataaatctagtttaaaacacatgtggtgaatatttgcagaaaagtgcatttaacaagtatgtggcattgtaatattaaagaactaatggaactaacggtgaagatttactaggcataaattatagaagcagataatgaggttattaaaataatatrtatctgtaatttttatataaaa

SEQ ID NO: 555314 - DNA, 353 bp, Homo sapiens
tcaaactgaatgagaaataaatggattccaatactgagatgaaagaaatattagcattatcaaggattttaaagcaacaatcataaatatactctaatgagcatgcttaaaacaaakggaaaaattgaaaagtttaccagagaaatagtctcagcaaaaaaacagaaatcaatactaagaacatctctcaaaacacataagtacatggaatttaaacaacctgctcctgaatgactttttgagtcaacaaagaaattaaggtagaaatcaagaaattctttgaaactaatgaaaataaagatacaacataccaggatcgctggaacacagctaaagcagtgttaagaggcaaa

SEQ ID NO: 555315 - DNA, 353 bp, Homo sapiens
tcaaactgaatgagaaataaatggattccaatactgagatgaaagaaatattagcattatcaaggattttaaagcaacaatcataaatatactctaatgagcatgcttaaaacaaagggaaaawttgaaaagtttaccagagaaatagtctcagcaaaaaaacagaaatcaatactaagaacatctctcaaaacacataagtacatggaatttaaacaacctgctcctgaatgactttttgagtcaacaaagaaattaaggtagaaatcaagaaattctttgaaactaatgaaaataaagatacaacataccaggatcgctggaacacagctaaagcagtgttaagaggcaaa

SEQ ID NO: 555316 - DNA, 353 bp, Homo sapiens
tcaaactgaatgagaaataaatggattccaatactgagatgaaagaaatattagcattatcaaggattttaaagcaacaatcataaatatactctaatgagcatgcttaaaacaaagggaaaaattgaaaagtttaccagagaaatagtctcagcaaaaaaacagaaatcaatactaagaacatctctcaaaacacataagtacatggaatttaaacaacctgctcctgaatgactttytgagtcaacaaagaaattaaggtagaaatcaagaaattctttgaaactaatgaaaataaagatacaacataccaggatcgctggaacacagctaaagcagtgttaagaggcaaa

SEQ ID NO: 555317 - DNA, 353 bp, Homo sapiens
tcaaactgaatgagaaataaatggattccaatactgagatgaaagaaatattagcattatcaaggattttaaagcaacaatcataaatatactctaatgagcatgcttaaaacaaagggaaaaattgaaaagtttaccagagaaatagtctcagcaaaaaaacagaaatcaatactaagaacatctctcaaaacacataagtacatggaatttaaacaacctgctcctgaatgactttttgagtcaacaaagaaattaaggtagaaatcaagaaattctttgaaactaatgaaaataaagatacaacataccaggatygctggaacacagctaaagcagtgttaagaggcaaa

SEQ ID NO: 555318 - DNA, 454 bp, Homo sapiens
gaaggaacatacctcaaaattataagagccatctatgaaaaacccatagccaacaccatactgaacaggcaaaagctagaagcatttgccttgagaactggaacaacaaaaggatgtttactctccccattcctattcaacatagtactggaggtcccagccagagcaatcaggcaaaagaaagaaagaaaataaatccayataggaagacaggaattcacactatcttttttgtaaacaatacaattttatacctagaaagccccacagtctctgactaaaagctcctagatgtgtctttttaaaacttcagcaaactttccggatgtaaaatcaatgtaccaaagtcagtagtatttctatgcaccaacaatgtccaagctgggagccaaatcaagaatgcaatctcattcacaatagccacagaaaagtaataaaaaacttataaaagaat

SEQ ID NO: 555319 - DNA, 454 bp, Homo sapiens
gaaggaacatacctcaaaattataagagccatctatgaaaaacccatagccaacaccatactgaacaggcaaaagctagaagcatttgccttgagaactggaacaacaaaaggatgtttactctccccattcctattcaacatagtactggaggtcccagccagagcaatcaggcaaaagaaagaaagaaaataaatccacataggaagacrggaattcacactatcttttttgtaaacaatacaattttatacctagaaagccccacagtctctgactaaaagctcctagatgtgtctttttaaaacttcagcaaactttccggatgtaaaatcaatgtaccaaagtcagtagtatttctatgcaccaacaatgtccaagctgggagccaaatcaagaatgcaatctcattcacaatagccacagaaaagtaataaaaaacttataaaagaat

SEQ ID NO: 555320 - DNA, 454 bp, Homo sapiens
gaaggaacatacctcaaaattataagagccatctatgaaaaacccatagccaacaccatactgaacaggcaaaagctagaagcatttgccttgagaactggaacaacaaaaggatgtttactctccccattcctattcaacatagtactggaggtcccagccagagcaatcaggcaaaagaaagaaagaaaataaatccacataggaagacaggaattcacactatcttttttgtaaacaatayaattttatacctagaaagccccacagtctctgactaaaagctcctagatgtgtctttttaaaacttcagcaaactttccggatgtaaaatcaatgtaccaaagtcagtagtatttctatgcaccaacaatgtccaagctgggagccaaatcaagaatgcaatctcattcacaatagccacagaaaagtaataaaaaacttataaaagaat

SEQ ID NO: 555321 - DNA, 186 bp, Homo sapiens
ttactgagaatctgagaggtgacctgactagccatcatwcaataaagcacagaactgctattagaatccagcgatctgtcaccaaagtccagactctgccacagttacgctctttatttaataatattttatattctgtctttggaaatacctttaaaatgttcaaatgtcatacatatgttaatg

SEQ ID NO: 555322 - DNA, 186 bp, Homo sapiens
ttactgagaatctgagaggtgacctgactagccatcatacaataaagcrcagaactgctattagaatccagcgatctgtcaccaaagtccagactctgccacagttacgctctttatttaataatattttatattctgtctttggaaatacctttaaaatgttcaaatgtcatacatatgttaatg

SEQ ID NO: 555323 - DNA, 186 bp, Homo sapiens
ttactgagaatctgagaggtgacctgactagccatcatacaataaagcacagaactgctattagaatccagcgatctgtcaccaaagtccagactctgccacagttacrctctttatttaataatattttatattctgtctttggaaatacctttaaaatgttcaaatgtcatacatatgttaatg

SEQ ID NO: 555324 - DNA, 186 bp, Homo sapiens
ttactgagaatctgagaggtgacctgactagccatcatacaataaagcacagaactgctattagaatccagcgatctgtcaccaaagtccagactctgccacagttacgctctttatttaataatattttatattctgtctttggaaatacctttaaaawgttcaaatgtcatacatatgttaatg

SEQ ID NO: 555325 - DNA, 403 bp, Homo sapiens
tcagaactgcagaagttttctaaatgccactttaacactaatgcactgacagattctaaatattttgtgagaagaaatgttaaaaatttttagcttgacaggtttctagagttactgtgtgtgtattttttttccccttgcaccattggttatgtatcactttcactttacacttgcatgttctccttgtcagggctggaactatcgtatagaagataatatgattgtgacttctagttcttttctagaggatgctgctagaaaatggttttgctttgtattttatagcttgttacccttaggtaggtaacatcttmcattctgctttcttccagtctttgcagtattcactagaggttccctttgcatgttgtactctgtcctcatttggagattgaactct

SEQ ID NO: 555326 - DNA, 403 bp, Homo sapiens
tcagaactgcagaagttttctaaatgccactttaacactaatgcactgacagattctaaatattttgtgagaagaaatgttaaaaatttttagcttgacaggtttctagagttactgtgtgtgtattttttttccccttgcaccattggttatgtatcactttcactttacacttgcatgttctccttgtcagggctggaactatcgtatagaagataatatgattgtgacttctagttcttttctagaggatgctgctagaaaatggttttgctttgtattttatagcttgttacccttaggtaggtaacatcttccattctgytttcttccagtctttgcagtattcactagaggttccctttgcatgttgtactctgtcctcatttggagattgaactct

SEQ ID NO: 555327 - DNA, 567 bp, Homo sapiens
tcagctcttttcccaactcccacagtgaggttgttttatgtatttatgatagagttagattgcttcatcacctttatcattccattctgatgtttctcaacctcttaaatgatttttttaaaatttgtatgcattaagattcattctttgtgctgaaaagtgcaatgaattttgaattttgacaaatagtatccaacgttacagaatcatgctgaataggttcactaaaaaatttcttgtacttcacctattcaacccttcctcttgtctcatgagcccttgtcagccactgattttttttttttttactctgttgcccaagctggagtgcagtgccacaatctctgctcattgcaacctctgcctcccgggttcaggcaattctctgcctcagcyccccaggtagctgggattacaggcgtccgccaccatgcccggctaatttttgtatttttagtggagatggggtttcaccatgttgcccaggctgatctcgaactcctgaccttgtgatccacctgcctcagcttcccaaagtgctgggattacacatgtgagccactgtgc

SEQ ID NO: 555328 - DNA, 537 bp, Homo sapiens
tttctgctttaagaaaaataatatagtagcaaggtcacagatctggagtcagctagggctgggttcaatcctgactgcctcacttactagttgcatgaccttaataaattatttaatcactstaaacttcattcttctcctctgaatgaagttagggaaattaaactaacagttgttcagtttccaaggagttagcatggagattgtattcgtctgttcttgcattgccataaagaaatatctgagactgagtcatttataaagaaaagaggtttaattggcttgtggttctgcaggctgcatgggatgcatgatgctggcatctgcttagcttctggggatccctcaggcaacttacaatcatggcagaaggtgaaggagaagcaggcacgtcacatggctggagcaggagcaagaggagggaggtgccacacacctttaaacagccagatctcacaagaagtctcactatcaaacgaacagcaccataacgatggtgctaaaccattcatgagaaatccacccccatgattcaat

SEQ ID NO: 555329 - DNA, 537 bp, Homo sapiens
tttctgctttaagaaaaataatatagtagcaaggtcacagatctggagtcagctagggctgggttcaatcctgactgcctcacttactagttgcatgaccttaataaattatttaatcactgtaaacttcattcttctcctctgaatgaagttagggaaattaaactaacagttgttcagtttccaaggagttagcatggagattgtattcgtctgttcttgcattgccataaagaaatatctgagactgagtcatttataaagaaaagaggtttaattggcttgtggttctgcaggctgcatgggatgcatgatgctggcatctgcttagcttctggggatccctcaggyaacttacaatcatggcagaaggtgaaggagaagcaggcacgtcacatggctggagcaggagcaagaggagggaggtgccacacacctttaaacagccagatctcacaagaagtctcactatcaaacgaacagcaccataacgatggtgctaaaccattcatgagaaatccacccccatgattcaat

SEQ ID NO: 555330 - DNA, 544 bp, Homo sapiens
atatactacatactattatatataatataaaatataatacatgtataatataatataatatttatacatattaaatatacatttttgttgttgttgaaatggagtcttactcttgtcgcccaggctgaagtgcagtggcatgatcttggctcactgcaacctccgcctcgcggattcaagcaattctcctgcctcagcctcccgggtagctgggattacaggggcacaccatcatgcctggctaatttttgtatttttagtagagacagggtttcgccatgttggccaggctggtctcaaactcctgacctcagatgatccaccccccttggcctctcaaagtgctgggaatacagatgtgagccaccgcacctggccccattattatatatgaatccaagaaaatatacagagaaaccatcaagaaataaaaaaaagggtttartaaagaagctagtaacaaaataaataccaaaatctattctagttaccaacaaaaacagaaaaaagcatggaaaatatcccattcgtgacagcaaaatca

SEQ ID NO: 555331 - DNA, 442 bp, Homo sapiens
aatgcttttattatttcggagactgagacaccatagccaagtaacttgtctaaggtcccatacagtagctaggaagcagcagaatcagaacttgaatcctgatggtctcttaaggcaaaggtcttaaccacttccctttactgcctctaaaaactagaggcaggagaaaataagactatttaagtagctgtgttttgtttcaaggtagagacattttcaaaaaaatgcttattaccagcaaattaatattttttctaaagaaatttcagacttctasaatttggattagtaatgcagtgtatttgtaatgaattaaaataagatgtgatttaaggaaaaataattgaaactgggttatgtcttgttataaatgcttattccaccaaccatatatttaatacataaagctaaaaatgcaatttatatgcaaaatattatattt

SEQ ID NO: 555332 - DNA, 613 bp, Homo sapiens
cctttttcactcttcatgcttttaagatctctgttttgggtattctgcagtgtccctacgttatgtgttccttttatttgaatttatcctggttaggattcagcatggttcctgaattattggagtcatgtcttctattaatctggaaaattgcctgctgttttctcttcaaatgttgctctactgtatttattttctatgttctctttttctggaattctgatgttgaattgccttattctgttctccttgctctttactgtcatttaaaaaatacatctgggtaatttcctcagctctgtcttccagattgttacttctttatctagctgtatctaagttgttaatcccaaccattgrgtttttaatttcagtgactaaaatgtttatttttaaatgtttgatgtagttctttttccagcctactttgtagttttgataatatcttattctttcccatatttacaattccttatttaggtcaataatcatttaaacataatctcttcagagattttcagcctgggaccactgtttatttttaagaattggctagaggttactaagcgatataaaattcaaatttcaaatccattaaagggtaggcccttgg

SEQ ID NO: 555333 - DNA, 616 bp, Homo sapiens
tgccctttttcactcttcatgcttttaagatctctgttttgggtattctgcagtgtccctacgttatgtgttccttttatttgaatttatcctggttaggattcagcatggttcctgaattattggagtcatgtcttctattaatctggaaaattgcctgctgttttctcttcaaatgttgctctactgtatttattttctatgttctctttttctggaattctgatgttgaattgccttattctgttctccttgctctttactgtcatttaaaaaatacatctgggtaatttcctcagctctgtcttccagattgttacttctttatctagctgtatctaagttgttaatcccaaccattgggtttttaatttcagtgactaaaatgtttatttttaaatgtttgatgtagttctttttccagcctactttgtagttttgataatatcttattctttcccatatttacaattccttatttaggtcaataatcatttaaacataatctcttcagagattttcagcctgggaccactgtttatttttaagaattggctagaggttactaagcratataaaattcaaatttcaaatccattaaagggtaggcccttgg

SEQ ID NO: 555334 - DNA, 442 bp, Homo sapiens
gtgtcttattgcacagagtctttttgtcagtcttaagatctctgttttgatgttgatgctggtcagttgtgcctgartcccaaaggcaggagggtataatgagacatgtcctaacaccttttcttatcactgcccaaactagtttttcaagtttactttggaatgccctcagctgaggtggcagggggccttcagttggttgtgggggcttagaattttatttttggtttacagctaaaattccaatagaagcccgctggctttccagtgagaggaacccgagagtggagcccagagtaatcaaagttattgaagagtgaggggtgagtcttggaaaggggaaagccagagaagagaaacccagaattctgtatataaactctgcctaagtctctgattcctgctgaacctcacatgcacagggaaacctgcaggcagccta

SEQ ID NO: 555335 - DNA, 460 bp, Homo sapiens
tttcctccacaagagacagctttgcaggaccatttttaaatatgtcaaagaaatacgttttgggggaaaatactataatttatttcagagactgctatgtcatgtgatgctatactagagtcagattggaatttggtgtcttattgcacagagtctttttgtcagtcttaagatctctgttttgatgttgatgctggtcagttgtgcctgaatcccaaaggcaggagggtataatgagacatgtcctaacacctwttcttatcactgcccaaactagtttttcaagtttactttggaatgccctcagctgaggtggcagggggccttcagttggttgtgggggcttagaattttatttttggtttacagctaaaattccaatagaagcccgctggctttccagtgagaggaacccgagagtggagcccagagtaatcaaagttattgaagagtgaggggt

SEQ ID NO: 555336 - DNA, 598 bp, Homo sapiens
gcagggggccttcagttggttgtgggggcttagaattttatttttggtttacagctaaaattccaatagaagcccgctggctttccagtgagaggaacccgagagtggagcccagagtaatcaaagttattgaagagtgaggggtgagtcttggaaaggggaaagccagagaagagaaacccagaattctgtatataaactctgcctaagtctctgattcctgctgaacctcacatgcacagggaaacctgcaggcagcctagctaaagataaaaaaactaaaccgaggccgggtgcagtggctsacacctgtaatgccagcactttgggaggccaaggcgggaggatcacctgaggttggaagttcaagaccagcctgaccaacatggagaaaccccgtctctattaaaaatacaaaattagccaggcatggtggcacatgcctctaatcccagctacttaggaggctgaggcataagaatcgcttgaacccaggaggcagaggttgcagtgagccaagatcgcaccattgcactccagcctgggcaacaagagcaaaactccatctcaaaaacaaacaaacaaacaaactaaactg

SEQ ID NO: 555337 - DNA, 402 bp, Homo sapiens
tgatttggaagtggaaagtctcaacttccaatagtgccaaagcccaaactgtgactgtggaagtgggtggcttagtgacagtagaggtgatctttagggaagagggagtcaagaarctgagagcccagttggactgttgacaatttcacccaaaccaggggtgaattgacctaggatgacagcagcacacaggtgaggaggaagtggtgagactgatgcagagatctttgaagaaggagggacctggaggtcggtggatgacagaggctttcaggaagggaagagggtggcatagctgtatggttgaggctcagaaaaagcctaagggaaatggaaagcaaagaagacaatgaccttactgcccagcttttaagctgtggcacggagaaaatgacaaccacc

SEQ ID NO: 555338 - DNA, 586 bp, Homo sapiens
tcagggtgttggccacagtgccatctggaagctccactagaagaatctgcttccagctcactcgggatgcagsagaattcgtttcctgattcctcactggctgtctgctggaagctgccctcagttcttagccacgtgagcctttccaatgtgctgctcatttcactgagccagcaaaaagtctccagaacaagtctgttagcaagacagtctcataatatcactccatcacagtgtgacatccaaccccgctgcatattctgttcattagaagcaagtgacaggtgcacatgtactcaaggagagggcattacacagaggtgtgagcaccaggagccagggatcatggtggcctcttagggtgtgtcctcttcagaaggggcgaggatataggacgtttgctggttacgtcagggcagcatggtggaggaagtgggatgtggggaaggtaggagctgagtcaggacaagaaaggctgagcacctgagatgagggtgtgctgggtgacaaggagaggggcttggactttggggacaagctgatggagatagagttatctgcttttctccattgcatgcactatgaa

SEQ ID NO: 555339 - DNA, 586 bp, Homo sapiens
tcagggtgttggccacagtgccatctggaagctccactagaagaatctgcttccagctcactcgggatgcagcagaattcgtttcctgattcctcactggctgtctgctggaagctgccctcagttcttagccacgtgagcctttccaatgtgctgctcatttcactgagccagcaaaaagtctccagaacaagtctgttagcaagacagtctcataatatcactccatcacagtgtgacatccaaccccgctgcatattctgttcattagaagcaagtgacaggtgcacatgtactcaaggagagggcattacacagaggtgtgagcaccaggagccagggatcatggtggcctcttagggtgtgtcctcttcagaaggggcgaggatataggacgtttgctggttacgtcagggcagcatggtggaggaagtgggatgtggggaaggtaggagctgagtcaggacaagaaaggctgagcacytgagatgagggtgtgctgggtgacaaggagaggggcttggactttggggacaagctgatggagatagagttatctgcttttctccattgcatgcactatgaa

SEQ ID NO: 555340 - DNA, 559 bp, Homo sapiens
ggctgggggtgctgggaagtaggtgattcagggcggctagtggggaggcagcaggggagcctcagaggaggctgcaggcgaggtggggccagctcacccatttgcctcaagggtcatggtctgcaccacaccacagggaaggcagctaagtctgccacctgctatggttgactggcttggattttacacctgtaaggaggtgactgtccactaggctgctgaggtcagttcatagaggaaaggaaaactcacagccaacacctggacccaaaaacatctgcactgacytctttcccagccaggacacaaaaaggttatctctttaaatgtgcatttgtcctgcggccaagaggctgctggcacaacacatccttccgtcacagcgctggtgctgccaatcaagctagaaggacggccaaccccagcttcccttattcaatcccccagggacaggggaggggagagagtgaaggcaaaggctgtgctggtgcctgggggtgggggcaggagagccttacacaaacacgaacccacactgggacatgtaggcacctgccac

SEQ ID NO: 555341 - DNA, 605 bp, Homo sapiens
gctgcggtcaccacctcctcattctcgcacactctctccctccagctcctgtttacttactggctgggcaggagcttcagcttcccacgggcacctgaacatgtgttcctcttacagagggtttgggaacagaatagattttctgacagttgccctgacctcaggcatctgagggctcctctccctccttccaaccctactcatgcaaacccgcttcacgacaaaaggagagccaccccgactcagaatctaatgacagggtttggtgtcctgtctttgcaatgctggaggcatccttcacttctctgagcctcaatttcctcatctgcaaaaaagaggatcccccagtacctgacacaggggctgtgggggagaycaatgagacaaggcatttgaggaagagccacgtgaactgtaacacaaactgtcgagccccacgcaaaggcttaagaatgcccacgatgagtggtgcgtgacttatcccgggactctggagccagcctgcctgcattcaaggccccgctcagctgcacctgattaggagggattcagggctgcccctcaaagaggaggaaaccaataaatgtaagcaaaggagtcagggc

SEQ ID NO: 555342 - DNA, 436 bp, Homo sapiens
gggttcaataacttaccttcaccaaaagatgcaaagccagtgtcaagctagaaactgcgcctgggtggctgtctggccattaccccgtgccatggtgggtgatcaagaggtgatgctaatgccaatttcctctcctccccgtcatccatccattttcacaggacctgtttctttggaaacctccaccctctgcactctggtttccttccccagtcaccccttattcaagtttgcacaccagagttgagcagagccacctggggagaaaaaaaccacctgctcatccaacttcaagcagcatcattttagggcactgacctygttttctttggtacactcagcctgctggtgttgtctgttttggagctgcccttagatgagggtggggggaagatgactgcattggaatgaaaggcctggaaggattctgaataca

SEQ ID NO: 555343 - DNA, 540 bp, Homo sapiens
ctggctcactcctctgcgtgtggatatccagttctcctgggaggtgagggtctggccrcagtcctctgcgtgtggatatccagttctcctgggaggtgagggtctggctcactcctctgcatgtggatatccagttctcctgggaggcgagggtctggctcactcctctgtgtgtagatatccagttctcctgggaggcgagggtatggccacactcctctgggtgtaggtatccagttctcctgggaggcgagggtctggctcactcctctgcgtgtggatatccagttctcctgggaggtgagggtctggccgccgtcctctgcgtgtggatatccagttctcctgggaggtgagggtctggctcactcctctgcatgtggatatccagttctcctgggaggcgagggtctggctcactcctctgtgtgtagatatccagttctcctgggaggcgagggtctggccacactcctctgtgtgtagatatccagttctcctgggaggcgagggtctggccacactcctctgggtgtaggt

SEQ ID NO: 555344 - DNA, 540 bp, Homo sapiens
ctggctcactcctctgcgtgtggatatccagttctcctgggaggtgagggtctggccgcastcctctgcgtgtggatatccagttctcctgggaggtgagggtctggctcactcctctgcatgtggatatccagttctcctgggaggcgagggtctggctcactcctctgtgtgtagatatccagttctcctgggaggcgagggtatggccacactcctctgggtgtaggtatccagttctcctgggaggcgagggtctggctcactcctctgcgtgtggatatccagttctcctgggaggtgagggtctggccgccgtcctctgcgtgtggatatccagttctcctgggaggtgagggtctggctcactcctctgcatgtggatatccagttctcctgggaggcgagggtctggctcactcctctgtgtgtagatatccagttctcctgggaggcgagggtctggccacactcctctgtgtgtagatatccagttctcctgggaggcgagggtctggccacactcctctgggtgtaggt

SEQ ID NO: 555345 - DNA, 540 bp, Homo sapiens
ctggctcactcctctgcgtgtggatatccagttctcctgggaggtgagggtctggccgcagtcctctgcgtgtggatatccagttctcctgggaggygagggtctggctcactcctctgcatgtggatatccagttctcctgggaggcgagggtctggctcactcctctgtgtgtagatatccagttctcctgggaggcgagggtatggccacactcctctgggtgtaggtatccagttctcctgggaggcgagggtctggctcactcctctgcgtgtggatatccagttctcctgggaggtgagggtctggccgccgtcctctgcgtgtggatatccagttctcctgggaggtgagggtctggctcactcctctgcatgtggatatccagttctcctgggaggcgagggtctggctcactcctctgtgtgtagatatccagttctcctgggaggcgagggtctggccacactcctctgtgtgtagatatccagttctcctgggaggcgagggtctggccacactcctctgggtgtaggt

SEQ ID NO: 555346 - DNA, 540 bp, Homo sapiens
ctggctcactcctctgcgtgtggatatccagttctcctgggaggtgagggtctggccgcagtcctctgcgtgtggatatccagttctcctgggaggtgagggtctggctcactcctctgcatgtggatatccagttctcctgggaggcgagggtctggctcactcctctgtgtgtagatatccagttctcctgggaggcgagggtatggccacactcctctgggtgtagrtatccagttctcctgggaggcgagggtctggctcactcctctgcgtgtggatatccagttctcctgggaggtgagggtctggccgccgtcctctgcgtgtggatatccagttctcctgggaggtgagggtctggctcactcctctgcatgtggatatccagttctcctgggaggcgagggtctggctcactcctctgtgtgtagatatccagttctcctgggaggcgagggtctggccacactcctctgtgtgtagatatccagttctcctgggaggcgagggtctggccacactcctctgggtgtaggt

SEQ ID NO: 555347 - DNA, 629 bp, Homo sapiens
ggtttctgcctgatgctctgggtttcaagcctgcgatcaagtggcatccctgtgcccccgccagcctctcaccaaagcaccacacttacagcacacactcatggcagtggcagycccagaccagctcagggaacaaggcaacttcctggaggggacgtaagggctcctaaaggctgtggcacaaactacctgcccattgccaccacatggggtgcttctgcttggaatccacccacctctgtatattctgagcataggttccttttccaggagggctttcaccaaggacccaatggaaaatcacatcacagagcacaaaatctgcaccatgctaggttggagcagccgggaaagcaccatccgggcagggcagcaccttttgcctggagcatttctttaacatgaatgaaaagatggattagccacaaagggtggctcaggatagaaaatgaatagaaaagcttacctccatggaagctcttcagcagcggtgctacctgcttgcgcaaatcctggagcaggaggcggaggtcaggaagcagccatttgagaaggagaaagaagggaaacattggttaagacctcctaaaaacagcgtggcagtcagtgctgattatcattatctaaag

SEQ ID NO: 555348 - DNA, 629 bp, Homo sapiens
ggtttctgcctgatgctctgggtttcaagcctgcgatcaagtggcatccctgtgcccccgccagcctctcaccaaagcaccacacttacagcacacactcatggcagtggcagccccagaccagctcagggaacaaggcaacttcctggaggggacgtaagggctcctaaaggctgtggcacaaactacctgcccattgccaccacatggggtgcttctgcttggaatccacccacctctgtatattctgagcataggttccttttccaggagggctttcaccaaggacccaatggaaaatcacatcacagagcacaaaatctgcaccatgctaggttggagcagccgggaaagcaccatccgggcagggcagcaccttttgcytggagcatttctttaacatgaatgaaaagatggattagccacaaagggtggctcaggatagaaaatgaatagaaaagcttacctccatggaagctcttcagcagcggtgctacctgcttgcgcaaatcctggagcaggaggcggaggtcaggaagcagccatttgagaaggagaaagaagggaaacattggttaagacctcctaaaaacagcgtggcagtcagtgctgattatcattatctaaag

SEQ ID NO: 555349 - DNA, 562 bp, Homo sapiens
agctggccctagctgccattttaatgcactgttagtgggacatacagcctgttttgaatccacgtctgacagagtcacaataaattttatcccaagccaccagtgcccattttgaaacaccaggacatcccataggtgcttgcgtatgatctcattcagagcattttatttaaaatgaagtaactgagaaagtgcttcaaatattttgaaaagactcaactaagataatatcttatttactgaaaatttaggcattgaaactgtattttgttttgtttttttaagacggagtctcgctctgttgcccagaygggagtgcggtggtgcaatcttggtgcattgcaacctccacctcctgagttcaagtgattctcctgcctcagcctcctgagtagctgggactacaggtgcccaccaccatgcccagctaatttttgtatttttagtagaggcggggttttgcaaggctggtctcaaactcctgaccacaggtaacctgcccaattcagcctcctaaagtgttggaattactgacatgagccaccacactgggcctacattg

SEQ ID NO: 555350 - DNA, 562 bp, Homo sapiens
agctggccctagctgccattttaatgcactgttagtgggacatacagcctgttttgaatccacgtctgacagagtcacaataaattttatcccaagccaccagtgcccattttgaaacaccaggacatcccataggtgcttgcgtatgatctcattcagagcattttatttaaaatgaagtaactgagaaagtgcttcaaatattttgaaaagactcaactaagataatatcttatttactgaaaatttaggcattgaaactgtattttgttttgtttttttaagacggagtctcgctctgttgcccagacgggagtgcggtggtgcaatcttggtgcattgcaacctccacctcctgrgttcaagtgattctcctgcctcagcctcctgagtagctgggactacaggtgcccaccaccatgcccagctaatttttgtatttttagtagaggcggggttttgcaaggctggtctcaaactcctgaccacaggtaacctgcccaattcagcctcctaaagtgttggaattactgacatgagccaccacactgggcctacattg

SEQ ID NO: 555351 - DNA, 562 bp, Homo sapiens
agctggccctagctgccattttaatgcactgttagtgggacatacagcctgttttgaatccacgtctgacagagtcacaataaattttatcccaagccaccagtgcccattttgaaacaccaggacatcccataggtgcttgcgtatgatctcattcagagcattttatttaaaatgaagtaactgagaaagtgcttcaaatattttgaaaagactcaactaagataatatcttatttactgaaaatttaggcattgaaactgtattttgttttgtttttttaagacggagtctcgctctgttgcccagacgggagtgcggtggtgcaatcttggtgcattgcaacctccacctcctgagttcaagtgattctcctgcctcagcctcctgagtagctgggactacaggtgcccaccaccatgcccagctaatttttgtatttytagtagaggcggggttttgcaaggctggtctcaaactcctgaccacaggtaacctgcccaattcagcctcctaaagtgttggaattactgacatgagccaccacactgggcctacattg

SEQ ID NO: 555352 - DNA, 562 bp, Homo sapiens
agctggccctagctgccattttaatgcactgttagtgggacatacagcctgttttgaatccacgtctgacagagtcacaataaattttatcccaagccaccagtgcccattttgaaacaccaggacatcccataggtgcttgcgtatgatctcattcagagcattttatttaaaatgaagtaactgagaaagtgcttcaaatattttgaaaagactcaactaagataatatcttatttactgaaaatttaggcattgaaactgtattttgttttgtttttttaagacggagtctcgctctgttgcccagacgggagtgcggtggtgcaatcttggtgcattgcaacctccacctcctgagttcaagtgattctcctgcctcagcctcctgagtagctgggactacaggtgcccaccaccatgcccagctaatttttgtatttttagtagaggcggggttttgcaaggctggtctcaaactcctgaccacaggtaacctgcccaaytcagcctcctaaagtgttggaattactgacatgagccaccacactgggcctacattg

SEQ ID NO: 555353 - DNA, 616 bp, Homo sapiens
tcatgtaagatagctgtaagtttcccttatcaatgtaagagcttagaccaagtacagagtctttaaaaacaagacagtatatattatgtgatatgcagactgtagacctcgacttaaaatgcagttcagtgaaaaacgaagtttcttttgtccaggataccgaaaccgtcacttcccatctcatctgaagatgwaccatatagccatcagtgcggcgtcgttcctctggttacttttatagatgaacacatattccttccagtccttgtgatagaaaatggtaattttaaatggcattgaaactgaagtattaaataaaaaaatatctttctatacaacaggagacagtaagtatgtcctggcaatttctcaaagattttagttcacaggtctgagaaaaattctattagctttaattatttatcagcagtcaatttagattactgttcttgacctatttttacagtgtatgggccacccagaaatgaaataaatgaatagtctttttctacaatggctgattttctgaaataatagaaatctggtttaaaggaggaataaaaccccaaacatgtagttaccacaatatataacccaccatgctgtttttgtagtt

SEQ ID NO: 555354 - DNA, 518 bp, Homo sapiens
tttttttttttgagacaggttctcactctgtcacccaggctggagtacaatggctcaatcctagctcactgcaacctccgtctcctgggtctaagcgattctcatgcctcagcctcccaagtagctgggactacaggcgtgcgccaccatacccggctaatttttgtatttttagtagaggcagggtttcacctttttggccaggctggtctcgaattcctgagttcaagtgatccactagcctcggcttcccaaattgctgggatcataggtgtgagccaccacaccaggcctaaataaagccattttgaaaagagagagtaagaagtaaacgaacacacttcctggccttggtcccgcttggagaggattatcctggagctggtggagcagggtcccccyggaatccactgagtcagcagatgatgctacgttcccgcctttccccaggagggtggtgtgggggctgctgtgaaactgatcacgcagatctgggtgggcggcctggagcccttgag

SEQ ID NO: 555355 - DNA, 418 bp, Homo sapiens
cgggaggctgaggcaggagaattgcttgaacccgggatgcagaggttacagtgagctgagatcacaccactgcactccagcctgggcgacaagagcaaaactccatctcaaaaaaaaaaaaaaaaaaaaggaaacattaagttcatggggagttaatccacgtattgcagaaggcaggaattctcagtgttttggcatccctgggataacgacaaacttcgcttagaacaagatgttgggagccacagagcagtttccasgtagtccctttgacatcttgggggagtggggagggtcctgtgaaatgtgactctcacactcacctcagctccacaggcaagtgctccaagacttcacagttgaacttttagctaaggacagagttctttcccaatctcccccatatgcatatttattt

SEQ ID NO: 555356 - DNA, 485 bp, Homo sapiens
tttgtttccatgcatggtggctcatgcttgtaatcccagcattttgggaggctgaggcagacagatcacaaggtcaggagttcgagaccaatctggccaacatagtgaaaccccrtctgtactaaaaagacaaaaaattagctgggtatggtggtgtgcacctgtaaccccagttacttgggaggctgaggcaggagaatcacatgaacccaggaggcagaggttgcagtgagctgagatcgcaccactgcactccagcccagacgacagtgcgaggctctatctggaaaaaaaaaaatcgtaaagacaagatctcactttgtagcccaggatggtcttgaactcctagactcaagtgatcctcccttcttagcctcccaaagcactgggattacaggcgtgagccaccatgcccagccttgaccagaagattttaattagacaaagactgcccctgaggctactttcaggcatggatttgctag

SEQ ID NO: 555357 - DNA, 563 bp, Homo sapiens
tatatgggtcatagtttgtggtgtccccaaacaatggcaatagtaacatcaaagctccctgactgcacatcaacatatcagacataataatagtgaaaaattagaaatgttgtgggaattaccaacatatgacaaagagacatgaagtgagcacctgcagttggaaaaatgttgctgacacacttgtttgactcaaggttgccataaacttcaatttgtgaaaaagcacaatatctgtaaagcataataaagtaaagctcaatgcaacaaagtatccctgtataaaaatcagttgtctttctatatgtttgcaataaatgatctgaaagtgaaagtaaaaaaaatccatttatagtagcatcaaaaagagaataaaatgcttaggaataaatttcgcaaaagaaacacaaaacttgtgcctaaaaaccataaaacactgctgaaagacactaaactaaacggaaggatgyccaatgttcatggagtggacgacttaatatttttaagatggcagtagtcacaaagtggatttacacattcaaggtaacgcctatcaaaattcc

SEQ ID NO: 555358 - DNA, 305 bp, Homo sapiens
ggtataaatgaagctgtctcagagatcagaagaggaagaatctgtttctggctattttgggaagacttggaggatctggcatttasaaggatggataaggcagggcatggtggctcacacttgtaatcccagcacttcaggaggccaaggcaggtggatcacttgaggccaggagttcaagaccagcctgaacaacatggtgaaaccccatctctactaaaaatacaaaattagccggatgtggtggcacacacctgaaatcccagctacttgggaggctaaggcaggagaatcacttgaaccca

SEQ ID NO: 555359 - DNA, 480 bp, Homo sapiens
ctcttttgtgaataaaggttaatttttccaattacacgtaagtagctaatattatttttttttagcagtcttacagtgtaagttacaaccaaaagtgaagtgcctgaattatatttacattttaacaaatggttttaaagggaaaatccatgtgaaaaagaaacaaaagtcaggaaaaaaaacacacagaagtttccataccaatcctgatagcaataacaatccctttgctgtcrtgagagttcaccctcatcctgatttcatagtaatcctgttcacgcctttctttaaagctttactcccatgcatacatctctaaaacaatataggttatctcaaacttcatatagattttgaatcttttgatacaaatggaatcgtgctatgtgtattcttatgagaccttattttagctcaaatgtatgtttgctaagttgttataggtgtctctagagcgttcatgtttattattcatagaat

SEQ ID NO: 555360 - DNA, 480 bp, Homo sapiens
ctcttttgtgaataaaggttaatttttccaattacacgtaagtagctaatattatttttttttagcagtcttacagtgtaagttacaaccaaaagtgaagtgcctgaattatatttacattttaacaaatggttttaaagggaaaatccatgtgaaaaagaaacaaaagtcaggaaaaaaaacacacagaagtttccataccaatcctgatagcaataacaatccctttgctgtcatgagagttcaccctcatcctgatttcatagtaatcctgttcacrcctttctttaaagctttactcccatgcatacatctctaaaacaatataggttatctcaaacttcatatagattttgaatcttttgatacaaatggaatcgtgctatgtgtattcttatgagaccttattttagctcaaatgtatgtttgctaagttgttataggtgtctctagagcgttcatgtttattattcatagaat

SEQ ID NO: 555361 - DNA, 521 bp, Homo sapiens
tctggaggaccacacagggctcacaggggaggaaatgtgaagagatggcaaaacagaacaggacattccgtgtgtttccagaaggcaatctggctggatattaaggcccacctcagtattggtgaggacacccagtgtctcttggccctgagcatgtgcacacaaacacgcacattgtctaaacggcattgacatcactactacctgagtcatcctcagattctatacaacccctktaaaaatatcaatgacacattcttcttagaaaacaatctgggaatcccaaatttgctatgaaatggcagaagatcctgaaaacccagagcaatccagtaaaaagcacaaagctggagccaccccactacctaacttcatgatatactactacaaaactttttgtaccaaaatacaatagcactggcagaaaagcagagactagagcttaggaaaaacaacaggagcccagaactaagtcactgcatttgcagctcacagccttttcccaaagaagcaagaacgcc

SEQ ID NO: 555362 - DNA, 632 bp, Homo sapiens
accactttggccagcctcctcaccaccctattttcttttcttttttcttccttgtttaaaaaaagagagagagagaaagagggcctcgctctgttgcctaggctggagtacagtggcacaatcacggttcactgcagccttgaactcctgggctcaagtgatctttccaactcagcctctggaacagctaggactacaggaacatgccaccatgcctggataacttggytttttgtttgcttttagagaggaagtctccctatgttgcccaagtaagtctccaacttctggcctcaagtgataatcctgtcttggcctcccaaagtgctgggattataaactgatatggtttggctgtgtccccagccaaatctcatcttgaattgtagctcctataattcccatgtgttgcaggagggacctggtgggagataactgaatcacaggggtggtttcccctatactgttttcatggtagtgaataagtctcatgagatctgatggttttataaggggaaacccctttcacttagtctctcattctgttcttgtctgccaccatgtaagacatggcttttgccttcaattgtgattgtgaggcctccccagccatgtggaactgtgagtccatt

SEQ ID NO: 555363 - DNA, 253 bp, Homo sapiens
atatgtacaattattctatattaataaaaacagagtggtctctgaatgcagatcagaaatgaaggactcaagcacttatcactgtgtaatagggtcagccttcattgcagaatataaaatgaagccattagaacagttttctaataagtattgaaaaatatttgggcttgagacaacttsatttgactcactgtgtccacacggccttcattaattctaggagagtcttcttcctcactactttacctagcta

SEQ ID NO: 555364 - DNA, 551 bp, Homo sapiens
gattgctggatcatatggtggctatgtttttaattttttgaggcatctccatactgttttccataatggctgtatcaatttacattcccactaacagttctaagggttccctcttcttgacaccctccattcctaatggttttgtgtaaatgcgcaggtctcacctccacagttgggttgtaatcccgagagcagagctgcagtcctcatgcctgctgaccctgcagggtgtggtgtctctgtccatccaaggaccagccctgttcattgtctaacacagcagcagaagctgtgcacactgactttccctacaagagcagtgaccagagaaagtttaatttattccacgcagaaatatggcaagtattttttttttaactaatcaaacagattacttatcagatggcatgggttaaaaattactcagtctaaaaatgtctggtgaacaagcgcttaattttagcaaacaattctaaattgagtacttatgaaaagcaattttkttgttccccaaacccaaaagacaccctccctcctttagataaaaaggg

SEQ ID NO: 555365 - DNA, 464 bp, Homo sapiens
tgaaccaccatgcccagccaagcccaggagtttaaggccgcagtgagctatgattgtgccactgcactccagcctggatgacagagygagacccggtctcaaaaattaaatcagtatttgtctaatggagttgttgaccattcttgggggatgggaggacacctgagaaaatgtgtgagggtgagaggtgtggaagaccaccacggtgggcacatagaaaacagtcctgcttctgctgcccgctggattgagggtgaaacttcccactcttccccaccccactgcaaggtagccagcctgccccagatcctgacgctgcccatgtaccttcttcactcgaagggcagtgatcacatggctttcgtcatactcccatttggaacggacatctggaaaggaaacgtatttaagaactgaatttgcaaaggaacatacgaccaaactactcagaggacctacgtcgt

SEQ ID NO: 555366 - DNA, 408 bp, Homo sapiens
cccagctaattttttattttttgtagaaatgggggtctcactatgttgcccaggctgatcttgaactcctgagctcccagcccctcccttctcggcctcccaaagtgctgggattataggcctaagccaccgaacctagcctatattagaaattaaaactgagaaaattttaaacattaattcatttataaatgacaaccataaactcattatatgttaaacaccctatttttcaagagtgtaaaggggtgctgaagctgaaatatttgtctaccacagcagttctcaaagagaagctgagcatgggataggggtgttggtggggtggccctgaggacaggcttctttcagagaagtattgggcagctggggctgtgggaggtagaayagttcaggttgaatggatca

SEQ ID NO: 555367 - DNA, 544 bp, Homo sapiens
tttgaatcgatgctgaaccagctaattacttcaggaacatgctacctaaataatgcctccttcattagatccattaatttaattctcactgtttatrcccctctgctcactgcctgtctgactgattcctcctccagtgctttctccatttctccttttactctcttcagtgctgccgaagtttaaggtggaagtggtggaacccaaggagttatcaacggtgcaggaatctttcttagtaaaaatttgttgtaggtaagagcagaagcttgggatctggtggagattaaagatgcatcgagagacatgatgaggggatgacatgggatgtgggattatgggtgggccaaaacttggggcattttatgtaattcagagtcatggcttatccaagacctttttttttttttttttttgagacaaagtctcactcttgtttcccaggctggagtgcaatcacgtgatctcggctcactgcaacctccgcctcatgggttcaagcgattctcctgcctcaacctctagagtagctgggatcacaggc

SEQ ID NO: 555368 - DNA, 638 bp, Homo sapiens
ctatcttgaagaagaatcacaaaatctagaggattatactacccaaaatcaagaactataataaaactatagtgtgtgtgtgtgtgtgtgtgtgtgtgtgtgtgtgagatattgttgaaggataggcgaagtaaacaatgrgacaaaacagaatccaggaataaactctcccatgtatggctaccttatttatgataaaagcaacatgctgtaatgtagtgggaaaaggatggtctttcaatagatgatctgagccatattaaatatccatgtaggaaaacaaagtctcttgacctagctcataccatgcgcaaaaagcaatttcagataaaattaaaacaaaaacagcttttagctgggtgcagtggctcacgcctgtaatgtcaaccctttgggaggccgaggcaggcagattgcttgagctcaggagttcgagaccagtctgggcaacatgctgaaaccccaactctatcaaaacaatacaaaaaattagcggggtgtggtggcatgtgcctcctgtggtcccagctattcaggaggctgaggtgggaggattgcttgagcccgggaagcagaagttgcaatgagctgagattgcaccactgtactccaacctgggtgacagagtgagagagtga

SEQ ID NO: 555369 - DNA, 638 bp, Homo sapiens
ctatcttgaagaagaatcacaaaatctagaggattatactacccaaaatcaagaactataataaaactatagtgtgtgtgtgtgtgtgtgtgtgtgtgtgtgtgtgagatattgttgaaggataggcgaagtaaacaatgagacaaaacagaatccaggaataaactctcccatgtatggctaccttatttatgataaaagcaacatgctgtaatgtagtgggaaaaggatggtctttcaatagatgatctgagccatattaaatatccatgtaggaaaacaaagtctcttgacctagctcataccatgcgcaaaaagcaatttcagataaaattaaaacaaaaacagcttttagctgggtgcagtggctcaygcctgtaatgtcaaccctttgggaggccgaggcaggcagattgcttgagctcaggagttcgagaccagtctgggcaacatgctgaaaccccaactctatcaaaacaatacaaaaaattagcggggtgtggtggcatgtgcctcctgtggtcccagctattcaggaggctgaggtgggaggattgcttgagcccgggaagcagaagttgcaatgagctgagattgcaccactgtactccaacctgggtgacagagtgagagagtga

SEQ ID NO: 555370 - DNA, 490 bp, Homo sapiens
aggtcccatctgtcattttttatttttgtagaatgtacttattttccctgacttttcagtcagaatttgcaatcaaggggagcataatggatccagtggatacccaggataaaagggtgtaattgcctagagaatcttttctgttaaatatcattcatcttacttcccttatccctttgcctccaaacctgtttccaaaacaaaagcattcctctgaggaagtgcttgcacggtgataggtgatagatagcccaygtggggagaggttgggagaatcatgcagaagagaaaccgagagagatggaaacggcattctggccagccacttttcttgtaatccatcactgtttgccctgcagtagcgggctggttgagcagagccccataattaaaattctctattctaacctgtcctcacatctttaagatgattctttgagaagtctgggttaaaaggtttaaggaagaaaccaaactgtgagttttgggg

SEQ ID NO: 555371 - DNA, 490 bp, Homo sapiens
aggtcccatctgtcattttttatttttgtagaatgtacttattttccctgacttttcagtcagaatttgcaatcaaggggagcataatggatccagtggatacccaggataaaagggtgtaattgcctagagaatcttttctgttaaatatcattcatcttacttcccttatccctttgcctccaaacctgtttccaaaacaaaagcattcctctgaggaagtgcttgcacggtgataggtgatagatagcccatgtggggagaggttgggagaatcatgcagaagagaaaccgagagagatggaaacggcattctggccagccacttttcttgtaatccatcactgtttgccctgcagtagcgggctggttgagcagagccccataattaaaattctctattctaacctgtcstcacatctttaagatgattctttgagaagtctgggttaaaaggtttaaggaagaaaccaaactgtgagttttgggg

SEQ ID NO: 555372 - DNA, 503 bp, Homo sapiens
tgtagtgagtttattatcatttttaaattaattaataaatattttaagattgtctcagttttaatttctaatatgataaagaccaatagttaaaacccacttcaccgaaagctgtttgaggtcctcagtaaattaagagtataaagggacactgaaacaaagaatttttagaaccactgttcttttctatcatttggtcaccataatgaattaaagcaaatgactaatatgaaccaaaagaaagctggggtagcagtttttttttttttttcttttttcygagatggagtcttgcaccgttgcccaggctggagtgcagtggcgcaatctcggctcactgcaagctctgcctcccaggttcacgccattcttgtgcctcagccacctgagtagctgggactacaggctcctgccaccacgcccagctaactttttgtacctttagtacagacggggtttcactgtgttagccaggatggtcttgatctcctgacctcatgatc

SEQ ID NO: 555373 - DNA, 603 bp, Homo sapiens
ccccaacctcagacttaccaggaagcagatacatrtgagtgtggaagccggagggtgtttatgtaagagcaccttcctcacttccatacagctctacgcggcaaattaacttgagttttatttatcttatcctctggtttaattacataaatatttattttttaagtgtaattttgccaaataataaaaacagaaggaaattgagattagagggaggtgtttaaagagaggttatagagtaaaagatttgatgctggagaggttaaggtgcaataagaattcagggagaaatgttgttcattattggagggtaaatgatgtggtgcctgaggtctgtacattacctcttaacaatttctgtccttcagatggaaactctttgatttctcagaaaagttgtatgcctatttaataaagctactcatttcctttggaactttatctttaagataatagtttacatgtagtagtacttgaaatctaggattattaactaatatgggcattgtagttaatggcggttgatgggttctaattttggatggagtccagggaagagaaagtgatttctagaaagcctgttcccctcactggacgaaataa

SEQ ID NO: 555374 - DNA, 603 bp, Homo sapiens
ccccaacctcagacttaccaggaagcagatacatatgagtgtggaagccggagggkgtttatgtaagagcaccttcctcacttccatacagctctacgcggcaaattaacttgagttttatttatcttatcctctggtttaattacataaatatttattttttaagtgtaattttgccaaataataaaaacagaaggaaattgagattagagggaggtgtttaaagagaggttatagagtaaaagatttgatgctggagaggttaaggtgcaataagaattcagggagaaatgttgttcattattggagggtaaatgatgtggtgcctgaggtctgtacattacctcttaacaatttctgtccttcagatggaaactctttgatttctcagaaaagttgtatgcctatttaataaagctactcatttcctttggaactttatctttaagataatagtttacatgtagtagtacttgaaatctaggattattaactaatatgggcattgtagttaatggcggttgatgggttctaattttggatggagtccagggaagagaaagtgatttctagaaagcctgttcccctcactggacgaaataa

SEQ ID NO: 555375 - DNA, 603 bp, Homo sapiens
ccccaacctcagacttaccaggaagcagatacatatgagtgtggaagccggagggtgtttatgtaagagcaccttcctcacttccatacagctctacgcggcaaattaacttgagttttatttatcttatcctctggtttaattacataaatatttattttttaagtgtaattttgccaaataataamaacagaaggaaattgagattagagggaggtgtttaaagagaggttatagagtaaaagatttgatgctggagaggttaaggtgcaataagaattcagggagaaatgttgttcattattggagggtaaatgatgtggtgcctgaggtctgtacattacctcttaacaatttctgtccttcagatggaaactctttgatttctcagaaaagttgtatgcctatttaataaagctactcatttcctttggaactttatctttaagataatagtttacatgtagtagtacttgaaatctaggattattaactaatatgggcattgtagttaatggcggttgatgggttctaattttggatggagtccagggaagagaaagtgatttctagaaagcctgttcccctcactggacgaaataa

SEQ ID NO: 555376 - DNA, 428 bp, Homo sapiens
ttagttttcacctatggatctccacggattttccaaagctgaactcatttactggtgtatttactaatccctagatcatttcactctatacagggaccagcaaacttcctgcaaaaggccagatagtaaatatctcaggctttttgggccatacggtttctgttgcaactgcttaactctgctactgcagtacgaaagcaaccactggcaatatgttaccaaagaaaaaaaaaagaacatgagtatggcaataaaatgccatttacaaaactaggcagcttgttgagtttggyccatgccttagttttccaggccctgctttaaacccacaaaaatgatctgaaagacaaatactttaacttcaggttctcatcattcattggtggtcatatatgaaccatgtccacatctttagcaaaaataagctt

SEQ ID NO: 555377 - DNA, 603 bp, Homo sapiens
ccccaacctcagacttaccaggaagcagatacatatgagtgtggaagccggagggtgtttatgtaagagcaccttcctcacttccatacagctctacgcggcaaattaacttgagttttatttatcttatcctctggtttaattacataaatatttattttttaagtgtaattttgccaaataataaaaacagaaggaaattgagattagagggaggtgtttaaagagaggttatagagtaaaagatttgatgctggagaggttaaggtgcaataagaattcagggagaaatgttgttcattattggagggtaaatgatgtggtgcctgaggtctgtacattacctcttaacaatttctgtccttcagatgraaactctttgatttctcagaaaagttgtatgcctatttaataaagctactcatttcctttggaactttatctttaagataatagtttacatgtagtagtacttgaaatctaggattattaactaatatgggcattgtagttaatggcggttgatgggttctaattttggatggagtccagggaagagaaagtgatttctagaaagcctgttcccctcactggacgaaataa

SEQ ID NO: 555378 - DNA, 576 bp, Homo sapiens
gccatgcagagtgggtcagcgcctgtaatcccagcgactygggaagctgagggtggaggatcacttgaggtcaggagttcaagaccagcccgagctgcaaagtgagaccctgtctctacaaaaataattttttaattagctgggcatagtgacacacgcctcttgtcctagtagttgggaggctgaggcaagaggatcacttgatctcagggttgaggctgcggtgatccatgatcacaccattgcactccagcctatgtgacaaagtgagtccctgattctaaaaaagaggaaaagcagggtgacattcaaatctgaggctcaaatatagcaatcatgtttacttattccttttccacaacctactctttacaactgtagtcataatgtaaatgcgctttttaagctattttacagcgttcagtgttaccaatggcattcttggtaaagttggttcattctcaagtttttgaaaactactgaaaaattgattttcaaaaaagtggtagcggctttatgagtatcccgagtatcccccaccccttgcagctaccagtcagaagcatgagtactagc

SEQ ID NO: 555379 - DNA, 576 bp, Homo sapiens
gccatgcagagtgggtcagcgcctgtaatcccagcgacttgggaagctgagggtggaggatcacttgaggtcaggagttcaagaccagcccgagctgcaaagtgagaccctgtctctacaaaaakaattttttaattagctgggcatagtgacacacgcctcttgtcctagtagttgggaggctgaggcaagaggatcacttgatctcagggttgaggctgcggtgatccatgatcacaccattgcactccagcctatgtgacaaagtgagtccctgattctaaaaaagaggaaaagcagggtgacattcaaatctgaggctcaaatatagcaatcatgtttacttattccttttccacaacctactctttacaactgtagtcataatgtaaatgcgctttttaagctattttacagcgttcagtgttaccaatggcattcttggtaaagttggttcattctcaagtttttgaaaactactgaaaaattgattttcaaaaaagtggtagcggctttatgagtatcccgagtatcccccaccccttgcagctaccagtcagaagcatgagtactagc

SEQ ID NO: 555380 - DNA, 576 bp, Homo sapiens
gccatgcagagtgggtcagcgcctgtaatcccagcgacttgggaagctgagggtggaggatcacttgaggtcaggagttcaagaccagcccgagctgcaaagtgagaccctgtctctacaaaaataattttttaattagctgggcatagtgacacacgcctcttgtcctagtagttgggaggctgaggcaagaggatcacttgatctcagggttgaggctgcggtgatccatgatcacaccattgcactccagcctatgtgacaragtgagtccctgattctaaaaaagaggaaaagcagggtgacattcaaatctgaggctcaaatatagcaatcatgtttacttattccttttccacaacctactctttacaactgtagtcataatgtaaatgcgctttttaagctattttacagcgttcagtgttaccaatggcattcttggtaaagttggttcattctcaagtttttgaaaactactgaaaaattgattttcaaaaaagtggtagcggctttatgagtatcccgagtatcccccaccccttgcagctaccagtcagaagcatgagtactagc

SEQ ID NO: 555381 - DNA, 445 bp, Homo sapiens
aggcctgctgagtcacaatttcagcagagtgggatcaggaaatctgtattaacaagcctttgaagtgggtattaatgaatgctaattttttttttttttttgagacagagtctcgccctgtcgctcaggttggaatgcaaagttttagaaggatcaattggtaaacaaaccctaatttccagagtatatttgtcttagaattaagaagatggttgggccaggcayggtggctcacgcctgtaatcccagcactttgggaggccaaggcgggcggatcacgaggtcaagagattgagaccatcttggccaacatggtgaaaccccatctctactaaaaatacaaaaattagctgggtgtggtggcacgtgcctgtagttccagctactcgggaggctgaggcaggagaatcgctcaaacccaggaggtggaggttgcagtgagccg

SEQ ID NO: 555382 - DNA, 522 bp, Homo sapiens
tgaggaaaaggcaccagagcaacattggaagagagtttggagcaatagtcttttttttggtgggggggaggcttgtttattccccataataattttcaaaaactatgtatttcccctacacatttttaagttgacatctaagaaaatttttttatgtttaagtagcttccagggattaatttctgctgtctattatctggtatacatgctttcagtaccactgctagcttttccattgcttttgtgcaaattrggcaaaggtgcccttttgggaaaaagcaggttttctaggaacggtactcttgtgtaaagaaaaaatgtgccccttcctctggatgaggaggagagcctggccagtggattgcaggctgtatttcagcctctacttatcccacaaaaccgcacaactaagtttcagcccttcacttgtcccgaaaaccatacaaaccatacataaaagctttgtaaactttaactgaaaaaaaacaggccatgcgcggaggctcacccttgtaatcccag

SEQ ID NO: 555383 - DNA, 353 bp, Homo sapiens
tcactattatttagtgaaatgagatattatgatattttctgaattgtgattaaaaaggcaactttatgcccatgcaacagaaactataaaaaatacagagaatgaaaagaaacagatagattttttagttctttaggcccgtagtctgcaaatccttttatgattttctatcaaacaaaagaggaaaatagaccagttgcaatccaaacgagagtctaatagaatgaggtcgaaaagtaaatcgcgcgggtttgttactgataaagcaggcaagacctaaaatgtgtaaagggcaaagtgtatactttggcgtcaccccttacatattttargtctttttttattgtgcgtaa

SEQ ID NO: 555384 - DNA, 472 bp, Homo sapiens
ggaatccatggatagtttgtaattcttgggagatgacaatgcctagtgggagtggccagaaggattctttaaggatgaaaaagaatgaagagtaataaggggaggctgaatgttggatgttctgggagtcactccttctcctctgtggtttctgaccattgagagatcaaatggggatgacagcagagatggctaagttgtccccactatctrttctctccttcttccaaggtgatggagtcctcaaattttgcctaaatacatgactacccacaaatgagacttcaattcccagcatctcttgcaggtgggtgtggtcatgtgactgacatctggccaatgggatgtaggcatgtgctcaatggcagtttctaggccattgcttccttttctctcctcatcctccaacctcgattaaaaggtcaagggctacatcaagggaatggtggggcagaaaggagaaaggagcctg

SEQ ID NO: 555385 - DNA, 351 bp, Homo sapiens
tacctgaagacaatcccgtttcccacgaaatcctcaaagctatgcaaatatcctcttgcagattctacaaaaagagtgtttcgaaastgctctatgaaaagaaaggttcaactgtgtcagtagagggcacacatcacaaacaagtttctgagaatgcttctgcctagttgttatgggaagatatttcctttttcaacataggcctgaaagcgctccaaatgtccacttccagatactacaaaaggagtgattccaacctgctctatgatagggatgtcaactctgtgtcctgaatacaaacatcacaaagatgtttctcagaacgctgcagtctgcaatttgtatgaattc

SEQ ID NO: 555386 - DNA, 351 bp, Homo sapiens
tacctgaagacaatcccgtttcccacgaaatcctcaaagctatgcaaatatcctcttgcagattctacaaaaagagtgtttcgaaagtgctctatgaaaagaaaggttcaactstgtcagtagagggcacacatcacaaacaagtttctgagaatgcttctgcctagttgttatgggaagatatttcctttttcaacataggcctgaaagcgctccaaatgtccacttccagatactacaaaaggagtgattccaacctgctctatgatagggatgtcaactctgtgtcctgaatacaaacatcacaaagatgtttctcagaacgctgcagtctgcaatttgtatgaattc

SEQ ID NO: 555387 - DNA, 576 bp, Homo sapiens
ccgcttccaacgaaatcctccaaactagccaaatatccacttgcagattccacaaaaagagcgtttcaaaacttctctatgaaaagaaaggttctactcctttagttgaggacacacatcacgagtaagtttctgagaatgcttctgtctagtttttatgggaagatatttccttgttcaccttaggccggaaagcgctccaaatgtccacttacacacactacaaaaagagtgtttcaaacctgctctgtgaaagggaatgttcaattctgtgacttgaatgcaatcatcacaaagaastttctgagaatgctgctgtctgctttttatatgtaatcccgtttccaacgaaatcctcaaatctagccaaatatccacttgcagattccacaaaaagagtgtttcaaaactgttctgtctaaagaaatgttcaactgtgttagttgaggacacacatcagaaactagtttctgagaatgcttctgtctagttgttatgggaagatatttccttttccaacgtaggcctgaaagcgctccaaatgtccacttacacacactacaaaaagagtgtttc

SEQ ID NO: 555388 - DNA, 496 bp, Homo sapiens
cccctcttctgtgtttttctgggtttcctgtttcttgaatgactttattttggttttgagacttctgggttagtcttctcgtggcatttcttaatactgattttcattctctctttgtaaatcctatttcttgaaagatcctttgtattgatttccgttgctgccagaaaacattaccacatacctggaggcttaaaagagccctcctttattatcttacagcgtttgtgagtcagaartctgggcctcacgtggctcagttgggtcctctgcttagggcctcacaagatggaagtcaaggtgttggctggcttagctcttatctgaaggctctgggaagaatctgcttccaagctcactcaagttgttggtagaatccagttccttgtgattgtattaggttggagcaaaagtaatcgtggtctttgccatttaaaagtaatggcggccaggcgtggtggctcatgcctgtaatcccagcactttgggaggccga

SEQ ID NO: 555389 - DNA, 569 bp, Homo sapiens
tcttagggatttaattgaatgttttaatactgtttctcttaatctgccttgttaaatttggtattcaccaagatgcccctattgtctctacttttatcttttttttttttttttttgggacagtctcgcactgttgcccaggctgcagtgcaatggtgcgatctcggctcactgcaacttctgcctcccgggttcaacccactctcctgcctcagcctcctgagtaactgggattacaggtgcccaccaccacgccccactaattttttttgtagtttttagtagagacrgagtttcactatgttggccaggctggtctcgaactcctgacctcatgatacacccaccttggcctcccaaagtgctgggattacaggcgtgagccaccgcgcccagcctctacttttatcttgatgcatcaccgagttgatgttagatttcaaattcttctttgcccttatgccattctatcctgaacccacctttatatgatgatgaaagaaattagcaatatgttattatctatctgttggtatatatcaaatgctcacctaaaaatagcaacaacc

SEQ ID NO: 555390 - DNA, 569 bp, Homo sapiens
tcttagggatttaattgaatgttttaatactgtttctcttaatctgccttgttaaatttggtattcaccaagatgcccctattgtctctacttttatcttttttttttttttttttgggacagtctcgcactgttgcccaggctgcagtgcaatggtgcgatctcggctcactgcaacttctgcctcccgggttcaacccactctcctgcctcagcctcctgagtaactgggattacaggtgcccaccaccacgccccactaattttttttgtagtttttagtagagacggagtttcactatgttggccaggctggtctcgaactcctgacctcatgatacacccrccttggcctcccaaagtgctgggattacaggcgtgagccaccgcgcccagcctctacttttatcttgatgcatcaccgagttgatgttagatttcaaattcttctttgcccttatgccattctatcctgaacccacctttatatgatgatgaaagaaattagcaatatgttattatctatctgttggtatatatcaaatgctcacctaaaaatagcaacaacc

SEQ ID NO: 555391 - DNA, 525 bp, Homo sapiens
aacttcaaacacctgttacctaatttgagcagaatgtttactacaatattcaagagtccattcagccaatgtcatatctatgataaaacctgcaaaagttcggatattaataactgtaagtaaatttgttgagagtgactgaaatcactatgggatgagaagttgctatagaaattttactaaagagtgaactagccaggcacagtggctcacacttgtaattctrgcactttgggaggccaaggcaggtggatcacttgaggtcaggagtttgagaccagcctaaccaacatggtgaaaccccatctctactaaaaatacaaaattagtcaggtatggtggtgcacacctgtaatcccagctacttgcgaggctgaggcaggagaattgcttcaacctgtgaggtggaggttgcagcgagccaagattgcgcctgggcaacaagagcgaaactctgtctcaaaaaaacagagtgaacttcacacatctgtcccagcaaactataaatggtatatagcagaattc

SEQ ID NO: 555392 - DNA, 525 bp, Homo sapiens
aacttcaaacacctgttacctaatttgagcagaatgtttactacaatattcaagagtccattcagccaatgtcatatctatgataaaacctgcaaaagttcggatattaataactgtaagtaaatttgttgagagtgactgaaatcactatgggatgagaagttgctatagaaattttactaaagagtgaactagccaggcacagtggctcacacttgtaattctagcactttgggaggccraggcaggtggatcacttgaggtcaggagtttgagaccagcctaaccaacatggtgaaaccccatctctactaaaaatacaaaattagtcaggtatggtggtgcacacctgtaatcccagctacttgcgaggctgaggcaggagaattgcttcaacctgtgaggtggaggttgcagcgagccaagattgcgcctgggcaacaagagcgaaactctgtctcaaaaaaacagagtgaacttcacacatctgtcccagcaaactataaatggtatatagcagaattc

SEQ ID NO: 555393 - DNA, 525 bp, Homo sapiens
aacttcaaacacctgttacctaatttgagcagaatgtttactacaatattcaagagtccattcagccaatgtcatatctatgataaaacctgcaaaagttcggatattaataactgtaagtaaatttgttgagagtgactgaaatcactatgggatgagaagttgctatagaaattttactaaagagtgaactagccaggcacagtggctcacacttgtaattctagcactttgggaggccaaggcaggtggatcacttgaggtcaggagtttgagaccagcctaaccaacatggtgaaaccccatctctactaaaaatacaaaattagtcaggtatggtggtgcacacctgtaatcccagctacttgcgaggctgaggcaggagaattgcttcaacctgtgaggyggaggttgcagcgagccaagattgcgcctgggcaacaagagcgaaactctgtctcaaaaaaacagagtgaacttcacacatctgtcccagcaaactataaatggtatatagcagaattc

SEQ ID NO: 555394 - DNA, 519 bp, Homo sapiens
ttcttttgtaaagtttgttttaattaaaaatattttttaagagacaaggtctcactgtgtctcccaggctggagtgcaatggtgcaatcatggctcactgcagacttgaactctgggctcaagctctcctcttgcctcagcctcctgagtagctgggactacaggcttgtgccatcatacctggctaatttttaaaatttttgtagagggtcgggcgcagtggcttatgactgtaatcccagcattttaggaggctcaggcgggcagatcacttgaggtcaggagtttgagaccagcctggccaacatggtgaaatccagtctctatcaaaaatacgaaacttagctgggcatggtggcacacgcctgtaatcccagctatttgggaggctgaggcaggaaaattgcttgaacttgggaggtggaggttgcagtgagccragatcgcaccactgcactcctgcttgggcgacagaatgagcctccatctcaaaaagaaaatttgtttttgtagagacgg

SEQ ID NO: 555395 - DNA, 519 bp, Homo sapiens
ttcttttgtaaagtttgttttaattaaaaatattttttaagagacaaggtctcactgtgtctcccaggctggagtgcaatggtgcaatcatggctcactgcagacttgaactctgggctcaagctctcctcttgcctcagcctcctgagtagctgggactacaggcttgtgccatcatacctggctaatttttaaaatttttgtagagggtcgggcgcagtggcttatgactgtaatcccagcattttaggaggctcaggcgggcagatcacttgaggtcaggagtttgagaccagcctggccaacatggtgaaatccagtctctatcaaaaatacgaaacttagctgggcatggtggcacacgcctgtaatcccagctatttgggaggctgaggcaggaaaattgcttgaacttgggaggtggaggttgcagtgagccaagatcgcaccactgcactcctgcttgggcgacagaatgagmctccatctcaaaaagaaaatttgtttttgtagagacgg

SEQ ID NO: 555396 - DNA, 524 bp, Homo sapiens
tgcttctttgtatttttttttatrgattccctcctgaggtaggcaggggtaggggggaccatccagacaggactttggtcccctcttgtaatgatggaagaaagagcattgaaataacagcagctcccttttaatgagcaagggcgctctgccttgcatttgctgagggtgtctatgccttaactcacccaaccttcccatgaacctattaggtaggtaccaacatgatcccaaaatggaggcacagagaaatcaagtgacttatccagctgacaaaaggatcttgagagtaaccttcagtttcctgctccccaaagttttgctctttttcttgttttgaattctctagcacccagggaggccagccagagactgacaagggcacttagggagtggaaataaaaaaacaaaggcacctgcagagccaattagtgagtcaaaattcaactcccaaacctaagggttggttccttgagctaaagcagagagctttgatcacagttactaactcgtgaatgaactga

SEQ ID NO: 555397 - DNA, 549 bp, Homo sapiens
gtggaggttgcagtgagccaagatcatgccactgcactccagcctggatgaaagagtgaractttgtctcaaaaaaaaaagaaaagacaagacaagacaagaaagcaattgtgtttccagtcattaagccatctatccattctcactcccacacactcacaagggggatatcttaacactcacagatgcatttggggttcacaaaagacaagcactttgatttagattcctctagaaggagatgcattcaaaattgactgttttgccttccaattagcaataacatcaacagtttcttgcatactctaccccactttcaacaagtttgcatggatagacacttatgcaaatagactcctcaaggaaattgtgaaatttccttgggccttgtgttttggagtggccagtaggtcaatagcacaagaatcataaaacagaattctagaatcaggatctcctctacccttccctggggtcctctgacatatgacatgtaactggcttagagaatagaagctaactgggtgtggtggttcacacctgtagtcc

SEQ ID NO: 555398 - DNA, 404 bp, Homo sapiens
cagcctgcgtgacaagagcaaacaacaacaacaacaacaaaaatattggtgaggatatggaaaaattagaacccttgtgcactgctgatgggaacataaaatggtacagccgctaargaaaacagtatggcagttcctcagaaaattaaaaattgaattaccatatgatccagcaaattccatttctcagtatatactgaaaagaattgaaagcagggtttcagggagatatttgtatagccattctcatagcagcattaaacagccaaaaggtggaagcaacccaatgtctactgacagatgaatggatacacaaaatgcagtatccataaaaggctgaaatattcatcctttaggagggaggaactctgacacatgctacaatatggatgaaccctgataac

SEQ ID NO: 555399 - DNA, 591 bp, Homo sapiens
cacttcccatggcccaacattgccggaacgttcttctcacctgtagaatactcaccattactgagctcaagccctggaagcggcctgaagagaaagacacattgataaatgygacaagctcacgtttcctcttttgcccacttagttttatttttttttaatttttacttatttatttttttacagaagaatatttatttatttgtttgttttgtttttgttttttttgagacaagagtctcgctgcgtcacccaggctggagtgcagtggcgcgatctcggcttagcgcaacctccgcctcctgggttcaagccattctcctgcctcagccgcctgagtagctgggattacaggtgcccgccaccacgcccagctaattttttgtatttttagtttcaccatgttggccaggctactcttgaactcctgacatcaggagatctacctaccttggcctcccaaagtgctgggattacaggcatgagccactgcgttgagccttttgtttttgttttttttgagacggagtctcactccatcacccaggctggagtgcagtggtgtcatctgggctcactgcaacctccgca

SEQ ID NO: 555400 - DNA, 591 bp, Homo sapiens
cacttcccatggcccaacattgccggaacgttcttctcacctgtagaatactcaccattactgagctcaagccctggaagcggcctgaagagaaagacacattgataaatgcgacaagctcacrtttcctcttttgcccacttagttttatttttttttaatttttacttatttatttttttacagaagaatatttatttatttgtttgttttgtttttgttttttttgagacaagagtctcgctgcgtcacccaggctggagtgcagtggcgcgatctcggcttagcgcaacctccgcctcctgggttcaagccattctcctgcctcagccgcctgagtagctgggattacaggtgcccgccaccacgcccagctaattttttgtatttttagtttcaccatgttggccaggctactcttgaactcctgacatcaggagatctacctaccttggcctcccaaagtgctgggattacaggcatgagccactgcgttgagccttttgtttttgttttttttgagacggagtctcactccatcacccaggctggagtgcagtggtgtcatctgggctcactgcaacctccgca

SEQ ID NO: 555401 - DNA, 591 bp, Homo sapiens
cacttcccatggcccaacattgccggaacgttcttctcacctgtagaatactcaccattactgagctcaagccctggaagcggcctgaagagaaagacacattgataaatgcgacaagctcacgtttcctcttttgcccacttagttttatttttttttaatttttacttatttatttttttacagaagaatatttatttatttgtttgttttgtttttgttttttttgagacaagagtctcgcygcgtcacccaggctggagtgcagtggcgcgatctcggcttagcgcaacctccgcctcctgggttcaagccattctcctgcctcagccgcctgagtagctgggattacaggtgcccgccaccacgcccagctaattttttgtatttttagtttcaccatgttggccaggctactcttgaactcctgacatcaggagatctacctaccttggcctcccaaagtgctgggattacaggcatgagccactgcgttgagccttttgtttttgttttttttgagacggagtctcactccatcacccaggctggagtgcagtggtgtcatctgggctcactgcaacctccgca

SEQ ID NO: 555402 - DNA, 457 bp, Homo sapiens
caatgcattccagcctggcccacagagcaagactctgtctcaaaataaattaataaataaataaaaataaaaatcaaataaagaaaaacaaaatcaaaaatcaaaaaagtggtttcagctgtgccctctgaaacttaatgtttcttactgactttkctaaacctaagtgtctccatccatagtgggggatcccaaggccatggtcacaccctgatgtgtgactgtctcatgaggaaatgatgggaattcctttatgactctgcagtggtccctccgtgtctgctggagggggtcctggctgattcccagctctacatcctgtagattctcacacccagggcctccttcggcctcttctcaggggagtctcagagcaggagcctctctcccttgcccagtgaaagtcattctcccctctctcatccacctcacccgcggccacaatcctgagactttc

SEQ ID NO: 555403 - DNA, 549 bp, Homo sapiens
tgccagtcctggcctttttccaaatgtcaccttctccgccctcaggccacttggctttccccagatgggctgagctcgctatttctttaaccaggaaatccccaaggccaggccagtgggtaccatatcaggagaaaggcgacttggcrtcagggcatgggacccacgcagtgccctctgggacattttatcaggagagggaatctagcagttcccaggactggagcaaatcagcctttgggtgggacagttctttcccagatctaacctaagcctctcctgctgcctcttcttgagcgagtgacagccaggatccatccccttggacagccctgggtgaccgtctcctgggccagcccacaggaccagctctccctcctgcctagggcagcaggatgggccccaaggtacctatgacgctggctctgtgtgaccgaccctgtattggcaggcaggtgtcaataggcagaaacgctggccactccagccttggccaacatggtgaaccccatctctacaaaaaatacaaaaattagctgggcatggtgg

SEQ ID NO: 555404 - DNA, 397 bp, Homo sapiens
ccagctttcccaacacttcctcaaaattaaggtgcggtgccaggcgcagtggctcacgcacgcctgtaatcccagaactctgggaggccaaggcaggyggatcacttgaggtcaggagttcgagaccaacctggccaacatggggaaacccgtctctactaaaaatacaaaaattagctgggtgtggtggtggacacctgtaatcccagctactcgggaggctgaggcaggagaatagcttgaacctggtaggcagaggttgcagggggcagagattgcaccactgcactccagcctgggccacagagcgagactccatcttggaaaaaaaaaaaagagttaagatggggtaggggtgcagggggcaggtaaggagggacctcgaggcggctggggg

SEQ ID NO: 555405 - DNA, 406 bp, Homo sapiens
tgtttctatgccattttgttattattttttgagacagagtcttgctctgttgcccagtggagtgcagtggcatgatcatggctcactgcaacctctgtctcctgggctcaagygatcctcctgtctcagcctcctgagtagctgactataggcatgcatcaccacgcctgcctaatttttgtattttttgtagacatgaggtttcaccatgttactcaggctggtctcgaactcctggactcaagcaatttgcctgccttggcctcccaaaatgttgggattacagctgtaaaccacggcgccaggccattctctgccctttaaatctggccctggctgtgtgacttgctttggtcaatgcgacatcagccgatgggatgcaaagagaggcttgagaagagcttga

SEQ ID NO: 555406 - DNA, 406 bp, Homo sapiens
tgtttctatgccattttgttattattttttgagacagagtcttgctctgttgcccagtggagtgcagtggcatgatcatggctcactgcaacctctgtctcctgggctcaagtgatcctcctgtctcagcctcctgagtagctgactataggcatgcatcaccacgcctgcctaatttttgtattttttgtagacatgaggtttcaccatgttactcaggctggtctcgaactcctggactcaagcaatttgcctgccttggcctcccaaaatgttgggattacagctgtaaaccacggcgccaggccattctctgccctttaaatctggccctggctgtgtgacttgctttggtcaatgsgacatcagccgatgggatgcaaagagaggcttgagaagagcttga

SEQ ID NO: 555407 - DNA, 483 bp, Homo sapiens
cgggttcaagtgattctcctgcctcagcctcccgagtaactgggattacaggcaccckccaccatgcctggctaactttggtatttttagtagggatggggtttcaccatgttgactagactggtctcgaactcctgacctcaagtgatctgcccacctctgcctcccaaagtgctgggattacaggtgtgagccactgcgtccggccaatttttttttaatagctacaaatgtatttttctttttttaaaaaatattctttatttcttctaaaaaaaaaaaagggggggatacatctgcagaatgtgcaggtttgtttcctaggcacatgtgtgccacgatggcttgctgcacctattggcctgtcctctaagttccctcccctcacccaaattcaagttttgttttttttttgagacggagtcttgctcagtcgcccaggctggagtgcagtggcgcgatctccgctcactgcaagctcca

SEQ ID NO: 555408 - DNA, 461 bp, Homo sapiens
atctctaccaaaaaatacaaatattagccaggtgtggtggtgtgtgcctgtagacccagctacttgtgaggctgaggtgggaggatcgtttgaggctgcagggaaccgtgatgaygccactgcactccagcctgggtaagagtgagaccctgtctcaaaaaaaaaaaagaattctcccagcactttgggaggccgaggcgggaggatcacctgagatcaggacttccagaccagcctggccaacatggtgaaaccccgtctctactaaaaatacaaaaaaaaaattaactgggcattgtggtgtgcacctgtaatcccagctactcgggaggctgaggcatgagaattgcttgaggcagaggttgcagtgactgagattgtgctacggcactccagcctgggtgatggagtgaggcttcgtctcaaaaaaaaaaaaaaaaagaagaattaatgagttaata

SEQ ID NO: 555409 - DNA, 396 bp, Homo sapiens
ggctcgtccccccgcggatgagccgccgcggacggggcgcgggcggacgatggaactccacatcctggagcaccggctgcaagttgccagcgtcgccaaggagagtatcccgctgttcacctacggcctgatcaaacttgccttcctgtyctccaagaccaggtaagcgcgcggggacgcggcgccggccggggacagacaaagggggcgcaccccgggccgctgtcctcgccgccgcgcctcggaaaacaacttcgggccccgggagcgcccccgccccgcccccgccgccgcttcgctcgcgtctgacaaagccggagccgcagggtcctggctcccggacccctcgcaaccttccaccccccggtgcgccaccccccacctctgtcgtccccc

SEQ ID NO: 555410 - DNA, 396 bp, Homo sapiens
ggctcgtccccccgcggatgagccgccgcggacggggcgcgggcggacgatggaactccacatcctggagcaccggctgcaagttgccagcgtcgccaaggagagtatcccgctgttcacctacggcctgatcaaacttgccttcctgtcctccaagaccaggtaagcgcgcggggacgcggcgcckgccggggacagacaaagggggcgcaccccgggccgctgtcctcgccgccgcgcctcggaaaacaacttcgggccccgggagcgcccccgccccgcccccgccgccgcttcgctcgcgtctgacaaagccggagccgcagggtcctggctcccggacccctcgcaaccttccaccccccggtgcgccaccccccacctctgtcgtccccc

SEQ ID NO: 555411 - DNA, 396 bp, Homo sapiens
ggctcgtccccccgcggatgagccgccgcggacggggcgcgggcggacgatggaactccacatcctggagcaccggctgcaagttgccagcgtcgccaaggagagtatcccgctgttcacctacggcctgatcaaacttgccttcctgtcctccaagaccaggtaagcgcgcggggacgcggcgccggccggggacagacaaagggggcgcaccccgggccgctgtcctcgccgccgcgcctcggaaaacaacttcgggccccgggagcgcccccgccccgcccccgccgccgcttcgctcgcgtctgacaaagccggagccgcagggtcctggctcccggacccctcgcaaccytccaccccccggtgcgccaccccccacctctgtcgtccccc

SEQ ID NO: 555412 - DNA, 514 bp, Homo sapiens
ctggcataatgcagtcacatgtcttgtttttgcattcagaatattgtcttttmatagtctttcagaatatgttaaggaggtttcactatatatcacaaatcatggtttaaatttcaaagcattagataaaaatgaccttacactgcatttgtagatgtcactctcaagccatcccaatgtagtttccatgggaactaatgtacatcaaagaagaaagagagagaaagagagactgtaagatcaaatttttagttcctgcctcctctttttctgggaaaaccaaaatgagccccatgttaaatgctgttgaaattagatactgaatcttatcttctatgtgaatgcagctttttgtttttttcctcctaagaaggagtactacctatatggtcatgcacaatttttccatagagtccatccatataatttataagttgtatttacagcctcagaaggcacatgtgcttatttaggaggagagtcaacatcatccattattactttgttttcaagt

SEQ ID NO: 555413 - DNA, 514 bp, Homo sapiens
ctggcataatgcagtcacatgtcttgtttttgcattcagaatattgtcttttcatagtctttcagaatatgttaaggaggtttcactatatatcacaaatcatggtttaaatttcaaagcattagataaaaatgaccttacactgcatttgtagatgtcactctcaagccatcccaatgtagtttccatgggaactaatgtacatcaaagaagaaagagagagaaagagagactgtaagatcaaatttttagttcctgcctcctctttttytgggaaaaccaaaatgagccccatgttaaatgctgttgaaattagatactgaatcttatcttctatgtgaatgcagctttttgtttttttcctcctaagaaggagtactacctatatggtcatgcacaatttttccatagagtccatccatataatttataagttgtatttacagcctcagaaggcacatgtgcttatttaggaggagagtcaacatcatccattattactttgttttcaagt

SEQ ID NO: 555414 - DNA, 536 bp, Homo sapiens
gtcgttgcttgcacgggcaggtagagaacttttcctgtccattgttcttctgaattataaatcactgacctctttatgatttctaaagggaaaatgacttcaagcttcttagagttcccctaaggcattctctatattcaatataatatgggaagccctgggtttgtctttgtatgtttcatctgcagtgacctgaaatcttcataaccctcttcctttctccacttatcaactaaggggtggttggcaataaggatgggtgggagagaaaaaaaaacagaatttgaggaggagagcatttaaaccmtcagactgtgtgttctgtgacatcaaagactggcaacattctaaaggtaaatgtaactatgcatccctttgggattttcagatatcttgtacaatctattttattcctctaaacatggagactataaagctgtgtggaaatcaatagtttaattcattcattcaacaaacaggtggtgagtgctcatcataacaaccacatctaatagctaacatgttgaatgattatc

SEQ ID NO: 555415 - DNA, 236 bp, Homo sapiens
aagtttatactggaccatagataataaactcatcaacaaacaccagatttttgttctggagaaaaagatgaaagcttttgaacagtactagtcatcaccaaggaaactrtggtggagtaaaaaaattttaagaagatatcaacattgcagtaaatcaacctaacctggaaatgtgtttggtgacaaactgaattttcctaggtgtcggcaaactaactcttttaaggccccactag

SEQ ID NO: 555416 - DNA, 558 bp, Homo sapiens
ttttacatatatttcgttacatgtataatgattacatatatgataaaaatgatatatgttattctttttatttttaaaaagttctctttatttgtaattatatccccttatcttctttcttcaactaacttacaaagtagattggtacagattaccagatacttttcaatgttgtttaattcataattttttctttgcaaattctgatttacttgcattttacttattattttccttgatttagagtacaatactttatattaaactatgtwgttttcaattaagcattttggggattgtgaaattaactctgaatattgcttttattgtatctcggagggattgatggttaatattctcactgtttgtttttaaaaagtttctaacaccaattttgattctctgtttattgtcactgttatgcattttttaatttctatggtaaatggatttaattggctattaattcattgttcttttctaaatttacgcatgtagtttaatgatatagtctgaattatatccatttggtattttgtttttaatttcttgagatga

SEQ ID NO: 555417 - DNA, 591 bp, Homo sapiens
gtggttttctctttcttttcttttctttccctttcttttccttccctttatttttcttcttccttttttttttattcaccaactacccaccttccctaattcgtaggttagaaggatttctctacagttctttctcttttttccaatctcttctggatgtttcttygtctcaaactacatagacattgtggaaatcagtatcttcatttcaagtctaggtgggtcaaatttgattctcttgtattttcactcttaaaatagcatcttgaactttcacctgtgatccatctataaggatcaaatgtaaggacttcaagagggcatctgcccaataatttctgtatacccagtacagcaaacagggtggtattgttgatgtgtactcagtgcatacaatagtatagtagtgttgtatatgctttgcagagagtagcattattgttgtatcagcacataggacaggacagttttattgcaacataaccaaaacataggttaaatgttaatgttgttgtacacccagtgcatagaacaacataaaattgttgttatatgttcaatgcaaaccacagagtagaatgctcaattttt

SEQ ID NO: 555418 - DNA, 591 bp, Homo sapiens
gtggttttctctttcttttcttttctttccctttcttttccttccctttatttttcttcttccttttttttttattcaccaactacccaccttccctaattcgtaggttagaaggatttctctacagttctttctcttttttccaatctcttctggatgtttctttgtctcaaactacayagacattgtggaaatcagtatcttcatttcaagtctaggtgggtcaaatttgattctcttgtattttcactcttaaaatagcatcttgaactttcacctgtgatccatctataaggatcaaatgtaaggacttcaagagggcatctgcccaataatttctgtatacccagtacagcaaacagggtggtattgttgatgtgtactcagtgcatacaatagtatagtagtgttgtatatgctttgcagagagtagcattattgttgtatcagcacataggacaggacagttttattgcaacataaccaaaacataggttaaatgttaatgttgttgtacacccagtgcatagaacaacataaaattgttgttatatgttcaatgcaaaccacagagtagaatgctcaattttt

SEQ ID NO: 555419 - DNA, 591 bp, Homo sapiens
gtggttttctctttcttttcttttctttccctttcttttccttccctttatttttcttcttccttttttttttattcaccaactacccaccttccctaattcgtaggttagaaggatttctctacagttctttctcttttttccaatctcttctggatgtttctttgtctcaaactacatagacattgtggaaatcagtatcttcatttcaagtctaggtgggtcaaatttgattctcttgtattttcactcttaaaatagcatcttgaactttcayctgtgatccatctataaggatcaaatgtaaggacttcaagagggcatctgcccaataatttctgtatacccagtacagcaaacagggtggtattgttgatgtgtactcagtgcatacaatagtatagtagtgttgtatatgctttgcagagagtagcattattgttgtatcagcacataggacaggacagttttattgcaacataaccaaaacataggttaaatgttaatgttgttgtacacccagtgcatagaacaacataaaattgttgttatatgttcaatgcaaaccacagagtagaatgctcaattttt

SEQ ID NO: 555420 - DNA, 477 bp, Homo sapiens
atgttgccagcagtgctctatgtacacatgtacacatcacacagcattrtcattcctgggttttatttttctgtaaactttttgcatagccaattgttgccagtccatataatgtctttcttttattactgtaattcattttaattagttaattcctgcatcctcattttttcctgccattactctctccctatagccacctgctgtatagcattctttggattcataaacatgtatggattcttgattgtggataagactgtgaaaatgtctgcgtattttacacataattgctattcacctgtctctctgctgctgaattggaagctacttgaggaagggaaaccagccttttcccaacctgaacaccttgcacagtgtctgattcccagtaagagctcaataaatgagtgtcaaatccatgcatgacatgatacattaatgaattaaaagccctacattttagtttaatttcta

SEQ ID NO: 555421 - DNA, 477 bp, Homo sapiens
atgttgccagcagtgctctatgtacacatgtacacatcacacagcattatcattcctgggttttatttttctgtaaactttttgcatarccaattgttgccagtccatataatgtctttcttttattactgtaattcattttaattagttaattcctgcatcctcattttttcctgccattactctctccctatagccacctgctgtatagcattctttggattcataaacatgtatggattcttgattgtggataagactgtgaaaatgtctgcgtattttacacataattgctattcacctgtctctctgctgctgaattggaagctacttgaggaagggaaaccagccttttcccaacctgaacaccttgcacagtgtctgattcccagtaagagctcaataaatgagtgtcaaatccatgcatgacatgatacattaatgaattaaaagccctacattttagtttaatttcta

SEQ ID NO: 555422 - DNA, 477 bp, Homo sapiens
atgttgccagcagtgctctatgtacacatgtacacatcacacagcattatcattcctgggttttatttttctgtaaactttttgcatagccaattgttrccagtccatataatgtctttcttttattactgtaattcattttaattagttaattcctgcatcctcattttttcctgccattactctctccctatagccacctgctgtatagcattctttggattcataaacatgtatggattcttgattgtggataagactgtgaaaatgtctgcgtattttacacataattgctattcacctgtctctctgctgctgaattggaagctacttgaggaagggaaaccagccttttcccaacctgaacaccttgcacagtgtctgattcccagtaagagctcaataaatgagtgtcaaatccatgcatgacatgatacattaatgaattaaaagccctacattttagtttaatttcta

SEQ ID NO: 555423 - DNA, 477 bp, Homo sapiens
atgttgccagcagtgctctatgtacacatgtacacatcacacagcattatcattcctgggttttatttttctgtaaactttttgcatagccaattgttgccagtccatataatgtctttcttttaytactgtaattcattttaattagttaattcctgcatcctcattttttcctgccattactctctccctatagccacctgctgtatagcattctttggattcataaacatgtatggattcttgattgtggataagactgtgaaaatgtctgcgtattttacacataattgctattcacctgtctctctgctgctgaattggaagctacttgaggaagggaaaccagccttttcccaacctgaacaccttgcacagtgtctgattcccagtaagagctcaataaatgagtgtcaaatccatgcatgacatgatacattaatgaattaaaagccctacattttagtttaatttcta

SEQ ID NO: 555424 - DNA, 465 bp, Homo sapiens
tgaatggacagcttacaggagctgtgttctacatagatacatagttgtatgtagccaaatgcagaattatatgtaaagtgccacaaaacaaatgtaaggtaaatagtagtgtaaggccttcattatcatttatattactggtgtgttttaatgaagcattgaatttatttacagaaaaggatgctaagctgagatattttaaagtcaagctatataagaatttgaagggatatttaatataatatctscttttccaccagccatcaatctcagcaaactcacacaggaccagaaaaccaaacactgcatgttctcactcataagtgggagttgaacaatgagaacacatggacacagggaagggaacatcacacagtggggactgttgcagggtgtgggggcaaggggagggaaagcattaggacaaatatctaatgcatgtggggcttaaaacctagatgacat

SEQ ID NO: 555425 - DNA, 465 bp, Homo sapiens
tgaatggacagcttacaggagctgtgttctacatagatacatagttgtatgtagccaaatgcagaattatatgtaaagtgccacaaaacaaatgtaaggtaaatagtagtgtaaggccttcattatcatttatattactggtgtgttttaatgaagcattgaatttatttacagaaaaggatgctaagctgagatattttaaagtcaagctatataagaatttgaagggatatttaatataatatctgcttttccaccagccatcaatctcagcaaactcacacaggaccagaaaaccaaacactgcatgttctcactcataagtgggagttgaacaatgagaacacatggacacagggaagggaacatcacacagtggggacygttgcagggtgtgggggcaaggggagggaaagcattaggacaaatatctaatgcatgtggggcttaaaacctagatgacat

SEQ ID NO: 555426 - DNA, 430 bp, Homo sapiens
aactttttaagcttctgcacaaaagtgaaaacatgcagtatttctctttgtgtgcctggcttattttacttagcataatgtcctccaagcttatccgcattgccatgaatgacaaaattttgttatttttatggctaaatactattccactgtgagtatatacaatattttctttatccattcatcttttatggacacttgggttgattccatgtcttggctactgtgaatagtgctgcaataaacaygagagtgcagatatcacatcaatatactaatatcctttctttttggtatatatttagcagtgggattgctggatcatatggtagttctatgtttagctttttgaggaaccccatactgttttccataatggctgtactaatttacattcgtaccaacagtgttcccctttctccacattctt

SEQ ID NO: 555427 - DNA, 624 bp, Homo sapiens
gactcaccctcagcaagatccacccacactgtggacaggcaccagccaatcagctgccagcatggctagaaaaagcaagcagaagaaaatggaaaaagttgacttgatgagtcttccagtcttcatcttccacccatgatggatgcttcctcccctcaaacatcagaactcggagtcttatgtctgaggacaggaggcatccagcattggagagagatgactttggactcttggacttacactaatggtttgccacaagctctcaagccttggccacagaatgaaggctgcactgttgacttccctactttcgaagttttcgrtcttggactgagccactaccggcttccttgcccctcaacttgcagacggtctattgtgggacttcaccttgtgatcatgtgagtcaattatccttaataaactccctttcatatatacatatattgtattagttttggccctctagagaaccctgactaaaacagattttggtaccaggagtgggatactgctataaagatacttgaaaatatggaagtgactttggaactgggtaacaggcagaggttggaacagtttggaggacttggaagaagacaggaatatgtgggaaagtttgaa

SEQ ID NO: 555428 - DNA, 624 bp, Homo sapiens
gactcaccctcagcaagatccacccacactgtggacaggcaccagccaatcagctgccagcatggctagaaaaagcaagcagaagaaaatggaaaaagttgacttgatgagtcttccagtcttcatcttccacccatgatggatgcttcctcccctcaaacatcagaactcggagtcttatgtctgaggacaggaggcatccagcattggagagagatgactttggactcttggacttacactaatggtttgccacaagctctcaagccttggccacagaatgaaggctgcactgttgacttccctactttcgaagttttcgatcttggactgagccactaccggcttccttgcccctcaacttgcagacggtctattgtgggacttcaccttgtgatcatgtgagtcaattmtccttaataaactccctttcatatatacatatattgtattagttttggccctctagagaaccctgactaaaacagattttggtaccaggagtgggatactgctataaagatacttgaaaatatggaagtgactttggaactgggtaacaggcagaggttggaacagtttggaggacttggaagaagacaggaatatgtgggaaagtttgaa

SEQ ID NO: 555429 - DNA, 571 bp, Homo sapiens
agtcttccagtcttcatcttccacccatgatggatgcttcctcccctcaaacatcagaactcggagtcttatgtctgaggacaggaggcatccagcattggagagagatgactttggactcttggacttacactaatggtttgccacaagctctcaagccttggccacagaatgaaggctgcactgttgacttccctactttcgaagttttcgatcttggactgagccactaccggcttccttgcccctcaacttgcagacggtctattgtgggacttcaccttgtgatcatgtgagtcaattatccttaataaactccctttcatatatacatatattgtattagttttggccctctagagaaccctgactaaaacagattttggtaccaggagtgggatactgctataaagatacttgaaaatatggaagtgactttggaactgggtaacaggcagaggytggaacagtttggaggacttggaagaagacaggaatatgtgggaaagtttgaaactttctagagactagttgaatggttttgaccaaaatgctgataatgatgtggaca

SEQ ID NO: 555430 - DNA, 484 bp, Homo sapiens
ctggatgtccagcagaggtctgttgcaggggtgaagccctcatggagaccctctgctaggacagtacaagggggaaatgtgggattggagctcccacacagagtccccactggggcactgcctagtggggctatgagaagaaggccaccatccttcagaccccagaaagatagatccaccaacagcttgcactgtgtgcctggaaaagctacagacactcaatgccagccatgaaagcagctggaatgggggactgtaccctgcaaagccacagaggcagagctccccaaggccataggagcccactttttgcatcaccattccctggatgtgagayatggagtcaaaggagattattttggagctttaggatttaatgactgccctgttggatattggacttgcatgaggcctgtaacccctttgttttggccaatttctcccatttggaattgaagcatttatccaatgtctgtacctccat

SEQ ID NO: 555431 - DNA, 528 bp, Homo sapiens
gttcttcatttctgtctgagaccttgttagcctggcctttaccctctatatttctatcagcatttttgaaaccaccacttaacaaatcttgaagaagtttcaaacttttcctgatatttttatcttcttctgagccctccaaactctcccaacttctgcccattacccagttccaaagctgtttccacatttttaggtatctttatagcaacatcccactcctccgtaaccaattttctgccttagttcatttgtgctgctataaagaaatacctgaagctgggtaatctataaagaaaagaggtttctttggttaatggttctgcaggctgtacaagaatcacagcaccagcataggcacctagtgagggcttcggactgcttccactcatggcagaaggtgaatgggatctaacatgtgcagggatcacggagtggaagaggaagcaagaagcaaaggggcyaggctcttttaaataaccagctctcacaggaactaacagagtgagtactcacccaccaccccaa

SEQ ID NO: 555432 - DNA, 531 bp, Homo sapiens
ggaagcaagaagcaaaggggccaggctcttttaaataaccagctctcacaggaactaacagagtgagtactcacccaccaccccaaagggaggacattaatatgtcctccatgagggagctgccctcatgacccaaatacctcccattaggccccatctccaacattggggatcagatttctacatgaaatttggaagggtcaaacgaacstaacaatggcaactttatatccactagggcggttattttttttaaaaaaattaaggaaaataccaagtgttgatgaggatgctgagaaatcagaactctcaggcattgttagtggaaatgtaaatgcacagctgctgtggaaaacagtttgtcagtttctcaaaaaggtaaacgttgaactaccatatgacccagcaattccactcatatatatatatatacacacacacacatatatatacacatatatatatgtacacacacacacaaacacacatacacgtatatatgaatgaaatttaaaggagagatgccaacag

SEQ ID NO: 555433 - DNA, 613 bp, Homo sapiens
gaaggacaaaagaaagcaagtgagaattcgtgcagctaaacatcacatttaccagaaacccctttgtggacctcagtttccctgtctgtccaaggggagtgacaatgcctatccccattatttacagagaatccaaggagatagccccattcctgtaaacattttttttttggaggggtgggatggagtcttgctctgtcacccacgctggagtgcagtggcgcaatctcggctsactacaagctctgcttcctgggttcatgccattctcctgcctcagccttccaagtaactgggactacaggcacccactaccacacctggctaattttttgtatttttagtagagatggggtttcaccgtgttagccaggatggtctcgatctcctgacctcgtgatccacctgcctcagcctcccaaagtgctgggactacaggcgtgagccaccgcgcctggccacctctaaacttttttaagcaaagggactatagtctttcttttcatttcttgccactcactagctgtgatcttgtttttaattttttattgcctcagttttcccagctgtaaaatgtgaagaataatggcacatagggttgctgtgaagatta

SEQ ID NO: 555434 - DNA, 558 bp, Homo sapiens
gtgtgtgtgtgtgtgtgcatgtgtgtgtgtgcgcgtgcgtgtgtgtgtgcgtgcatgcatrttttgtaacttagctacggtgacacaactgagaggttggagctaagatctaaactcaggtggtccaaattccagtagaagcttgtaaccacttcatcatccaacccaagcccctttcctcacagaccacaccctgcggtaggggcagcaaggatccccaaaaccaagagagagggaatggcagacagacttgcgcctctgatccacaggtccaggacaagggcccccaacaacagcagacacaggaggaggtatgggtctctgttctggggctgggaactcactttcctgcctaataagagattcctggtcctcaggagataaacagtctccataatgccaactgggacccccaagagctggggaaactaagtctctccatgggtagggggcctactcaagaccacctagggactgaaaatcatcctgccagcctggctgtcttccgcaatggacttggaggtgggagccagccagtccagctggcccaaggtcacc

SEQ ID NO: 555435 - DNA, 558 bp, Homo sapiens
gtgtgtgtgtgtgtgtgcatgtgtgtgtgtgcgcgtgcgtgtgtgtgtgcgtgcatgcatattttgtaacttagctacggtgacacaactgagaggttggagctaagatctaaactcaggtggtccaaattccagtagaagcttgtaaycacttcatcatccaacccaagcccctttcctcacagaccacaccctgcggtaggggcagcaaggatccccaaaaccaagagagagggaatggcagacagacttgcgcctctgatccacaggtccaggacaagggcccccaacaacagcagacacaggaggaggtatgggtctctgttctggggctgggaactcactttcctgcctaataagagattcctggtcctcaggagataaacagtctccataatgccaactgggacccccaagagctggggaaactaagtctctccatgggtagggggcctactcaagaccacctagggactgaaaatcatcctgccagcctggctgtcttccgcaatggacttggaggtgggagccagccagtccagctggcccaaggtcacc

SEQ ID NO: 555436 - DNA, 584 bp, Homo sapiens
ttttgtcttcacccaaaagaaggatatgtaggagctaagtttatcttaagtacagaagtcactttgaagcaggtagggttagctgcttyaaatgagccacctgggccaccctgcccacacctcagggccttcctcttgcctcagctgggccacttgacactctcctgctcctccgtgtcttttcaggaggagcctagctgaaatgcctagctgcaggggctcagcatgaagctggccaacctgcaggccttgggcccagaaatgagcccagctccccagatgccctaccttgggtcaatgagccctgctgctatcttgctccaaccagccagaggctcacaggcaaaatgtgagtgagcctggaaactgaccacaccctcccacttgagatacttcttctcatgcctggtcttccttttgcctcactggagtctctctcccagcctcctgcattgatccttctccatggctcatcctctaactgctggtgtgcttcaggctctgtcttagcaaccttctctccaacatctacaatttctctaggtgatcacattcctcatggctttaaattctgtcaatgtact

SEQ ID NO: 555437 - DNA, 584 bp, Homo sapiens
ttttgtcttcacccaaaagaaggatatgtaggagctaagtttatcttaagtacagaagtcactttgaagcaggtagggttagctgcttcaaatgagcyacctgggccaccctgcccacacctcagggccttcctcttgcctcagctgggccacttgacactctcctgctcctccgtgtcttttcaggaggagcctagctgaaatgcctagctgcaggggctcagcatgaagctggccaacctgcaggccttgggcccagaaatgagcccagctccccagatgccctaccttgggtcaatgagccctgctgctatcttgctccaaccagccagaggctcacaggcaaaatgtgagtgagcctggaaactgaccacaccctcccacttgagatacttcttctcatgcctggtcttccttttgcctcactggagtctctctcccagcctcctgcattgatccttctccatggctcatcctctaactgctggtgtgcttcaggctctgtcttagcaaccttctctccaacatctacaatttctctaggtgatcacattcctcatggctttaaattctgtcaatgtact

SEQ ID NO: 555438 - DNA, 592 bp, Homo sapiens
gagaggagtcgggcagcctctcaaggttcacataactaagctaaatcactctacagcccgctcctctttggcgcaaacggaaatcccccccacctgctggagcttgtcacgcaggcagggcagagtctgctccctgagagctcggagctgcctgcagcctcccgcccccagcccccgcctgctgcctgagctgtcagcccgactcccaaacaggctgattatccccatctggggaaaacaaaacatgtcagcagcggcgcctgagaagagggctgtcttcttagtgagaagtaatctgaggaaaactcccagctctgatctacaataggaagtgagtgagcgaccttgctgttcttgacattgctttctcctgatacggacacaggcaggcctccgccagcatcacctcctctgagaagccttctgggcctgggctgaccctgcccaggctctctgcagggtcccctgaccctcccagggcccactgtgagatttcagtcaatgktcctctgtgcggccctagagcttcagtctatttcagaatgagactctgggtcacaccgtttgttgctttgtagggattttggagatg

SEQ ID NO: 555439 - DNA, 522 bp, Homo sapiens
aaaaattcaaatgaggcagggcccggtggctcacacctgtaatcccaccaccactttgggaggccgaggcaggtggattgcttgaggtcaggagtttgagaccagtctggccaacatactgaaaccccatctctactagaaatacaaaaaattagccaggcctggtggtgcacgcctgtaatcccagctactcgggaggctgaagcaggagaatcacttgaacccagaagacagargtggcagtgagccaagattgccccactgcactccagcctgggcaaaagatagagactatgtctcaaaaaaaataaaaataaaaataaaaaagttcaattgaaaggctgaaagattaagttgaaaacatcttttggaaaatagaacaagatgacaagttagaaaataagagagatataaatatcttttatatgaaatgggaggttcaaatcattaagcgctaaccccttactaacaggagttccagcaagtgaaagcaaaaggaggagatttttcaaagagatgata

SEQ ID NO: 555440 - DNA, 568 bp, Homo sapiens
gatttttataagtaaaggaaataaagattagtgactgagaaagtcaagcttggtgaaatttttgaagcggagcactagagagagaaccatgacacagagacagagttccacaattgtgaaaacagrtcctcccaatgttttcaccttgcagtctttggctggatacctatctgagaatgtgtgagaagaaactaaggctggagaaagaataacaggaatggagtaggcagaaaatgcacaaaactcacataggattaaaaatagtctgtggtatcattagcccaagtggaaaaaataagacgtgtaacacacagggcatgaatgtataatagtaatgacttagtagtgtgatgaaattaaccttagcgtaaggttgctctggacccattctaacaaagcttaagtgcaaaccttaaaaagatccaaaatataacttcactgaaaaaaaaaatccaacaccacttaaataaacaaaataaaatatagaaatcaacgatgtaaaattcacaacgtctgacatccaataaaaaatttatcaagcaggcaaggaagtaaaaaacgataactc

SEQ ID NO: 555441 - DNA, 568 bp, Homo sapiens
gatttttataagtaaaggaaataaagattagtgactgagaaagtcaagcttggtgaaatttttgaagcggagcactagagagagaaccatgacacagagacagagttccacaattgtgaaaacaggtcctcccaatgttttcaccttgcagtctttggctggatacctatctgagaatgtgtgagaagaaactaaggctggagaaagaataacaggaatggagtaggcagaaaatgcacaaaactcacataggattaaaaatagtctgtggtatcattagcccaagtggaaaaaataagacgtgtaacacacagggcatgaatgtataatagtaatgacttagtagtgtgatgaaattaaccttagcgtaaggttgctctggacccattctaacaaagcttaagtgcaaaccttaaaaagatccaaaatataacttcactgaaaaaaaaaatccaacaccacttaaataaacaaaataaaatatagaaatcaacgatgtaaaattcacaaygtctgacatccaataaaaaatttatcaagcaggcaaggaagtaaaaaacgataactc

SEQ ID NO: 555442 - DNA, 598 bp, Homo sapiens
tgtttcctagggttctcaagataaaggagataacatccagctttcctgccccacaccgtatctgaaataaaaacaacagcagggatagcagattacatgtgttttttaatttttatttattttgccaagcactatgctaaatacataatcttagtcctatcaaaaaacttgtttggaaagtttaggtaattggcttaactctgttctgcatggccaacaagtggcagggatggggctctaaccccagattaactgactctagcacttgatctctggacactctggcatggtgggacaggattctgcaagctttaaagtgctgggtagattaaagtcttatttaagagatcttggggatgggtgcggtggctcacaccagtaatcccagcactttgggaggccgaggtgggcagatcaggagatcgacaccatcctggctaacatggtgaaacttgtctctactaaaaatacaaaaaattagctgggcgtggtggtgcgcgcctgtagtcccagctactcgggaggcaggagaatcacttgaacccaggaggcagaggttgcagtgagccaasattgcgccactgtactccagcctggg

SEQ ID NO: 555443 - DNA, 624 bp, Homo sapiens
gcacaaataacaagctgacagcatcaggaaaaaaatgaaaataataatgttgatactgctggaattgcatgttatttctctatttccagtttcagggaccgagttaggcaataattcacatttggggggtggatttggctttttaagtcgcagccacgcatccatattgaaatatttcagaatgggaagctaattatttatcgttaataaaagtccagatttattgtctactgtatcccatgcaatgtgttaaacgttttctgcaaattatttaaattaccyacaaaaaatctgaaagataatgttatcctgtcaatttcatagatgatgaaactgaagccctgttaggtcactcgctcaaaataacatatccagtaacttgacagatgcagagacctgcacacaacttcctctggtgcaggggtaaaaaaagcacgagcttaggaatcctgaattcaaactcctggtagctttgttaccttaaatggctgaattaactctttgaggcctcagtttctgcatctgaaaagggagacaatgaagcctaacttgtagaactatttgaagcactaagtgagaatgaatgcaaagcacttgacccagtaccaggcccatagtaagcat

SEQ ID NO: 555444 - DNA, 573 bp, Homo sapiens
cgttggccattttaaatagtcattagtcactgtgttcccctaacccayttcaacttgaaaacagtaagttcacaaagttcattcttggaggctgaatttgcattcaaatggagttttttgtgcctgtcgttggtaatgatcaaatgactctgaatacccttgggtgaggtgtgccttctttggtttgccatgaactatgctgttcccttatcattttatacccagcccaactcaaaatctgtagatctctgtaggcatttgagtttcagactcacctaaaaccccaactaattcactcttgattgattcctttaaatatatccttcaagtcaactctaccactatatagttgctgagcaaatattgccatgtatgggaaaaatgtaatccttgttcttacagatgttgcattctagtgcagggagatagagaaggaatagaaataaataatattatttaggattatcaagttcttccaagtctagtcttccttgtataaagacctactggctaggctgaatgaatctgctacccaggtgagcctgtgcagtatcctgttttagagcaatgttg

SEQ ID NO: 555445 - DNA, 273 bp, Homo sapiens
gcttgtctagccaccttatcagcataagcgttgcctagagcaatgggatctgatgccttttgatkccccttgcagtgaatgaccccagcttcctttggaagtaaagcggccttgagtagagtttttattaaagaggcattaatgatggaggacccttgtgtagtgagaaaacctctttcagcccatatgaccgcatggtggtgcagaatatgaaaggcatatttagaatcagtatagatattgacgcgtagtcctttgcaagagtgagagctt

SEQ ID NO: 555446 - DNA, 273 bp, Homo sapiens
gcttgtctagccaccttatcagcataagcgttgcctagagcaatgggatctgatgccttttgatgccccttgcagtgaatgaccccmgcttcctttggaagtaaagcggccttgagtagagtttttattaaagaggcattaatgatggaggacccttgtgtagtgagaaaacctctttcagcccatatgaccgcatggtggtgcagaatatgaaaggcatatttagaatcagtatagatattgacgcgtagtcctttgcaagagtgagagctt

SEQ ID NO: 555447 - DNA, 273 bp, Homo sapiens
gcttgtctagccaccttatcagcataagcgttgcctagagcaatgggatctgatgccttttgatgccccttgcagtgaatgaccccagcttcctttggaagtaaagcggccttgagtagagtttttattaaagaggcattaatgatggaggacccttgtgtagtgagaaaacctctttcagcccatatgaccgcatggtggtgsagaatatgaaaggcatatttagaatcagtatagatattgacgcgtagtcctttgcaagagtgagagctt

SEQ ID NO: 555448 - DNA, 539 bp, Homo sapiens
cattctacttatattaattttccagaaaacacaaatgtattgaaacaaaaagtagattagtgattgcttaagggatgggctagggtggggagatgggaagtgactgcaaatggggataaggtttcctttggggtttgagacaggaataatacagggtggtcacaggagaatagaaaatttcaggcagcagtttcacatgactagtaaaagaaaaytgttgaaatagttgcagaagctagagactgacaagaccctgaaaaaccagggtgcgaatcaagctggctaagactgactggacgcaacatggcaccggatttgacctaggttttacataggacctcattatatgctcattaacatactaaataaaacacaccagtgccatgacagttccaggaacacccatatttctttttatttatttatttttattattattattattattatactataagttttagggtacatgtgcacaatgtgctggttagttacatatgtatacatgtgccatgctggtgtgctgcaaccattaactc

SEQ ID NO: 555449 - DNA, 569 bp, Homo sapiens
ctttacatttctattttatttccttccaagacttctactacatctagcttcyaaagctcttaagttagtgactatcattctatttctttatcatcccgtgatgatgtcagagaaactctttgagccaatattctaggtatctatacttttatttttaaatcaaaaagatcaacccatccactgagtttttattttggagtttgactagaagttatgattatagtttccttgtaacctttacttgtttctcaggatccacaccataggaactgtttttggatgaggtgaaggtagctgctctctgtaggttaccagtccagatgactagcccacaggggtgaacctgtgttgggtgatgctaacatgctcaggtgctagccagtccactcacactcattacaactggccacgtcccctcatagatagttctaccctgaagatacactacagcttgcagaaggtattcctgcttctttgccccgcaatagcacccaggatgggtaattgcctttatagcttgtcaggaggaggaaagagcttaattaggactctctccaccagcacaatcc

SEQ ID NO: 555450 - DNA, 569 bp, Homo sapiens
ctttacatttctattttatttccttccaagacttctactacatctagcttctaaagctcttaagttagtgactatcattctatttctttatcatcccgtgatgatgtcagagaaactctttgagccaatattctaggtatctatacttttatttttaaatcaaaaagatcaacccatccactgagtttttattttggagtttgactagaagttatgattatagtttccttgtaacctttacttgtttctcaggatccacaccataggaactgtttttgsatgaggtgaaggtagctgctctctgtaggttaccagtccagatgactagcccacaggggtgaacctgtgttgggtgatgctaacatgctcaggtgctagccagtccactcacactcattacaactggccacgtcccctcatagatagttctaccctgaagatacactacagcttgcagaaggtattcctgcttctttgccccgcaatagcacccaggatgggtaattgcctttatagcttgtcaggaggaggaaagagcttaattaggactctctccaccagcacaatcc

SEQ ID NO: 555451 - DNA, 354 bp, Homo sapiens
acacacatataacataaataagcaaagcgaaactcgtgtgcaagcccctaggcggctgctggccggctctgaatcttgaatcacatggttaaktgattattggtggggaaagcttaaagacctgtagaagaggaggaggggggcatgtccaaggtctcgaagtcagtttgggcagagcttggactcaaacctggggttctgactccaagcccagctttccttctgtcagtgggcctaaaaatagaagactgaccttttcttggtatttttgtgcttcacaaatgccagagcgttattcattagttcatcttcccaaaataactggcagaacacggccagagggcaacaggaaga

SEQ ID NO: 555452 - DNA, 354 bp, Homo sapiens
acacacatataacataaataagcaaagcgaaactcgtgtgcaagcccctaggcggctgctggccggctctgaatcttgaatcacatggttaagtgattattggtggggaaagcttaaagacctgtagaagaggaggaggggggcatgtccaaggtctcgaagtcagtttgggcagagcttggactcaaacctggggttctgactccaagcccakctttccttctgtcagtgggcctaaaaatagaagactgaccttttcttggtatttttgtgcttcacaaatgccagagcgttattcattagttcatcttcccaaaataactggcagaacacggccagagggcaacaggaaga

SEQ ID NO: 555453 - DNA, 600 bp, Homo sapiens
tgtcgcccaggctggagtgcagcggtgtgatctcagatcactgcaacttctgcctcccgggttcaagtgattcttctgcctcagcctcccaggtagctgggattacaggtgcccaccaccgcacctagctaacttttgtgtttttagaagagacagggtttcaccatgtcagccaggctggtctcgaactcctgacctcataatctgccctcctcagcctcccaaagtgctgggattacaggcatgagccaccatgccmggccaggcctgttcatcttttaagggtttatgttgtttgactttttccatcacaaatttttattcacctcagtttgctgataactatttccaggtaagctggagtcataacacacatttgccaattatctggagaggagcactacttcctaattatgtggtcattgaagagctagttgatcattaagctacactgatatgcaaagccacaataataaacagcaggcaagattaaaaactccgtaagacataatcccttatggtcctcttcataaacatacaaataatgaaaaaataaatacacgtttgctcaattctgcaaaaccagaaatgtcacagggg

SEQ ID NO: 555454 - DNA, 600 bp, Homo sapiens
tgtcgcccaggctggagtgcagcggtgtgatctcagatcactgcaacttctgcctcccgggttcaagtgattcttctgcctcagcctcccaggtagctgggattacaggtgcccaccaccgcacctagctaacttttgtgtttttagaagagacagggtttcaccatgtcagccaggctggtctcgaactcctgacctcataatctgccctcctcagcctcccaaagtgctgggattacaggcatgagccaccatgcccggccasgcctgttcatcttttaagggtttatgttgtttgactttttccatcacaaatttttattcacctcagtttgctgataactatttccaggtaagctggagtcataacacacatttgccaattatctggagaggagcactacttcctaattatgtggtcattgaagagctagttgatcattaagctacactgatatgcaaagccacaataataaacagcaggcaagattaaaaactccgtaagacataatcccttatggtcctcttcataaacatacaaataatgaaaaaataaatacacgtttgctcaattctgcaaaaccagaaatgtcacagggg

SEQ ID NO: 555455 - DNA, 602 bp, Homo sapiens
atctttggttgttgcagttgaagggatgctaccagcatctagtgggaaaagccaggggtgctgtactgctgcacatctaacaaggcaaagaccagctccccacccaacaaagaattattgggttcaaaatggcaatagcattgaggctgagaaagctgatttaagtcatattaaaatggaccccttgtaaatataaaacacaattttgtgatagtaaaaatttccaaagaatttttatcactttcctattgaagtgaattaactcttaatagctcattgaatttatgattagctaytatttctcagtaatcatcgcataaacttgaaaattctgatgagaaaaataatgtacaacttattttccaacatgataaaatatttatgaacactaaatttaacaattaatgatgctgacataatgttgcattttggagaaatataattaagcagttattaattttgtctttgttccttgaaatgttagcgccaatttttttttttttcaatttttagatgcccttggacctcaaaggccctgacactgcatgtggagtcaggtgcataaaacatccttgaatctattaattctgggcctcctcaat

SEQ ID NO: 555456 - DNA, 576 bp, Homo sapiens
ttcatctgaatctggcttcccgagagtctctgtagtatggcgtggaggcttaagagcttctgtgtctttcagagggtagaaggagattcagtcgactttcttttgcccacatgaattgatgctatgctcctttaagtgccaggtttagtcccctgctgagatcacacttacctcaactaaattatttttcatttaaaagcagccatccattcacagtcttttatttgtgtttcaatgatgtttgtaaatgtgctctagcagttgaaagtgtaggcacgtatgtgggggagcattcctgatgttcccctcaccacgcatttgtgtacccctcacatgccctttgtctgtgtctcatccatctctaacatgaccacaaaaatggtgtctcctgaagtgttcaaggatctaccctcctccatagtcatgaagtttctagtaataatgrtaattattcttattgtaataaggaggaaggggtggaggagaaaaaagtgatggagaaaaatggtgtctcctgaagtgttcatggatccgccctcccttgtagtcatggagtttccaataataatgataatt

SEQ ID NO: 555457 - DNA, 656 bp, Homo sapiens
agatctaaggcttgagagtagccstctgttcaagagacaatagaagggccagagggagtggagcggaaaatagcagggaatgagttgagggaagaagcaaggtgaggaggaggtgcaaaccacttaggacttgtaggcattcagggcctttggattttacttgagtaaaatagggtcttgacttacatttcaaatgaataatttgaacttctgcattgaaaattgattatgagggcgcttaatgcagtttatagctgtgtacttgtgtgattatgtggttgatgtctgtctctctcatagactgtaggccctaagagggctggagtactgtctgacttgctcttcatggaatctccaagatcaagcctagtgcttggcatgttgctgtccaataaatatttaatgtgaaaggataaaatgaatgcaggccacatcaagatgatgctagttggcattcatccctcagaggcatgtgctgtagatagtcaatgtgcaaatttcaacttgtatccatccacttaaagacaacttcaaacgcaccctccaaccacaggcttaagttgaattatctgcttaattgttgctatgtgcagctgtttttcattagtgctgttttaatttgcagtctatgaactttgatatttgtaacaaaaagt

SEQ ID NO: 555458 - DNA, 518 bp, Homo sapiens
tgcatacagcctaaatgcaccactcaatgaatttcccatgtaaccaawgtttcacaactctttttgttattggaacatcccttaaggagcatttttagacattattttcctagttgttccctatcatgaaattgaaatagaaaaatacagtacatatggagtgtatctgtgtgttgtatttatgtccgtgctttacatggaacagagtaaaaaattttttttttttactcccactgagaatgcatgagttgtaatgaggaatcagaacatgcccccacccagttattattccttccaaccaaattaagtagacccctccccttacttttaacagattgctgtatttctccagttttgtttgcttgtttttttcttgagacagagtcttgctctgctgcccaggctagagtgcaggggtgcaatcatggctcactgcagcctcgacctcccaggctcaagtgatcctcccacctcagcctcctgagtagcagggactacaggtgcccaccaccatgccc

SEQ ID NO: 555459 - DNA, 518 bp, Homo sapiens
tgcatacagcctaaatgcaccactcaatgaatttcccatgtaaccaaagtttcacaactctttttgttattggaacatcccttaaggagcatttttagacattattttcctagttgttccctatcatgaaattgaaatagaaaaatacagtacatatggagtgtatctgtgtgttgtatttatgtccgtgctttacatggaacagagtaaaaawttttttttttttactcccactgagaatgcatgagttgtaatgaggaatcagaacatgcccccacccagttattattccttccaaccaaattaagtagacccctccccttacttttaacagattgctgtatttctccagttttgtttgcttgtttttttcttgagacagagtcttgctctgctgcccaggctagagtgcaggggtgcaatcatggctcactgcagcctcgacctcccaggctcaagtgatcctcccacctcagcctcctgagtagcagggactacaggtgcccaccaccatgccc

SEQ ID NO: 555460 - DNA, 528 bp, Homo sapiens
ggttcctgcaggtctagagacccagtttgcaaatgagataagacgtaattctagaatctgataaggacaggtgagattctaacactgtctcatcccattgctagccctagagtttctcatggggatagttcctcaggctggtcttttatgttctyatgatacctttgggattatttaaatataaactctgacttttcacaggagtgggagccccaagatggccctgggtagggaggtccctaagtcacctgggcctccacccctagactgaatccttcttcctcacccctatgcagccacctggaccgcgcccggcccagggctgacatactgggcatttgttgtgatctctgactatcctgatgagtcatgaagaagcatatttacccattcgaacactagcaagtgcctgaaacggggcaggggtcgggtagacctcggaatctctgcactccggagtcgaggatgtcagacacaagaaaggagagtgcccttaaggtcggccacactcagcttcctggggaattc

SEQ ID NO: 555461 - DNA, 528 bp, Homo sapiens
ggttcctgcaggtctagagacccagtttgcaaatgagataagacgtaattctagaatctgataaggacaggtgagattctaacactgtctcatcccattgctagccctagagtttctcatggggatagttcctcaggctggtcttttatgttctcatgatacctttgggattatttaaatataaactctgacttttcacaggagtgggagccccaagatggccctgggtagggaggtccctaagtcacctgggcctccacccctagactgaatccttcttcctcacccctatgcagccacctggaccgsgcccggcccagggctgacatactgggcatttgttgtgatctctgactatcctgatgagtcatgaagaagcatatttacccattcgaacactagcaagtgcctgaaacggggcaggggtcgggtagacctcggaatctctgcactccggagtcgaggatgtcagacacaagaaaggagagtgcccttaaggtcggccacactcagcttcctggggaattc

SEQ ID NO: 555462 - DNA, 528 bp, Homo sapiens
ggttcctgcaggtctagagacccagtttgcaaatgagataagacgtaattctagaatctgataaggacaggtgagattctaacactgtctcatcccattgctagccctagagtttctcatggggatagttcctcaggctggtcttttatgttctcatgatacctttgggattatttaaatataaactctgacttttcacaggagtgggagccccaagatggccctgggtagggaggtccctaagtcacctgggcctccacccctagactgaatccttcttcctcacccctatgcagccacctggaccgcgcccrgcccagggctgacatactgggcatttgttgtgatctctgactatcctgatgagtcatgaagaagcatatttacccattcgaacactagcaagtgcctgaaacggggcaggggtcgggtagacctcggaatctctgcactccggagtcgaggatgtcagacacaagaaaggagagtgcccttaaggtcggccacactcagcttcctggggaattc

SEQ ID NO: 555463 - DNA, 552 bp, Homo sapiens
ctgaggtgggaggatcacttgagcctaggaggtcaaggctacagtgaaagaagagaagacataaagacaatcctgactgtgagattataaggacatgacttggaatcactcatgccaagtcctgagcagagtctcaggcagcccataaaaacagctagtaaacattagctccagctattagctcaagtccctctcctacgaaacgccatacggcagctcagagtttgacccagcaaggtcacacagctaataaggcatggacttggcayttaaacacaggcctagctccaaattcaaggctgttgttgctacccgggtattaatctgaacgattaggtctgacaccttcttctgtgtccagtgccacagacagcagacagcctacccatctcctccacgctgaaagcatttgcagtttgccaggagtcagcatctctacagattgttaaagccagaattgccacatcaatgcccagcgtcagcctccagccagctccgcccacccctgcacgccctccgtggccagggcatacaaaggctatgctagaaatt

SEQ ID NO: 555464 - DNA, 552 bp, Homo sapiens
ctgaggtgggaggatcacttgagcctaggaggtcaaggctacagtgaaagaagagaagacataaagacaatcctgactgtgagattataaggacatgacttggaatcactcatgccaagtcctgagcagagtctcaggcagcccataaaaacagctagtaaacattagctccagctattagctcaagtccctctcctacgaaacgccatacggcagctcagagtttgacccagcaaggtcacacagctaataaggcatggacttggcacttaaacacaggcctagctccaaattcaaggctgttgttgctacccgggtattaatctgaacgattaggtctgacaccttcttctgtgtccagtgccacagacagcagacagcctacccatctcctccacgctgaaagcatttgcagtttgccaggagtcagcatctctacagattgttaaagccagaattgccacatcaaygcccagcgtcagcctccagccagctccgcccacccctgcacgccctccgtggccagggcatacaaaggctatgctagaaatt

SEQ ID NO: 555465 - DNA, 585 bp, Homo sapiens
gacagagacgctatttctaaagaaaaaaaaacccaccaactccggagttgagcaagscagggtttaaatcctgcctctgctgtgtaacagcaatgaccttggacaaatgacctagcctctctgaacctgagtttcctcacctgtaaaatagtaaaacttcttgataggttggtgaatgggtacaaacttagggaagaaataccttctaatgtttggtagcagactagggtggctacagttagcaacaatatattgtgtatttcaaagttgctagaagagagaacttgaaatgttcccaacacataaaattataaattctcaaggtggtgaatacctcaaataccctggcttgataattacacattctgtgtatataaaacacattcatatgcaccccataatatgcaaaatttcatttatcaataaatgaaaaaaagccagatgtggctcatgcgtgtaatcccggcactttgggaggccaaggcaaatggatcacctgaggtcaggagttcaagaccagtctggccaacatgacaaaaccccgtatctactaaaaatacaaaaaaatagctgggcatggtggcg

SEQ ID NO: 555466 - DNA, 585 bp, Homo sapiens
gacagagacgctatttctaaagaaaaaaaaacccaccaactccggagttgagcaagccagggtttaaatcctgcctctgctgtgtaacagcaatgaccttggacaaatgacctagcctctctgaacctgagtttcctcacctgtaaaatagtaaaacttcttgataggttggtgaatgggtacaaacttagggaagaaataccttctaatgtttggtagcagactagggtggctacagttagcaacaatatattgtgtatttcaaagttgctagaagagagaacttgaaatgttcccaacacataaaattataaattctcaaggtggtgaatacctcaaataccctggcttgataattacacattctgtgtatataaaacacattcatatgcaccccataatatgcaaaatttcatktatcaataaatgaaaaaaagccagatgtggctcatgcgtgtaatcccggcactttgggaggccaaggcaaatggatcacctgaggtcaggagttcaagaccagtctggccaacatgacaaaaccccgtatctactaaaaatacaaaaaaatagctgggcatggtggcg

SEQ ID NO: 555467 - DNA, 554 bp, Homo sapiens
cttttctaacactagttactgataaacagactgatgaatcactctgacagttttgtgaattttaacsctctgttaaaatcacaagggacaacgctaagttttaatatctaaactggaattttagggggcaagatcagccccttagattgaaagagacctatggagttgggtgatgtcaggtgcctcggagtcttggggacagcaccgatctctgtccccacatgggcacacactcttgtcaggcctatctggcattcagtgatgacttctgtgttgacaggaaaatattgatgggatgaatggaaagggtataaaacatggaagaagaaactattctttcatcagtgattaaaggcagcggaaataaagccaagtaaagttcagtgtacaaattaataaggcaatcagtctctattgattactagatgcctggttgaagtggatcttgaattggtttcccatgggaaggatttggagattttaagtggctgagtggtaatgattaaaatccaactttattctaaagctaccatacatagtaaagccttaattaa

SEQ ID NO: 555468 - DNA, 554 bp, Homo sapiens
cttttctaacactagttactgataaacagactgatgaatcactctgacagttttgtgaattttaaccctctgttaaaatcacaagggacaacgctaagttttaatatctaaactggaattttagggggcaagatcagccccttagattgaaagagaccyatggagttgggtgatgtcaggtgcctcggagtcttggggacagcaccgatctctgtccccacatgggcacacactcttgtcaggcctatctggcattcagtgatgacttctgtgttgacaggaaaatattgatgggatgaatggaaagggtataaaacatggaagaagaaactattctttcatcagtgattaaaggcagcggaaataaagccaagtaaagttcagtgtacaaattaataaggcaatcagtctctattgattactagatgcctggttgaagtggatcttgaattggtttcccatgggaaggatttggagattttaagtggctgagtggtaatgattaaaatccaactttattctaaagctaccatacatagtaaagccttaattaa

SEQ ID NO: 555469 - DNA, 468 bp, Homo sapiens
tatatttttaaacaaataaataaaaggctgggcacagtgggtcatgcctgtaatcccagcactttggaggccgaggcaggtggatcacctgatgtcaggagtttgagaccagcctggccaatatgcaaaaccccatctttacaaaaataaaaatacaaaaaaattagccaggcttggtggtgggggcctgtaatcccaactacttgggagactgagcaaggagaatctcttgaacccagaaagcggaggtggcagtggactgaaatcrctccactgcactccagcctgggtgtcagatcaagactcaatctcaataaataaatagacagtaaaataaaaaacaataacgaaaggataaagatggctgctagagtcactgaaaactcaccttgtccacaaagaaggtctgaaatagcaaatagataactatgcattgaatcgaacatctttgggagaaggctggaattc

SEQ ID NO: 555470 - DNA, 468 bp, Homo sapiens
tatatttttaaacaaataaataaaaggctgggcacagtgggtcatgcctgtaatcccagcactttggaggccgaggcaggtggatcacctgatgtcaggagtttgagaccagcctggccaatatgcaaaaccccatctttacaaaaataaaaatacaaaaaaattagccaggcttggtggtgggggcctgtaatcccaactacttgggagactgagcaaggagaatctcttgaacccagaaagcggaggtggcagtggactgaaatcgctccactgcactccagcctgggtgtcagatcaagactcaatctcaataaataaatagayagtaaaataaaaaacaataacgaaaggataaagatggctgctagagtcactgaaaactcaccttgtccacaaagaaggtctgaaatagcaaatagataactatgcattgaatcgaacatctttgggagaaggctggaattc

SEQ ID NO: 555471 - DNA, 468 bp, Homo sapiens
tatatttttaaacaaataaataaaaggctgggcacagtgggtcatgcctgtaatcccagcactttggaggccgaggcaggtggatcacctgatgtcaggagtttgagaccagcctggccaatatgcaaaaccccatctttacaaaaataaaaatacaaaaaaattagccaggcttggtggtgggggcctgtaatcccaactacttgggagactgagcaaggagaatctcttgaacccagaaagcggaggtggcagtggactgaaatcgctccactgcactccagcctgggtgtcagatcaagactcaatctcaataaataaatagacagtaaaataaaaaacaataacgaaaggataaagatggctgctagagtcactgaaractcaccttgtccacaaagaaggtctgaaatagcaaatagataactatgcattgaatcgaacatctttgggagaaggctggaattc

SEQ ID NO: 555472 - DNA, 637 bp, Homo sapiens
gcctatgtattaaaggtcaaaacatcatgtttagactgtgagagaacccagtgtctttattccttgtagatcacaagttgacatttgtgtggaattttgagtgcaaatgcctgttatttgaagctatgcacctaggctggaaaacagtttttcttctatggaaagtgacaaatcagccgggcaagagtgctaagttttmtcttcaccgataacatttcaaacagcaaatactctgtttataattttagaacataaagtttctcagtgagtaagaaagccgaagtcattcagagatgataatttttgtgaccctttatagctgtacccagactttggcagaaatatttatttccattaagtcgggagctggcttttcggttctcccctcaacgtgatgaattgaggtggtggattttaaccttttcatctttgttttattttctaacctgttagaatttacttatctcagctttattgctatttccagtaacaaagctgaacttgcttgtttatactatatacaatttaaagtaaactaccacgttagcctctatatttgaaagtaaaactaagtaaaatttggtcatttttattaccgtgagtgtccatatacttttactacatttgtatgcaattt

SEQ ID NO: 555473 - DNA, 637 bp, Homo sapiens
gcctatgtattaaaggtcaaaacatcatgtttagactgtgagagaacccagtgtctttattccttgtagatcacaagttgacatttgtgtggaattttgagtgcaaatgcctgttatttgaagctatgcacctaggctggaaaacagtttttcttctatggaaagtgacaaatcagccgggcaagagtgctaagttttctcttcaccgataacatttcaaacagcaaatactctgtttataattttagaacataaagtttctcagtgagtaagaaagccgaagtcattcagagatgataatttttgtgaccctttatagctgtacccagactttggcagaaatatttatttccattaagtcgggagctggcttttcggttctcccctcaacgtgatgaattgaggtggtggattttaaccttttcatctttgttttattttctaacctgttagaatttacttatctcagcwttattgctatttccagtaacaaagctgaacttgcttgtttatactatatacaatttaaagtaaactaccacgttagcctctatatttgaaagtaaaactaagtaaaatttggtcatttttattaccgtgagtgtccatatacttttactacatttgtatgcaattt

SEQ ID NO: 555474 - DNA, 603 bp, Homo sapiens
catgtagcaaacgcgcttgcctttctgtgtgccagtcmatgttctaagtggcctaagttttttaactcatttcatcatcccaatctctgtatgaagtctaaatgattatcagcaccatttgatataccagtaaactgagacactatgagacaaagtaattcatttatgcattaatacctacactataccaatgttttatggatgtcactgactgaactcatgccatgcatatctatcccatacctaggctataagaccagtagactggtatataacgtggtttaactatacaatgtaagagagagattccacacagaagccctcaaaatacagtgcgagccaatcctaggaaaaagttagaagagaaaaatcaaagtatctaaattatctaaacggaaacaacggactttggccatggaagaacagaggattatgatagtgacctgttcctgaacagctcttaactgcagaaggttgggcccttcaattgttctttgttagtatcattatcatagtactcgaaagcaatagcagaaattaaaaatgtggcaatgaagtatttgagatatgatacatcctattggtgagagtaaaaggatgaaa

SEQ ID NO: 555475 - DNA, 603 bp, Homo sapiens
catgtagcaaacgcgcttgcctttctgtgtgccagtccatgttctaagtggcctaagttttttaactcatttcatcatcccaatctctgtatgaagtctaaatgattatcagcaccatttgatataccagtaaactgagacactatgagacaaagtaattcatttatgcrttaatacctacactataccaatgttttatggatgtcactgactgaactcatgccatgcatatctatcccatacctaggctataagaccagtagactggtatataacgtggtttaactatacaatgtaagagagagattccacacagaagccctcaaaatacagtgcgagccaatcctaggaaaaagttagaagagaaaaatcaaagtatctaaattatctaaacggaaacaacggactttggccatggaagaacagaggattatgatagtgacctgttcctgaacagctcttaactgcagaaggttgggcccttcaattgttctttgttagtatcattatcatagtactcgaaagcaatagcagaaattaaaaatgtggcaatgaagtatttgagatatgatacatcctattggtgagagtaaaaggatgaaa

SEQ ID NO: 555476 - DNA, 603 bp, Homo sapiens
catgtagcaaacgcgcttgcctttctgtgtgccagtccatgttctaagtggcctaagttttttaactcatttcatcatcccaatctctgtatgaagtctaaatgattatcagcaccatttgatataccagtaaactgagacactatgagacaaagtaattcatttatgcattaatacctacactataccaatgttttatggatgtcactgactgaactcatgccatgcatatctatcccatacctaggctataagaccagtagactggtatataaygtggtttaactatacaatgtaagagagagattccacacagaagccctcaaaatacagtgcgagccaatcctaggaaaaagttagaagagaaaaatcaaagtatctaaattatctaaacggaaacaacggactttggccatggaagaacagaggattatgatagtgacctgttcctgaacagctcttaactgcagaaggttgggcccttcaattgttctttgttagtatcattatcatagtactcgaaagcaatagcagaaattaaaaatgtggcaatgaagtatttgagatatgatacatcctattggtgagagtaaaaggatgaaa

SEQ ID NO: 555477 - DNA, 603 bp, Homo sapiens
catgtagcaaacgcgcttgcctttctgtgtgccagtccatgttctaagtggcctaagttttttaactcatttcatcatcccaatctctgtatgaagtctaaatgattatcagcaccatttgatataccagtaaactgagacactatgagacaaagtaattcatttatgcattaatacctacactataccaatgttttatggatgtcactgactgaactcatgccatgcatatctatcccatacctaggctataagaccagtagactggtatataacgtggtttaactatacaatgtaagagagagattccacacagaagccctcaaaatacagtgcgagccaatcctaggaaaaagttagaagagaaaaatcaaagtatctaaattatctaaacggaaacaacggactttggccatggaagaacagaggattatgatagtgacctgttcctgaacagctcttaactgcagaaggttgggcccttcaattgttctttgttagtatcattatcatagtactcgaaagcaatagcagaaattaaaaatgtggcaatgaagtatttgagatatgatacmtcctattggtgagagtaaaaggatgaaa

SEQ ID NO: 555478 - DNA, 566 bp, Homo sapiens
tagtgaagttctttttcagagatcaaatcacaagtgggcaaaatttccctttaactccacacctctgactctgggatttcagaagagcaggaaaaacctatgctccttatgttttactattttttactttttctttctttttgtgtgttttgctcttgttgcccaggctggagtacaatggggcaatctcggctcaccgcaacctctgcttcctgggttcaagtgattctcctgcctcagtctctggagttatctaggattacaggcatgcaccrcaaagcctggctaattttgtgtttttagtagatatggggtttctccatgttggacaggctggtctcgaactcccaaccttaggtgctccacccacctcagcgtcatattatgttgggattataggcatgagccactgcacctggcctactttttgctttcttctccaccgtggtttccttcttcccagacctcacttgtccataaaaattttcatttaatttcttctctgtctacccaaaatcccttccctttttgtgccttctctgcactttggctaatgttaattatct

SEQ ID NO: 555479 - DNA, 566 bp, Homo sapiens
tagtgaagttctttttcagagatcaaatcacaagtgggcaaaatttccctttaactccacacctctgactctgggatttcagaagagcaggaaaaacctatgctccttatgttttactattttttactttttctttctttttgtgtgttttgctcttgttgcccaggctggagtacaatggggcaatctcggctcaccgcaacctctgcttcctgggttcaagtgattctcctgcctcagtctctggagttatctaggattacaggcatgcaccacaaagcctggctaattttgtgtttttagtagatatggggtttctccatgttggacaggctggtctcgaactcccaaccttaggtgctcyacccacctcagcgtcatattatgttgggattataggcatgagccactgcacctggcctactttttgctttcttctccaccgtggtttccttcttcccagacctcacttgtccataaaaattttcatttaatttcttctctgtctacccaaaatcccttccctttttgtgccttctctgcactttggctaatgttaattatct

SEQ ID NO: 555480 - DNA, 620 bp, Homo sapiens
atttctcacacagcaccttggttacttttctcacagtgcttaagaaaatctgaaattattttrtgcattaatgtgcttgttcattgttttctgatagtatagaaaacacagagatcaaaggttattcttaccttattcaccattttatgcttggaactattaaggtatagtgcctgaataaccagtgcttaataaataactactagataaatagtctaatgaatggaagtatgtggatctaccagaagttttcatgacatgcacatttctttatgtccctaaattatttacacttttgacaatactgtgaagaccataattgtaagaactaaagaaagaggagagaaacacaaagggtagcttgagagtcaataaggagagatttgttttagaaaacaaacctgataggggcttctggcctagttgagtctgagccacactctcttataggttaagactttttaaggattcaggacaggagagtttgtcagaggcttggactgcttctgtgtctctttgttgtgcttatctgtgagtgcagcaggataatttaggaatcagagagacagagaggttgaggagaatacttattatttaggtgcatccacccagtcagatta

SEQ ID NO: 555481 - DNA, 620 bp, Homo sapiens
atttctcacacagcaccttggttacttttctcacagtgcttaagaaaatctgaaattattttgtgcattaatgtgcttgttcattgttttctgatagtatagaaaacacagagatcaaaggttattcttaccttattcaccattttatgcttggaactattaasgtatagtgcctgaataaccagtgcttaataaataactactagataaatagtctaatgaatggaagtatgtggatctaccagaagttttcatgacatgcacatttctttatgtccctaaattatttacacttttgacaatactgtgaagaccataattgtaagaactaaagaaagaggagagaaacacaaagggtagcttgagagtcaataaggagagatttgttttagaaaacaaacctgataggggcttctggcctagttgagtctgagccacactctcttataggttaagactttttaaggattcaggacaggagagtttgtcagaggcttggactgcttctgtgtctctttgttgtgcttatctgtgagtgcagcaggataatttaggaatcagagagacagagaggttgaggagaatacttattatttaggtgcatccacccagtcagatta

SEQ ID NO: 555482 - DNA, 620 bp, Homo sapiens
atttctcacacagcaccttggttacttttctcacagtgcttaagaaaatctgaaattattttgtgcattaatgtgcttgttcattgttttctgatagtatagaaaacacagagatcaaaggttattcttaccttattcaccattttatgcttggaactattaaggtatagtgcctgaataaccagtgcttaataaataactactagataaatagtctaatgaatggaagtatgtggatctaccagragttttcatgacatgcacatttctttatgtccctaaattatttacacttttgacaatactgtgaagaccataattgtaagaactaaagaaagaggagagaaacacaaagggtagcttgagagtcaataaggagagatttgttttagaaaacaaacctgataggggcttctggcctagttgagtctgagccacactctcttataggttaagactttttaaggattcaggacaggagagtttgtcagaggcttggactgcttctgtgtctctttgttgtgcttatctgtgagtgcagcaggataatttaggaatcagagagacagagaggttgaggagaatacttattatttaggtgcatccacccagtcagatta

SEQ ID NO: 555483 - DNA, 563 bp, Homo sapiens
aatctaatcagactagattcttgtatttcgaactaagaactcagaatatatccatgacctttggttaaaaagcttaaagggaaagtaaamttcatttattcgttgaacaatttatttagtatttcttatttattagtgttctgtctcctgaataaataactcattttaagtgtttattgagcaccaattgcacataaactattgtattagttttgtgggagaaaaaaataaataaactaaatatccctccctcaaggaatgtttgtaaagttgattaactatgctagaaaatagaaagtgaatggtgctatgagatacagaggtatagtagtattatgaaggttgaatggagaaagagattaaatacagcagaagacaattatttctatcagagaagagatgacataggagatgaagaagaaagatttaaaatgatttttacagaaagatgaagagatacataactcttgagtagagaaggcaagaagaagagaaactgtatggacagtatgagctaaatgtgaaaacagaattttttttggctgggtgcggtggctcatgcc

SEQ ID NO: 555484 - DNA, 563 bp, Homo sapiens
aatctaatcagactagattcttgtatttcgaactaagaactcagaatatatccatgacctttggttaaaaagcttaaagggaaagtaaaattcatttattcgttgaacaatttatttagtatttcttatttattagtgttctgtctcctgaataaataactcattttaagtgtttattgagcaccaattgcacataaactattgtattagttttgtgggagaaaaaaataaataaactaaatatccctccctcaaggaatgtttgtaaagttgattaactatgctagaaaatagaaagtgaatggtgctatgagatacagaggtatagtagtaktatgaaggttgaatggagaaagagattaaatacagcagaagacaattatttctatcagagaagagatgacataggagatgaagaagaaagatttaaaatgatttttacagaaagatgaagagatacataactcttgagtagagaaggcaagaagaagagaaactgtatggacagtatgagctaaatgtgaaaacagaattttttttggctgggtgcggtggctcatgcc

SEQ ID NO: 555485 - DNA, 583 bp, Homo sapiens
agatgaggcagtcactgctcttatttagactttgcatcctaggattagcaaataacataagacaaacatgagcataattagcaaaaatcttttccagtcaaagagtatcccccaggagttagggtccaagtaggagagatgatcttgtactcccttccacatggctgttgggtgtgcagatctgtggtgtgaacagattttaaaattttagttttaacttgcttcatgtctgcagttaaactgttataaaaggttccccagaggtgttgtttcacctcaccctagctatacattaattggttccatggtagagaagtgacacaggtatgtttatgttgccattcacattttcactgttgacagaatgctagtgcatcttgtggctctcccgcatactctttccttactgtaggagaagttcatcacatatatttttggccagattatctacaaaagcagttgtttgtactgattcagtaatagatacaacagcaatgctaacagttgccataatgwctatggctgagcctgtaaagaccataagtgtaaatgtgaatcttttgtgtctgacctgggacagggc

SEQ ID NO: 555486 - DNA, 561 bp, Homo sapiens
gtttctctctctctctctctgtttccctctgtttcttkgtttccctctctctgtttctctatttgcttctctctgtatgtttctctctctcactctctctctctctcctgctttatattatatgctagcaaaggattaggcaaggatagatgttctctaaagacagatattgcctgtttgaaaagctaaggacaggccaaccaaaaaataaagaaactaacactgatttttttaaaaagccatacgtagcgtcagtgatgaggacctctcatttttgttattactgctgtttcattcaagaaactgaaaactaggacaagatttgttcccacatacacaggtaagagcagctcagccacaataaagagatgtctcactgatttgagtgaaaaatgcaggaccccatttacatggaaatatagtattttaaaataaaaaaagctgaagttttaagcattccaattcacaatgtaaattttgtcttttttatgtaaaatgagataatgtaagtaagacacttctgttgtaattgttattgctattgaggttatcatccctgtt

SEQ ID NO: 555487 - DNA, 502 bp, Homo sapiens
tgacaatagagaacaaattttgtaattcctaaatacctgactagtagtatcatttgtatatatatttattttcatttatcaggaattattcatgcacctaccttaactgtaattaccaactcagcaacgtaaaatcacactgtacctaaaaatacaaacagtatcctactgaagttaaacatgctatcatgctgaggttgggttgccrtcttttcctctgaaaccacaaagagcttctgcatgttactgccttcaacatatgcacttgctagtttctgtttccattgttaaaaatagactcctttgacaatcatttttaaatactttccatcctacaaagcttattagctttactttacacaaccattcagcacatattgctactaaatagttgatttgtcaccaaataatgaaacctgtaatttgtaggaagaacggaaacctaggctccaggaatcccaaagtagaaatcctcctaggagttatagtaatttgaaactct

SEQ ID NO: 555488 - DNA, 502 bp, Homo sapiens
tgacaatagagaacaaattttgtaattcctaaatacctgactagtagtatcatttgtatatatatttattttcatttatcaggaattattcatgcacctaccttaactgtaattaccaactcagcaacgtaaaatcacactgtacctaaaaatacaaacagtatcctactgaagttaaacatgctatcatgctgaggttgggttgccatcttttcctctgaaaccacaaagagcttctgcatgttactgccttcaacatatgcacttgctagtttctgtttccattgttaaaaatagactcctttgacaatcatttttaaatactttccatcctacaaagcttattagctttactttacacaaccattcagcacatattgctactaaatagttgatttgtcaycaaataatgaaacctgtaatttgtaggaagaacggaaacctaggctccaggaatcccaaagtagaaatcctcctaggagttatagtaatttgaaactct

SEQ ID NO: 555489 - DNA, 529 bp, Homo sapiens
agtaaaaacaagaaccacctgtcttgcagagtggggtgactatagttagtaataatgtattgtgtatttcaaagtagctaggaaaagagatgacatgttaccaacatagggctgggcccagtggcccacacctgtaatcccagccttttgagaagctgttgggggaggatcccttgagcttaggagttcaagaccaacttgagcaacatagcaagaccctcatctctacacattttttttaattagctgggtgtggtggtgcacacctgcagttccagctacttaggaggctgaggcaagaggatcacttgagcccaggaggtagaggctgcagtgagctatgactgcaccactgcactccagcytgggcaacaaagtgagacactatctgaaagaaaaaaaaaaagaaaagaaattaaaaatactacacatgatggataccccaaataatccaatttaatcattatacatcaattaaaaaaatcaaaaaaatttgaacttggcttttcaaacatgaaaaacatgtgag

SEQ ID NO: 555490 - DNA, 452 bp, Homo sapiens
tgcatgccatcatgccagctaattttttctttctttttttttttttttatttattttttttgtagagacagggtcttactatgttgcccaagctagtmttgaactcctggcctcaagcaatcctcccaccttaacctcccaaagctctgggattacaagcttgagccactttgcctagcctaatgtcagcatttaataagaagctattgttcccaccatatatatgtataggagagactgctaactgcctgactcaattatctgttctccctggttttttttgtaacagaatcccagaacttattcagactagcaatgtgcccactttccccatagattcatgtggccatatgactaagttctggccattgacatggaattagaagtgttgggccaggcccggtggctcacacctgtaatctcaacagtttgggaggtcaagatgagcagaa

SEQ ID NO: 555491 - DNA, 472 bp, Homo sapiens
aaaataaatgacctaaaaattaaattttagaaagtaaattttagcttggtgtagtgacccatatctataatcctagcactttaggaggctgaggtgagtagatcactggagcccagcaacaacaacaacaacagaataaaaaaaatttagctgggcctggtggcacatgcatgtagtctcaactmttcaggaggcagagatgggaggattgcttgggcaaaggaaataggcatcggacttttttgccttgggaattctatttgcctgtcccctgactccagcactttgggaggcagtgtattcaaggcattttgtaattaaaattcatagttgccacaaactgcattgaaaactaaattattatatatcacttcttaattgattgaatttattttcttttatttgtataaaggaatctcacactgtctctttggctggagtacagcagtgcaatcttggcacactacaaccc

SEQ ID NO: 555492 - DNA, 644 bp, Homo sapiens
atctttctcactgattattcagtgtgatatgcaaaagtaaaatggaatgtattatctagtcggagagttaggaaagtcaaatagtagttcatcaacataattatgaatgtgatagaaattcagagaagagggagaccatgataagcaggaaaggcttatttatgtgacttgagctatgtctcgaaatagaaacatgaaaatccagaaaagatatgggggaaacattctggtcaacaatattagatcaatgaaagctaaagaacaaagtattattgagcacacatggacataaacatgggaacaacagacactgtcgactacaagagtggggagggagggagtggctgtgggtggaacacctacttattgggtactatgctgactacccgggtgacagaatctgtaccccaaacctcagcatcacacaatatacccatgtaacaaacttgcacttgtacctgctgtatctaaaataaatgtttaaaaaaatttaaataagctaggaaattttttaaaaagaagaaactgttaagtaacaaayttaaaataagtgactattgtggacctagcctaggaagaaaaacattgaagtactagaccaaattgctcaaactaaaaaatgagctgcaataagtactgcaata

SEQ ID NO: 555493 - DNA, 531 bp, Homo sapiens
ctttagagaaggtacatggctttaattttgtagttgtaaaacaaatttcttagtataaattaaaaccatataacatgatttctttctccttatccttagccaagtgaaattttaaacttgtatttaaaaggtgggctcagagtgtttcatttttgttattattactccatgtaaatgtgagaattaaaaagggcactagtatttgtttggtactagtctgtataagaataaacgtaaataagtaaacacatgaattggacaatgtacaataggcaaataatatatgtataaaggaatgtatcacatagaactcatttctttactaataaaatcacagcatgtatgccagaaaatgaattatcttcacatttcataaacataagcgtgctcaaaactgcttaaatgtagcctttatgyttatgcacacattaggtacaaagtagttttatatacatagcaatcaccacaatggtgaagacagtctgaccacaataggacacagcaaacatcaaagcaaatctcaggtgcggg

SEQ ID NO: 555494 - DNA, 531 bp, Homo sapiens
ctttagagaaggtacatggctttaattttgtagttgtaaaacaaatttcttagtataaattaaaaccatataacatgatttctttctccttatccttagccaagtgaaattttaaacttgtatttaaaaggtgggctcagagtgtttcatttttgttattattactccatgtaaatgtgagaattaaaaagggcactagtatttgtttggtactagtctgtataagaataaacgtaaataagtaaacacatgaattggacaatgtacaataggcaaataatatatgtataaaggaatgtatcacatagaactcatttctttactaataaaatcacagcatgtatgccagaaaatgaattatcttcacatttcataaacataagcgtgctcaaaactgcttaaatgtagcctttatgtttatgcacacattakgtacaaagtagttttatatacatagcaatcaccacaatggtgaagacagtctgaccacaataggacacagcaaacatcaaagcaaatctcaggtgcggg

SEQ ID NO: 555495 - DNA, 560 bp, Homo sapiens
ttttttgaccttcattttaaaatcaatttaataatacttttctgtgcttagtcccactttgctctctcaagaggtttttyactggctttggggttttctttggttttcagatatgtatccaggctctttcagattgacacacagcccttccccatccatctgcttgaaataatcaggaatgtggctgtttcccccttgagacgtcagtgtctgtctccagcgggtgcaaaacttaacttttcttccgccaggagcatgctgtcaaaagtccatagagccagcctacaaacatgttttgttccagtccttcccaacttcttttatttggccccaaccaaacattctgacagtctaaataaaagttcaaaagcgtccgtgcgcagtggctcacgcctgtaatctcaacactttgggaggccaagcgggcagatcacctgagggcaggagttcaagaccagcctggccaacatggcgaaaccccatctctactaaaagtaaaaaaattagctgggcatggtggcgggcgcctgtaatcccagctactcaggaggctggggcag

SEQ ID NO: 555496 - DNA, 568 bp, Homo sapiens
ctcatgtgcattttcacacatttgtgattctgcttacatcctcttgtcattctgagataaatggcctcctcactcccatttctgccaatgatcaaaattttatccctttttaagacctaactcaaataatacctccttcatgaaactgttcccagttgtttgagttggaattgtttctttcctctgtacttccactttcattttttgtttttagatggagtctcactgtcayccaggctggagtgcagtgatgcaatctcagctcactgcaaactctacctcctgagctcaagtgaccctcctgcctcagcctcccaggtagctgggaacacagatgtgtgtcaccacgcctggctaatttttgtattatatttttggtagacatgggatttcaccatgttgcctaggctggtctcaaactcctgagttcaagtgatccacccacctcagcctaccaaagtgctgggattacaggtgtgagccaccatgcccagcccaccttgtatcttttttttttttttttgagacggagtctcactctgtctcccaggctggagtgcagtggcac

SEQ ID NO: 555497 - DNA, 518 bp, Homo sapiens
gcccaaattgggcagcctcccaagccagagtaggctcagagagactccagcacagtcatgcagtggaagacgatttatggacagaaggaggaaagtgacgtacagaaaacattagtgaggtacagaaagagctggattggttacaaggtttgccttatttgaccatggtttaaaccgttgatcccctttgactggcaaaaactcagtgattggcacaagactaggttacagtctattgacacctccacataggttatagttcactgtgcacagagaaacctttaggctgaacttaaaatatgtaaggargcagctttacactaaacttgatttaacagccctcacagataaagtaggatgtgctttgcagcaggtctgccatggcgtgatcatagctcactgcggcctcgaactcctgggcttaagtgatcctcccacctcagcctcccgagcagctgggaccacaggtgcgtgccaccacgcctgactaatttttaaatttttttgtagagatgagg

SEQ ID NO: 555498 - DNA, 606 bp, Homo sapiens
cagtggaaaagacgttaaaactctgtaaaaaatttaaaagggtacaatatgtttcagcaaatgaaaacatagttaagagataaccggacaaaaagaggtgattctctaatttagttcctataagctgataaggtgaaacaataatgttaaaataaaacacttaatgaaaaattttcaaattgcttttcctctccctttaaaatccctcaacatataaaagaaataagaaagctgagatatatagctagctttttggagcaacacaaaactaatttttcaaaggagaataattaccattatttatcaaataaaatataactttggagtctgaacagcaatggaattcagccagtctccagttggagctgacctccatatttaggcagaagcactaggccagtgcytactgctcaggcagaaatttatcatgcaatttgaccaagagtcttcaaaaatgctcagcagtagtattttcatctgactctgtcgagattcagaaaataggaataacttccccctgcaacctatagaaacattttagggaaatagtttaagatctgtacttaacctaaaaattccgctgaatactgaagacccttcttcaga

SEQ ID NO: 555499 - DNA, 606 bp, Homo sapiens
cagtggaaaagacgttaaaactctgtaaaaaatttaaaagggtacaatatgtttcagcaaatgaaaacatagttaagagataaccggacaaaaagaggtgattctctaatttagttcctataagctgataaggtgaaacaataatgttaaaataaaacacttaatgaaaaattttcaaattgcttttcctctccctttaaaatccctcaacatataaaagaaataagaaagctgagatatatagctagctttttggagcaacacaaaactaatttttcaaaggagaataattaccattatttatcaaataaaatataactttggagtctgaacagcaatggaattcagccagtctccagttggagctgacctccatatttaggcagaagcactaggccagtgcttactgctcaggcagaaatttatcatgcaatttgaccaagagtcttcaaaaatgctcagcagtagtattttcatctgactctgtcgagattcagaaaataggaataacttccccctgcarcctatagaaacattttagggaaatagtttaagatctgtacttaacctaaaaattccgctgaatactgaagacccttcttcaga

SEQ ID NO: 555500 - DNA, 536 bp, Homo sapiens
ttctcatgacagtgagtgagttctcacgagatctcatggttttataaggggctttttcttttctgccaggcacttctccttcctgccatcatgtgaataaggacatgtttgcttcctcttctgccatgattatgtttcctgaggcctccttagccatgcagaaatatgagttaattaaacctgtttcctttataaattacccagtctcaggaagttctttatagcagtgtgagaatggagtaatacaatgacctagtctgaaaagtcaaacattrttacttctcccatattgtattcgttaaaagtgagttactgagtcctactcatattgaaggggaaatctcaactatgcctcttgacgggaggaatatcaaagaattttgaaaccaccacaccacccaaacagggcacaccagcatgggctcccagggcagaactgttctccaggcctgctcaagtgacatgttctctggaaagacctccttcacttctctaaccatattcttttttttcttctctcaaacctggataactta

SEQ ID NO: 555501 - DNA, 536 bp, Homo sapiens
ttctcatgacagtgagtgagttctcacgagatctcatggttttataaggggctttttcttttctgccaggcacttctccttcctgccatcatgtgaataaggacatgtttgcttcctcttctgccatgattatgtttcctgaggcctccttagccatgcagaaatatgagttaattaaacctgtttcctttataaattacccagtctcaggaagttctttatagcagtgtgagaatggagtaatacaatgacctagtctgaaaagtcaaacattgttacttctcccatattgtattygttaaaagtgagttactgagtcctactcatattgaaggggaaatctcaactatgcctcttgacgggaggaatatcaaagaattttgaaaccaccacaccacccaaacagggcacaccagcatgggctcccagggcagaactgttctccaggcctgctcaagtgacatgttctctggaaagacctccttcacttctctaaccatattcttttttttcttctctcaaacctggataactta

SEQ ID NO: 555502 - DNA, 536 bp, Homo sapiens
ttctcatgacagtgagtgagttctcacgagatctcatggttttataaggggctttttcttttctgccaggcacttctccttcctgccatcatgtgaataaggacatgtttgcttcctcttctgccatgattatgtttcctgaggcctccttagccatgcagaaatatgagttaattaaacctgtttcctttataaattacccagtctcaggaagttctttatagcagtgtgagaatggagtaatacaatgacctagtctgaaaagtcaaacattgttacttctcccatattgtattcgttaaaagtgagttactgagtcctactcatattgaaggggaaatctcaactatgcctcttgacgggaggaatatcaaagaattttraaaccaccacaccacccaaacagggcacaccagcatgggctcccagggcagaactgttctccaggcctgctcaagtgacatgttctctggaaagacctccttcacttctctaaccatattcttttttttcttctctcaaacctggataactta

SEQ ID NO: 555503 - DNA, 635 bp, Homo sapiens
caactgattaaaataaaagattgaagagccaacggaatggaggctccctgctcctccccactacactgcatgaataccctggctctgaggacgctccgacaggactgggcaccactggtccttcaggcagaactaactgcatgcccgttcctgcctgcatccttaccaagtggcatttcccacagaagagagtcaaaaccattccaaccctgtaaggacaagctcaagtgtcactgcctccaggaagtcttcaccagtacctctttcctggctcattggtcctgaattccgctagcctgctgcttcctccagcctgggatcatgggtggtggtctgggatctctgtaggtagcacwtgaacaagggattaaacaatgtcttaccgtgatgaagtcactgcctttcgattctctttcaattcttatcttcaaggcaagggaaaaagttcaagtttggtgctaatatgtctttactaactctctgatgcttgctaatcattttttcttaataaagagagagcaggccttgggcttagaggcttggcagcagtatctatctggaatttaataagattgttttatttttcagatgcttttgatttatgacagagataccagcgttccatttatgtttgt

SEQ ID NO: 555504 - DNA, 504 bp, Homo sapiens
cactgtggaaaaaagttgtggccgttcctcaaaaaggtaaacgtagagtttccatataacctagcaaatccagtcctagggatatactcaagataattgaaaactgacgttcaaacaaaaattgtatatgaatgttcatagcactcttgttcattataggtcaaaatggttaaaacccaaatgttcatcaactgatgaatcgataaacaaaattcagtatatacttacaatggattatcattttgccataaaaagaaatgaaatacggacggatgctacaacacagatgagccttgtaaacattttgctaagtgaaagaagtcaggcacaaagggccacatgttgtatgatcccatttatacgaaatgttcagattaggcaaagccatagacacagaaagtagaattgtgttttccagaagctgagaagtggggccaatggggagtgkctgctaaatgggtctgaggtttctgtttggggtgatgaaaaggttctggacctaaa

SEQ ID NO: 555505 - DNA, 564 bp, Homo sapiens
agctgctttcgctgatattttatggacttaggaatgatccttacagaattcttttcaacatcaaaaagtgcaatttgtcttggaaggcaacaagatttcttcaataaatttggaagagggctggcctattagttgtcataataatggttttgtaactcatatgaaataaaatcagaatgtaaaataggtatacgggggcagaatttaattctgtgctgataacactccccatgcccccagcacccactttctatcagagaaggtgtctgtgtatgttacccaaaatgcaagtcccccaaccccaacccattggggcttcagccgcaagccaagtatggatgtcttggatgtcaygggtttgagctgggtctcttctctggctcagagagatgtgtgggtgacggggtatcctcagccatggaaagctgccatcatccagaataaaaaacctagaagtcaaattctaggcatcaagggtcggatcagcaatgccaagaagaaatgaagcttccctggtggggtcgagatgaatctgtcattcaataaatctacactggctgggca

SEQ ID NO: 555506 - DNA, 575 bp, Homo sapiens
attctgggcctatttgctaccatagtttatcctactctcmctaataattcttgctcagcagtcacagggtgattgcctgatgaatgtacatggcccgatttccggttgtttgcgccattgagggtgactagttatgcccatgggagtacagctccttcctctatgacccacgaccaggccaaaatttcttccagatgctctgaccagttagtcctaggacctgattgaccccagggagtctgacccctaagtataacacagcatcgtggtcctgggaaggtgtaaacataatacaatttctgcccattgaaccgaatgttaacaggaagacgttccctgaagcagaagaaaatgaccttggtgacgatgatccttgccaaaggtaggtacccttgccttgtcacctacctggtggtcatgacggcgatcaaggctggccctgctttcatgtaactaactggccttcaatggttcacttttcccattgagtgacttttttcagttatacacttctgtaaaccagaagtgtttttactggcttttctttatgtaagtttttatttttaccatcgttt

SEQ ID NO: 555507 - DNA, 575 bp, Homo sapiens
ggtgcaaggttacacaggtttgagcaacccagtggagtttagaatccaggagaatagccaagtacaggacagaattttccatcatgtggaatgaccttaacaatacgggggtggaagtttctagttttcataataagctttgatttttagtatgtagtagaaacagaacaaccagtgccttaagccaattatttatttatttatttatttatttatttatttatttatttatttattgttggttcttacagtgaggctagagtttaaaaagtcagttcatttttaaaaaatatttaatggtccaggtgatatctgagccaggccaaaatagtgaaartggtgcttgagtgatgaagtttggggactgctagactcaggaaaaagcccaaggtctgccgtgaggggtgctgggttcaaatgtggcctctgcccttcactagctgcaagatattgtgtaagtctttatacctctttggactcagtttcctcatctctaaaataattgcttatcatgaaaagtgccatactgtcagttctggacacaccagcggccccctgaccgccctgactcttgt

SEQ ID NO: 555508 - DNA, 606 bp, Homo sapiens
tatcaccctactcagaatggcatgcaatttaaacttatgaattgtttatttccagaatttttcatgtaatgtgtttggaccatggttgactgttggtaactgaaaccayggaaagcaaaatcccagataagggagactattgtgttttctttaggaaaattcctttaaaagcttatagtgagcttatagtggctagcattaggcctaaaatactctgttgtgggcttttcatttccttaaagtaatagaaaggtttgtttttttaatttaaaaagaatttctgatttagggaaagattgcaattaataatgagtattatgatcaacagctacatgtacatatcacttttaagatctttagagagctaattacttagggaagattcaaagacatttatatagtttatttaagtatccaaatgcactacaattatttgtagtttttaatctaaaatgagccttttagaaaacctcaatcatacaactacacacacacacacacaccctacatatatacttgttctaacaaagctaatttcttctggaacttggtaaaattctggaatttgtgaatactaatagagaaataaaaagggtattaactaga

SEQ ID NO: 555509 - DNA, 570 bp, Homo sapiens
tcaagtcatgacaggaatatttaactcctagaaggagtagaaagtaattggagtgagctggaggatgatccaggacggaacgatagggtgttcacttagcagtaggatttgtgggcaagggtgaccacaagagaacaatggagttagcgtgcttatttaaagcacccaagagtgtagaccctttgtgggggactggttgaaaggtgcagaggcccccgtgtctgtgtatgaacaggtgagactgagacaacccactgtggaaacaaagaagcatggatgaagrcagacagcctcccactccaacacacacacatatgcacatgcacacacacacacacacacacacatacccttggttgctgatgtttcatatgcaccagtatctcagataaaagagtctagagctgggctggaagatagcaagctatccaagtcagccccatcaccctcattttatgtttgttattgaacttttgtagtcattcggtgctggacatgtctactacaaaagaggaagaagatgaggaggaaaaggacaatatggagaagggagagaaggcatgctgggta

SEQ ID NO: 555510 - DNA, 485 bp, Homo sapiens
ctgtctctctttctctctctattgttctcyctcttacctttctctgatattttttcctctttggtgttgacaaatcactgtcagtaagtgacattctcccttaagaaacctatctgacacagagcacaaggcgtgatggttgttcatggatcagccagattgaattaaggttcaatttcaggttagaatcagctggaagagatgagacccccaaaatagcagtggcttcagcaaaacagagctttatttctccctggcgggatcttcaggctggtggcccaggtttggagcagcaatcctcaggtgcagggaccctgtgccttctgccttgccactcagcatcatcactgcatttctcaaggtggctgctggggtgccagcctttatgggcagttccagcctgcaggaaggaggaaagtggaaagaaaggtgcatccgcctagtaagggtgctctccagaagttgcacacaccacttccacatat

SEQ ID NO: 555511 - DNA, 509 bp, Homo sapiens
gcatgtgaaaatgagtgaagtaaggagtcctttgtaccttaaagatagcacataggaataattgtcacttccaccaaaaaatgtgttccttctcattcttctccaaacatgagtctaattctaggttcattttgcttccatgtctgttaaagccacagccatacaactgtggtcctctatataagaaaaaagcaacagtgcaagcatggtattacataacaacacatcccctggtattggggaagtcttggggcatggtggggagtgtggctaattgggaagaggagcctgtccaatgtctccagatttcctgacttatcaaaagaaataagaaatttagatttagttgagccrggcgctgtggctcacgtctgtaatcccagcactttgggaggccaaggcgggcagatcacgaggtcaggagatcaagaccatcctggttaacatggtgaaaccccatctccacaaaaatacaaaaaattagccaggtgtggtggcgggcgcctata

SEQ ID NO: 555512 - DNA, 509 bp, Homo sapiens
ctgggagtgcagtggcaccatctcggctgactgcaaccttcacctccctggttcaagcaattcccctgcctcagcctcctgagtagctgggattacaggcacacgcyaccacatctgactaattattttttgtatttttagtagagacagggtttcaccatgttggccagactggtctcgaaatcctgacctcaggcaatccacctgcctcggcctccccaaagtgctgggattacaggtgtgaaccactgcgcccagcccacctatctttaaaatactgaagttgatgatataaagtaatttttaaaagatgcatgtgttatgttactgaaaatatgtgttgtgtaataatgatattgaaattgattttaaattaaatccctattcatgccttggctttgacttcagcaataatacttacaaattcatgggtttggtgcacatccccctcaatcataactttgatgtatgttttgtgatgcaataaaataaaaatatttgattttaaa

SEQ ID NO: 555513 - DNA, 509 bp, Homo sapiens
ctgggagtgcagtggcaccatctcggctgactgcaaccttcacctccctggttcaagcaattcccctgcctcagcctcctgagtagctgggattacaggcacacgccaccacatctgactaattattttttgtatttttagtagagacagggtttcaccatgttggccagactggtctcgaaatcctgacctcaggcaatccaccygcctcggcctccccaaagtgctgggattacaggtgtgaaccactgcgcccagcccacctatctttaaaatactgaagttgatgatataaagtaatttttaaaagatgcatgtgttatgttactgaaaatatgtgttgtgtaataatgatattgaaattgattttaaattaaatccctattcatgccttggctttgacttcagcaataatacttacaaattcatgggtttggtgcacatccccctcaatcataactttgatgtatgttttgtgatgcaataaaataaaaatatttgattttaaa

SEQ ID NO: 555514 - DNA, 578 bp, Homo sapiens
tctgtgttcatggatttgaagaattgatattgtcaaaatgcccatgctacctgaagtggtctatggattcaatgcaatccctgtttacagaaatagaaaaaatacaaaaagattctaaaatttgtatcgaaccacaaagaccctgaatagctaaagcaatcttgtgcataaagaacaaagctggagtcatcacacataatgatttcaaattatattacaaacctatggtaatcaaaacagtatgatactggcataaaaatggacacayagatcaatagaacaaaatagagaacctaaaaataaacccaggcatatatagtcaattaatctttgagaaagcaccaagaacacacagtgggaaagggatagtctgttcaatgaatgttgttgggaaaactagacatccacatgcagaagaatgaaattggaccattatctgacatcataaacaaaattcaactcaaaataaattaaagacttaaatgtaagacacttagaagaaaacacgggggaaatctccttgatattggtcttggcaatgatattttttggatatgacacaaaaatcacaggaaaca

SEQ ID NO: 555515 - DNA, 516 bp, Homo sapiens
agcactcatccagggtctatgttctggtgttcttgcttaaaaacattatgttttcagcaccataagacagggcaaasttttttaaagaaaaaaaacaaagcatttattattattattattttttattgatcattcttgggtgtttctcacagagggggatttggcagggtcataggacaatagtggagggaaagtcagcagataaacaagtgaacaaaggtctctggttttcctaggcagaggaccctgtggccttcccagtttgtgtccctgggtacttgagattagggagtggtgatgactcttaatgagcatgctgccttcaagcatctgtttaacaaagcacatcttgcaccgcccttaatccatttaactctgagtggacacagcacatgtttcagagagcacagggttgggggtaaggtcacaagatcaacaggctcccaaggcagaaaaatttttcttagtacagaacaaaatgaaaagtctcccatgtctacttctttctacacagac

SEQ ID NO: 555516 - DNA, 516 bp, Homo sapiens
agcactcatccagggtctatgttctggtgttcttgcttaaaaacattatgttttcagcaccataagacagggcaaagttttttaaagaaaaaaaacaaagcatttattattattattattttttattgatcattcttgggtgtttctcacagagggggatttggcagggtcataggacaatagtggagggaargtcagcagataaacaagtgaacaaaggtctctggttttcctaggcagaggaccctgtggccttcccagtttgtgtccctgggtacttgagattagggagtggtgatgactcttaatgagcatgctgccttcaagcatctgtttaacaaagcacatcttgcaccgcccttaatccatttaactctgagtggacacagcacatgtttcagagagcacagggttgggggtaaggtcacaagatcaacaggctcccaaggcagaaaaatttttcttagtacagaacaaaatgaaaagtctcccatgtctacttctttctacacagac

SEQ ID NO: 555517 - DNA, 482 bp, Homo sapiens
atgtttcccaggctgctctcaaactcctgagttcaaatgatcctcctgcctcagcctcccaaagagctgagattacaggcatgagccaccatgccctgcccctttctgtgattgctgtggctgtagtcatcaaattagttggcagagtgccatctattccatgtttttcttctatatgttaattcctatttcccaagactaataataattactaataaggaataagaagarccaaatatatgctcatttccttcttgacaaatctcaagtgtaagtctcttagtcctatgatctacataaggaatagtatgatttcaccgcagctacttccctattgttcgttattgtacattgtatcacagtattaaggaaactgttaaaaataacaggttctcatgttcttaacctgtgaaagaactaaatattcatctgccataatgggaaacgtctaagtctgtgccatgcaacatagtggctaccag

SEQ ID NO: 555518 - DNA, 482 bp, Homo sapiens
atgtttcccaggctgctctcaaactcctgagttcaaatgatcctcctgcctcagcctcccaaagagctgagattacaggcatgagccaccatgccctgcccctttctgtgattgctgtggctgtagtcatcaaattagttggcagagtgccatctattccatgtttttcttctatatgttaattcctatttcccaagactaataataattactaataaggaataagaagaaccaaatatatgctcatttccttcttgacaaatctcaagtgtaagtctcttagtcctatgatctrcataaggaatagtatgatttcaccgcagctacttccctattgttcgttattgtacattgtatcacagtattaaggaaactgttaaaaataacaggttctcatgttcttaacctgtgaaagaactaaatattcatctgccataatgggaaacgtctaagtctgtgccatgcaacatagtggctaccag

SEQ ID NO: 555519 - DNA, 482 bp, Homo sapiens
atgtttcccaggctgctctcaaactcctgagttcaaatgatcctcctgcctcagcctcccaaagagctgagattacaggcatgagccaccatgccctgcccctttctgtgattgctgtggctgtagtcatcaaattagttggcagagtgccatctattccatgtttttcttctatatgttaattcctatttcccaagactaataataattactaataaggaataagaagaaccaaatatatgctcatttccttcttgacaaatctcaagtgtaagtctcttagtcctatgatctacataaggaatagtatgatttcaccgcagctacttccctattgttcgttattgtacattgtatcacagtattaaggaaactgttaaaaataacaggttctcatgttcttaacctgtgaaagarctaaatattcatctgccataatgggaaacgtctaagtctgtgccatgcaacatagtggctaccag

SEQ ID NO: 555520 - DNA, 620 bp, Homo sapiens
tctgttttgatgccaacactacgctgctttagttactgtaggcttgtgatatattttaaagttggatagtgtgatgcctccaggtttgttctttttgctcaggcttgctttggctattcaagctactttttggttttacacaaattttaggattatttttctatttctataaaaaaaatcggtattttgatagggattgcattgactctgtagactgctttgggaagtatggtcattttaacaatgttaattctcctaatccatgagaatgggatgtcattccatttgtttgtgtcctcctcaatttctttcatcagtgttttgtagttttccttatagagatctttcatctttttggttacatttatttctatgtattttaaatttcttgtagctattgtgcatcccatattgtaaatgggactgccttctcaatttctttctcagctagctcattattgatgtatagaaatactactgatttttatataatgatattatattgtatttctgaatgastttataaggtctaaaagctttttcacagagtccttaggtttttccatatgtaagtgcatataatcagcaaagagggacaatttgacttcctcttttccaat

SEQ ID NO: 555521 - DNA, 583 bp, Homo sapiens
ttgaaggattccagggttaaatatctttcttcctgccctgtcccttgattccccatgtccaccctaaagcaaatcctgtccaagcatgtgtcctaaaaagtgcatcaaagtgaggtcagggcataattgaaaccttacagtttctttacaagaaagcctcttctctgtagctcagtttccaagcttaagtaattacaaataagaccacttctggaagcacatgtcctggtaaaattcaaagctaattacagaktcgatgcctttccactctctgttttcttttaccttatgtacatcaacacaaaatgatctcaaaacaaccattaagtcatcttctgttgcattccatcttttcaatgttccatgggcatctcaattctctaattaggggacttagagattggacgataagcgctgagtgtgcctgccgagccctgttcatcagttccagacattgcccacttgagtgaccagcaaggctcctgctaccagccaatcacatggattggattggggaatggagatgggaacagaatcagggcaatatggttctatcaatgtgcctacattgaccattgctagt

SEQ ID NO: 555522 - DNA, 630 bp, Homo sapiens
atttgaattagttgctggaacttaaaaattaggaacttttgtttgagaatctacatgtcagtcttctcttgaaaaacaggaagtttttgccatgttggacctgtcttcctacatggcaataactggctaaagtagcctagtggctgccactcatgcagctctgggtgtccagtgtcccctatgaaccactattttatatccagtcttccttgcttgtttatgttgtctgccaggcccctgtaaacagctggttagcaacctttagtgtaaatgcacagagcaaaaggagtagaggatatgcctcatgccttaagaacggttacgttataagagtcatgggactgagagacagtctctrtttttccctttgtaaccatatttatgaaggttttagaacaagaatatattcatgccttattatcataatttttcaaaaaagtatattaatatattatgatcatgtatgtatataactaaaattctctaaaaatactataaaagcagaataaatggagtactgtggctcctcagaagagagataatcttcactggacagagccatgcgatgataccagagtctcagctatgtacattactcggcatttagcataacagatgttacatggttat

SEQ ID NO: 555523 - DNA, 419 bp, Homo sapiens
aagtcaaacagagctagtttatatgaaaccttggacatagtaggtcatattgaaagaaaaaaaaaatcagccttagaccaatctatgatatattttttgcctttactaatacaaaaaataagcttgaccagatttcatatctccttaagatggaaccatctgagctagttgtgttcttgcccacctccatgcagaagcatgcataagcatgaccaccaattgggcaaaycccagaaaagtttcattctctttatatgctgcaggacaagaatgtgtgcaaatgaataaccactacttaagcaaatcatcttgacccaatttgtggacctgttaacttttatttttcttaatttactctctacagagtagctttgtcctgagagatcccctcataatttccccaaaacgtaaccatgtgt

SEQ ID NO: 555524 - DNA, 590 bp, Homo sapiens
tgtaagctgctccctgtgcagggattttagtacagcaatacagagaggttgccaagtttatctccaactcagtcatctctgaatccaaaccttttttgttttgctatggcarggcttcttcctggaactttttgaaacaacaaaaaattcaaggtgcaacagttacaagtgggtgcttctccacagtgtgtacacaaaagcctggggaacctgggtgacaataggaaaacttttaagtattaattcaagctaatttaaattttttaaaagatcacccctagaaaccgtgtagagaatgggcacacagcagggattggagtgggacaagaagatcagttacagatggggaaactgaagaccaaggttataaaaggaacttgttcaaggtcaggcatcaagaaactggtgccactgaatgaacctgcttccctcctttcccatcccttcttgctctagctggagagaaaataccagcaggagcccacacccatggcaaatactgagccctcctgggtgccatatagcctctgggctgccaataaacattcatgattgaattttaaaatgttttcctaaatgtgctaaaaaaa

SEQ ID NO: 555525 - DNA, 605 bp, Homo sapiens
cacacacagacacacacatgcacagacacacacacacatcagttgcttagaagaagccaggcttttccagaaacgaaactcaagtgaggctttcctggaacatataaagaaatgctgtaatgcttccttgataacatcatccctacagctactgagtagtgagttccatgtaactttgtggatggcagagcagcaaagtgggctgagcatgctgctttctaatcctcacttctggggtctctggggagtccaatcagagccatagcccacatgataagatctatggtagttgcatgtacgaggcatcatgaaagcacaaaaaaaagaagtgacccttgagcaacattctaaagggggaagaggagtcaaaaggaagcaaaatagtggggcataggtcaaatccagccctcaactttttcttgtggatcttttcaaaatttaaactagttactaacatttaataatccagattgcccatttttcaaaagcatwttgggagatttgctaacacagagcccatattcctccatggcaaaaactggttgaggctgaccagcagccgctatttcagagacagtgagcacacaccagtttgcctcaggccc

SEQ ID NO: 555526 - DNA, 599 bp, Homo sapiens
ataagaacctgcctaatttaggaaatttgatttgaactacctggtctaaccaaggtttccacttcccactactgcatttggtgtagggtcaatgagctgaagtttgtgaacccatgttgcttctgtcttcccttaaatgttatcacatagaggagggagctaccccacaacaggggaaaaaatatctttcaaccccaacatccatcccagacaaataagaacayggataaaataagagactcttaaagactcattttgaaagccttgaattcttaacaaaacctctgaacaagtttctcctaggagaggactgaaatgaagccttttgaaaacaaaaaagaaatggcacatttgacaagggtcagctggccaggctcctgtgatgacagcatttgggagtattaatatataccaagagctgtaaatggttgcaaaaatgcacatggattccttgacataatgtactagctcacaccatctgccactttcagcagtcaaggactgcatacttgaaatgctttctaatcactttcacttaacaaggagttggattccacactaatttttgaaaatctgccaccagaacagttctttagggt

SEQ ID NO: 555527 - DNA, 599 bp, Homo sapiens
ataagaacctgcctaatttaggaaatttgatttgaactacctggtctaaccaaggtttccacttcccactactgcatttggtgtagggtcaatgagctgaagtttgtgaacccatgttgcttctgtcttcccttaaatgttatcacatagaggagggagctaccccacaacaggggaaaaaatatctttcaaccccaacatccatcccagacaaataagaacatggataaaataagagactcttaaaractcattttgaaagccttgaattcttaacaaaacctctgaacaagtttctcctaggagaggactgaaatgaagccttttgaaaacaaaaaagaaatggcacatttgacaagggtcagctggccaggctcctgtgatgacagcatttgggagtattaatatataccaagagctgtaaatggttgcaaaaatgcacatggattccttgacataatgtactagctcacaccatctgccactttcagcagtcaaggactgcatacttgaaatgctttctaatcactttcacttaacaaggagttggattccacactaatttttgaaaatctgccaccagaacagttctttagggt

SEQ ID NO: 555528 - DNA, 535 bp, Homo sapiens
atggatgaggaaactgagacacaaataagttttaatgaattgtacaaggttccttagctgataagctgcagagctgggaatttaactcaagaccatgtggttcaaaacacctctcacttaggaggcaaatagttcaaggggaaaatgatcccaggaagtgtttgaaatgtcagaggtgataatccagttccaacaggcgctgtggtgtacatctgatttagggctctaactttgtccaatgggtaggactcatcagtagtattttctacacatgtagaaaaaagtctggaagataggttttcttattcctcttttgcatatgtggaaattgaagttcagaaacagaaaatattgcccaaaatcrtatggctgaacaatcagaacagagattttaattctagtttgttttatatgaagggtagaaaaatccttcctaaatttttcatcatgtatgcctcatatttgaatactataactagattctattatataagaatatgttgaaatgcttacactcacttttggtgtattttgt

SEQ ID NO: 555529 - DNA, 497 bp, Homo sapiens
ttaaacctgtttcctttataaattacccagtctcaggaagttctttatagcagtgtgagaatggagtaatacaatgacctagtctgaaaagtcaaacattrttacttctcccatattgtatttgttaaaagtgagttactgagtcctactcatattgaaggggaaatctcaactatgcctcttgacgggaggaatatcaaagaattttaaaaccaccacaccacccaaacagggcacaccagcatgggctcccagggcagaactgttctccaggccttctcaagtgacatgttctctggaaagacctccttcacttctctaaccatattcttttttttcttctctcaaacctggataacttagcatctcatcactttgagtatgttgtctttgattgctgtaaatcactatttcatgtatatatttcatttctccccagtaaaatgttaattgtctcaaactttatgtgctctagaggtgattccattttaggcaaa

SEQ ID NO: 555530 - DNA, 514 bp, Homo sapiens
tgaccattattcagaatttagtgcttatcattttcacatgtttgggttattctttaactgtaaatgtatatactcctaaacaatgtaaagtattatttggtacgtttaaaaattttaaccatatatccttctgcaatttacttttctctcctctctacattatacttgtgaaattcattcatgcagctatctgtggctccattattcattttcactgctatagagtgttttattgtatggatataacccagtttatttctcattctcctgcttgacatattcttaacgtctttggggtggtgaatggctgtttcctcatcttgcattctttctcgatctatcatttatagcattaattttgtagtggggtctttcagccttggttctggatttcaaagacattttgtcttctagcttatgtagttgaaaagtgatggttttcgatatttgtttttttatctttttgtttctctttctttttgcctctactytacatttaaaacatatgttaaaa

SEQ ID NO: 555531 - DNA, 590 bp, Homo sapiens
ccaacacagaaactcaagaggctaagactctgggtgttacaatctggcacggagcctaggagaagacccaagggcaaaaggagtgaatgagccaagcaatgtggggaaaacctygacttttaggcacaaaagctaacatgggggaatgtttagtgtgtggtcaccagcatcacactccgttgtctttggaccaggttttgctctcctgcaataacagaagtttatcctcatgaccccagggctagccagaaaagataaaattatagtaagcattatttgttttagaaaatacaatactgggccgggcgcggtggctcatgcctgtaatcccagcactttgggaggctgaggtgggtgaatcatgaggtcaggagaccgagaccatcctggccaacatggtaaaatgccgtctctagtaaaaatacaaaaattagcttggcgtggtggcgcgcacctgtagtctcagctactcgggaggctgaagcaggagaatggcttgaacccgggaggtggaggctgcagtgagctgagatcatgccactgcactaaagtctgggggcagagcaagactccatctcaaaaaacaaaaa

SEQ ID NO: 555532 - DNA, 590 bp, Homo sapiens
ccaacacagaaactcaagaggctaagactctgggtgttacaatctggcacggagcctaggagaagacccaagggcaaaaggagtgaatgagccaagcaatgtggggaaaacctcgacttttaggcacaaaagctaacatgggggaatgtttagtgtgtggtcaccagcatcacactccgttgtctttggaccaggttttgctctcctgcaataacagaagtttatcctcatgaccccagggctagccagaaaagataaaattatagtaagcattatttgttttagaaaatacaatactgggcygggcgcggtggctcatgcctgtaatcccagcactttgggaggctgaggtgggtgaatcatgaggtcaggagaccgagaccatcctggccaacatggtaaaatgccgtctctagtaaaaatacaaaaattagcttggcgtggtggcgcgcacctgtagtctcagctactcgggaggctgaagcaggagaatggcttgaacccgggaggtggaggctgcagtgagctgagatcatgccactgcactaaagtctgggggcagagcaagactccatctcaaaaaacaaaaa

SEQ ID NO: 555533 - DNA, 505 bp, Homo sapiens
cccaattaccctgtgacaagtttctattttcttttaaaaggatgatgtttcctcaccaggagatcttgttatagcagatggaggtaaattgcacrtacttctgtacttagtattattgtaaattcacattctaatcataccatgagatcagtaaactattacacttttataatgtttcatatataaaaatttttattgactgccattgtaatcgttataggacatactagttgactgggaatttaactacttttagtggttatgaatcttcaggcagtgactcactgagcttttatagaacataggttttgatgacattatgacttgactattaaacttgtatgtgagatttcatcattaaagtgttgatccaatatattcaacttctttttcattctatgtgtacattaagagccattctttatcacctagtttctacaaagcttttctgtgccaggtcttgcttctacttccttctgatatcaagatagaaatgcactgtcac

SEQ ID NO: 555534 - DNA, 505 bp, Homo sapiens
cccaattaccctgtgacaagtttctattttcttttaaaaggatgatgtttcctcaccaggagatcttgttatagcagatggaggtaaattgcacgtacttctgtacttagtattattgtaaattcacattctaatcataccatgagatcagtaaactattacacttttataatgtttcatatataaaaatttttattgactgccattgtaatcgttataggacatactagttgactgggaatttaactacttttagtggttatgaatcttcaggcagtgactcactgagcttttatagaacataggttttgatgacattatgacttgaytattaaacttgtatgtgagatttcatcattaaagtgttgatccaatatattcaacttctttttcattctatgtgtacattaagagccattctttatcacctagtttctacaaagcttttctgtgccaggtcttgcttctacttccttctgatatcaagatagaaatgcactgtcac

SEQ ID NO: 555535 - DNA, 450 bp, Homo sapiens
tcataacatagcaaccaaccttttagttttagctattattactattattgcagtccctaaaatttatataagaaaggtatgataagtttcagaagttgggtagcattcatctgcaaaaccgtctaacgtttttctttctgtgggtatgttttagctacttattcaatttctttaatgtcattaatctacttgattttatttttttcttcttgacttgcttttggcaagttatatttttctagcagtttgtccatttaagttttcttttctttttttcttttttagagacaggatctcactgtcttgctgagcctatagtgcaatggtgcaatcatagctcactgcagcctctaaatcttgggctcaagtgattctcctgcctcagcctcccgaatagctgagactacaggtgtgyaccactgtacctggctaatatttaaagtttttgta

SEQ ID NO: 555536 - DNA, 581 bp, Homo sapiens
attgtgattctttgaattatctctttatttcctcatcatcacttggtattttgtatttatttttaaatatattttcttcttcttttctttattagatttgctaatggtatatctattttattgttttcttctaagaactagstcttgaatttgtttgcttgtcatttttttaacatacattttaaaaacataacttttttatgttttaaaatgactaatttttgcttgtatatctacttactccttagctttgatttccttattttgtttattattgtgtatttaaaaaaatgtttggaagtttatataacttactattattctttctagtttaatagtgtatacattttaaagagaatgaaatacctaggaatacaacttacaagggatgtgaagtacctcttcaaggagaactacaaaccactactcaaggaaataagataggacacaaataaatggaaaaacataacatgctcatggataggaagaatcaatatcatgaaaatggccattctgcccaaagtaatttatagattcaatgctatccccatcaacctaccattgactttcttcacagaatc

SEQ ID NO: 555537 - DNA, 581 bp, Homo sapiens
attgtgattctttgaattatctctttatttcctcatcatcacttggtattttgtatttatttttaaatatattttcttcttcttttctttattagatttgctaatggtatatctattttattgttttcttctaagaactagctcttgaatttgtttgcttgtcatttttttaacatacattttaaaaacataacttttttatgttttaaaatgactaatttttgcttgtatatctacttactccttagctttgatttccttattttgtttattattgtgtatttaaaaaaatgtttggaagtttatataacttactattattctttctagtttaatagtgtatacattttaaagagaatgaaatacctaggaatacaacttacargggatgtgaagtacctcttcaaggagaactacaaaccactactcaaggaaataagataggacacaaataaatggaaaaacataacatgctcatggataggaagaatcaatatcatgaaaatggccattctgcccaaagtaatttatagattcaatgctatccccatcaacctaccattgactttcttcacagaatc

SEQ ID NO: 555538 - DNA, 581 bp, Homo sapiens
attgtgattctttgaattatctctttatttcctcatcatcacttggtattttgtatttatttttaaatatattttcttcttcttttctttattagatttgctaatggtatatctattttattgttttcttctaagaactagctcttgaatttgtttgcttgtcatttttttaacatacattttaaaaacataacttttttatgttttaaaatgactaatttttgcttgtatatctacttactccttagctttgatttccttattttgtttattattgtgtatttaaaaaaatgtttggaagtttatataacttactattattctttctagtttaatagtgtatacattttaaagagaatgaaatacctaggaatacaacttacaagggatgtgaagtacctcttcaaggagaactacaaaccactactcaaggaaataagataggacacaaataaatggaaaaacatawcatgctcatggataggaagaatcaatatcatgaaaatggccattctgcccaaagtaatttatagattcaatgctatccccatcaacctaccattgactttcttcacagaatc

SEQ ID NO: 555539 - DNA, 396 bp, Homo sapiens
aatgacaccaaccatccatactccacttttccatttcaaaagaatcttagaaaatagactggaagtgtagaatgttttaatctcaagactggataggtattaagtatacttttttattgttattgtattttatttagagatagggtctccctctgtcgctcaagttggagtgcagtygtacaatgatagctcattgaaacctcaaaagagggctcaagaaatcctcccacctcagcctcctgagtagcaagaactatgggtgcatgccactaaatctggccaattaaaatttgtgtgtgtgtgtgtgtgtgtgtgtgtgtgtgcgtgtgtgtgtgtggagttgtggtctcactgtgttgctcaggctgtttttgaactcctggcttcaagtgatcc

SEQ ID NO: 555540 - DNA, 501 bp, Homo sapiens
gagtgccatggtggaaaagtagaacaggataagggggatggggagtgctggggcctggcaatgtgttgattatattagaatgctcagggtgggtggacctcttggtggggatgatgtactggagcacctccactagcccttccaggtccattctcctgggatgatggtctataccggctgcaccatgagccctcttgttctgggcctctggcttcccattcggttgagccaatggatgacactggtagaactctgagtagcacactgaggtcagagtattaattctagcaaaagagagcttctgccctcaagctcctttcttcytaggccacaggttagcagtggttataatcctcactgaaggttacagctctttctgggttacaatagctgttccctccccctgggttcaaattaatgctccccactattgctaataccatgtgattccctacctcttcttggtttccattaagtcttcccatacctttgtaaaaagtc

SEQ ID NO: 555541 - DNA, 586 bp, Homo sapiens
aataaatctctgttcccttaaaaaaagaaaataaaagtgactctaccattttgcattcccttttattatataaagtttcgagtayttttttgtgtccaggtctcccagttgacactacttgaagcagaagaattgctcagttgagacaatcaacaaaaaagagaataaaatggtcattgttctaagcctgtaactgttggggtcatttgtatgtaacagtagataatcagaacagggtgtgagattggaggttggtgtattgtcagccagttgagttggcctcatgcagattgttaagggctttggcagacctgcgttatttcttcggtgcttgtgctttggggagtactagggttcttcaatttggatcacatcagtccaaaagcagtagacttttctagtgatcagaataattgctgcatgtcacaaaagaacatgaacccagactcagaaaagaaacacaggaaaccttcaacaacaaggatcttcacattggggcaaaggttacattttttggctcgcactttctaagtctcctaataatactgatatcacttgttttggggtgtgtgttgttactgtgatg

SEQ ID NO: 555542 - DNA, 586 bp, Homo sapiens
aataaatctctgttcccttaaaaaaagaaaataaaagtgactctaccattttgcattcccttttattatataaagtttcgagtacttttttgtgtccaggtctcccagttgacactacttgaagcagaagaattgctcagttgagacaatcaacaaaaaagagaataaaatggtcattgttctaagcctgtaamtgttggggtcatttgtatgtaacagtagataatcagaacagggtgtgagattggaggttggtgtattgtcagccagttgagttggcctcatgcagattgttaagggctttggcagacctgcgttatttcttcggtgcttgtgctttggggagtactagggttcttcaatttggatcacatcagtccaaaagcagtagacttttctagtgatcagaataattgctgcatgtcacaaaagaacatgaacccagactcagaaaagaaacacaggaaaccttcaacaacaaggatcttcacattggggcaaaggttacattttttggctcgcactttctaagtctcctaataatactgatatcacttgttttggggtgtgtgttgttactgtgatg

SEQ ID NO: 555543 - DNA, 611 bp, Homo sapiens
tatttccctgtgtcaaatattttgtttgaaattgtgtgctttttgaaaaactatgtcttactctttgttcacaccaccaattcctaatacagctacctatctatctatctatctatctatctatctatctatcatctatctatctatctctggtgaataaatgaattagtgacaaacatttacatgttataagtaaagttttggtgccgcaaaagaaatagcactcgaatataaaattttctttttaattctcagcaaggcaatgtacttctatagaagggtgtgcccttacagatggagcaatggtgagtgcacacttggacaagggaggggaaggggtttttaatccctgatgcacgtggcccctgctgctgtgtcattcccctattggctagggttagaccgcacaggctaaactaactccgacaggctaatttaaagagagtgatggggtgagtggtttgggaggaaaattggttatggcagagyaggaaattggaatgagtcagggtggagaatgagcaggtaatcggaatgagtcagggtggagcaggtaattggaatgagccagggtggagtaggtaatcgaaaaagattgctttacgagaaag

SEQ ID NO: 555544 - DNA, 557 bp, Homo sapiens
tcacacacacaactttaaatgattaactactacaagctagggccccttaggggcttctaaatacgggatctcatttaatgctcacaaagttgctagactgatccacgctcagaaggatgacgaatttgggacttatccaactggcgcatggtggagtcaggtttattcgctcatccatttgacagggctcaacgcaggctatgctaagacacggcaccttggcatactgagtattttaagatgaargaatttgagagaactgcagaagcaggaaggtctctctggcttactctctcctttctcttctgaaacaggttgtaaaatctcaaaagaatttctggtcttctacgcacagcaggtcataaaacctcatgggagaaatgccctccctatacccagaggaaaggaatgtctgcctcaccgggaacagaaagaagcagcagaacaaacaggccttgctaagttctcccaattttattaccattaaatcatacttattttttctccagtggatatttctccattacagtttacctcttcatcaaacctaagcataa

SEQ ID NO: 555545 - DNA, 559 bp, Homo sapiens
attctcctgcctcagcctccaagtagctgggattacaggcgtgagccaccacagccagctaattttcatatttttagtacagatggggtttcaccatgttggccaggctagtctcaaacttctgacctcaagtgatctgcccacctcagcatcccaaatgctaggattacaggcttaagccactgcacccagcctggttttagctttcaataaggtggtctgagaaagactcgttgaaaaaataactgcaaaggcttgacagaggtgagggaattastcgtggatatttccagcaagagtgttccaggcaccactgctatggcagaagtatgtctaacatattctagaagcaataaggatgccagtatgtctagggcaggatgagaaaaccgagcaagaggaagaaaagaaggaaaaaaattcaacaagaatgtaggaggttacatcatatagatgcttttcagcctttgaatgattttcgcaaaggggaaaagcaatctgatttttgttatagaaagatccctctttctgctgtgttgagaatagactgttaggtata

SEQ ID NO: 555546 - DNA, 603 bp, Homo sapiens
ccatcatctcaaacatttatcatttccttgtcttgggaacattcaggatcctacttctagctccttaaactgtttattatattatggttaactttagtcatcctaccactgtagtataactaaaacatttcttctacctacctgtaattttgtatcctttaacaaacgtctccctaactttcatttatccttgcccttctcagcctctagtattgtctatttttagctctatgagatagacttctttttagtttccgcatgagtgagaatatgcagtttttaactttctgttcttcgcttatatcacttaacataatgttctctagttccatccatgttgctatgaatgacagaatttcattttttaatggctgaataatatttcattgtataaatatacaccgttttttttttttttacccatttatctgttgttggacacataggttgatttcatatcttgrctattgtgaatagtgctgcaataaacatgtgggtgcagatgttactttgatatattgatttcctttcctttgtataaattcccaggagtggaattcctggatcctatggtagtgtattttggggaacctcccaaaatac

SEQ ID NO: 555547 - DNA, 658 bp, Homo sapiens
ttaagaatattaggatttttttccatgctgagctaagaaaactctcggatcccagttttagtttgcagattttttgttattgtccaactttaggatcatccagtatcaaacccacagactacagtttgatcaaaagtagctcatgtaggagctgagcccaggaagcactaatggggcagagggaaagtgagaccaggaggggaaggaagtgaatgaagtgtgtatttccaccatgggcaacagaagcttgatgccgctggggaatctggagagcatgagaaacacctcagagtaatcttcacctcatccacccatggctgggatgttttggggctctaacttkctttctttttcttttctttttctttctttctttctttctttctttctttttttttttttttttttgagacagggtctcgctctgttacccaagctggagtgcagtggcgcaatctcggctcactggaacctccacttcctgggttcaagtgattctcctacctcagcctctccagtagctgggacaggtgcccgccaccatgccctgctaatttttgtatttttagtaaagacggggttttgccatgtttgccaggctggtctcggactcctgacctcaggtgatccacccacctcggcctcccaaagtgctggg

SEQ ID NO: 555548 - DNA, 658 bp, Homo sapiens
ttaagaatattaggatttttttccatgctgagctaagaaaactctcggatcccagttttagtttgcagattttttgttattgtccaactttaggatcatccagtatcaaacccacagactacagtttgatcaaaagtagctcatgtaggagctgagcccaggaagcactaatggggcagagggaaagtgagaccaggaggggaaggaagtgaatgaagtgtgtatttccaccatgggcaacagaagcttgatgccgctggggaatctggagagcatgagaaacacctcagagtaatcttcacctcatccacccatggctgggatgttttggggctctaacttgctttctttttcttttctttttctttctttctttctttctttctttctttttttttttttttttttgagacagggtctcgctctgttacccaagctggagtgcagtggcgcaatctcggctcactggaacctccacttcctgggttcaagtgattctcctacctcagcctctccagtagctgggacaggtgcccgccaccatgccctgctaatttttgtatttttagtmaagacggggttttgccatgtttgccaggctggtctcggactcctgacctcaggtgatccacccacctcggcctcccaaagtgctggg

SEQ ID NO: 555549 - DNA, 580 bp, Homo sapiens
ggtgcccgccatcacacctggctaacttttttatttttagtagagacggggtttcaccatcttggccaggctggtcttgaactcctgacctcgtgatccacctgcctcggcctcccaaagtattgggattacaggcrtgagccactgtgcccggccaattggggtctccctctttcacccagactggacgggatttcgccatgttgcccaggctggtcttgaactcatgggctcaagcaatctacctgccttggccccctaaagtactgagattacaggtgtgagacactaagcccagccaaatacaagtaattttcgtattttgatttggtatcctgaaactttgctaaatttgcttatttccggtagctgttctgtgaattccactgaattttatacatagaagagcatgtcatctgtgaataaagacagtttatcattttctttcattctaggagcctattatttcttttttttttgtcttattgcactggttagagcctccagcataatgctgtgtagaagtggtgagagtagacatctttgctttattttttatcagagatggggaaagcagtca

SEQ ID NO: 555550 - DNA, 580 bp, Homo sapiens
ggtgcccgccatcacacctggctaacttttttatttttagtagagacggggtttcaccatcttggccaggctggtcttgaactcctgacctcgtgatccacctgcctcggcctcccaaagtattgggattacaggcatgagccactgtgcccggccaattggggtctccctctttcacccagactggacgggatttcgccatgttgcccaggctggtcttgaactcatgggctcaagcaatctacctgccttggccccctaaagtactgagattacaggtgtgagacactaagcccagccaaatacaagtaattttcgtattttgatttggtatcctgaaactttgctaaatttgcttatttccrgtagctgttctgtgaattccactgaattttatacatagaagagcatgtcatctgtgaataaagacagtttatcattttctttcattctaggagcctattatttcttttttttttgtcttattgcactggttagagcctccagcataatgctgtgtagaagtggtgagagtagacatctttgctttattttttatcagagatggggaaagcagtca

SEQ ID NO: 555551 - DNA, 338 bp, Homo sapiens
tcctcttcttttttttagagacagggtctttcagtctgtcacccaggctggagtgcagtggctcaatcatagctcactgtaacctccaattcctgggctccaatgatccttctgcctcagcctcctaagtagctagaactacaggcacatatcaccatgcacaactaatttcttgaaaaatttttgtagcccaggagttccagaccagcctggtcaacrtggcaagatcccatctctacactatattgcccaggctggtctcaaactcctgggctcaagcaatcctcctgcctcagcctcctgcatagctgggactacacatttgcatcactgtactc

SEQ ID NO: 555552 - DNA, 498 bp, Homo sapiens
atggttgggttctggtgagggccctcttcaggtttcagacagccaacttctcattgcatccttacatggcagaaacaggactagggaactccttggggtctcttttataagggcagtaatcccatttatgagggctccaccctcatgacctaatgaccttccaaaagctccacctcctaataccatgacatggtgggttaggatttcaacatatgaattttgaggagacagaaacattccatctataamagcatacaatgcccattcatgaattccacatctgtgaatctctgggctaaatataggataaatccagacaatggataaagtggttaaaatgatgaactccatcttctatgttttgaagtagaaattgagccctattactgaaagggtttaaggagtagaccatagaataggaccatataagtagtataatactgtttttattaaatatttatattgtgcatatacagcaaaacaattttattgagtact

SEQ ID NO: 555553 - DNA, 606 bp, Homo sapiens
gtgatcacaccactgcactccagcctgggtgacagagtgagaccgtgcctcaaaaatagtaataataatacttcagtgtttttataaaaatagagaattgaacatgattctatcaggattccttctaatttgaaattctggctggatgcagtgactctcatctgtaatcccattgctttgggaggccatggcagacagatcacttgagcctagcagttcaagaccagcctggagaatatggcaaaactcatctctacaaaaaatacaaaaattagtgggtgtggtggtacacacctgtagtcccagctactagggaggctgaggtgggaggattgcctgagctgggagattgagactgcagtggctgacattgtgccactgcactccagcctgggtgacaaagcaagaccctgtctcaaaaaaaattctatatttgtgggtcaccaaaaataaktttgactaaaatattttattcaatggctctaaaggtcaaaagtgcttgaaaggattatttacctcagatacaagataggaagtgttgaagtattcaagaaaccaatttgtaaaatgagccaatgatctagaagtactctatccacagttggg

SEQ ID NO: 555554 - DNA, 594 bp, Homo sapiens
aaacaaaatctcagaaatcttccctttattttcacctgttctaataccattcacgggccaaggcaatccatctaattaagtatgcttgcataggcaggtgttcccactagagaaataaaaatcaatggaagattgtggtaattttcacagccaacagtgttggcccacattattggaccattatatacttggtttgctgtctgtttatctgttggttacttttttttaaaaaaaatgatatcatcaagtaatcttcagggcataaaaaggagcttcattcaactcctcagtaataacagtcattactgtactctctaaaaacaattggctagttacrtgcagcttctaaagagttccctaatccagaaaactgcaaattacatagtaatgattattgaggtactgtggtaactccagtcatcatttcaatgtaattgatagagcatgaataactataaattatgtcatatatacaacctctttacagggaactcacacagttatttgtggtatgcataataaagcaaaatctaaattgaatgttaattttaataaaaatcacttttatacctcatttccatctgaatggatacc

SEQ ID NO: 555555 - DNA, 464 bp, Homo sapiens
ttactgccggccaacactcgataaaggaaaarccgaaaaagaaaaacctcaaaaacactcaaccatttaaaatgtctaaagcctatcatccatttaaaaattgatagacatacaaagaagtagtcctagaaacatgaaaaaaaataagtcaatgtaaacagatccaggcatgatggagatggtacattggcaaatgatgatgttaaatatgcccaatatgctcagaaatttgaaagaaaaatgttaatgtaacaaagaaagatagaaataaaagatgtaaaaaaaacaaaatttgtagaaataaaatataaattatgtaaaattaaaattttactggataggatttgcagcaattttacactacaaaaaaaatcaataaaattggaaacataataatagaaactatccaaaaattaaatacacagaatagaaagattgaagaaaagagaaattttttaaagaaa

SEQ ID NO: 555556 - DNA, 423 bp, Homo sapiens
tttgaaaatctaacaatgttaattgtgttctgtaaggaggtcatgargttggggatagaatgctcggttaccttttgagttttcctttctgccgtcttttgagaaccaaacatcattagaagttccaataatcacagtacaagcagtactttcgtggcagtccttcagcaacctccttgaagggaaatgtctagtccttatttataataacataataatgtgattttgaaagagacagcatgattgtggattttgttttgactaaaaaaaaaaaaatagaccctgcatttttgttttttaaggaagagaatagaaagttgttggatgctgtttagataagaagtagtagagagaatatcctcattaatgcatcttgtcttctgagatgcagggtaataccccctgcgtgctggcaccaactcg

SEQ ID NO: 555557 - DNA, 569 bp, Homo sapiens
atatctgcccccaacacctattcattcatttacattacacttttgaacggcttacaatagacatgtaattttggcagggtgatgcttttcatataaatatagattagttccatattgagatcagaagaaatagggttctatggtaaaagctacagtcgtgagcaactggagagcactgaatatcaaggraagtcttactgcatttccctcaaatgtgatctttttagagatattcttctttgatctctaaagctatcaaagctggcctgtttttactgatttccacagatccctttacctagctccatcttagacactctagtcattgatcccttcgtttcgtctattctagttaattagccaactaggtagcccatttgtgctgcagagaagtcaatgcatatccatatcacaggtacttctccatataaagtctgtggccaattgttgtatactacctgtatctttgcccattgggagggcttcaggctcacccaagcggtggctgccatgcagtagcaatctatttctagcaagcaccaatatgtcttgctgacacaccagtgaac

SEQ ID NO: 555558 - DNA, 564 bp, Homo sapiens
ccatatcacatttaaacatcatacttccttaagttcttcttgactgtgacaatttctcaggctttgtttttgatgaccgtgacagwtttgaggagtactggtgggatattccacagaaagtctcttttgggatttgtccaaaattcttctcatgattagattggggttatgggtttaggggaggaaaactacagaggaaaaatgctatttttcagtacatcatatcatggataggtactatcaacatgacatcactgtggttgatcttgatcacctggatgaggtgttgtgtgcagcgacactaaagaataatgtgttatgctccgtatctttgaaagtggagatttacataaattatttggaattcttctgcacggaggagttgtctattctccgtcatttatttaatgaatccttacttatatcagtagggcttgtggatatttatcttatatttaaagttatcatccaacactttatttatttatttgtttattgtcaaattgtttcaactctggctacttagagctctttcagttgtattcctttggcattctttctttc

SEQ ID NO: 555559 - DNA, 547 bp, Homo sapiens
gaagggactgaggtcctatttttagcctccttcaacaaaacaattatcggccaagaatcttgtatccagtgaaactaagcttcataagtgaaggaaagatacagtcttttccaaacaaacaaatgctgagagaattcsccactaccaaaccagcactacaagaactgctaaaaggagctctaaatcttgaaacaaatcctcaaaaaaaaaagaaaaaaatagaacctccttaaagcatatatctcagaggaccttaaagcataaatctcacaatacatacatgttgtgtatataacaataatacaatgaagaaaacacaaagtattcaggcaacaaatagcacaatgaatagaacagtacctcacatctcaatactagcattgaatgtaaatggcctcagtgcttcacttaaaaggtacagaacggcagaaatgataagaattcaccaaccaagtttctgctgccttcaagagactcacctaacacataaggactcacataaatttcaggtaaagggtaaaggttaaaagatattccatgcaaatgg

SEQ ID NO: 555560 - DNA, 547 bp, Homo sapiens
gaagggactgaggtcctatttttagcctccttcaacaaaacaattatcggccaagaatcttgtatccagtgaaactaagcttcataagtgaaggaaagatacagtcttttccaaacaaacaaatgctgagagaattcgccactaccaaaccagcactacaagaactgctaaaaggagctctaaatcttgaaacaaatcctcaaaaaaaaaagaaaaaaatagaacctccttaaagcatatatctcagaggaccttaaagcataaatctcacaatacatacatgttgtgtatataacaataatacaatgaagaaaacacaaagtattcaggcaacaaatagcacaatgaatagaacagtacctcacatctcaatactagcattgaatgtaaatggcctcagtgcttcacttaaaaggtacagaacggcagaaakgataagaattcaccaaccaagtttctgctgccttcaagagactcacctaacacataaggactcacataaatttcaggtaaagggtaaaggttaaaagatattccatgcaaatgg

SEQ ID NO: 555561 - DNA, 547 bp, Homo sapiens
gaagggactgaggtcctatttttagcctccttcaacaaaacaattatcggccaagaatcttgtatccagtgaaactaagcttcataagtgaaggaaagatacagtcttttccaaacaaacaaatgctgagagaattcgccactaccaaaccagcactacaagaactgctaaaaggagctctaaatcttgaaacaaatcctcaaaaaaaaaagaaaaaaatagaacctccttaaagcatatatctcagaggaccttaaagcataaatctcacaatacatacatgttgtgtatataacaataatacaatgaagaaaacacaaagtattcaggcaacaaatagcacaatgaatagaacagtacctcacatctcaatactagcattgaatgtaaatggcctcagtgcttcacttaaaaggtacagaacggcagaaatgataagaattcaccaaccaagtttctgctgccttcaagagactcacytaacacataaggactcacataaatttcaggtaaagggtaaaggttaaaagatattccatgcaaatgg

SEQ ID NO: 555562 - DNA, 582 bp, Homo sapiens
acaaaaagtcaaaaattagcagggatggtagtgcgcatctgtagtcccagctactcaggaggctgaggcaggaggatcgcttgagcccaggaggttgaagctgcagtgtgcagtgatcacaccactttactcagcctagacaacagactgacaccttgtctcaaaaaaaagaaaaaaacaaaaaaagaaaagaaagaaaagaaaaatgggtactatatctcaggatactcatgaattttgctttctaatagaggaagaactaaaagaaaaaaagatacacttttttttccccacaatatacctaaggaatcaaataaaaatttgttttcaggcatacaaaattagagcttatcaacataccagggactctcctgtgagtgacttggcaagaatggtggatacaggttggagcttccctttcagctgcatgcagcaaagcactgcccgaaaggcatcttctcccttggccagtccttctcccagcactgccatgaaagaacagccatcattaaccatatgacatttaatgcacatttttcttgattatagtatyaacacactatcacaagcgtggctttttat

SEQ ID NO: 555563 - DNA, 592 bp, Homo sapiens
ccatcccactgagatgtcacttaaaaaatattaagttccaggatacatgtgcaggatgtgtaggtttgttacatagggaaatgtgtgccatggtggtttgctgcacctatcaacccatcaccttaggtattaagttctacatgcattagggatttatcctgatgctctccctccccccacccccaacagatcctagtgtctattgttccctttctcgtgtccacgtgttttcattgttcagctctcactcatgagtgacatcatgcgttgtttggttttytgttcctgtgttagttagatgagaataatggcttccagttgcatccaagtctctgcaaaggacatgatcttgttcctttatatggccacatagtattccatggcgtatatgtaccttttccatgaatctttctgtaaccacgcagacctacctgccccatttgtttctaccccaaatgtatcgttttccaaattgcctcagaatgtgcctgtttactgtccacttctccctatatactgtgaaaattttgagaatagaaaccttgccttattcatctttatgttcctattcctctcacgaaccttggccact

SEQ ID NO: 555564 - DNA, 583 bp, Homo sapiens
gaaatgatgtgagttttgaaaagtgaggaaattcctttcccaaagggatattgggctttcactgtcctctatttcagtcagttctgaaaatgtacatgccattgggttttgccagtcctgttggctggcttctgctgagagggaaggaaaagaatgagacagtgaaggaaagtgagctaaacttagtgggaaggcccaaggctccaggcagtggctgaargcagtttcctaattacttagcctccctgggagataggaataaagttttcccaaaaacaggataagagaactgggaggagcgatgtattgcaacgtgtgcaagcttcctctattcactccttctccttgttgagatctgcagaaagcttaatcggtggcatttaatagcatttattgagcaccaactgtgagccatactccacattagaccctgggatacagaaagttgtaggacatagcccctgctctcaagaatcaccatttattggggggaaaacctacacataagcaattatcaaaatatgttgtcatatgtcatgtgatggacttatatgaactagtgttggcatctttgaacaccaca

SEQ ID NO: 555565 - DNA, 583 bp, Homo sapiens
gaaatgatgtgagttttgaaaagtgaggaaattcctttcccaaagggatattgggctttcactgtcctctatttcagtcagttctgaaaatgtacatgccattgggttttgccagtcctgttggctggcttctgctgagagggaaggaaaagaatgagacagtgaaggaaagtgagctaaacttagtgggaaggcccaaggctccaggcagtggctgaaggcagtttcctaattacttagcctccctgggagataggaataaagttttcccaaaaacaggataagagaactgggaggagcgatgtattgcaacgtgtgcaagcttcctcyattcactccttctccttgttgagatctgcagaaagcttaatcggtggcatttaatagcatttattgagcaccaactgtgagccatactccacattagaccctgggatacagaaagttgtaggacatagcccctgctctcaagaatcaccatttattggggggaaaacctacacataagcaattatcaaaatatgttgtcatatgtcatgtgatggacttatatgaactagtgttggcatctttgaacaccaca

SEQ ID NO: 555566 - DNA, 583 bp, Homo sapiens
gaaatgatgtgagttttgaaaagtgaggaaattcctttcccaaagggatattgggctttcactgtcctctatttcagtcagttctgaaaatgtacatgccattgggttttgccagtcctgttggctggcttctgctgagagggaaggaaaagaatgagacagtgaaggaaagtgagctaaacttagtgggaaggcccaaggctccaggcagtggctgaaggcagtttcctaattacttagcctccctgggagataggaataaagttttcccaaaaacaggataagagaactgggaggagcgatgtattgcaacgtgtgcaagcttcctctattcactccttctcctygttgagatctgcagaaagcttaatcggtggcatttaatagcatttattgagcaccaactgtgagccatactccacattagaccctgggatacagaaagttgtaggacatagcccctgctctcaagaatcaccatttattggggggaaaacctacacataagcaattatcaaaatatgttgtcatatgtcatgtgatggacttatatgaactagtgttggcatctttgaacaccaca

SEQ ID NO: 555567 - DNA, 410 bp, Homo sapiens
tcatttaggcagccatttttttgggctcrtcttttaaagaaaaaagcccactgaaagttaaatgaatctcaagcccaaactgcttcctttaattttcctttgtgtcagataagctatataattattgataactatgagtgtccaaatatttgtttaaagagcaatttaatgtctctgatttatattcatgagttattaagtagctgcatatttcctgtgtatttttttctgaatacatgattaatcgaagtttaatgaaattttaaaagacatttttccaattttgtctggaatgctgtcttctctccagaaattacaattatccactgtggaacaactttgtaaaaaggatagaaaggggaggttttgggcttctgaccttcctcttttaaatacatctatatgatcca

SEQ ID NO: 555568 - DNA, 410 bp, Homo sapiens
tcatttaggcagccatttttttgggctcgtcttttaaagaaaaaagcccactgaaagttaaatgaatctcaagcccaaactgcttcctttaattttcctttgtgtcagataagctatataattattgataactatgagtgtccaaatatttgtttaaagagcaatttaatgtctctgatttatattcatgagttattaagtagctgcatatttcctgtgtatttttttctgaatacatgattaatcgaagtttaatgaaattttaaaagacatttttcyaattttgtctggaatgctgtcttctctccagaaattacaattatccactgtggaacaactttgtaaaaaggatagaaaggggaggttttgggcttctgaccttcctcttttaaatacatctatatgatcca

SEQ ID NO: 555569 - DNA, 621 bp, Homo sapiens
tcagtactattggtacaatatttacatcaaaaacttttaagcatttacatacatataaccaggtaaaaattacaatgaaaaaagaaacatcatttttaacaagtaacaagaaaaaatatatgatacttagaactttacccaatgactttaggaaaaataaggctttactgaagagctcgagtatatagagctctaagtaatattcatgcatgtgaagccttaatatgtacaatatatcagctctccagatatattcacagatttgatgcactttcatctaaaaatctgaagggtttttatttggtggaggttgcttgacaaaatgatatttaaaatatgaaagaaaaaaacaattagtagcatttacattttgatctaaaacttgggaagataggacttatttctgctagatatcaagacatgttctaattgtattttaattaacagagtgtggtatttgcataatagaatataacagagcacccagaaagagacccagtaatatatggaagtttagtacacagtagatgttgtayaccattccataaattatgtaagagcattgactatttatataatccatacattcatcctcaccttatgccatataccagaataaat

SEQ ID NO: 555570 - DNA, 558 bp, Homo sapiens
tcatatagcatctaggatgagctttctaaaatgtatacctggtatcatgattattttcctgcttaaaactcttcaatgggttcacataatttyctttatgataaaattaaagctccctggcatgaataatgagatctttttttatatggcctttttaatgccttttcagcctcaatgcttgccgtttatctccaaattatctttatgcaccaaaaaaggaactgtctagtagccatgtgtggatactaacatgcgatgataatataaaagaatgaagaaaggtcatattaaatggggacaggcctttcattagaggtcctgatattatggcttaaggtaataggcagagaaaatgatgacaggacctagaggaatggaacaagatctagagcagtggttctcaacctttattatgtatcaaaatcatctgatttttgactgtgagtttttgactcagaatttaaattttccataagttcccaggtggtgctaacgcactacaatttgagaaccactgatctagaataatatgcagagaaacactggaggaagattttc

SEQ ID NO: 555571 - DNA, 490 bp, Homo sapiens
ctcagcagcctcaaagatcaaagatagataaacccatgaagatgagaaagaattaatgcaaaaacactgaaaactcaaaaagccagagtacctcttctcctttaagtgatcacaacacatccctagcaagggaacagaactgagcagaggttgagatggatgaacttcagaagaagggtaataacgaactttgctaagctaaaggaatayattctaactcatcacaaagaagctaagaaccatgataaaacattacaggagttgttaaacagaataacaaatttagagaggaacataaataacatgatggagctgaaaaacacaacatgaaaacttcaaaatgcaaacacaagtagcaatagccgaacagaccaagcagaagagatatcagagcctgaagactatctttctgaaataaggcaggcaaacaacattagagaaaaaagaatgaaggaatgaacaaaacctctgagaactatgggattatgtt

SEQ ID NO: 555572 - DNA, 644 bp, Homo sapiens
aatattccatgtgcacttgaaagaatgagccactgaccatatcttttctcacacagaagaatatgtattttgttattgttcggtggagtgttctatagatatctgatatggtttgactgtgtcaccacccaaatctcatctggaatgttagctcccataaatcccacatgttgtgggagggaacttgtgggagataattgaaacataggggcagtttctctcatactgttctcggggagtaagtagtgatgaataagtctcaagagatctgatggtttataaggggtttcccttttcccttggctctcattctctcttttctgatgtcaggtaacacttcccttgctattccaccatgaccgtgaggcctccccagctacatggaactgtgagtccattaaacctctttttctttataaatcatccagtcttgagtatttctttatcagcaacatgaaaatggactaatagagtaaattggtaccgggagtggggmgctgctgtaaagatacctgaaaatgtggatgtggctttggaatgagataacaggcagaggttggaacagtttggagggctcagaagaagacaggaaaatgtgggaaagtttggaacttcctagagacttgttgaatggcttttaccaa

SEQ ID NO: 555573 - DNA, 407 bp, Homo sapiens
tgatgttttatatgaatacaaaactttatatatatatatagttatgatcacacatgtttagttaatgtattaggcaccctgaatagaagaattttcataataagattgataagatatattctgcatcaatcctacattctttgttaaatagaaccacacaaaattcaacaatgacacccctctggaatcttgggacccccagaagccctgtagctgaatggcaaacagaatgaggctggtaatgagttgcattgggtgaagtccctgccccaatatttactaaaaataaaatgttcaaaggtgtctcagccttcttaagcttcatttcctttataagataaagaaataataaaaataacattacctatctcagagtgttakttagagaaaaacagaattataaatgt

SEQ ID NO: 555574 - DNA, 609 bp, Homo sapiens
ttttatgttacctctcataattagcatctaatgcacaacttttctcttatattttaatgttgatagcttcttccttgtgattcttcagaagcagatgaaatggaaaggctcaagtgtgaaagagatgatgccttgaaagaagtaaatacacttaaggtaacctctaatttagtttccttatgttttcttcagaaaaaaaagaaaaagaaaaaaatcctatattggattctgaagcattggggcttaattttatttttaatggaaaaatattaatatcaaatagtaaaaatcagattctttattcagttggcctttagagaattartttttggtctacatatttatatttcacaatatctgtgcaacatttagtgtgaacaatggtttttgctcatgtcttctgttgaggtttcttcttatcctttttattctctctcattagtggccagggcagaattagatgaagagccaataaagcaagtcgtggcaattttggatcctgtgagttctttgggaaatacattttttttcatgtgcagggctattcttaagggacatcatgttttgctaacgtaatttggaattaatattattttagagaggaaaaaa

SEQ ID NO: 555575 - DNA, 591 bp, Homo sapiens
aactcaattcagtggcaggcatgcrgggttctgagcccagctcttctggtagaagactgtgttccttctggtgtatcctgtcgtacctgaactcagcccacaaccataacaccaatcacacaccctctgcctcattctttaccaattcaatattaaaaagaagaaaagaaggaataaatttaaaaatcattcactcattgtccacacctgggatttgtgctacttacaacctggacagcccaggtcattatattcaattgacagttttattgcttctatggaaaaaacaaaaaccactgtcctagatactctgttaagatacacagataaataagaaatgttacttatcttcaaaatcttgatgtctagttgtggacacaagactaatttgagaaaaagattaaaaatctaaatacagtttaaaattttattttaaaaaataaaaatttaggtagacagattgatccatagataccacagagaggtaaaagagcttgagacaaaataaatgaaatggtgaccttatatgatttgtgataaaatcccacactaactatacagaggaaaaatggagaaagggttgaatggcaa

SEQ ID NO: 555576 - DNA, 591 bp, Homo sapiens
aactcaattcagtggcaggcatgcggggttctgagcccagctcttctggtagaagactgtgttccttctggtgtwtcctgtcgtacctgaactcagcccacaaccataacaccaatcacacaccctctgcctcattctttaccaattcaatattaaaaagaagaaaagaaggaataaatttaaaaatcattcactcattgtccacacctgggatttgtgctacttacaacctggacagcccaggtcattatattcaattgacagttttattgcttctatggaaaaaacaaaaaccactgtcctagatactctgttaagatacacagataaataagaaatgttacttatcttcaaaatcttgatgtctagttgtggacacaagactaatttgagaaaaagattaaaaatctaaatacagtttaaaattttattttaaaaaataaaaatttaggtagacagattgatccatagataccacagagaggtaaaagagcttgagacaaaataaatgaaatggtgaccttatatgatttgtgataaaatcccacactaactatacagaggaaaaatggagaaagggttgaatggcaa

SEQ ID NO: 555577 - DNA, 550 bp, Homo sapiens
tgcctctaatcccagcactttgggaggccgaggtgagtggatcacctgaggtcaggagttcaagaccagcctggccaacatggtgaaaccccatctctactaaaaatacaaaattagctgagcatggtggtgcatacctgtagtgccagcyttcaggaggctgagataggagaatcgcctgaacctgggaggtgaaggttgcagtgagctgagactgtggcattgcactccagcctgggtgataagagtgaaactccatctcaaaaaattaaataaataaaatttaaaaaaaataaataaaaaatggtggctcatgcctgtattcccagcactttgggaggccaaggtggaaggactgcttgggcccaggagtttcagaccagcctggacaacaaagtaagacccaatccttacaaaatattttttaaaaaaattaactaggcgtggtggtgcacaactttggtcccagctatttgggaggctaaggcagaaggatcacttgagcctgggaagttgaggctgcagtgagccaagattgcaccactgcact

SEQ ID NO: 555578 - DNA, 550 bp, Homo sapiens
tgcctctaatcccagcactttgggaggccgaggtgagtggatcacctgaggtcaggagttcaagaccagcctggccaacatggtgaaaccccatctctactaaaaatacaaaattagctgagcatggtggtgcatacctgtagtgccagccttcaggaggctgagataggagaatcgcytgaacctgggaggtgaaggttgcagtgagctgagactgtggcattgcactccagcctgggtgataagagtgaaactccatctcaaaaaattaaataaataaaatttaaaaaaaataaataaaaaatggtggctcatgcctgtattcccagcactttgggaggccaaggtggaaggactgcttgggcccaggagtttcagaccagcctggacaacaaagtaagacccaatccttacaaaatattttttaaaaaaattaactaggcgtggtggtgcacaactttggtcccagctatttgggaggctaaggcagaaggatcacttgagcctgggaagttgaggctgcagtgagccaagattgcaccactgcact

SEQ ID NO: 555579 - DNA, 503 bp, Homo sapiens
gtctacactgccctttgtcttgatttgttttaaagttatcttctcagtatccatagtctacctgtttggaaagaatcccacatcttataaacattggtggaagaaaggcattcaacccgctgtgaaaggtaaaagagcaagatagtccctyttccagttattggcaatgggccgccatctggatctggagttttgcaggagcgaatcaaagatgcacaacagctgagaaccacgttgagcgtccagcaggaggtgtgagatccagcagcaccacctgggagagtctggcaggtgggctgccccaaccacgttgttccctgggatgaacttggctgtgtttctcactgttatttaatagatttcctttggtccagccccagctttcaactctccgtgagtcaatatattgtttctaatacatttcttttcttctcaagttagctaccgcccatttctgttgcttgcaaccatggataccagctgatacacccttttttaaggca

SEQ ID NO: 555580 - DNA, 634 bp, Homo sapiens
ttttattttcctctggagacatttatcttacagctttctgtctcctggaggctgaattagttgctgtcaaggcctcctgggactctccttcacctgcttcctggatctcatgccttcctctttcttgattcattcccttgttctggtggactcttaactctaggaacgtcctaagaaagcatacacggggtagattttataagttctaacatgtttgaaartctgtattctgccctcatacaggttgatggtttgacttgtttagattgaaaattattttctttcagacttttgaaggcattgctttgttgttttctggcttctaaatttgctgttgagaagtctgttgccattctgattcttagtcctttgcatatgaccagtatttgctaacttgaaatttttaggatcttccccccttatcttcagtgttctgacatttcacaatgaatacttgtgccttcagttcagagctgtgtgcttgaagtattcctgtgttcatttctttccctccattttttcttttcttggtttctggaactcctgccctttagatattagactcctgaactgatcctctaattttcttatgtttttctcatattttttctgggtgtgtgtggggtgggggagg

SEQ ID NO: 555581 - DNA, 397 bp, Homo sapiens
tggttccttttctaaattttggctctttattgatattckctatccgttcatacattgtccttttggtttcctttagttcattgggcctactccttccaggatttgctgttgttgattgcggatggctatagccatccatttgtttaatgacttttcctattttttgcaaagactatttcttgttgtgtgtggccactaaactctctgttcttttatatcagtggttatccagttaactgtcagaaatttccttaaatacctggctggacacattggttcatgcctgtaatcccaacactttgggaggctgaggtgggcagatcacttgaggccaggagttcaagaccagcctggccaacatgatgaaaccccatctctactaaaaatacaaaaatta

SEQ ID NO: 555582 - DNA, 582 bp, Homo sapiens
acaaagaaaggctctggatcacatggcttcactggtgaattctactaaacatgtaaagaattaacaccaatcagttgattcctgggcaagatggccgaataggaacagttccagtctgcagctccccatgagatcaaggcagaaggcaggtgatttctgcatttctaactgaggtacccagctcatttcactgggactggttagacagtgggtacagcccacggaggacgagtaggagcagggtgsagggtcacctcacttgggaagctcaaggggtcggggaactccctcccctagccaagggaagccatgagggaacggcgcattctggcccagatactacacttttcccatggtcttcacaacccgcagaccaggagattccctcgggtgcctacaccaccagggacctgggtttcaagcataaaactggcggccatttgggcagacaccgagctacctgcagaagttttttttcataccctagtggtgcctggaacgccagcgagacagaactgttcattcccctggaaagggggctgaaaccagggagccaagtggtgtagttcagcagatcccacc

SEQ ID NO: 555583 - DNA, 426 bp, Homo sapiens
agtggaaagaaataaataacaaagattgtagcagaaataaatgaaatgagacaaaaatacaaaagatcaacaaaacaagaatttttttgaaaggacaaacaaaattgagaaatcattagctatattaaccaagaaaaaggagaaaatacccaaatatgtaaaatcagaaacaaaaaaggagacaycacaacagataccatggaaatacaaaggatcattagaaactactatgaatggctatatgctgataagtttgaaaatctggaggaaatggataaattcctgggcacatacaacctaccaagattgaaccaagaagaaatagaacacctgaacaagccaataacatataatgagattgaatcagtaataaaaagtctctcaataaagaaaagtccaagactagatagctttaccactcaattc

SEQ ID NO: 555584 - DNA, 426 bp, Homo sapiens
agtggaaagaaataaataacaaagattgtagcagaaataaatgaaatgagacaaaaatacaaaagatcaacaaaacaagaatttttttgaaaggacaaacaaaattgagaaatcattagctatattaaccaagaaaaaggagaaaatacccaaatatgtaaaatcagaaacaaaaaaggagacatcacaacagataccatggaaatacaaaggatcattagaaactactatgaatggctatatgctgataagtttgaaaatctggaggaaatggataaattcctgggcacatacaacctaccaagattgaaccaagaagaaatagaacacctgaacaagccaataacatrtaatgagattgaatcagtaataaaaagtctctcaataaagaaaagtccaagactagatagctttaccactcaattc

SEQ ID NO: 555585 - DNA, 474 bp, Homo sapiens
agacttttgggactattggagtgaagtgattctatctagtatgtgagaatgacttaagttttrggggaccagggatggaatgctatggtttatccctggcaaaattatattgaaattggatccccaatgtggcagggttgagagatggggcctggtggaaggtgttcgggtcatgggggcagatccctcatgaatagattaatgccttcctgtaggggtcagtgagttcttgctgtcataggaacagactagtttcttgagagcaggttgttataaagcaaggacaccccttgggttttaccttttcacatgtgtcagctttccctttttctgccatgttttgaccacgcacatggccctcatcagaagctgaatgaatgctggtgccatgcttctcatacttccatcctgcaaaactgtgaggtaagtaaacctcttttctttataaattacccagtctcagatattctgtta

SEQ ID NO: 555586 - DNA, 401 bp, Homo sapiens
cccaagaatcttatatgaaagagctttttaacatccaaacagcttcagtgcttcaaagaggaggcatgtgaggacatatgtaaagctcttccgtagttcttttttgtttttgtttttgtttttaatagactttgttttttacagcagttttaagtttgtaaccaggagtggtagctcacacctagaatcccagcacactgggaggccgaggcaggtggatcacctgaggtcaggagatcaagaccagtctgggcaacatggtgaaaccctattttcacaaaaaatacaaaaattggctagatgtggtggcacgtgcctgtagtcccagctattcaggaggctgaggtgggaggatggcttgagcctgggaggtcgaggctmcggtgaaccatgattgcacc

SEQ ID NO: 555587 - DNA, 560 bp, Homo sapiens
ccaaattgtaatccccatgtgttgagggagggacctcgtgagaggtgatcagattatgcagactgttcctccatgctgttctcatgataatgtttgagtctcgtggaatctgatggttttataaggggctttcccctcttcattctgcacttctatttcctgctgccatgtgaagaatgtttgctttcccttctgccatgattataagtttcctgaggcctccccagccatgaggaactgtgattytattaaacctctttcctttataaattacccagtctcaggtatttcttcatagcagtgtgataacatacaccctttctcctgagtccccaaagtccattacatcattcttatgcctttacatcctcatagcttagctcccacttatgagtgagaacatacaatgttgggttttccattcctgagttacttcagttaaaataatggtctctaattccatccaggttgctgtgaatgccaatatctcattcctctttatggctaaatagtattccatggtgtacacatacaatacaggcacacacacatacacacac

SEQ ID NO: 555588 - DNA, 535 bp, Homo sapiens
tttccttccttttctcatctttcctcatcttagaaaacatgcatttttctaagcagtggagatggaacagtagactagacaaagaggataacagctcatgtggagcttccactctggaaacatagagcaaacgagaatgagcaggagctaccaggaaggctgcatggatgaagtaggcttacaaaatgagtgagatttgggtatcaagaacaaagtctaagggggcaagcaagtagaggcaataattggaggagtaggatggggttagcggcaaacgtgtgggaggaagaccatgtcagctgaactggctgggagcagttttgccttgggaagcagtgagccattgaagagagagagagatacacgcatgaaaccatggtcctggattgtcaagagtcacagtgcccggaggagatagcatgtgagcaattgtcaggtggttygatctgtactctagcaggactgagcacaggggaatgctgatgcgggtgtggggcaaaggaggagcagagccacagagctggaaggggagggt

SEQ ID NO: 555589 - DNA, 538 bp, Homo sapiens
atcagcgcacttactgtcttcagcccctttagacagcctgcaggaagacttctcaccaagggaacttccttccttcctgagtttcccccgatgacttccagacctatgtgctttagggaaggtgttccattgcccactgccagctttcctgcctggctttcccccggtgggcttccatgaatgcagatacagagtcgggagagagaagggaaacgggcacttgcttttaaggactacgtgttcgtggcaggccagaacaaattgcacaaaggctagattacttatgtactattaggaagatcgttaatatcagggtgttaaaatatgtaaatagcataaatatgccccacatcctaattactgttttgcatgatcaagtcatttactctttatgacattttatgattgttcagctgtgtcagcgaacacttagcacaacctcctaccrcagatgatgaagctatggagttttcccagtttcctggccaggaacagcggggtgggggtgggggcggcatcaaggcaaaacaaagcctcc

SEQ ID NO: 555590 - DNA, 471 bp, Homo sapiens
aataatcgtcaatatttaaaatacagggctctatcccagcagtttgggaggctgaggcaggcagatcaattgaggtcaggagttcaagaccaacctggccaacatggtgaaaccctagctttaccaaaaatgcaaaaatcagctgggcgtggtggtatgcacstgtgaccccagttactcaggcagctgaggcagaagagtcgcttgaacctggaaggtggaggttgcagtgagctgagctcgcaccactgccctccagcctgggtgacagagcgagactccatctcaaaacaaataaataataataaataaaaatacagggctctaaaagtactttttatttcacatacccagcaagttttctttggtagctcttagtcattgtattagtgtcctattgctgctgtaagaaattaccacaaatttggtggcttgaaacaacacagatgtattattttatagtcctggggt

SEQ ID NO: 555591 - DNA, 583 bp, Homo sapiens
aagcttgtcagttgttaaattgtgcagaaccgtaggccagatctgtaaagatttgttttcctcctctggtgctttctatggaaacggcacagggcackctgggagtcttcctagaggtggcttgcagggagccttgtctcaaatgagaaggctgggcctgcaggacacaggaaaagagctctgggggcttgtcttaagttttgaaaagaagctattacatgcttctcttgagccttctaagagtcctgtaattgctggtgtctttgcaactggtcaggttttgatagaatcatttgtttaagattgtgattttcattcttctaactgctccccatgcctatttttttttttaagacacaaggtctctctctgtagcccaggctgggatgcagtggtgtgatcatggcttactgcagatttgaactcttgggctcaagcgatcctcccacctcagcctcccaacccaagtagctggaactacaggtggcgccatcacacctggctatttttttttttttttttttttttttttggtagagaagaagtctttctctattaccctggcaggtttcaaactcctggc

SEQ ID NO: 555592 - DNA, 473 bp, Homo sapiens
tactagccactagcccgtctcttagaacctctcatttcctttccatcgtggaaatctatcctcaaagaaataacttmtcagtgttccatctgctattctactactcctcagggattattcaggccccctcccttccctacacatcaagctcaaggatttgcccccacccaggactggcaaattagctttactcaacatgccctgagtcagataactaaaatacctcttagtctagatagatactttcactggataggtagaggcctttcctacagggtctgagaaggccactgcagtcatttcttccattctgtcagacataattcctcagtttagccttcccacctcaatacagtctgataacagacgagcctttattagtcaaatcagctaagcagtttttcaggctcttagtattcagtgaaacctttatatcccttacggtcctccatcttcaagaaaagtagaatgga

SEQ ID NO: 555593 - DNA, 473 bp, Homo sapiens
tactagccactagcccgtctcttagaacctctcatttcctttccatcgtggaaatctatcctcaaagaaataacttatcagtgttccatctgctattctactactcctcagggattattcaggccccctcccttccctacacatcaagctcaaggatttgcccccacccaggactggcaaattagctttactcaacatgccctgagtcagataactaaaatacctcttagtctagatagatactttcactggataggtagaggcctttcctacagggtctgagaaggccactgcagtcatttcttccmttctgtcagacataattcctcagtttagccttcccacctcaatacagtctgataacagacgagcctttattagtcaaatcagctaagcagtttttcaggctcttagtattcagtgaaacctttatatcccttacggtcctccatcttcaagaaaagtagaatgga

SEQ ID NO: 555594 - DNA, 381 bp, Homo sapiens
aagaaaggctgaagcaaaaacatgtttcaaatgaagttattcttgataagcattatgattgcccttcattccttaataaaaatcatggccttgtccttatggaatgtcctaggtatggagactctctgtcaccttctctgtctctctctctttgtctctttctctctctctgtctctctctctcacacacaygcacacacacacacacagagcaagagagagagagaaagagagagagctaatctgctcaaaattgtattgcaaatagagagtacaatctaaaaatcttttattttaatgtaaggcttggaagcatcacgttggaatctcttaagtcaggtatacataaatatctagccagatagcctcaattcttgattg

SEQ ID NO: 555595 - DNA, 637 bp, Homo sapiens
aagcttgtctgaatatttaaatgggtgttatattctgaatcatcattatgataagatggaagtttacattttatttagtttaaattaaattggctgggtgtcgtggctcacgcctgtaatcccagcacttcaggaggctcaggtgggcgaatcacttgacgtcaggagttcgagaccagcctagccaacatgttgaaatcccgtctctactgaaaacacaaatattagctgggcgtggtgtcggacacctgtaatcccagctactcaggagactgaagcaggagaatcgcctgaacccgggaggtggaggttgcagtgagccgagatcatgccacttcactccagccttagcgacagagctagaccccatytcaaaataaataaataaataaataaataaataaataaataaataataaaaataaaataaataaattgaatttgaggcatttttaacattttagaggtgttatcttccttgtaattagatgcagccattataatatctttctctttccttgtcactttgctttattcttctcactgtaatgaaagaatggagctgtgcaactactgtgtctgacaagcctaagtactgtaaatagcttccttataaataatgtaaattgctatttct

SEQ ID NO: 555596 - DNA, 545 bp, Homo sapiens
gtaaactcagccaactgagcagctgctgttcccaatgtggtatctttgctaagctaacacatattaaaaggtatgcattgatatagctaatgttttcttttctatccgagttctcattaacactggacagatgaaagtatgcatttcaagtcttgtcccaagacaatgaatattcttataacttctgacataattttatgtgaaaggatatgaactttctggacattcctcaaaacaaaacattgggccactatatcaatgacatcatgttactcagacttaatgatcaagaaatgtgaagtacattgaagaccttgataaacaccttccaatgggtaaaaatagactcaatgaagrttcagagggctgccacattaaatatctgggggaggctgggataccccctccaaagtaggtctgatatctggcatctctcacctttaaaaagaaagaccataccaggtcggcacctttgggttttggatgaaccatactccacacttgagagaaatgctctatctatttacaactgacccagaaggctg

SEQ ID NO: 555597 - DNA, 579 bp, Homo sapiens
ccttcatgccttccctccctactcaatctgtatccacgtttttaaagccataaacttttaactcataccttcattttttttaaaaaaaatctaatcctccacaaatgtctgctgtcacaaatattctgctgtcattaagaacaccacatcaggataatgtcataccaccatacggatcaagatgtctaaaaattcttggtctccaacttcagctagaacttagtgatgctggccagtccctttacttggagtcaactccctcatccattcctccccactctccacattatctttactttcccagttcaattttccaccctcatgctccattgatggcagatatccttgcctcccactgcatccgacagaggtaagaaggtgtattagtttgttctcacactgctaataaagacatacccgagactgggtaatttawaaagaaaagagatttaaaagaggctcacagttttgcatggctgggtaggccttgggaaagttacaatcatggcagaagaggaagcaaacacatcctcttcacatgtcagcaggagagagaatgagtgcccagtgaaggggcaa

SEQ ID NO: 555598 - DNA, 571 bp, Homo sapiens
cgcctgtagtcccagttacttgggaggctgaggcagaataatcgcttgaacccaggaggcagaggttgcagtgagccaagatcatgccattgcactacagcctaggtgacagagtgagactccatctcaaaaaaacttcaacaaaacttgaacttcatgccctaccttctcttttcttacagaggtaagagtttttcctaagatttttatctaggttaaaacagagcttttaaaaatacatattgaaacagcataattaactttataataattagaagtattcaaaatgaaatggtaaaacccaaatgaataaaagaatgaaattatttataaaaacatcatagaaaaaccagcaaaaagaatggaatatttatcagagctgtaaatgaaatattaactaaaagattttgaawtataaatatttaaaagatctataaaaaagaattaaagctgaagcaataaggaaaacaatggattgtcaagtatgaaaagcaaaataataatatctataaaaataatgagctcattcaagtatattttaaaaattaaaatccctagtaaataaatggtc

SEQ ID NO: 555599 - DNA, 640 bp, Homo sapiens
ccgtgtctgctttttacaccaaagagaactatttaattccaggtttttaaygttttgccatgttcttaagatattgcatggcttatcagttgcagtaagtaatttgtaccaagtaatgatatatgtcttctagtgatttctgaatcaatatttttattatttttctttcaactaccatattttatgtgcactttaatattataagcctcttcagtttctttttggacatagcatacaaatgttggaatgttggatttatgataatggtctattttaattggattagagccactaagattagttttcttttctgtgtgtgtgtgtgtgtgtgtgtgtgtgtgtgtgtgtgtgtgtgtttatttatttatttatttattttgagtcacagtctcactctgttgcccaggctgaagtgcagtggcatgatcttggctcagtgtaacttctgcctcctgggttctcctgcctcagcctcccgagtagctaggattacagtgacttgccaccatgcccagctaatttttatgtttttagtagagacagggtttcaccatgttagccaggctggtctcaaactcctgacctcaagtgatccgtctgcctcagcctcccaaagtgctgggatgacaggcataagcca

SEQ ID NO: 555600 - DNA, 640 bp, Homo sapiens
ccgtgtctgctttttacaccaaagagaactatttaattccaggtttttaatgttttgccatgttcttaagatattgcatggcttatcagttgcagtaagtaatttgtaccaagtaatgatatatgtcttctagtgatttctgaatcaatatttttattatttttctttcaactaccatattttatgtgcactttaatattataagcctcttcagtttctttttggacatagcatacaaatgttggaatgttggatttatgataatggtctattttaattggattagagccactaagattagttttcttttctgtgtgtgtgtgtgtgtgtgtgtgtgtgtgtgtgtgtgtgtgtgtttatttatttatttatttattttgagtcacagtctcactctgttgcccaggctgaagtgcagtggcatgatcttggctcagtgtaacttctgcctcctgggttctcctgcctcagcctcccgagtagctaggattayagtgacttgccaccatgcccagctaatttttatgtttttagtagagacagggtttcaccatgttagccaggctggtctcaaactcctgacctcaagtgatccgtctgcctcagcctcccaaagtgctgggatgacaggcataagcca

SEQ ID NO: 555601 - DNA, 571 bp, Homo sapiens
atattatcttgaaattaaaacaaaatttttaaatgcttatgtagaaatactggcctccatgggtcagcagagcccagtttaagaaaaactaagctaagaaatatctgaaatatgtttggttttctgcaatcaagctgttcgtaaaaagaatttatatgttttacttatggtcacattttagtgtaaaagtattgaagcaaaggatattgtcattataattctcaattacctactaaaatgatggttccattggctctgttggaacaatttaaaggtatttatttaaccaaaagtctgtttttttaaaataatttgttagtcttaacacataccaattttgtatttgtttgatgtgctgcaattttttcatcttttcccattatttataaaggctttctgtatatatgagatcaagattttwgtgtgtgtgtgtgtgtgtgtgtgtgtgtgtgtggtgtgtaaggagtcaggggagcataacttagagaatattgtgaagtttgggattcttcagaaaaattcatcttctctcactgtaacagagttctgttgttgaaagaatcccatttac

SEQ ID NO: 555602 - DNA, 598 bp, Homo sapiens
aaaaattagttgggtgagttggtgcacgcctgtagtcccagctactcaggaggctgaggcagaagaatcgcttgaayccaggagccagaggttgcagtgagctgagattgcaacactgcactccagcctgggcaacagagtgagactccatctcaaaaaaaagaaagaaagtaaaggaataaaagaatggctactccataggcagagcagccccaagggctgctgtttgcccatttttatggttatttcttgattatatgccaaacaaggggtggattattcatgaattttcctggaaaagggtgggcaattcttggaactgagggttcctcccctttttagaccacatagggtaacttcttgatgttgccatggcatctgtaaactgtcgtggtgctggtgggagtgtcctttagcatgctaatgcattataattagtgtataacgagcagtgaggatgaccagaggtcactttcgttgccatcttggttttggtgggttttggtcggattctttcccatgtgctgttttatcagcaaggtctttgtaacctgtatcttgtgctgacctcctatcttatcctgtgacttagaatgcc

SEQ ID NO: 555603 - DNA, 598 bp, Homo sapiens
aaaaattagttgggtgagttggtgcacgcctgtagtcccagctactcaggaggctgaggcagaagaatcgcttgaacccaggagccagaggttgcagtgagctgagattgcaacactgcactccagcctgggcaacagagtgagactccatctcaaaaaaaagaaagaaagtaaaggaataaaagaatggctactccataggcagagcagccccaagggctgctgtttgcccatttttatggttatttcttgattatatgccaaacaaggggtggattattcatgaattttcctggaaaagggtgggcaattcttggaactgagggttcctcccctttttagaccacatagggtaacttcttgatgttgccatggcatctgtaaactgtcgtggtgctggtgggagtgtcctttagcatgctaatgcattataattagtgtataacgagcagtgaggaygaccagaggtcactttcgttgccatcttggttttggtgggttttggtcggattctttcccatgtgctgttttatcagcaaggtctttgtaacctgtatcttgtgctgacctcctatcttatcctgtgacttagaatgcc

SEQ ID NO: 555604 - DNA, 516 bp, Homo sapiens
tcttacactgccaaagccatcaaagtgggaaggagacgggagaacagcagcataagcagctggcagaggcagcagaaaggaaagagagaaagagacaggaagtcaaagaaggagacagagaggaagagacagagagacagaaacagagagaccaaaagtcaaagaaagaaggagaaagagaggaagagacagacraagagggaatcagaaagagagagacaaagatggagtcatagagagagacagacacagaaagtcaaagagagagtcagaaagagaggaagagacaaagaagaaatcaaagagaatgaaagagagatggaagtagtaaagaaaaaaacagtgtaccctattcctttaaaagccagggtaaatttctgtctactcagccaaggcacatccttcttatgtggaacatcgacctatatctgcctccccactaactggacaggcacctgtaccttagtatttctaagtcccaacattaacattgacccaggaaatcagaccttatca

SEQ ID NO: 555605 - DNA, 516 bp, Homo sapiens
tcttacactgccaaagccatcaaagtgggaaggagacgggagaacagcagcataagcagctggcagaggcagcagaaaggaaagagagaaagagacaggaagtcaaagaaggagacagagaggaagagacagagagacagaaacagagagaccaaaagtcaaagaaagaaggagaaagagaggaagagacagacgaagagggaatcagaaagagagagacaaagatggagtcatagagagagacagacacagaaagtcaaagagagagtcagaaagagaggaagagacaaagaagaaatcaaagagaatgaaagagagatggaagtagtaaagaaaaaaacagtgtaccctattcctttaaaagccagggtaaatttctgtctactcagccaaggcayatccttcttatgtggaacatcgacctatatctgcctccccactaactggacaggcacctgtaccttagtatttctaagtcccaacattaacattgacccaggaaatcagaccttatca

SEQ ID NO: 555606 - DNA, 581 bp, Homo sapiens
agaggaccagacacctggagtaccaacaattccccctgccaattttctcagtgttattctagactaactcacacttggatatttttcccctgtggggaacacatttcacctggtggaggaagagggctggcatggggcaagaaaatcccttgtgaagaagggtggaattttgcagagaggaaggcagtgctctcatataagaatatgaggattgctgggtgcagtggatcatgcctgcaatctcagcacttctggaggccaaggcgggtgaatcacttgaggtcgggagttcgagactagcctgaccaacatgaagaaaccctgtctctactaaaaatataaaattagctgggcgtgggtggtgcatgcctctaatcccagctactcaggaggctgaggcaggagaatcacttgaacctgggaggcggaggttgcagtgagccgcgatcacgccattgcacttcagcctaggcaacaagagtgaaactccgtctcaaaaaaaawaaataaataaaataaaataaaataaaatatttttataaataaataaataaataaaagaatatgacgatcaagaaata

SEQ ID NO: 555607 - DNA, 577 bp, Homo sapiens
ggatccacgctgtctaccactgcccgttagtcatggagagtttctgctcctgacatccaaccatggatattgtcatggctggatgatccaggatcacctgaaacagatgcttctccttctgatgaatcatcagaaggtcactactagtctaatactacaccacaatgcctatgacattcacctaacttcatttcatcaagtaggcattgtattatctcacatcatcacaaggagggtgagtatggtacaacaggatmtttttcttaatttttttttaagagacagggtctcggtatgttgcccaggctggtctcaacctcctgggctcaagcaatcctgggcattgtcctcctaaagtgctgggattacagacatgagccaccatacccagccaacaataggatattttgacagagagagagagaatacatttacataacttttattacagtatattgttataattgttctcttttattatttaaattttttgagacagggtctcattctgtcacctaggctgaagtgcagtggcacagtcttggctcactgcaacctctgcctcccagtcttaatc

SEQ ID NO: 555608 - DNA, 580 bp, Homo sapiens
taccagtattatggaataaaacgtttattaaatttatgatagaaatgatactttacacaattgtgggaggagctagggaagtaaggtctaaaaacagcaactggagaatcagtggcaagtttctaaccaacctggcctcagaggggacaagccagaacagagtgaagaagcaatgagggcacaagcttgaaatacaagcaaatcgtgtatygactcatgtccatattgacatcatctgttacgtctcttccctttcgcaagattcccacttgcacccattcaaagaacagaaatgcagctcaaaattccacccttttgaggacttgtaatgctttgctttatgttgctgtgagaaggatcctctctcaaaccctcatcttcatccctgtatgtaagaagtgacaatgatattctataggttgatgcaaaagtaattgggttttgtgcctttaaaagtaatggcaaaaactgcaattacttttgcaccaacctaataggttttcttctctgcagtagttcctgtctcattcagaataaggattcaagtcgcaactttattgattttgatcacaggttattt

SEQ ID NO: 555609 - DNA, 580 bp, Homo sapiens
taccagtattatggaataaaacgtttattaaatttatgatagaaatgatactttacacaattgtgggaggagctagggaagtaaggtctaaaaacagcaactggagaatcagtggcaagtttctaaccaacctggcctcagaggggacaagccagaacagagtgaagaagcaatgagggcacaagcttgaaatacaagcaaatcgtgtatcgactcatgtccatattgacatcatctgttacgtctcttccctttcgcaagattcccacttgcacccattcaaagaacagaaatgcagctcaaaattccacccttttgaggacttgtaatkctttgctttatgttgctgtgagaaggatcctctctcaaaccctcatcttcatccctgtatgtaagaagtgacaatgatattctataggttgatgcaaaagtaattgggttttgtgcctttaaaagtaatggcaaaaactgcaattacttttgcaccaacctaataggttttcttctctgcagtagttcctgtctcattcagaataaggattcaagtcgcaactttattgattttgatcacaggttattt

SEQ ID NO: 555610 - DNA, 557 bp, Homo sapiens
acaagaagctcaaagaacaccatgaaaattcattgcaaaagtatcaccatctaagcacatagtcatcaggttagctaaagttaagatgaaggaaagaatcttaagagctgtgacacaaaagtatcagataacatataaaggaaaatctacaagattaatagcagatttctcagcagaaaccctaccaagctagaaaagatctgggtcttatctttagcctccttaaacaaaacaattgtcagccaagaattttgcacccagtgaaactaagcttcataaatgaaggaaatatacactctttttcagacaaacaaatgctgaatstacaaggaactcaaacaaactagcaagaaaatagaaaaaatcccatcaaaaagtgggctaaggacatgaatagacaattctcaaaagaagatatacaaatggccaacaaacatgaaaaaatgctcaacatcactaatgatcaggaaaatacaaatcaaaacaacaacaatgcaaataccatcttgttcctgcaagaatggccataatcaaaaaatcaaaaaataatagatgtt

SEQ ID NO: 555611 - DNA, 562 bp, Homo sapiens
caggctggtctcgaactcctgaccttgtgatctgcctgcctcagcctcccaaagttctgggattacaggcttgagccactgcacccagccagtaatgctgattaagtgttaaatataatgtttgaccaaccaaaccagcctattcttcaatgttaccaaataaatatcaagaagagtaaggtctctatgacttagtgatagactttaaggagtgttggaaccacactactgtagggttagaagggcttagtgctggagtggaggacacagcacagcgtccccctccatgtagaatctgcacatatgccatgagagagggacctgacatgacatgtgtccagtttagttagcctgtaaggtttcttcagtcattgtcttaaaataaytggtgcttgtactattaaggaaccaatagaacaagtagaatgctttaaaatatttctagttaatgacctttactattgttttctattctattaggtttcagaaagcccctctggaataatgtgtattataccatgatttcaaaagtggggtggggtgataatacattagttattca

SEQ ID NO: 555612 - DNA, 593 bp, Homo sapiens
ttaaggtgcaagtgcctaaattttgttgccaacccacaacatccttaatctcctttgctgtctgtacagtgcagcacaaggactgttgccttttggttgagcaatagatattggatgaacatttataagtaaggaacaaattaatattagacaagtagttatttgtttcttacttatattgccatattccttctggtagacactggacaggtaggatgctgcttactgaattgtgaaattttatactatgatgtaacatttataaaatgcttttgagttagcaractgttttatcttacagggtttcagtgaagctcaagtagaacaatacttactattaaaaaaaaagaaaggtagcgggtggtgttatttaaatggagtccttacggtatcaaactactcattaacaggaaaaatatttagtaaccccagtcatctaaaacatggccatgtgataaaaaaagaaacatggcctttcatttccaaatatctattgcattttcttaatgcacagacaaaataatatggcttctagaaagtatgagaaaatatataaaatgcagcagaaaataagttaaaagatgagttatatc

SEQ ID NO: 555613 - DNA, 568 bp, Homo sapiens
ctgtgatggcacatattaggtagaaggggagcacctagtctagcaggaaggttaaggcaaggccttaactaaggagaagtaatgtctgcctcaagtcttgaaagaacaaatgctagtcaggtaggaagcagaagcagaagagcacacacatttataaaattactagaattagaygtttaaaaatactttggtaacatttggagcaacagtttctttatccatggcaagagagtattatgttttttaccactgttcagctatttttcacattcgttaggaaagataaataaaaacagcataaagattatgaactccctcatgttgaagataaaatattcagtgtagtatatatatttttgataaatatttttattaataaataaataaattctttattaataaataaaattttgaaagaatatatatttaaaatatatattttgaaatacatacctttttttgcacaaagctcgctgtgtagcattgatgattaaataagctgcctatctgtgtttgagaatatcttttcttggagacagaggaagagactaactgaatcttccataaa

SEQ ID NO: 555614 - DNA, 444 bp, Homo sapiens
agatcttgaattattcattctccttatctccactgccaaaaccatacacaatccaaggtkttattatctctaatctggacttctgagattgccttgtaatgcagaacctgactttcactctattccatttgccacacaacagtcgcctcttctgtttaaatccttcagggccttcactaaagagactgaaattcctccaggccagcataaataggcccctccccatctttccagcttcaattcatatatctccctcttttgttctctatttcgcctacaaaagccttccttcctttcctcaaaaagatcaaaatcctagcagccttgtgacatttatacatgctattccctctatgccggaaattcttccttcttgacctccataactccagtcctcatttggctaatcttttttcactcttcaaggctcagtttttaatgtca

SEQ ID NO: 555615 - DNA, 566 bp, Homo sapiens
ccaggtgcagtggctcacacctacaatcccagcactttgggaggacaaggtgggcagattgcttgagcccaggagttcaagaccaacctgaggtgcaacaactcacaaacaaacaaacaaacaaacaaacaaacaataaaactatactgaaaaggctttaatacaccaactgataacttttagatggtttaaaggcrtcttctgatgaactgtgtcctaatgagtgtgaatggatacctttgagcaaggtacccagatttaaaatgacatatctcttaattttaaacgtaagatcaaggtcctaaaatttgatatagactaattattcttcaacagcttgggaactttatttcctaccccaagagacagttggtttatgaagtaaccccctacacacaatatatatacacatatatttatatgtatatgtatatttatgagtgaacttttttctttgcacacttttcctaatggtgtcatggaaaactcccctccacctaagttatgttctaaagccaatcttctagttttttatcacatcatttctcttgattttaaacatttga

SEQ ID NO: 555616 - DNA, 467 bp, Homo sapiens
attttccttttcacactctcacatgtaacattacctcctctgtctcttggtcacagggccccactgatgctgtcaagactayagaggcagctgaccacaatcttcctcatttttttcttgctcaagcacaatcaataagagtcttcaaaatcacagcaatataaaatgaatgactcaaaacccctttgaaatttgtaatcgtgtatttatttgtatgattgtctaattaatgcctgctgatcacaccatatagtaaccttcttgaagacaggggatgtatattttgtactcggtattgtatcttctactcctaacaaagatgcctggaaaactcaaattcttgataaacatcatcgaatggatacatcactgttttcaacgtgtggtgtccaggccaaaagtaccagaatcacccagacacatgttagcaacgagattctctgaccccactccagacttactgaatt

SEQ ID NO: 555617 - DNA, 632 bp, Homo sapiens
ctcctctgtctcttggtcacagggccccactgatgctgtcaagactacagaggcagctgaccacaatcttcctcatttttttcttgctcaagcacaatcaataagagtcttcaaaatcacagcaatataaaatgaatgactcaaaacccctttgaaatttgtaatygtgtatttatttgtatgattgtctaattaatgcctgctgatcacaccatatagtaaccttcttgaagacaggggatgtatattttgtactcggtattgtatcttctactcctaacaaagatgcctggaaaactcaaattcttgataaacatcatcgaatggatacatcactgttttcaacgtgtggtgtccaggccaaaagtaccagaatcacccagacacatgttagcaacgagattctctgaccccactccagacttactgaattagaagttctgagtttagatctgagcaatctgtgttttaccatcccctcagatgattctgaaatatgtcaacattcaagatacccttcttaccagaagtggctacacagacgtggtgggagaatagttcccaaagacggcagacgactatgtggatactgaaaaacaatgcactgacctggcttgtatgcattatattcc

SEQ ID NO: 555618 - DNA, 594 bp, Homo sapiens
aggatgtgtagtaaaccccttagtagtgcactggtcatggctcatcaggtttgcccatagccagtctttgaattccaatttaaataaataggggtactttaagtcttccttaaatttaaatataatcacattttttcattctttaatatacatcagcgacttctcattgttttctgattaagttaaaatccctaaagatgttgacaaatttttcattaactgctttcagttttttctctttcatcagcggcaacaaccttctctaccaaccttgcttcaaactccatgttctagagaagggatgggctctagcatgtgggactattgcatgayaaacaaacagcagtgcatagagctattgtagaatgccatagtcacttattctgcaagtttacaataattcctgtttcagtgtcaatttataaatagctactaataactaaaagcatgattttaaatctgcaggtataagcaataacaagcttagttaacatctaagaatgatgagaactgttttagcctttactcaagttgtgaacaaatattatgatgatgactctgctgaagaaccaagcagaggataaacaatgccag

SEQ ID NO: 555619 - DNA, 320 bp, Homo sapiens
tgatatcttgggtgtaaattagttagtattaattaattgggtacagtgctgaattaatttgaagacaagactcattctaagaaattctgatgttcagacctagaaatatatatggcgtcatagtggtcatattaacagcaaaaaaagtcatcatgaaaatatggtaggctcttttttttttttgccacgcgctattctaagcctttatgtgcatgataatatttagttattgtatccgcacagtaagccatgagtgtggcctattttacaacttaggaaacaggctcagagagtggyagttttgttaagggtcacacagc

SEQ ID NO: 555620 - DNA, 404 bp, Homo sapiens
gccagggatgctgccaaacatcccacagtgcacaggamagtccctaccccccaccatggagaatcacccagcctcaaatgtcaatagtgccaaggctaagaaaccctgatctgctagcattaaggtttaatttaagaagagagaaaggaaaaaagatagtagataggtagatggctaggcagatggtagggtagatagtgtggaggctgagggacccagggctctgaagggcttactgtgtgctggccacagtgctgaacacattacacgggttacctaaatccatcctggaagtcaccttctaggatagatgctattatcatcttctttatacacatggggaaactgaggctcacagaggtttggtgatttgccaaggccacatgcttggcagtggctggtgg

SEQ ID NO: 555621 - DNA, 404 bp, Homo sapiens
gccagggatgctgccaaacatcccacagtgcacaggacagtccctaccccccaccatggagaatcacccagcctcaaatgtcaatagtgccaaggctaagaaaccctgatctgctagcattaaggtttaatttaagaagagagaaaggaaaaaagatagtagataggtagatggctaggcagatggtagggtagatagtgtggaggctgagggacccagggctctgaagggcttactgtgtgctggccacagtgctgaacacattacaygggttacctaaatccatcctggaagtcaccttctaggatagatgctattatcatcttctttatacacatggggaaactgaggctcacagaggtttggtgatttgccaaggccacatgcttggcagtggctggtgg

SEQ ID NO: 555622 - DNA, 524 bp, Homo sapiens
ggccgggtgcagtagctcatgcctgtaatcccagtactttgggacactgaggtgggcggatcacttgaagtcaggagttcgagaacagtcgtcactagtaaaaatacaaaaattagccagacatggctgtgtgtgtgcctgtaatcccagctacttgggaggctgaggtaggaggactgcttgaacctgggaggcggaggttgcagtgagctgagatcgtgtcactgcactgcaccctgggcgacagagtgagacactgtctcaaaaaaacaaaaaacaaaaacaaataaaacactcgttcatgtaaccagaaatcacctgtacccgcaaaaattattgaaagtaatcagattttttttttaattccaattgctgccatattggacattcctagagcagaacctggcttaggtttccaggragcagctattgtgaggagtgagcacttgggagggacttgggatttctccaggggcctctgggacctgggtgagagaggcagattagactcatggatggaattc

SEQ ID NO: 555623 - DNA, 605 bp, Homo sapiens
gtgtctcactaacctcaccccagtctcagccctggaccacagggtctcttcgcacaagttctaccagagccaccagaaaagaggccttgtctcctccaggagctgaggtcagcaaacaatggcctgggagtcaaatttggcctccaaactgtttttataagcayggtgttcctggaacgcagccacacccatttgctcccatatggtctgtggctgagtttctgctccagtggcagagctgagtcactgcgatagagatcgcatggctcacaaaccctataatatgacccgtaaggagggagtgtgccgaccccgttctagaagtaggatctctcatcatcctggaaacctggagctacttggggccattttccaccccataatgtagcgagaccccacccggaaagacacccaaccacagagaagcggtggtgagggacgacagatggagacagatttgggagaaggcagacccccttaatccagctcaactccaagatgatttcttaattacttgagtcaataaataaatgtccttcatcttttttttcttaaatcaatctaaagaattttctatcatttgcaaccacaggaaataacgcagt

SEQ ID NO: 555624 - DNA, 401 bp, Homo sapiens
acctgtaatcccagctactcgagaggctgagacacaagaatcacttaaacccaggagacaaaggttgcagtgagctgagatcgtgccacygtactccagcctaggtgacaaagcaagactccatctcagaaaaaaaaaaaaaagaaaggaaacagagacacagaaacagagatagaaatggagttagaggtacagatagaggtagaaattgagaaaaaatagagcaggacagagaaggaactacacacatccacacacagaacgtccgcctcagccccaccacactggttctgtttctctagaaagccctgaataacacagcaggtcacaagacttggatgccaggtacaaaaacattcataccctatgagcaagaacaaggctgctgaaaagctgcccta

SEQ ID NO: 555625 - DNA, 604 bp, Homo sapiens
aagcttcattcccatctataattttatctggtaccattattcaatttagatatattgcataggatgtgccaacaatcacttttataaccattccatgattttgcttgggtaatcccttttaatggtgaacttcaggtcacaacagtaactatcagttcaactacaccaaggtttccraagacaatggcttctccacccaagcaggttgtatataaattccaaatagaacctggcatcaccctgaaggaattctaacttcacactgttggggaaatttaccaagatggcttcagagtagactaactttacacagcacattaaaaaaaaagacatttattcagcatcacgatcagactattacatttagcaatcaacagcatgggtgcaaaaaaaaaaatctacattaaaaccctttgttggaatgctttacactttccacagaacagaaactaaaataacctgttatacaattagtcacaaatacagtccttgagttttttgcccatacacatgagtatttgtctaaaacatgtcttctttgtagcagctaggccctgccaccactgtgcttggctgagttcacaaatctgtcgtaacctgtagc

SEQ ID NO: 555626 - DNA, 604 bp, Homo sapiens
aagcttcattcccatctataattttatctggtaccattattcaatttagatatattgcataggatgtgccaacaatcacttttataaccattccatgattttgcttgggtaatcccttttaatggtgaacttcaggtcacaacagtaactatcagttcaactacaccaaggtttccaaagacaatggcttctccacccaagcaggttgtatataaattccaaatagaacctggcatcaccctgaaggaattctaacttcacactgttggggaaatttaccaagatggcttmagagtagactaactttacacagcacattaaaaaaaaagacatttattcagcatcacgatcagactattacatttagcaatcaacagcatgggtgcaaaaaaaaaaatctacattaaaaccctttgttggaatgctttacactttccacagaacagaaactaaaataacctgttatacaattagtcacaaatacagtccttgagttttttgcccatacacatgagtatttgtctaaaacatgtcttctttgtagcagctaggccctgccaccactgtgcttggctgagttcacaaatctgtcgtaacctgtagc

SEQ ID NO: 555627 - DNA, 604 bp, Homo sapiens
aagcttcattcccatctataattttatctggtaccattattcaatttagatatattgcataggatgtgccaacaatcacttttataaccattccatgattttgcttgggtaatcccttttaatggtgaacttcaggtcacaacagtaactatcagttcaactacaccaaggtttccaaagacaatggcttctccacccaagcaggttgtatataaattccaaatagaacctggcatcaccctgaaggaattctaacttcacactgttggggaaatttaccaagatggcttcagagtagactaactttacacagcacattaaaaaaaaagacatttattcagcrtcacgatcagactattacatttagcaatcaacagcatgggtgcaaaaaaaaaaatctacattaaaaccctttgttggaatgctttacactttccacagaacagaaactaaaataacctgttatacaattagtcacaaatacagtccttgagttttttgcccatacacatgagtatttgtctaaaacatgtcttctttgtagcagctaggccctgccaccactgtgcttggctgagttcacaaatctgtcgtaacctgtagc

SEQ ID NO: 555628 - DNA, 604 bp, Homo sapiens
aagcttcattcccatctataattttatctggtaccattattcaatttagatatattgcataggatgtgccaacaatcacttttataaccattccatgattttgcttgggtaatcccttttaatggtgaacttcaggtcacaacagtaactatcagttcaactacaccaaggtttccaaagacaatggcttctccacccaagcaggttgtatataaattccaaatagaacctggcatcaccctgaaggaattctaacttcacactgttggggaaatttaccaagatggcttcagagtagactaactttacacagcacattaaaaaaaaagacatttattcagcatcacgatcagactrttacatttagcaatcaacagcatgggtgcaaaaaaaaaaatctacattaaaaccctttgttggaatgctttacactttccacagaacagaaactaaaataacctgttatacaattagtcacaaatacagtccttgagttttttgcccatacacatgagtatttgtctaaaacatgtcttctttgtagcagctaggccctgccaccactgtgcttggctgagttcacaaatctgtcgtaacctgtagc

SEQ ID NO: 555629 - DNA, 633 bp, Homo sapiens
tacacaagcttcattcccatctataattttatctggtaccattattcaatttagatatattgcataggatgtgccaacaatcacttttataaccattccatgattttgcttgggtaatcccttttaatggtgaacttcaggtcacaacagtaactatcagttcaactacaccaaggtttccaaagacaatggcttctccacccaagcaggttgtatataaattccaaatagaacctggcatcaccctgaaggaattctaacttcacactgttggggaaatttaccaagatggcttcagagtagactaactttacacagcacattaaaaaaaaagacatttattcagcatcacgatcagactattacatttagcaatcaacagcatgggtgcaaaaaaaaaaatctacattaaaaccctttgttggaatgctttacactttccacagaacagaaactaaaataacctgttatacaattagtcacaaatacagtcctygagttttttgcccatacacatgagtatttgtctaaaacatgtcttctttgtagcagctaggccctgccaccactgtgcttggctgagttcacaaatctgtcgtaacctgtagcttccctgtcacttctctggctctc

SEQ ID NO: 555630 - DNA, 633 bp, Homo sapiens
tacacaagcttcattcccatctataattttatctggtaccattattcaatttagatatattgcataggatgtgccaacaatcacttttataaccattccatgattttgcttgggtaatcccttttaatggtgaacttcaggtcacaacagtaactatcagttcaactacaccaaggtttccaaagacaatggcttctccacccaagcaggttgtatataaattccaaatagaacctggcatcaccctgaaggaattctaacttcacactgttggggaaatttaccaagatggcttcagagtagactaactttacacagcacattaaaaaaaaagacatttattcagcatcacgatcagactattacatttagcaatcaacagcatgggtgcaaaaaaaaaaatctacattaaaaccctttgttggaatgctttacactttccacagaacagaaactaaaataacctgttatacaattagtcacaaatacagtccttgagttttttgcccatacacatgagtatttgtctaaaacatgtcttctttgtagcagctaggccctgccaccactgtgcttggctgagttcacaaatctgtygtaacctgtagcttccctgtcacttctctggctctc

SEQ ID NO: 555631 - DNA, 647 bp, Homo sapiens
acagcactagcctagaatgccactcacagctcacctggctactcacctgatggcagtgctaaaaggcctggcttctcttcaagtactgggcgcttggcaggcttggggaagcctaggggatccttcagggcaccccaaagggttatgcctcttggagaggcctgccacaagcaggggagggaaaaacagaccttcggggttgaccagtcctgcagagaacaaaaacaaaaatatagacaggggtamacatgataaatccagttctggctgctctccccaaagggatctttcttcatctttagagaggggctaagtaggaagtaacctgccactcccgccaggctctgacttagccctgcaagctccaccaagtcttctttagacccagagaaagccattaggggtcagcaaaccagaatctgggaccagatcagccctgctgcctggttgaggccttcaagctaagaatggtttccccctcccccaactttttttttttttgagacaaagaatcttgctctgtcagccaggctggagtgcagtggcacgatcttggctcactgcaaattccgcccctccgggttcaagcgattctcgtgcctcagcctcctaagtagctgggattacaggcgcctgccagcacacgt

SEQ ID NO: 555632 - DNA, 587 bp, Homo sapiens
gaattgaaatcccagccttaccttgggcaagacaaccttacctataaaatgagaggatagtgtccctggcacagggtggttgtaatccataagacartgtcaccatagtgacctgcctccatgatatgaaaggggcatggaatcagctcatgctgtaacacacctagcacgcagcactttgcacatagtaggtgcttgatcaatgttcattataaagttttgattgtggttccttttcagtaatgggtatggctgagactctgctgagggggtgctgacaaggaagtaagctcttttgcaaggacctgaactaaggctagagaagagagcaggtaagcagcttcctgagagccccagaacacaagcacctagttttatttgttcctccgttccctggattccttccctagggccttcatattgtgagggcttaattcacattagctattgttaatgtttgtaggcagagcacacacaacagccactcaatcagtttaggttcctggccgtggttcacacccataatctcagcactttgtgaggttgactgcttgatcccaggcattcaagagcagcctgggcaacat

SEQ ID NO: 555633 - DNA, 259 bp, Homo sapiens
tctgcctcttgggttcaaccaattctgcctcagcctcccgagtagctgggactacaggtgcatgccrcccctggctaattttttgtattttagtagagatgggtttcaccatgttcgaggccggtctcgaactcctgagctcaggcaatccgcctgccttggcctcccaaagtgcggggattacaggcgtgagccactgtgcccggccttttcttttttgagactgggtctcactctgttttatgtagcctccctcacc

SEQ ID NO: 555634 - DNA, 331 bp, Homo sapiens
cagagtggaagtggggagtgggaatcattgcaactgtccattgcattgctacccaggaggctgaggtgggaggattgtgtgagcccaggatttcgaggctgcagtaagctatgatcataccactgcacttcagcctgggtgacagagcaagactctgtctctacagaaaagaaaaaaaaaaaagaagctgatacagrttacgaaaggatttcatgactaacaaattcgtagtgtgaaaaatcttgagtgcatatatgtacgcatacagagatggtgaggcatagggcagtttgggcatatatacaggagtggaattgctgagccatggggt

SEQ ID NO: 555635 - DNA, 431 bp, Homo sapiens
ggtggatcacttgaagccaggagttcaagacctgcctggccaatatggtgaaaccctgtctctactaaaaaggcaaaaaattagccgagaatggtggtgcatgcctgtagttccagctactcgggaggctgagacatgagaatcgcttgaacccaggaggcggagattgcagtgagccgagatcatgccactgcactccagcctgagtgacagagcaagactctgtctccaaaaaaaaagaataaaaaagaataagccagattttcgtatattttaagtgratgagagcccagcagcaacatgtcttgtttagctttgaatctcctctaataaatgtatatttagttgaattagcacacacacaaagcaaatagaaatgatttttatataggttcttgctaccaataagtagaattcaaatttagggatcc

SEQ ID NO: 555636 - DNA, 542 bp, Homo sapiens
tgtgtttttcccctccctgtgtctgtgtgttctcattgttcagttcccacttataagtgagaacatgcggtgtttgcttttctgttcctgtgttagtttgctgaggataatggcttccagttccatccatgttcctgcaaatggcatgatttcattcctttttatggatgtatagtattccatggtgtatatataccacatttcctttatccagtctgtcattgatgggcatttgggttgattccatgtcttttctgcctcccacttctaaccaagtgttttttggggggttgcccatcacaagtgccctgccaaggcatgtcaatcagagcacttccacgggaaattgtgaatcraaagtaagagatcactcccttctttctgacagcaaagctgaggagacgtgagctctgagataaccacagcctttgtttcagtctggtagagatggccatgttgagtgaggcagagtaatcagatgcagagaaggagagtccatattaattgattagaaaataagtataagataatgcaaaacgcag

SEQ ID NO: 555637 - DNA, 566 bp, Homo sapiens
ttttttttgggagtattttaaactttattttaagttctgggatacacatacagaatgtgcaggtttattacataggtatacatgtgacatggtggcacagaacagaacagaaacagaacagagacctcagaaataacaccaacatctacaaccatctgatctttgacaaacctaatagaaacaagcaatggggagaggattccctgtttcataaaaggtgctgggaaaactggctagccatatgcagaaaacagaaactggaccccttccttacaccttacacaaaamttaactcaagatggattaaagccttaaatgtaaaaccaaaaaccataaaaaccctagaagaaaacattgggattctttataacaattgtcagaattctttttaaaaaaacattttataaaatctactctctcttataatctctatccaagggactgtaaaaggagagactcccactctccttttcctgctgcctttccaaagtctagtgtagacatctgactaggtgtatgactcttctcccaagttgtccttgttgctaaggtaatctgtcccattc

SEQ ID NO: 555638 - DNA, 584 bp, Homo sapiens
tatcaggactggaggcaaataataaatatctaatggtacaacaggccacagtttttactatcctagtgaaatctgcatactttcaaaattaaatctgcttgattccacccactagagtttgcaggtaacaacaatgacataatgatgatgtcgacagcaatgggtcttgctgattcagtgcttactattacctgtcacaatactaactgcaatgtactgctcatttctcacaacaaaccagaggatgrgatgttattcctctccattttgtagataagctgactggggtacagagaggtaaagcggcttacctaaagacacacagcaagtgacaggcaaggccagttctgcctggactcacagtcccagtttcttcttttgcctccttgatgaaagcatcactttgaggaaaggcaaggttttcctaagtttacctagaagaggtttgcatttgaaacttctataataataattttaataatattcataaaaaacatatcatcctagtacttaataatatacatacttaccatgtatcagatgctgttctaagtactttacatatttccgttcattgaatcctc

SEQ ID NO: 555639 - DNA, 562 bp, Homo sapiens
atattaaatattggatcagtcagagtcaagtcagggaaaaaaggttgtattagttttctctaaattaaattatctctttcaaagggacctaaaggcaaaaaggaarcacaaaggtatcaaaatgcagtacccttagtgcttgctatggtttaaatgtatgtgtccttccaaaattcatatgttggaacttaactcccaaattgatgatactgaggtggggcccttaggggatgattaggtcatgagggttccacccttagagatgggattagtgcccttataaaagggcttcagggagagagttcatccctgttttgcctttctgtcccttctgccatgtgaaggcacagtgtttgttccctccagaagacacagcaacaagacgccatcttggaagcagagagtgagccctcaccagacaccaaatcagccagcaccttgatcttggacttctcagcctccagagctgtaataaataaatttgtattatttcttaattacccagtctaagatactttgttatagcagcctgattagactaagacagggcttgagaaacaaa

SEQ ID NO: 555640 - DNA, 592 bp, Homo sapiens
ttcatggcagacaatttttccacggacagtgtaggggattgctttggcaatgaaactgttccaccttagatcatcaggcattagattttcataaggtgcacacaacctggatcccttgcatactcagtttacaacagggtttgcgctcctatgagaatctaatgctgccgctgatctgacaggaggcgaagctcacgtggtaatgttcgctagccctctgctcatctcctgctgtaaggacttgctcctaacaggctccagaygggtgctggtctgtggctccggggctggggacccctggtccagtgtacagtacataagatattttgtgatacatatatatatatatgtatatcacattcacataacttttattacagtgtattgttaaagttgttcaattttattattactgttgttaatgtcttactgaggctaatttgtgaattaaactttatcataggtatgcaagtatagaaaaaaccataggctacatagggcagcactatctgtgctttcagccatccactggaggtcttggaacttatcctctaaggataagaggggactactgtgtataatttgtttttgc

SEQ ID NO: 555641 - DNA, 620 bp, Homo sapiens
agctaggcctcttgagccaaacagttagccaagttgtgaatgcaaaagcaaggttcttgaaggaaattaaaagttctactccactgagcacatgaatgataagaaagtgaaacagacttattgctgatttgaagaaagttttagtggtctggatagcatatcaaacarccacaacattcctttaagccaaagcctaatccagagcaaggctctaactctcttcagctcttacaagactgagagagatgaggaggctacagaagaaaagtttgaagctagcagaagttagttctttaggtttgaggaaagaagccatctccataacacaaaagtgcaagatgaagcagcaagtgctgatggagaagctgcagcaagttacccagaagctctaactaagatcattgatgaaggttgccacactaaacaacaggttttcaatgtagatgaaacagccttctattggaagaagatgccatatagctaaagaggagaagtcaatgcctggcttcaaagcttcaaaggacaggctgactttcttgttaggggctaatgcagctggtaactttaagttgaagccaaagctcatttatcattaaaaaaatcctaggcctcttaagaat

SEQ ID NO: 555642 - DNA, 497 bp, Homo sapiens
atcacacagcaagtggataaagaaactatggtatatacatacaatggaatagtactcagctataaaaatgaatgaattaatgacattcacagcaacctggatgaaattgaagactattattctaagtgaagtatcacaggaatggaaaaccaaacatcrtatgttctcactcataagtgggggctaagctataaggatgcaaaggcataagaatgacacaatggactttggggacacaggagaaaaaggtgggaagggggtgagggataaaaggctacaaatcgggttcagtgtatactgctcgggtgatgggtgcaccaaaatctcacaaatcgctactaaagcacttactcatgtaaccaaacaccacctgttccccaataacctacagaaataaaaaaaaattaagaataataactaacatttgctgggtgcctactgtgtgccttgtaccattttaagtgtctcacatattcctttaattaagcctcaccacc

SEQ ID NO: 555643 - DNA, 542 bp, Homo sapiens
tagacgttcatggccatatgtaaagtgcagccatgttactcaaggatccatttaatttgttctgggctctgatgtcaccatgcacccactgaggtktttttaaaacacattgagatcatacatatagttaaaaacaatcaagtaataccaatagggttattaaatgattccctattaaatttatttcctaccccatctttttcttctctcatcgtacttccaaaggcagccagttttaacccattctattgataggccttctggtggttagctccacatttataaataatatgcttacacctttatttagtagtttgccaccttaaaccaatatctatcaaatttttgctatgtcagatgagaatttaattaatattattatcctaaccttttcctctaacttcattatgttttgaccattgagaaggctcttgtcagtctgattcttagttctttataggtgatctgtttactcccgtggaaattttcaggatttttatttttgtgcttctgaaatttcacaataatacataagattttat

SEQ ID NO: 555644 - DNA, 594 bp, Homo sapiens
ttttgtttatgaaaagttctctgaatggagacaaaaagatggtacgtacacaaatagccwggctgaaagagccacacatctccacatggaaacatgagagttgagaaaatcctccatttagccaacttgccctgagcttcctgggtctctcagactcgtaggaagggtattttttcaataaaatatttcatactacagagtagagtcaaagctgtcaacaatttttaatttatccatcacaaaattcaacattgaaaaaaattggaggatattttatgaaaaataaaagtaataaataatgaaaaaagacattcttcaaaaaaaaaaaccacatcaatgacatagtgttagagccagaaatgcttgaagactgaaatgaagtttgtaagtatgtaccaagaataattattctgcttgttttttaagtgtaatcaatacaaaggattttataaaaaacattttgctttaatatacagatctattgaaataatttgtttttgataatagattttagatagaactgttttataagtctgccaataaaaataaatacacacaaatgtcagaaaataaataggcatttcaaaaaagcat

SEQ ID NO: 555645 - DNA, 594 bp, Homo sapiens
ttttgtttatgaaaagttctctgaatggagacaaaaagatggtacgtacacaaatagccaggctgaaagagccacacatctccacatggaaacatgagagttgagaaaatcctccatttagccaacttgccctgagcttcctgggtctctcagactcgtaggaagggtattttttcaataaaatatttcatactacagagtagagtcaaagctgtcaacaatttttaatttatccatcacaaaattcaacattgaaaaaaattggaggatattttatgaaaaataaaagtaataaataatgaaaaaagacattcttcaaaaaaaaaaaccacatcaatgacatagtgttagagccagaaatgcttgaagactgaaatgaagtttgtaagtatgtaccaagaataattattctgcttgttttttaagtgtaatcaatacaaaggattttataaaaaacattttgctttaatatacagatctattgaaataatttrtttttgataatagattttagatagaactgttttataagtctgccaataaaaataaatacacacaaatgtcagaaaataaataggcatttcaaaaaagcat

SEQ ID NO: 555646 - DNA, 594 bp, Homo sapiens
ttttgtttatgaaaagttctctgaatggagacaaaaagatggtacgtacacaaatagccaggctgaaagagccacacatctccacatggaaacatgagagttgagaaaatcctccatttagccaacttgccctgagcttcctgggtctctcagactcgtaggaagggtattttttcaataaaatatttcatactacagagtagagtcaaagctgtcaacaatttttaatttatccatcacaaaattcaacattgaaaaaaattggaggatattttatgaaaaataaaagtaataaataatgaaaaaagacattcttcaaaaaaaaaaaccacatcaatgacatagtgttagagccagaaatgcttgaagactgaaatgaagtttgtaagtatgtaccaagaataattattctgcttgttttttaagtgtaatcaatacaaaggattttataaaaaacattttgctttaatatacagatctattgaaataatttgtttttgataatagattttaratagaactgttttataagtctgccaataaaaataaatacacacaaatgtcagaaaataaataggcatttcaaaaaagcat

SEQ ID NO: 555647 - DNA, 408 bp, Homo sapiens
accttcacctggaggccgccttcacctggaggccgcccaccaccttcacctggaggctgcccttgctctttcaggatcctctttcatgggtttctgcagagccacggggtcagagcacatatgtgggccatgaggacttttcctttgcaccccaacacatctctacccgtcctccctgcacccccaacccgaagacgggcrtgtgatcctgtgggtgggtgcgtggtccgtgtgtgtaattttgtccggagcagtaattctcggagtgggccccagacccgcagtgtaagcattgcctggtgctgtggtttggacgtgtgtcccctccacatctcatgttgaaatgtatccccagtgttggagtgaggcctacggacaggggtttgggtcaagggtcagatccctcag

SEQ ID NO: 555648 - DNA, 584 bp, Homo sapiens
cccagtactttgggaggccaaggcaggaggatcgcttgaggccagcccacgagtttgagaccagcctgggcagtatagtgagaccctatctctaaaaaaawtaaaataaaaaatttaaattagccgggcatggtggcacgtgcctatagtcctaactactagggaggctgatgtgggaggatcatttgagcccaggagttcaaggctgcagtgagctgtgattatgccactgcactccagcctgggcaacagagctgagaccctgtctctaaaaccaaaccaaacaaaaaaattataaacctccatccacaaaatcccaaagacctcatctgcttctctaataatattatgaatgtgagttatttaaagggcataggtaggagaatgcctgtgggtccttgattgacatgagacccagcaacacagaccccacactcatggggacgccccaggacctgccaggcctacgctttcacgtttctttcacttgtttccttttgccctcttctgccactgtgttgctcccgtgtcagccaagacctagaataccgggcatcttcatgggagactcattacagcttatc

SEQ ID NO: 555649 - DNA, 584 bp, Homo sapiens
cccagtactttgggaggccaaggcaggaggatcgcttgaggccagcccacgagtttgagaccagcctgggcagtatagtgagaccctatctctaaaaaaaataaaataaaaaatttaaattagccgggcatggtggcacgtgcctatagtcctaactactagggaggctgatgtgggaggatcatttgagcccaggagttcaaggctgcagtgagctgtgattatgccactgcactccagcctgggcaacagagctgagaccctgtctctaaaaccaaaccaaacaaaaaaattataaacctccatccacaaaatcccaaagacctcatctgcttmtctaataatattatgaatgtgagttatttaaagggcataggtaggagaatgcctgtgggtccttgattgacatgagacccagcaacacagaccccacactcatggggacgccccaggacctgccaggcctacgctttcacgtttctttcacttgtttccttttgccctcttctgccactgtgttgctcccgtgtcagccaagacctagaataccgggcatcttcatgggagactcattacagcttatc

SEQ ID NO: 555650 - DNA, 601 bp, Homo sapiens
gatacagtaaaacaaaatggcctaaagaaaatgcaaataaaagggtggaaaaacgaataccatgtaaggctcacaatgtagacgtaataatagcagtagcaraagaaatagaattccaggtgaaaggcattaaacaagacaaagagggattttatattgataaaaggtataatccatcaaaaatatataatagtcataaaactacatgagcctaacaatatagtttggaaatgtatcaattacataccaatagaagtataaggagaacacacacacacacacacagtggaagatttaatacaggtagagcatgacagaccaaatagaccaaaatagaaaaaagggtaaagaatatctaaataatacaattaacagacttgaacttatcgagttatactcagtaaatggccaaaaaaaacacattctttttaaacacctcagaaacattcacaaaaattagccaagatttaagtcacaaagaatttaacaaattctacaactgcccctactttgatatagccaaattagaaattagccataaaaacaaaaacccctccaaaatctacttaaaaatttggcactcttcttagtaactcaaagc

SEQ ID NO: 555651 - DNA, 601 bp, Homo sapiens
gatacagtaaaacaaaatggcctaaagaaaatgcaaataaaagggtggaaaaacgaataccatgtaaggctcacaatgtagacgtaataatagcagtagcagaagaaatagaattccaggtgaaaggcattaaacaagacaaagagggattttatattgataaaaggtataatccatcaaaaatatataatagtcataaaactacatgagcctaacaatatagtttggaaatgtatcaattacataccaatagaagtataaggagaacacacacacacacacacastggaagatttaatacaggtagagcatgacagaccaaatagaccaaaatagaaaaaagggtaaagaatatctaaataatacaattaacagacttgaacttatcgagttatactcagtaaatggccaaaaaaaacacattctttttaaacacctcagaaacattcacaaaaattagccaagatttaagtcacaaagaatttaacaaattctacaactgcccctactttgatatagccaaattagaaattagccataaaaacaaaaacccctccaaaatctacttaaaaatttggcactcttcttagtaactcaaagc

SEQ ID NO: 555652 - DNA, 592 bp, Homo sapiens
tgattctcccacctcagcctcttgagtagttgggaccacaggcatgtgccaccacacctggctaatttttggggtttgttttggtttggattttttttttttttggtagagatggcattttgtcgtgttgcccagagtggtcttgaactcctgaccttaagtgatccacccgccttggcctcccaaagtgctgggattacaggcatgagccaccatgtctggtcccaattgcctatttcttatttcctcttggacatytaaggggcaactgaaatttaaaatgaacaaaattgaactcctggtaaactcttcctctgtcttccacatctcagtaaatatctcaggtcaaaaacttgatatcacccttgagttatttcttttctcatgttgtgtattcaatccttcatgagactctgttttctctatctttaagaagtttagcatctgacctcttctcgccacttccattattccctctttattccaagcactatcatctcttgctgtgattattgcacatgtgcttatttaataggggttaggccttctattattattctattttaggtctttctgtcataaatttcataac

SEQ ID NO: 555653 - DNA, 544 bp, Homo sapiens
cttggactttccagcctatagaactgtgagaaatacatttttgttgtttataagttactcagtctaaggtattttgtgatggcaggcattaaggactgagacaatgttgtgtacagcactatcgaatgaagctttctgtgatgatggaaatgttctattgcactgtccagtgatgtagccacaggaacatgtagctgttgagcatttgaaatgtgamtagtatgctgaggagttgaatgtgaattaatttaaactgaagtagtcacatgtgactagtgactcctttgttgaatgatgcactgtatgactttgaaagagcacagtctgcagaatagccaggtgattcatacccacagtaaatgttgggaagaactgttgtacatgatactgacaaaggtagctgtagaccacattttgagaaatactgctccactccctgctcttacagaatccactttcaaaaaacgcaaacgtggtattatcaatcccacttaacgggacagaaggtcaactgctgaaaggcaatataattagtcagtggtca

SEQ ID NO: 555654 - DNA, 349 bp, Homo sapiens
gccatgagggatccgccatcatccaaatacctcccatcaggcctcacttccagcattggggattaaaattcaacatgagatttgggcggcgacaaatatctaaattatatcactgtgaatgtgtccttatttggaaatagggtctttgcagatgtattcaaattaagacgaggtcattacggtgaacactaattcaattaattcaacatgactggtatccttattagagggcaacatttggacatagagacagactctcacagagggaaagcagtgcagacaygggataatacagccctgcgaggggccacgtggtgacgggatggaggcagagagattggagttgggt

SEQ ID NO: 555655 - DNA, 577 bp, Homo sapiens
cactccagttcctggaggtgttggccccatgacagtggcaatgctaatgaagaataccattatggccgggcgcggtggctcacacctgtaatcccagcactttgggaggccgaggcgggcgaatcacgagatcaggaaacggagaccatcctggctaacatggtgaaacccccgtctctactaaaaatacaaaaaaaaaaattarccgggcgtggtggcaggtgcctgtagtcccagctacttgggaggctgaggcaggagaatgacatgaacccaggaggcagagccaagggctctgttttttccagaaattttttaagagtttgagttaatattgaatttaagcagactttctgattaaaggtctttttttcttttttaataaaacacatctgtctggtgtgatatgaatttctgaaattctgtcttcctatgactcctagttgtgacctaacctgagtttttttcttatttaatcaatgtagatattcctatattcagtaacacttacttctatagccttaaatagataatttttttcttcttcttcttcttcttcttcttctttttttttttt

SEQ ID NO: 555656 - DNA, 482 bp, Homo sapiens
ctagacatactaggaggcttgagtgttgcctctttgttgctattcttgctgggctggttacctacatttctttttttcttgcccaggctcttattgagttcatagacaaagggccaccgattttttttttgtcctgttaatgactctccattgcaaacacatgaaagcctgcacccctaagcatggaaagccaagccttctatgatctcaactctgctcacttcttgagtcttctaccttgctgccctgaggggaaccttttctctctggcaagagatctgtggaagrgaactgagaaaaattcttacagagtcctagcaccatttgatctgcttgcatagctttattacttgcctactacatgccaggaattctacaacagactgggatgaaaagatgccttacaaagaagcataacatattctggaagagacagcctgttttcattcagaatgctatcacagaataccatagagcaagtg

SEQ ID NO: 555657 - DNA, 571 bp, Homo sapiens
tcactgcagcctccacctcctgggcttaagtgatcctccgcctcagcttcctgagtagctggaaccacyggcatgcaccaccatgtctggctagtttttaagatttctttttttttgtagagacaagctctccctgtgttgtccaggctggtctcaagctcctgaactcaagtgatcctcccacctcgggttttcaaagtgctaggattatgggcatgagccactgcaccaagcctggcccttgtaaatactattcccatctgatcttcacaaccatcctacaagccatgtattctatttcacttccattttaaagttgaggaaactgagacttagagaggttgagacacatcacacaggttaagtggtagtaaaccacatcttgttgcaaaacctgtgctctaagcctctattatgtcattcatttgggcttcctccatctgtctgtccattcgtcaatcagcaaatagttactgattgcttataggaagcttaatgataatggctaaaaagaaaaatagaggatttttgttgtttaatgacttttaatccttactttccaccaacatct

SEQ ID NO: 555658 - DNA, 571 bp, Homo sapiens
tcactgcagcctccacctcctgggcttaagtgatcctccgcctcagcttcctgagtagctggaaccaccggcatgcaccaccatgtctggctagtttttaagatttctttttttttgtagagacaagctctccctgtgttgtccaggctggtctcaagctccygaactcaagtgatcctcccacctcgggttttcaaagtgctaggattatgggcatgagccactgcaccaagcctggcccttgtaaatactattcccatctgatcttcacaaccatcctacaagccatgtattctatttcacttccattttaaagttgaggaaactgagacttagagaggttgagacacatcacacaggttaagtggtagtaaaccacatcttgttgcaaaacctgtgctctaagcctctattatgtcattcatttgggcttcctccatctgtctgtccattcgtcaatcagcaaatagttactgattgcttataggaagcttaatgataatggctaaaaagaaaaatagaggatttttgttgtttaatgacttttaatccttactttccaccaacatct

SEQ ID NO: 555659 - DNA, 608 bp, Homo sapiens
tgaggtcaggaattcgagaccagcctggctaatatggtgaaaccctgtctgtactaaaagtacaaaaattagctgggcatggtggcgcatgcctgtagtcccagctacttgggaggctgaggcaggagaatcgctttaacttgggaaacagagacagagattgcagtgaactgagatcgcaccactgcactccagcttgggcaacaaagcgagactctgtctcaaatgaaaacaaaaaggccgggcgtgatggctcacgcctgaaatctcagcactttgggaggccaaggcagggggatcacaaagtcaggagatcgagaccatcctggctaacacagtgaaaccccgtctytgctaaaaatacaaaaaattagctgggcgtggtggcacgcgcctgtagtcccagctactccgtaggctgaggcaggagaattgcttgaacccgggaggtgaaggttgcagtgagctgagatcgcgccactgcactccagcctaggcaacaaagcgagactctgcttcaaaaaaaaaaaaaagaaagaaagaaatgcagaatatgttaataacacagattaaacttatatgtgcttgtagactttgtttgtttgctt

SEQ ID NO: 555660 - DNA, 608 bp, Homo sapiens
tgaggtcaggaattcgagaccagcctggctaatatggtgaaaccctgtctgtactaaaagtacaaaaattagctgggcatggtggcgcatgcctgtagtcccagctacttgggaggctgaggcaggagaatcgctttaacttgggaaacagagacagagattgcagtgaactgagatcgcaccactgcactccagcttgggcaacaaagcgagactctgtctcaaatgaaaacaaaaaggccgggcgtgatggctcacgcctgaaatctcagcactttgggaggccaaggcagggggatcacaaagtcaggagatcgagaccatcctggctaacacagtgaaaccccgtctttrctaaaaatacaaaaaattagctgggcgtggtggcacgcgcctgtagtcccagctactccgtaggctgaggcaggagaattgcttgaacccgggaggtgaaggttgcagtgagctgagatcgcgccactgcactccagcctaggcaacaaagcgagactctgcttcaaaaaaaaaaaaaagaaagaaagaaatgcagaatatgttaataacacagattaaacttatatgtgcttgtagactttgtttgtttgctt

SEQ ID NO: 555661 - DNA, 415 bp, Homo sapiens
gtgtgcattaatctcacagagttgaacgtttcttttgactgagcagttttgaaacactctttttgtagaatctgcaactggatatttggagtgctttgaggccaatgatggaaaaagaaacatcttcacataagaaattgacagaaacattcccagaaatttctttgtgatgtgtgcattcaactcacagaattaaacttttcttttgattgagcagttttggaaacactctttttgtggtatctgcaaatggttatttggagtgctttgtggcttatagctgataargaaatatctttacacaaaaactaaacagaagcattctgggaaacttctttgtgatgtgtgcattcacctcacagaggtgaaactttcttttgattgagcagttttgaaacactctttttgtagaact

SEQ ID NO: 555662 - DNA, 415 bp, Homo sapiens
gtgtgcattaatctcacagagttgaacgtttcttttgactgagcagttttgaaacactctttttgtagaatctgcaactggatatttggagtgctttgaggccaatgatggaaaaagaaacatcttcacataagaaattgacagaaacattcccagaaatttctttgtgatgtgtgcattcaactcacagaattaaacttttcttttgattgagcagttttggaaacactctttttgtggtatctgcaaatggttatttggagtgctttgtggcttatagctgataaggaaatatctttacacaaaaacyaaacagaagcattctgggaaacttctttgtgatgtgtgcattcacctcacagaggtgaaactttcttttgattgagcagttttgaaacactctttttgtagaact

SEQ ID NO: 555663 - DNA, 415 bp, Homo sapiens
gtgtgcattaatctcacagagttgaacgtttcttttgactgagcagttttgaaacactctttttgtagaatctgcaactggatatttggagtgctttgaggccaatgatggaaaaagaaacatcttcacataagaaattgacagaaacattcccagaaatttctttgtgatgtgtgcattcaactcacagaattaaacttttcttttgattgagcagttttggaaacactctttttgtggtatctgcaaatggttatttggagtgctttgtggcttatagctgataaggaaatatctttacacaaaaactaracagaagcattctgggaaacttctttgtgatgtgtgcattcacctcacagaggtgaaactttcttttgattgagcagttttgaaacactctttttgtagaact

SEQ ID NO: 555664 - DNA, 615 bp, Homo sapiens
ttaaagtataataataataaaatttaaaaaaagaataaaactgctttgtgatgtgtgcattcatctcatagaattaaacctttctttggattcagcagtttggaatcactgtttttgtagaatctgcgaaggaatatttgggagctcattgaggccaaaggcaaaaaagcaaacatcccaggataagaaatggaaggtagctatctgacaatctgttttctcatgtttccattcaactcgcagttctaaactttcttttcattcagcagtttggaaacactttttgtagaatctgtgagggggtatttkggaaagcattaaggccaaaggtgaaaaagcaaatatcccaggataaaaactagaaagaagctatcagagaaaccactttgggataagtgaattcatctcacggaattaagcctttctttattcagcagtttggaaacactgttttaatataatatgtgaagggatatttggaagtgcagtgaggcctatagtgtaaaaggaaatgtcttcaaataaaaactagaaagaatctttctcagaaattgttttgtgatgtgtgcattcatctcacagagttaatcttttctttggttttagcagtttgga

SEQ ID NO: 555665 - DNA, 527 bp, Homo sapiens
agaagctttctgagaaactgctttgtgatgtgtgcattcatctcacagagttaaacattcctgtagattcagcagtttggaaacactgtttatgtccattctgcgaatggacatctgggarcgcattgaggtcaaaggcaaaaaagtgaaaatcccaggataaaaactagaaggaagctatctgagaaaccactttctgatgtgtgcattcatcacacagtgttaaacctttttttaattcatcagtttggcaacattggttttgtagaatctgtgaaagtatatttgggagtgcattgtggcccatggtgaaaatggaaatctcttcagataaaatccagaaagaagctttctgtgagactcctttgtgatatgtacattcatctcacagagttaaaccattctttggattcagcattttggaaacactgtgtttgtagaatctgtgaagggatatttgaaagttcatggaggccccaggcaaaaaagggaatatctcaggaaagaaactagaaggaagttatctg

SEQ ID NO: 555666 - DNA, 527 bp, Homo sapiens
agaagctttctgagaaactgctttgtgatgtgtgcattcatctcacagagttaaacattcctgtagattcagcagtttggaaacactgtttatgtccattctgcgaatggacatctgggaacgcattgaggycaaaggcaaaaaagtgaaaatcccaggataaaaactagaaggaagctatctgagaaaccactttctgatgtgtgcattcatcacacagtgttaaacctttttttaattcatcagtttggcaacattggttttgtagaatctgtgaaagtatatttgggagtgcattgtggcccatggtgaaaatggaaatctcttcagataaaatccagaaagaagctttctgtgagactcctttgtgatatgtacattcatctcacagagttaaaccattctttggattcagcattttggaaacactgtgtttgtagaatctgtgaagggatatttgaaagttcatggaggccccaggcaaaaaagggaatatctcaggaaagaaactagaaggaagttatctg

SEQ ID NO: 555667 - DNA, 527 bp, Homo sapiens
agaagctttctgagaaactgctttgtgatgtgtgcattcatctcacagagttaaacattcctgtagattcagcagtttggaaacactgtttatgtccattctgcgaatggacatctgggaacgcattgaggtcaaaggcaaaaaagtgaaaatcccaggataaaaactagaaggaagctatytgagaaaccactttctgatgtgtgcattcatcacacagtgttaaacctttttttaattcatcagtttggcaacattggttttgtagaatctgtgaaagtatatttgggagtgcattgtggcccatggtgaaaatggaaatctcttcagataaaatccagaaagaagctttctgtgagactcctttgtgatatgtacattcatctcacagagttaaaccattctttggattcagcattttggaaacactgtgtttgtagaatctgtgaagggatatttgaaagttcatggaggccccaggcaaaaaagggaatatctcaggaaagaaactagaaggaagttatctg

SEQ ID NO: 555668 - DNA, 527 bp, Homo sapiens
agaagctttctgagaaactgctttgtgatgtgtgcattcatctcacagagttaaacattcctgtagattcagcagtttggaaacactgtttatgtccattctgcgaatggacatctgggaacgcattgaggtcaaaggcaaaaaagtgaaaatcccaggataaaaactagaaggaagctatctgagaaaccactttctgatgtgtgcattcatcacacagtgttaaacctytttttaattcatcagtttggcaacattggttttgtagaatctgtgaaagtatatttgggagtgcattgtggcccatggtgaaaatggaaatctcttcagataaaatccagaaagaagctttctgtgagactcctttgtgatatgtacattcatctcacagagttaaaccattctttggattcagcattttggaaacactgtgtttgtagaatctgtgaagggatatttgaaagttcatggaggccccaggcaaaaaagggaatatctcaggaaagaaactagaaggaagttatctg

SEQ ID NO: 555669 - DNA, 583 bp, Homo sapiens
atttggcagcccgttgaggcctatggtgaaaaaggaaatatcctcagataaaaactataaagaagctttctgcaaaactgttatgtgatatgtgcattcatctcacagcgttaaacttctcattgcattgagcagtttggaaacaatgttttgtccattccaygaatggacatttgggagctcattgaggccaatggtgaaaaagtgaatatccaagaataaaaactagaaggaacctatctgagaaaccactttgtgatgtgtgcattcctcttgcagagttcaaactttcttttcattccaaaatttggaaatgctcttttggcagaatctgcaaaagcatatttgggagggcattgagtcctatggataaaaattaaataacttcagatgaaaattagaaagaagctttatgagaaactgctttgtgatgggtgcatccatcccacaaaggtaaacctttctttggattcagctgtttggaaactgttttcatgcattctgtgaatagatatttgggagctagttgagaccaatggtgaaaatgtgaatatcccaggataaaaactagaaggaagctatc

SEQ ID NO: 555670 - DNA, 582 bp, Homo sapiens
tgtttccaaactgctgaatgaaaagaaatgttcaactctgtgagatgaatgcacacatcattaagcagtttctcagatagcttccttgtgcttttatcctgggatattcactttttcaccattggcctcaatgagctcccaaatgtccattcgctgaatgtacaaaaaccgtgttaacaaagtgctgaatacaaagaatggtttaactctgcaaggtgaatgaacacaacacaaagcagtttctcagaaaccttctttctagtttttatctgaatatatttcctgttcaccatagacctcaatatcctccgaaatatctcttcacagattctacaaraacagtgtttccaaactgctgaatataaataaaggtttaactctgtgagatgaatgcacacattagaaagtggtttctcagatagcttccttgtagttttcatcctgggttatttccttttttgccatcagcttcaatgagctcctaaatgtccattcacagaatggacaaaaagagttattcaaattgctgaatccaaagaaagttttaactctgtgagacaaatgcacacatcacaaatcagt

SEQ ID NO: 555671 - DNA, 582 bp, Homo sapiens
tgtttccaaactgctgaatgaaaagaaatgttcaactctgtgagatgaatgcacacatcattaagcagtttctcagatagcttccttgtgcttttatcctgggatattcactttttcaccattggcctcaatgagctcccaaatgtccattcgctgaatgtacaaaaaccgtgttaacaaagtgctgaatacaaagaatggtttaactctgcaaggtgaatgaacacaacacaaagcagtttctcagaaaccttctttctagtttttatctgaatatatttcctgttcaccatagacctcaatatcctccgaaatatctcttcacagattctacaaaaacagtgtttccaaactgctgaatataaataaaggtttaactctgtgagatgaatgcacacattagaaagtggtttctcagatagcttccttgtagttttcatcctgggktatttccttttttgccatcagcttcaatgagctcctaaatgtccattcacagaatggacaaaaagagttattcaaattgctgaatccaaagaaagttttaactctgtgagacaaatgcacacatcacaaatcagt

SEQ ID NO: 555672 - DNA, 408 bp, Homo sapiens
ttctcagatagcttccttctagttttaatactggatattcactttttcaccattggcctcaatgagctcccaaacgtccattcacagaatggacacaaacagtgtttccaaactgctaaatccaaagaaagttttaactctctgagatgaaagcacataccacgaatttgtttctcacgtaagttccttctagtttttatcytgggatattttcttttttgccattggcctcaatgtgctccaaaatgtccattggcaaaatagacacaaacagcatttccaaactgcggaatctaaagaaatgtttaactctgtgagatgaatgaacacaacacaaagcagtttctcagaaagtttctttctagttttcatctgaagatattttctttttcgccttaggccccaagg

SEQ ID NO: 555673 - DNA, 408 bp, Homo sapiens
ttctcagatagcttccttctagttttaatactggatattcactttttcaccattggcctcaatgagctcccaaacgtccattcacagaatggacacaaacagtgtttccaaactgctaaatccaaagaaagttttaactctctgagatgaaagcacataccacgaatttgtttctcacgtaagttccttctagtttttatcctgggatattttctttyttgccattggcctcaatgtgctccaaaatgtccattggcaaaatagacacaaacagcatttccaaactgcggaatctaaagaaatgtttaactctgtgagatgaatgaacacaacacaaagcagtttctcagaaagtttctttctagttttcatctgaagatattttctttttcgccttaggccccaagg

SEQ ID NO: 555674 - DNA, 454 bp, Homo sapiens
actttttcaccattggcctcaatgagctcccaaacgtccattcacagaatggacacaaacagtgtttccaaactgctaaatccaaagaaagttttaactctctgagatgaaagcacataccacgaatttgtttctcacgtaagttccttctagtttttatcctgggatattttcttttttgccattggcctcaatgtgctccaaaatgtccattggcaaaatagacacaaacarcatttccaaactgcggaatctaaagaaatgtttaactctgtgagatgaatgaacacaacacaaagcagtttctcagaaagtttctttctagttttcatctgaagatattttctttttcgccttaggccccaaggtgctgccaaatatcctttcactgtttctacaaaaacagtgttttcaaactgctagatgaatgcacacatcactaaacagtttctca

SEQ ID NO: 555675 - DNA, 364 bp, Homo sapiens
ttggtgatgtgtgcatttatctcactgagttaaaactttcttttcattcagcagtttggaaacactgttttggtagaaccttcaaaatgatatttgggagcacattgaggccaaaggtgaaaaagtgaatattccaggataaaaatttctctgtcatgtgagcattcatctagcagagttaaacctttcttttcattcagcagtttggaaagagtgttttcttaaaatctgcgaatagatatttggtagcrcattgtggcccatggtgaaaaaggaaatatcttcagataaaaagtagcaagaattttctgagaaactgctttgtaatgtgttcattcatccaacacagttaagcttttctttg

SEQ ID NO: 555676 - DNA, 630 bp, Homo sapiens
ttcattgagcagtttggaaacactgttttggtaaaatcttcagatagataattgggaacacaatgaggttatgttgaaaaaggaaatatcttcagataaaaactagaaagaagctttctgagaaactgctttctgatgtgtacattcaactcacagagttaagccatactcaggattcagcactttggaaacatagtttttgtcgaatctgtgaagggatatttggagctcattctggccaaatgcaaaaaagtgaatatygcaggataaaaactagaaggaagctatatgagaaacagcttagtgatgtgtgcattcatctcacagagttaaacttttctttggatttagcagattgaatatattgtctttgtagaatctgtgaagggatattttggagcacactgaggtctatggtgaaaaaggaagtatcttcagataaaaatagaaagaagctttctgagcagctgctttgtgatgtttgcattcatctcacagagttaaaactttctttggattcagcagttctgaaacactgtttttgtataatctgttaaggggtatttggagttcattgaggccaaaggtgaaaaaagcaaatatcccaggataaaaaccagaaggaagcta

SEQ ID NO: 555677 - DNA, 355 bp, Homo sapiens
aattttttttttctttttttaatggggcctgaattgtttcccttccctgacctgacctgtacaataagagtttgccgaccacaggtctaaagagaaaaagttctcaaacttttaaaatcactttcatgtggtgcttctagtaacgtcttgcaggtggaacacagaagggaggcatctgggctggggccttccccagctgcagagctgtttattttycttcccccgatgaagttgaccttggcttcatcactttccattctgcacagttatttaactactgctcttgttaccatcaacattttctcctcttagacaagatgctcaaaataaatgagttttggtacaacgacaagaa

SEQ ID NO: 555678 - DNA, 491 bp, Homo sapiens
gtctaatgtggctggtgactgtaagttaaagcccgcactcatttatcattctgaaaatcctacggcccttaagagtatgctaaatctactctgcctgtcctctgtaagtggaacaatayaggctagataatagtacattggttcacagcatggtttactgaatattttaagccacagttgggacctactgcttagaaaaaaagattcctttgaaaacattacagctcattgacactgcacctggtcacccaagaactctaatggagatgtacaaggagatgaaagttgttttcatgtctgctaatatagcacccattctgtagcccatggatcaaagattcattttgattttcaactcatagtatttaagacatgcatgttttaaagctatagctgccttagattgtgattcctctgatgggtctgggcaaaataaattgaaaaccttctggaaaggagtcaccattctagatgccattaagaacatttgt

SEQ ID NO: 555679 - DNA, 491 bp, Homo sapiens
gtctaatgtggctggtgactgtaagttaaagcccgcactcatttatcattctgaaaatcctacggcccttaagagtatgctaaatctactctgcctgtcctctgtaagtggaacaatacagsctagataatagtacattggttcacagcatggtttactgaatattttaagccacagttgggacctactgcttagaaaaaaagattcctttgaaaacattacagctcattgacactgcacctggtcacccaagaactctaatggagatgtacaaggagatgaaagttgttttcatgtctgctaatatagcacccattctgtagcccatggatcaaagattcattttgattttcaactcatagtatttaagacatgcatgttttaaagctatagctgccttagattgtgattcctctgatgggtctgggcaaaataaattgaaaaccttctggaaaggagtcaccattctagatgccattaagaacatttgt

SEQ ID NO: 555680 - DNA, 491 bp, Homo sapiens
gtctaatgtggctggtgactgtaagttaaagcccgcactcatttatcattctgaaaatcctacggcccttaagagtatgctaaatctactctgcctgtcctctgtaagtggaacaatacaggctagataatagtacattggttcacarcatggtttactgaatattttaagccacagttgggacctactgcttagaaaaaaagattcctttgaaaacattacagctcattgacactgcacctggtcacccaagaactctaatggagatgtacaaggagatgaaagttgttttcatgtctgctaatatagcacccattctgtagcccatggatcaaagattcattttgattttcaactcatagtatttaagacatgcatgttttaaagctatagctgccttagattgtgattcctctgatgggtctgggcaaaataaattgaaaaccttctggaaaggagtcaccattctagatgccattaagaacatttgt

SEQ ID NO: 555681 - DNA, 549 bp, Homo sapiens
tagatctcttgtttagcactcttaccacaattwaaaaaaaaaaaaaaaaaaagtaagatgtgagctggcccacccagcagagggcagtgcagtgcacacaaccaaccactgcagctagtggccacaggaggcctggactgatcctgtggctgagcaacggcacaggtgtttttccttgagcgggggagctgggtggcaattgttgtttctttttgtttgattctactttgttttcatcttaaaatcctggttttgttaaagtgaaatttttttcttaaaaattgacaccagcaataaaaatgatgtgtttcttcctccaaacttgaagagtggaagaaaattaaagttcatttggatatggtgcagattctaataacatatatcagtttacagttgggcacgctcatagctgtaatttcagcctttgggaggccaaggcagatggatcacttgagcccgggaagccaagaccagtctgggacacatagtaagaccctgtctcaacaaaaaacatcaaaaaaattagccaggcatggtggtgcacacctg

SEQ ID NO: 555682 - DNA, 310 bp, Homo sapiens
aaattattttgataatttagtaccttctaattacttttctggtacataaataataataacagcagcttgaattccacgtccagtttgccccagtgacatgtccactcagttttacgtatttgcatgactcatcctgtccagtactaaattacatctaaaatcaagacaatggaagcaataggccaaaggacaaataagattcccwaaacaaccttgttagtaatcccttatgaatattccctaatctgcttccccatcatcaaaaggaatggggagagataagttttttacagtggggttgggatggtga

SEQ ID NO: 555683 - DNA, 565 bp, Homo sapiens
taaaaagcgatcacagaaacaggcacacatgcgtttaaaaagaggcctcagaaaaacatctttcctgtagaattaacattgatcttcaatagcttgtcccacttttgcattctttttcacagatgaaatagttgttctccattgtaaggcaaaaccgctttaagaactcagggttcaatcctgttgctattctcaggatttacttctggtgttatggtgttttttctttgtaatttcattacaaaaaatgtttataggctacttctgagccataagctttgattactttaatgatcacacaacacatattctgtaagcatgctttcgatgtgcatcctggtgtgtgagtatttaattatattacttgaaacaattcatagctgagaagaagataaggttaactttggtaagggagaatgtgaaaattgccctccaattcttttctaatgaaactgtgttygtgtctgtgtgtgtgtgtagatatatatatatatatatgtgtgtgtgtgtgtagatatatatatatgtgtgtgtgtatatatatatgtgtgtgtgtagatatata

SEQ ID NO: 555684 - DNA, 588 bp, Homo sapiens
tatgaaaaatgcttctttcacagtttttcacaatatatttgaaaaaaacatttcaatgcatttattcagacatgattagactttaaggttctaggaacaaagatgttcagtgaaaggcaacgagtttcactgcatgagaacaaaatgcatattaccacccactactgtgtctaacaccacattccagtttctggttcttacattgaagtttgaatgccctctagattatagcatgctatttagcacccaagtatttctttgtaaataccaaggattgcaatcccaaaaatattaagtcatcagtgtaaaattcaattagagttctaagattactgattcatagataattagtattgtggtcaagaataaatttaaggaatgattaaaggaagcacagtcaagcacactttggttttttgtttctaactcaagactttggtttcaagactctctttctttcagtgcttttcatattggacctcaagtgagatkctccttaatctgtcctcggcaatccagactccagtacccttgatattttccaagcaagccatggctgttcttgactctagggccttttgcccatca

SEQ ID NO: 555685 - DNA, 572 bp, Homo sapiens
tccttgttaatgtaatctagggatacaaattcaagttgttaatacatttgtattttctgttttatataccttccttttcaaaaaatcaattaatattagaattctattcttaagtagatttgtaacaattatttaaatttgtttctacttctttggggttccaggtttctctactcatcctttcatatgatggtttccttatgtgtgggaagtcttatgcttcatttctggattggttcatgtattcatacaaattttttccagaaaaatgtggtatatattatatgagctcttatatataagaacatgctttcctattgtttttgtaagcaaaaaactccttggttgtgtataaaatggaatcaccacttttttttactgcatgcatattacatacatgtatattacacgcattacattatatgtaacatgaatggtgcagtttcagcctaccataccatagctgtggatccaggcatttctgtactcctgggggttggggaaggtccctgctgccctagctggctcagaagtgcttgctccygctgtctggtttctccttgctgtccgtg

SEQ ID NO: 555686 - DNA, 492 bp, Homo sapiens
caggaggctgaggcaggagaatggcgtgaacccgggaggtggagcttgcagtgagccgagatggcaccactgcactccagcctggatgacagagcaagactccttctcaaaaaaagaaggtgcaaacacacacattagcctaggcctaattcagggtcagggtcaggattttcagcatcactgtggatgtcttccacctccayatcctgtcccactggaaagtcttcagcaacaataacgtacgtggaggtgtcatctcctatgagagcagtgtctttttctagaacatctcctgaaggacctgcctgaggctgttttatagttaactcttttaataagtgtaagaagtacactctaaaataatgataaaaagtatagtaaatacataaactgataacatagttgtttattattttcaaacattatatattgtacctaattgtatgtgctgtacttttatacagctgatgatgcagtaggtttgtttacacc

SEQ ID NO: 555687 - DNA, 583 bp, Homo sapiens
caagcatatgaaaaaaagctcatcatcactggtcctgagagaaatgcaaatcaaaaccacaaccagatatgatctcatgccagtcagaatggcgattattaagaagtcaagaaacaacacatgctggagaggctgtggagaaataggaatgctattacactgttggtgggtgtgtaaattagttcaaccattgtggaagacagtgtggcgattcctcaaggatctgaaaccagaagtattccaggtgtttttaactctatgtgaaaattaacgctgtggaaatactgagattgakgttcttgtaaaaaataaatgtgtgtgtggttatgaaatgcaaacataattattaacctccagttttgactcagaatgatgcatatataaagctatttaatcaattaaatttgaaagttgaagtcaggcatagtttagtgatttttttgacagtttgcccattcttaggagatgtttttgaggcttgacttggagtcaaaatatccatagaattctgaaattattcattccctagattaccttaagtatgtgtttaacaattttacatatgtgtttttaggaattaatt

SEQ ID NO: 555688 - DNA, 364 bp, Homo sapiens
atgtattccatgacgtcttcctcctaattcctatcatgttgcccaggggaatcatatcctctgaagggataaagggagtcttcctcttaatagaagggggtccttgaaatctcctgtaamatttttcatacactgaaaatgatagacacccagtcttctggttagtataatgcatatcatattaaaattatgaaaacaaacaaagcaaaaacaatgtgaagagctctgttgtagttctgttagtcaaaatgcaatacaggtcaaagcaaatagccagttgtcctaatagtgttagagtctaatgcccagctgtatgtgattctcctctctgttggaggctatagaaagatccccatgcctctga

SEQ ID NO: 555689 - DNA, 371 bp, Homo sapiens
aattcctgaaagagttgaggctgagggtaatattctttttgaaatttagatgagcaggattttaatgtactaaagaaggaatgaagatttctggtgtggggatagggtttattgttgctttttttccwctctttcattgtcctcagttgctggttgtttctttattttgctcattcatatattttgcttaaaaaactattgtttatttgtttaaaaaacaacttttttattggcataagaaaaacttgaaccatagatgatgtaacaatctttaatttttcatcagtgttagctgttcctctttatttaacatttgtatttcatgtcctgctaatcaattttataagtttagcgatttttcattgtaaacc

SEQ ID NO: 555690 - DNA, 555 bp, Homo sapiens
acaatgtatctcaaagtggtttacaagaaattcattaaatgttgtagagatagagccaagcagcgctcccaggtgcaagggtttctcttaggcactctgtctcatgatacaaaaagtcaagactgttcacagagttatccatatttgaaagggacaacaacaaagagttaacactgggtacatgatcgtattcaatgaagtaaaacagctataaaaggaagacgatgacctattaaataaaaatgctggcattactgtawgatacagtttaaatgagccaccaataacttacaaatacatatcttaatttgacaatgaaagaaacctcttgtatgtgaaacttggtgtttaacaataaaggtacagaaatttaaaaatatataaaaatatgataagtccacaattgtaggcaataaatttatattggtgatttataataataatttttttcagtcattatgtttagtggctagaccaaaatatttttctaatccattgttaaatgaaaattaaaagtgtcaaaataatgctaaatttgaagactcagctggaagg

SEQ ID NO: 555691 - DNA, 612 bp, Homo sapiens
gtgtttccactccagcttacttttttccatttttcaccaagaaacacaattgaaaagataagggaagagatttttttaaaaggcaactggagagaaagaaaagccaaatagctgaccagctagaattcatttctaattgtatgtcagaaaaagttatttagtggccccaggctttgttcttatttaatctgtatagcaagtgctctccactgaggatcagagaacatataaaggaaattctaaaattgttctcaaatttttggccaagtgcccatgaatatttcctttcatagatgttgttagtttccccagattctcagataatattttcacaagcgatttttaaaaattagaagctgttagattggttcctcgggtattttagattacttcagactgatagatgcagatctataaactaaaacctaatcattacctaaaattaccaggtggcaaaactaaacataaggtctttacaaaaagaacaaaattgtgccttgtgctttctgacttacttagagagtgcttcccaatggccatgggtttatgatacagtaataaaattatatgcatataatatgttttwtaatctaaaagtcaatttgatacaca

SEQ ID NO: 555692 - DNA, 640 bp, Homo sapiens
aaaaaaaaaatcattcagacaaaagagatcaagcctgtatgtatgtgtggtggtgtgtgttaggaggtgggagaagatcttaaataaggtggcaaaggtgtctctcactgagaaaagattcagggaaacaaaatacttagccatgatgaagtcctaaggaagggcattctaggtagagtaaacagcactgccaaagccytctgctggggcatggctagctttctagaggaagattaggaggcctgtgtggctggagcagagtgagcatgaagaagtgtaatggggaatgaaagcaaatgatttcaaatatatcagacaacacaggcaaatgcacctttatcaaatgctttcaatgtttttattgtggcaatgtaaatacataacatataatttataaatttaacgattttcaaatgtactcgattttcaaatgttcagattaagcacctgaaagcttacttccctctgaagcaaacaaacagcaacaacaaaatggttttaagtataaatgttgccttaggaggattataggttgggtgtccataaaatgcatcatccaaactgagaaacttttgagagtgaaaggggatcctaaatgtacaagagatcgaccacaacaatgggaataaacttggcatgc

SEQ ID NO: 555693 - DNA, 640 bp, Homo sapiens
aaaaaaaaaatcattcagacaaaagagatcaagcctgtatgtatgtgtggtggtgtgtgttaggaggtgggagaagatcttaaataaggtggcaaaggtgtctctcactgagaaaagattcagggaaacaaaatacttagccatgatgaagtcctaaggaagggcattctaggtagagtaaacagcactgccaaagccttctgctggggcatggctagctttctagaggaagattaggaggcctgtgtggctggagcagagtgagcatgaagaagtgtaatggggaatgaaagcaaatgatttcaaatatatcagacaacacaggcaaatgcacctttatcaaatgctttcaatgtttttattgtggcaatgtaaatacataacatataatttataaatttaacgattttcaaatgtactcgattttcaaatgttcagattaagcacctgaaagcttacttccctctgaagcaaacaaacagcaacaacaaaatgsttttaagtataaatgttgccttaggaggattataggttgggtgtccataaaatgcatcatccaaactgagaaacttttgagagtgaaaggggatcctaaatgtacaagagatcgaccacaacaatgggaataaacttggcatgc

SEQ ID NO: 555694 - DNA, 479 bp, Homo sapiens
ttaatgaaaacgattactaatatttaattactttgtttttactcggtttagttttggtactctggtctagaaatagaatttatacattttaatgcaaaacagttatgtacttatacaaacaaaaatatacatagatgcttacaatattaaaattgtgtatctgtcttttctgaaatataaatgtaataaatctctgttgcatctcatcactcattgttacaygtcttccaattttacatgagttgctttttagacagagattcttataatccttctctaaaagattttgtggtacctgaagccaatacagtactctttgaataattattttactctgtagagtttttactgaagctgctaaaaaaagtcttaagaaaatgttataatttgcatcccagtaattaagcgaataaaatcaacatacattcatcttgaatttcaactacctagatactttactacttattttagaagttttt

SEQ ID NO: 555695 - DNA, 512 bp, Homo sapiens
aggaaaaaattaggtgatttattcaggcaaaaactaaccaaaatataaaattcagaaaaaataaaaatgtaaaactttaatagttttcatattttatgaaaacaagaaaagttaaatctcttgaagttattaggggcattatataaaaaggcaacttattgcaactatctctttagacaaaggagggagagattattaatgaaaccatttttataatctagtttttcgtaatggaaagaattcggcagagaaagattattgtgtttcagctccttaatattgcatcccgttttaactttccttgaatagcaaatagctaaagcggtatacaratgtgttacctttggcttcatgggaaatgcatatttcaagaactttaatcatctagagaagaagtttaccaaactcaaaacagcagtttttgctgtttaatttttcttacgaataagaaagaatctgaaaataaaaaagaaaagaattgcacaataatttagggtattgtccaaaccaac

SEQ ID NO: 555696 - DNA, 530 bp, Homo sapiens
agagacatggagaaggggtggggggttcttgccctccagaaaagcagagaaggggtcgggggggcagaaataaggggttggggcacagagataagagattgggatgcagagataagaggttggggcacggaaatgagggatcagggtgcagagataagaggtcagggttcctgcccctcccccagaaaagcgggacttgccgctaagggtgaaggagaaggggttgaggggttctcgcccctcccccagaaaagcagagaaggggtagagacacggagagaaggggttgggattcttgcccctcccccagaaaagcaggacttgctgctaagggtgaaggaccaaggcaggcatccttgcrtggtttgacacctctgaaacctgggtgaataatcagagaggcatccctgcaatgattaaacaccaagggaaggctgccttccctagtccgtgactggcaccagagttttgggtccacagataaaacgtgtctcctttgtctctaccagaaaatgaaaggaattgaaatt

SEQ ID NO: 555697 - DNA, 539 bp, Homo sapiens
ctgttctgtctatccgagtgggaactgcaagttagtactgcctcctatctgcctttttttcctgtaagttattttttgagtaaatttaggtaatttatatttttctaaaaaatctgttttatccagattttaaggctaatatgaatatgttttagcgaaggattttatttcccaatgtaacagtttttccatttttacttttaaactagcatttttttttttttatctttccagtctccyttgtttaactagtggattatctagtttcttttccaaaaaaaatctttttttttcaaatattccttaaggtttcaaatttattaatctctactttttaaaattaaatgatctctgctttccttacacttctttgcattttctaacttctttagatgaatgtttaattaatttttcaagactatatgtttcatgcgtgtccgtgtgaagagaccaccaaacaggctttgtgtgagcaacatggctgtttatttcacctgggtgcaggcgggctgagtctgaaaagagagtcagcgaaggca

SEQ ID NO: 555698 - DNA, 576 bp, Homo sapiens
caacttttttttttaatttgcagcagtagcgtaaagaatataattggattacttttgcaagaggaagtattttccttttgtgtcacttttccgtgtcatagtgaaaccttataatttgatgttgcctcagtatccattttgaataccagtttaactttcttatactagaagcaaggctcagtcatgcttgacacagtttccaattctatatcttacccaagtagctcaagccagtggccagagataactcagatccatctcttctgcctaccctagtagactgggctctccctttctggcccctttctttagaggaaactctgaggcatttgcccacaaacttaaagtgacccaagctctgttccctcatatatacctctagttgccacttmtctctgtttctgcttgacccttcatttctgccttgtgcgactcaggaaggaagtctgccctcctgactcatgcccgccttgcccaggatctgtaagtaaaaaagtctttggagttattttctattgtgacagtgtattgaatttgtaccttccatctgccccaagggagaataaaaggttggac

SEQ ID NO: 555699 - DNA, 528 bp, Homo sapiens
ccctttctggcccctttctttagaggaaactctgaggcatttgcccacaaacttaaagtgacccaagctctgttccctcatatatacctctagttgccacttctctctgtttctgcttgacccttcatttctgccttgtgcgactcaggaaggaagtctgccctcctgactcatgcccgccttgcccaggatctgtaagtaaaaaagtctttggagttattttctattgtgacagtgtattgaatttgtaccttccatctgccccaagggagaataaaaggttggactcacagtgcccgagcaatggtcrgcctggcataaactagacatgggccaaaggagccacaagggcatctcccagtataagcggttatctcatgtgagggatcccctggttactggttggacaactagtcaccaggtcaaagaagtaccctataaaaatacccatgtccagctccccttcattttccattaggacagggttgctagccactctggtcctggaacccttatttagcttggtgc

SEQ ID NO: 555700 - DNA, 610 bp, Homo sapiens
aacagtttggaggttcctcaaaaaactgaaaattgagctagcatatgatcaggcaatcccactgctgggtatatatccaaaggaaaggaaattagtatattgaaaagatacttgcacttcaatgttttctgcagcactatttataatagctaagctttggaagcaacctaagtgtccatcaatagatggatggataaaaaaatgtggtacatatgcactggagatcattatgttaagtgaaataagccagacacagaaaggcaaacatcatatgttctcacttatttgtgggatctaaaaatcatgaactcacrgacatagagagtagaacgatggttaccaggggctgggaaaggggagagctggatggggcggggaggtgggaatagctaatgggtacaaaaaaatagaatgaatgagacctactatttgatagcacaatagagtgactatagtgaataataacttaattgcacattttaaaaaagagtgtaattggactgtttgtaactcaaaggataaatgcttgaaggaatgaacacctcattctacactatgtgcttatttcacattgcgtgcccatttccaaatatctaatgtaccccataaa

SEQ ID NO: 555701 - DNA, 574 bp, Homo sapiens
agatgatgagttaatgggtgcagcacamcaacatggcacatgtatacctatgtaactaacctgcacgttgtgcacatgtaccctagaacttaaaatataataaaaataaataaataaggaataatttcaatttaacaaatatacattttaacctttattacatcaatgaacagtttatatcagcttgaagaaaaatataattcactctaataaatatgttccatttctcaacaatgactattgtgttagagctaaactataaagcacaaacgtaatttaaattatttcacacctcctcatttgtaaaaatttctacttttatttatcttttctaattgatcttttttttttgctcgttcttgagaggacacagtagaaaatgaaaaaacagcagggagtaaagttttgatagtatcattacacaggagggttttctccttatagaagttctcttactgttatcagtgttaaaacgcctttcattatgtgtgtgtctttgaaaattatattaataatttttaaaagatccaaagcttcatttgggactggacacaaaggggtggataattagttg

SEQ ID NO: 555702 - DNA, 560 bp, Homo sapiens
tgtttgtataaaatattatgatatttataaaatatattactactatagcatacacatatgtgtgtgagtataggcatagctatatgtatttacataaaatgtgtctaacaatcaatatttatctccatcaattgatctatcaatcaatgtatctatctatctaatttctctgaatttaaaagttaatactargcatttaattggcatatattatatatttgtgaaagaataagtaaatgaatgtataactgagtgaataaatgcttttattaataagcctcataattgaaaatttttcctattaattaaaattatttcaagatttacttttaataaaggatatgtgttgaaaaaatataacaatcaacatttttaagtgtattttgtattacatctcttgttcttccctcccacggctgatacctttgtgtactgctgggttattatctctcactcaatcttattggcttttcttgtaaatatacctacctgccatgtatttcattgtaagaataattatttaaaaatttggcttagcaaaataactctacaagaagcaa

SEQ ID NO: 555703 - DNA, 579 bp, Homo sapiens
aatgagagacaggcttaaggaatacctctaagcctcagttttcttaagcctaacaatgggatgaccacatgagatgtggtccctggcaagcagcccccaagccacagtgtggaccatttaaagtcatggagtgtggaccatttaaagtcatggacctgcccaggtacagacactgtcaagtcctggctacacttttcytaaatacggtgacatggaaaagttaattgtgtagaaaatagtctttctcgtcttttaggacttcatgtgctgaacagtattttcaggctttaagctaaaggcactgggttctgtggatgctagatagcatttctgatgctctatctttaacattttagtgcctggcacagatcactgctgcaaattctcgttaaagtcttgtttaagttcattgtttaagttttgaactgcctttacctctaggagaaacaggtgaggaggggctagcaaaccctcgtttatatggctttacacaggctaaaatacatgccttatcaagaatttcatttggctctggatttttaaattatatgagctctgattacaacctcttttttttgg

SEQ ID NO: 555704 - DNA, 395 bp, Homo sapiens
tctagactagtggtccccagcctttttggcaccagggactggttttgtgatagaaaatttttccacagacagggagcaaggatagtttcaggatgattcaaatgcattacatttattgtgaattttatttctattattattacattgtaatatataatgaaacaattatacaactcactataaggtagaatcagtgggagccctgagcttgtttttctgcaactaggcggtcccatctgggggtgatgggagacagtgacagatcatcaggcattagattctcataagaagcatgcaacctagatccttcacatgcgcggttcgcaatagggttcatactcstatgagaattgaatgctgccactgatctgacaggaggtggagctcaggtggta

SEQ ID NO: 555705 - DNA, 640 bp, Homo sapiens
actctgtcacccaggctggagtgcagtggcgcagtcttggctcactgcaacctccgcctcccaggttcaagcagttctsctgcctcagcctcctgagtagctgggattacaggcgcgtgccaccacacccagctaatttttgtatttttagtagagatggggtttcaccatgttggccaggctggtcttgaactcctgacctcaagtgatcctccaacctcgacctcccaaagtgctgggattataggcttgagccaccgcaccctgtcaaaaataagttttctgataccaaaacaatctctggttttatccagccctatgaccttaggaattttcctaactgatgtttgcttcagtttattcttatcttagatgggtaattcattaagtgtaaaatatttaaaggtaattttaatacacaaagtttttaattttttgtttctgtttattttgataattctctagaaagcccgagtttccctgttcttctcttagccctgccagcagccagctttctgatttggggcaaattatttaaccttggatactttcatctataaaatgtgaggactgatcttcatctataaattgtgaagactgatttgtactatttggttgaaatctaatttctgtgattatt

SEQ ID NO: 555706 - DNA, 383 bp, Homo sapiens
aattgttttttagaatagatatgatagtttagatatatatttaaaaaaataacagattataaatgtttacttaaagttttataattgagtaatatttattttctggctcaccatttgtaaaatataatatctattaccaagcaaatactttaataaagttttgtaagaaatattacaactactgctactattactaaaaacaattgccctcaaagagcttccagtttttaacaatcttatgtggatctaggcaatcacatttaggggataaaaaataaagttgaagtgtacaagaagttttttttaaaacatggtcttttattgtacctttgaaaaagatagagayacatagatcttaaaatataattccagggagggaattc

SEQ ID NO: 555707 - DNA, 552 bp, Homo sapiens
aatttgccaaccacctacccagtggttaggctactaaagtggaaagtttcattcccaattaatgcaccatttttctcagagactttgaacagacatgtttttgatccatcaaatctttctgtcctggggttgtgtttggtttttattccaattctaaggtctgtctgaacacgctgtgccttgagccatgtagcacacagaaggacaaatgatttcttcttattattmtttttattaacaattgaagggaatagttaacatttaagaaaaaaaaagactgacttgagagaaacttttggttattttctagtgagggaaaaaaagctctaaatgcagtatgtcaatcttgtttcctagataacaaagcaaatctaaaacagttttgaacttttttccttattccctttatcatgaatgtttaatatccaaaggagccaatttttgttgagaattagcttccaggtttggaggctattagcaatcaccacagggagcctcacactccagttctatttcccatcctttttcctgaatcagaatcattttctgtgt

SEQ ID NO: 555708 - DNA, 549 bp, Homo sapiens
aagcaatcctcccactcagccttttgagtagctgggactacaggcatgcaccacgatgcctggctaatttttaaaaayttttttgtaaagacagggtcttgctgtgttgcccaggctggtcttgaactcctggcctcaagcagtcctcccatgttggcctcacagagtgctgagattgcaggtgtgagccacggctctcagccctaaatccactttagttggttaggaattggtggcaatgcaggagtgactcagagttggagtatttatgttgaaaggttaagaatagtgttagacacagttctactcagctataccacatagtgtggaagaaaagaacagagggtgatttggtatttttcaatgttggatcttctattggttcctctgttctacagcattggtgaatgataacaatttacaacttgcacttaagttagagagttagagacatcggtatgaattcctgtttagcttactatagattcagatggctacatacagaatgcttgtagatatgtgtgtgtatatatatgtggtactgtacac

SEQ ID NO: 555709 - DNA, 587 bp, Homo sapiens
tagttgctccagggtttacaatatgtatctttaacccatcacagtttactttttaataacattataccactttgcatctgatataagaaccttatgatgctatatttccatttacttcctccctatcctttattctattgctgtcatacattttatttctataagtattataaaccctacaatttattgttttatttttgctccaaatattatattttaaagaaattaaaaatgggaaaaagtcttttatatttgtccatatatttatcatttccatacccttctttgtgtagatctgagtttccaataggtattgttttccttctacctgaagtacttcctttaacatttcttgtattacaaatctctggcattaatttattttagcttttgattgcgtgacaaaaagtattttgccttcatgtttgaaatatttttcggtagatatggaattctaggttcagaatttttttgttctttttcgtttttcctttagcactgtaaagatgttcattttattatcttctggcttgcattatttctgacaataaatcagtggaaayatttacagtatctgtttcctttta

SEQ ID NO: 555710 - DNA, 605 bp, Homo sapiens
acacacatgcatgcatacacacacacacatatacacacacacatcttccccaaataatatttggggacaggcctgacttaactgcagaatatgggcaacgttgttatgaggtgaccttggccttttaaccaacgtggataattcattgcctgtcgctgtgcrcagctcgtgcttaaaaagtgaactttattggggtcctcagggggctccctagcaaagactggtatcatcgttcattgcgcttctgttttgtttagcccatacgcctgtccatacagatgtttccaacagcaaacagttcatgacccagaaagaaaaaaatattttggctttccccagctttcagcacctgttcaaaccaaagggacttcgaagctctttgcacacatcagaaggcccagccagcaattgaagagaggccacctcatggctggagccaatgttgcaacctggtggcaaacccaagccccttcaagcagtgactcttattatcttaactcctagaagaagtgttagcaggagagaaacggcagatctcacagaaagatctttcattatgtaaagatcgtcacatgcatgtgtcaatttgtctcaccacatcagaa

SEQ ID NO: 555711 - DNA, 583 bp, Homo sapiens
acttacgctcacccagattcctgacctacagaaactgtaagattatccagtccctttaagccaatacattttggggtaatttgatatgcagcatggataactaacataatcagaatttgcctttagctttctttgcccttaaatatcttagtccagctccctttttgtaataatcaatgtctggcatcttttgttttactttatttttcttttgaggactgaaaagaagctgtaagctaagggtaagtgactgatttcttaacacttttagtttcttggtggagaaattctgtcctggatactactgccacataagaaactcctcaaaatttagtggcttaagcaacaccactttatgatatctcctggattctttaagtcagaagttggggcagtgtatggctggtcaatccctctgggcatcaactgttgtcacacagaagtattcaatgaatggctggtctcgtctgaagggaccaaggtagcttcccctgtgtctgatgctttggacagggctctccagcatgcaggtctcagagtatcctgaattcttacrtggcaattgattttccaggaaaaagag

SEQ ID NO: 555712 - DNA, 288 bp, Homo sapiens
ccagacattcgttggttgtggaggaatagtgtggggagggcccggatagaaatatacacaaaatataggaggcatggaacaggaagaggagaccagctatgctcaagacatcaaggaagactttacagagcaggaaatccttctctttggtcctaaaagataaagagaagctcactaggtgcagagggaggacgttccaggcagggggcacagcatgtacaaasgatgtaaaggcaggaatgccagttgaactgattcaattatttttttataccagtatgggtttgt

SEQ ID NO: 555713 - DNA, 410 bp, Homo sapiens
aaatctacaatgctacaatgctttggtaggagtgggcccttccagatgaaggagaagttcttcaggtttggccagggacaaggccgaggccatggcagatgacagctggcacgtgagttctgtgtatcaggatctgacattcttaacaaatgatgctaccatgattattatagttctatagcttttatgtttctcaaaagaattccgaggagggtggatcatctgaggtcaggagtttgagactagcctggccaacatggtgaaaccccttctctacaaaaacataaaaattagccaagcatgatggcaggtgcytgtaattccagctactcgggaggctgagcggggagaatcgcttgaacctgggaggcaaagactgcagtgagccaagactgtgccattgcactcca

SEQ ID NO: 555714 - DNA, 579 bp, Homo sapiens
ctgggcaacatggcaaaatcctgtctctacaaaaaatacaataattagctgggcatggtggcgcatgcctgtagtcccagctactcagaaggctgaggtgggaggatcaactgagcctagggaggttgaggctgcagtgagtcaagattgagcctcttcagccttggagactctgtcaagaaagaaagaaagaaaagaaacaaagaaaaaatgggaaaaagaaaagaaagaaagaaagagaaaggaaggatggaaggaaggaaaagaaaggcaggcagacaaataaagaaagagagagagggaggaaggaaggaaaagaaagacagacagacagataataatatgatgacacaaagaaagaaaaaaagaaagagagaaagaaagaargagccctccacaactatgattctctccgctctccctttaacaaatgtttctgttctctcaagttgctcagccaatcaggagactctccctcacccttctggaagaagagcactaccaccgtcacacaaagagttttcctggaaccaggagctgaccttgcacatcacaaaatgctaagagacactcctgagc

SEQ ID NO: 555715 - DNA, 377 bp, Homo sapiens
ggctatgttttcctcacttaaattgcaaaaaaaaaaaaatgattaactgaaataacactgcacattattcagatttaattatgtttgtaatacatcacccagtgatatggggcaactttttgctgttcactttccatcatgcatttctcatarcatatggtcctcatgaaatagttttgattcagagtccccagtagcatatggcaaaaaaaaggcccctcaagtcacatgcaaagtagaggctagcctctgtgccccagaggaggctccattgactgcaagccagcaagcctggaatctgaattggtgtcagggtcccactcatcatgaagattttacatttggtttgggactttggagcatgaggctctggatgt

SEQ ID NO: 555716 - DNA, 417 bp, Homo sapiens
ttcgtaatcctgtcccccagttgaccattatatcaggtgagccatgcagcagactaggaagagttaagatctcttggsttcagtttcctgatattttagagaatcttaagttacaacaattctacattcccgaattgggacatccgtccacgagaaaggcatttccccactcccaccatgatctagagcaaacacgaacaacctctgaataaagcaaagagtcttgtgtgagcaaacctagcctaacactctagactgtgatctgttcatttctaaatagactacaatacctagtctctgaaaatgccaccctatccacctgtaagtcccagtattcgtgcccttgtgtagtctcctcttctcaaatctgggttggccctgggactcgcatttgacctatagaatatagcagaagca

SEQ ID NO: 555717 - DNA, 578 bp, Homo sapiens
atgcaacaaagggagatttgtgccaattatttccagaaccaaaggccagtgaaatactttaattttatcacacacatctattttggcagtgagcacttagagttttataggaaaaggtaagccatgccttggggtccgaaagagaatgggcgtctactggtgagggttccatgatatggaaaacactagaaaaacagcaggatggaggtgaattataatagatttgacataartgagcaagactaaatacgttttgaaagcagtgggccattcagttatttcttttatttttcatatttttctcgactctgcaaaataataagaaacaaaagaaaaatctgctgaatgcctagtcatagtttattggagcaggaaaataagccattccaaaccattctctgatttgctgtgagtggcagaatcattcaccgtggtgaatcatagcagggagaaccatttggaatgattattttctgatgttaaattgcaaatggcacaagtggaatcaacaaaggtatgaattattttaaaaaatcttttaaaaaatcctgttattgaaaaatatgtatttgtatgac

SEQ ID NO: 555718 - DNA, 583 bp, Homo sapiens
agctacatactcacaaaaataggaggggaaagatctctgcgaggagaattacaaacattgctaaaataaatcatagatgaaacaaacaaatggaaaaacattctatgmtcatggattggaagaatcaatatcattaacatggccatactgccaaggcattttacaatctacagattcaatgctattcctatcaatctaccaatgtcatttttcacagaattggaaaaaaaactgttataaaattcatatggaacaaaaaaaaagcccaaataaccaaaccaatcctaagcaaaaagaacaatgctggagggatcacattacctggcttcaaactatactataaggctgtagtaaccaaaacagcatggtactggtacaaaaacagacacatcgattcatggaatggaatagagaacacagaaataaagatgcacatctgcagccatctaatcttcaacaaagtcaaccaaaataagcaatggggaaagaactccgtattcaaaaaatggtgctgggatatagatagtgggctagccatatgcagaagaatgaaaatggatcccttttaccatatacaaaaatt

SEQ ID NO: 555719 - DNA, 583 bp, Homo sapiens
agctacatactcacaaaaataggaggggaaagatctctgcgaggagaattacaaacattgctaaaataaatcatagatgaaacaaacaaatggaaaaacattctatgatcatggattggaagaatcartatcattaacatggccatactgccaaggcattttacaatctacagattcaatgctattcctatcaatctaccaatgtcatttttcacagaattggaaaaaaaactgttataaaattcatatggaacaaaaaaaaagcccaaataaccaaaccaatcctaagcaaaaagaacaatgctggagggatcacattacctggcttcaaactatactataaggctgtagtaaccaaaacagcatggtactggtacaaaaacagacacatcgattcatggaatggaatagagaacacagaaataaagatgcacatctgcagccatctaatcttcaacaaagtcaaccaaaataagcaatggggaaagaactccgtattcaaaaaatggtgctgggatatagatagtgggctagccatatgcagaagaatgaaaatggatcccttttaccatatacaaaaatt

SEQ ID NO: 555720 - DNA, 583 bp, Homo sapiens
agctacatactcacaaaaataggaggggaaagatctctgcgaggagaattacaaacattgctaaaataaatcatagatgaaacaaacaaatggaaaaacattctatgatcatggattggaagaatcaatatcattaacatggccatactgccaaggcattttacaatctacagattcaatgctattcctatcaatctaccaatgtcatttttcacagaattggaaaaaaaactgttataaaattcatatggaacaaaaaaaaagcccaaataaccaaaccaatcctaagcaaaaagaacaatgctggagggatcacattacctgrcttcaaactatactataaggctgtagtaaccaaaacagcatggtactggtacaaaaacagacacatcgattcatggaatggaatagagaacacagaaataaagatgcacatctgcagccatctaatcttcaacaaagtcaaccaaaataagcaatggggaaagaactccgtattcaaaaaatggtgctgggatatagatagtgggctagccatatgcagaagaatgaaaatggatcccttttaccatatacaaaaatt

SEQ ID NO: 555721 - DNA, 583 bp, Homo sapiens
agctacatactcacaaaaataggaggggaaagatctctgcgaggagaattacaaacattgctaaaataaatcatagatgaaacaaacaaatggaaaaacattctatgatcatggattggaagaatcaatatcattaacatggccatactgccaaggcattttacaatctacagattcaatgctattcctatcaatctaccaatgtcatttttcacagaattggaaaaaaaactgttataaaattcatatggaacaaaaaaaaagcccaaataaccaaaccaatcctaagcaaaaagaacaatgctggagggatcacattacctggcttcaaactatactataaggctgyagtaaccaaaacagcatggtactggtacaaaaacagacacatcgattcatggaatggaatagagaacacagaaataaagatgcacatctgcagccatctaatcttcaacaaagtcaaccaaaataagcaatggggaaagaactccgtattcaaaaaatggtgctgggatatagatagtgggctagccatatgcagaagaatgaaaatggatcccttttaccatatacaaaaatt

SEQ ID NO: 555722 - DNA, 522 bp, Homo sapiens
acttttttcaaaaaaccaactcctggattcgctgatctcttaaatggtttttcatgtctcagttttcttcagttcatctctgatttttgttatttctcgtcttctgctagctttggggttgatttgctcttgcttgtctaattctttcagttgtgatgttaggttgttaatttgagatcttttatcactttgtgaggtgggcatttagtgctatgaatttccctcttaacactgccttagctatgtyccagagattctggtatgttgtatctttgttctccttattttcaaataacttgatttctgcctcaatttcattatttacctgaaagtcattcaggagtatgttgtctaatttccatgtaattgtatggttttattttcattgtgttgacttctatttttattgtgctgtggtccaagagtgtgtttggtatgatttcggttcttttacacttgttgaggattgttttatgtccaattatgtggtcaattttaaagtgtgtaccatgtggcaatgag

SEQ ID NO: 555723 - DNA, 559 bp, Homo sapiens
tttctgcctcaatttcattatttacctgaaagtcattcaggagtatgttgtctaatttccatgtaattgtatggttttattttcattgtgttgacttctatttttattgtgctgtggtccaagagtgtgtttggtatgatttcggttcttttacacttgttgaggattgttttatgtccaattatgtggtcaattttaaagtgtgtaccatgtggcaatgagattaatgtayactctgttgtttttgggtggagacttctgtaaaggtctagcagacccatttgttccaatggtgaatttaggtcctgtatatcttagttaattttctgcttcaatgatctaatattgtcagtggagtatagaagtctcacattattaatattatgtggctgtctatgtctttttgcacccagattcataaagaacttgctttatgaatctgggtgctcctatgttgtgtgcatatgtatttaggaaagttaggtcttcttgctgaattgaaccctttaccattatgtaatgtccttcccttgtctttttttatctttgttggtttaaa

SEQ ID NO: 555724 - DNA, 559 bp, Homo sapiens
tttctgcctcaatttcattatttacctgaaagtcattcaggagtatgttgtctaatttccatgtaattgtatggttttattttcattgtgttgacttctatttttattgtgctgtggtccaagagtgtgtttggtatgatttcggttcttttacacttgttgaggattgttttatgtccaattatgtggtcaattttaaagtgtgtaccatgtggcaatgagattaatgtacactctgttgtttttgggtggagacttctgtaaaggtctascagacccatttgttccaatggtgaatttaggtcctgtatatcttagttaattttctgcttcaatgatctaatattgtcagtggagtatagaagtctcacattattaatattatgtggctgtctatgtctttttgcacccagattcataaagaacttgctttatgaatctgggtgctcctatgttgtgtgcatatgtatttaggaaagttaggtcttcttgctgaattgaaccctttaccattatgtaatgtccttcccttgtctttttttatctttgttggtttaaa

SEQ ID NO: 555725 - DNA, 434 bp, Homo sapiens
ataataagaagaaaaatagcaagaagtggaactaccagttactgagttttcactatatgctaagtgctttccatatattatttaaccctttcaacaaccctgtcaggtaggtgttatctctcttttctaaaagtgatgtaccttaccgaggatactcctctaatgtgaagaagtagttcaaaccagatctctttggtttcaaatcccatactcttaaaccacagtgcttaaatctgtaatatcagtttaaatgcaacagaaggattttatgcaaagatcaaaggattgaaaatatttatatttggstttagagggaaggattatcccacagaagattacaagaacttttaagactaatatgatttcttagatctatttctaattaggagcatttggaatatattctcttagtgattaagagattaaataaatgt

SEQ ID NO: 555726 - DNA, 511 bp, Homo sapiens
tgcatgaggaggtgaaagtgaagctaccatttctggttttccctaagcagtctagtataaaatgtaggtgttatttatttatttatttttgagacagggtcttgctctgtcgcccaggctggagtgcagtggtgccatcacggctcactgcagcgttaacctcctacacttaagtgatcytcccacctcagcctcctgaatagctgggaccacaggtgtgcaccaccatgtctggctaattttggtattttttgtagagacaaggtcccattatattggcccaggctgatctcaaactccttgactcaagtgatcctcctgccttagcctcccaaaatgctaagatccaccacgcctggcctccttcaacttttaaaaattatatgtctaatattcttgaaaaaaaaaatcttccaaatctagcacaggccatttatatgagcaattttgtaaatggttctgggaaaataagacggcgaaatatagaaaattctaattctccttagctaag

SEQ ID NO: 555727 - DNA, 528 bp, Homo sapiens
tgcttgaacccgggaggcggaggttgcagtgagctgagatggcgccattgcactccagcctgggtgacaagagtgaaactccgtctyaaaaaaaaaaaaaaaaaaagtgtgtgtatatatacatgtgtgggttttttaatatattatttgattatccacatgtaatttttgccttataggctaagtttagactttgattcccatttaaaatgtgattcaacaatgctatggtctgactagttgtgtcagaccaaaatttgtatgttgaaatcctaacccccaagatgatggtattaggaggtggggtcctttggggggtgtttaggtcatgaagatggagtcctcacgaatggattcatgcccttataaaagaggcccaagggagctgattggccccttccaccacgtgaggtcccctagatggtaccatctatgaggagggccctccccagacacccaatctgttagcaccttgctctcggactttccagcctccagaactgtgagaaataaatttctgttgtttat

SEQ ID NO: 555728 - DNA, 580 bp, Homo sapiens
aaagagactccaaaggcaaaagactaaagaacaattccttgtcttgaatgattctcagaaataattgatcaagcgtgttcactttttgttgccaatgtccacgatccctgaatcccaaccttctagtgaggaaagctttmacacaacggcaacccaagataatttcatccacccaggcccctctcccccgtgttgagttcagtagggagaggagaatgggtaagtgtggattctggctgtcttacactccaggggctgtccccatcagctagggtaagtcagacatgactggttttgactagaacaagtttctgccaaagctgtcctatatcaatcaagcaaaagcaactacttttatgggggttttgagggcattaacttattttaccccttagcactggaggctgcacctggggctgcagaggaagccagtcacctttacacatctaaatactgcagcaaccatttttattacttcaaactttaaatcctccatgctagtgcacgtttctagcagccaacctgcccttagcagtgactgcatcttactaaagggaacactgttataatcagactcatt

SEQ ID NO: 555729 - DNA, 580 bp, Homo sapiens
aaagagactccaaaggcaaaagactaaagaacaattccttgtcttgaatgattctcagaaataattgatcaagcgtgttcactttttgttgccaatgtccacgatccctgaatcccaaccttctagtgaggaaagctttcrcacaacggcaacccaagataatttcatccacccaggcccctctcccccgtgttgagttcagtagggagaggagaatgggtaagtgtggattctggctgtcttacactccaggggctgtccccatcagctagggtaagtcagacatgactggttttgactagaacaagtttctgccaaagctgtcctatatcaatcaagcaaaagcaactacttttatgggggttttgagggcattaacttattttaccccttagcactggaggctgcacctggggctgcagaggaagccagtcacctttacacatctaaatactgcagcaaccatttttattacttcaaactttaaatcctccatgctagtgcacgtttctagcagccaacctgcccttagcagtgactgcatcttactaaagggaacactgttataatcagactcatt

SEQ ID NO: 555730 - DNA, 591 bp, Homo sapiens
gcaggcaaattgattaccatttgcccaggacactgataaattctttattagcaaaaatgaaatacattgaaactggatttcagtcttttgcaaaaggcagaatccttttgtgaagtaaatagtggcccttaatttatctgcttgctaagtttgtttttctactttcmgtgctcatgaattgggaatacacctgcaattttaggcaccaattactgtgttggataattctctacccaagggagctgatttcctgggagaagaaccctgcttctgtgtgggtacttaagttagcaaaacaggaagaagccagttagtaaaaatttcgtgtcttgaaaggcaaaataatgtaataaacaaagtaagggtattagagtcagatggacctgagctcctgagtttgcactctgatttataactgatatgatgctggactctgaacctcagtctccccttggtaaaatgaacataatctctatttcacagggttcttgttagaattagatacgttgacatatgtagcatgcccaaaacagtaccaaacacatattaggagttcagtaaaagctaggttattaccatgattggcaaata

SEQ ID NO: 555731 - DNA, 625 bp, Homo sapiens
acgttccgctataaaatatggaacaaaatcggtttgatttacagtagatgtaaaatagaaaaattaggatgggctattctggacatgtagaattagttccttttatgrgttttctacaaacctgtatttattacactaaaataatgctaaaatatattttgttttattgtgtggagtttaaatggatacactggataatggaataacattaactaaataaacattgatgcctatttttttcagtgttttaaaattttttaacaaagatttctttttacggtaaaattgcacttcattaaatctactcctaaatatttctttctttttcatacatacacaaatggattgtttttttaattttattttcaggttgatcattgttagtacataaaagtacaattgaactttgcatattgattttgtatcttgtgaccttgctgaactcatgtattggttttagtgggttttaatgagttttttataaacttttatattcacttatgtcctctgcaatgatagacaattctaacatcttattttcccacattgatgattttgtttttttctctcatgtaatttctttggatgttaacatttttgccttgttctaaaatgtcaagacaca

SEQ ID NO: 555732 - DNA, 275 bp, Homo sapiens
caccatgtaggtcaggctggtctccaactcctgacttctggcgatctacccacttcagcctcccaaagtgctgggattacaggcgtgcgcctggccagctttttgacatatttcaagatggctactyggaagactggagatagcttcttctacaagaatagctgaaaagctgtgtttgttggggagatttgcatttgtagagaaaatctgcattgatatatacaggctttccctgagatactcccttgtctgggttttggaatgattaactgagc

SEQ ID NO: 555733 - DNA, 275 bp, Homo sapiens
caccatgtaggtcaggctggtctccaactcctgacttctggcgatctacccacttcagcctcccaaagtgctgggattacaggcgtgcgcctggccagctttttgacatatttcaagatggctacttggaagactggagatagcttcttctacaagaatagctgaaaagctgtgtttgttggggagatttgcatttgtagagaaaatctgcattgatatakacaggctttccctgagatactcccttgtctgggttttggaatgattaactgagc

SEQ ID NO: 555734 - DNA, 552 bp, Homo sapiens
atgtgatgtatgacagtaggaatctgtacacattcattttgctacatgtccgtagggcaaaatcagtttcagtgtttaggtgtattttgtctgctccctgcattcccatagttttgaccttatattttactcttttttttttgtgaacataccaatgcttcaatttttttccagtaatataatcaactatactataagagaaaaattttgataaaacacaaatttcatgttttcctactctaattggtttttacgtaaaaatacaggtaaaatttatttgtgcttttttgctattattttttgctattctctgtttgtctatgtcttcwccacatagacacaattagggaattttgtacactcttgtgccaactgctttgataggaacaaaatgtatttctcgaactcctaggtataaaacttaagtatccacgatttaaattcttttttgctcacttctattatgtttccagtctcaatagaaatcgatgccaatccagaaatacaagcattattctaatacttctcacacattactgatatagattaaat

SEQ ID NO: 555735 - DNA, 564 bp, Homo sapiens
ctttactgtcctatgtgatgtatgacagtaggaatctgtacacattcattttgctacatgtccgtagggcaaaatcagtttcagtgtttaggtgtattttgtctgctccctgcattcccatagttttgaccttatattttactcttttttttttgtgaacataccaatgcttcaatttttttccagtaatataatcaactatactataagagaaaaattttgataaaacacaaatttcatgttttcctactctaattggtttttacgtaaaaatacaggtaaaatttatttgtgcttttttgctattattttttgctattctctgtttgtctatgtcttcaccacatagacacaattagggaattttgtacactcttgtgccaactgctttgatagkaacaaaatgtatttctcgaactcctaggtataaaacttaagtatccacgatttaaattcttttttgctcacttctattatgtttccagtctcaatagaaatcgatgccaatccagaaatacaagcattattctaatacttctcacacattactgatatagattaaat

SEQ ID NO: 555736 - DNA, 600 bp, Homo sapiens
tatcttgggaaacactatgtatttctttactgtcctatgtgatgtatgacagtaggaatctgtacacattcattttgctacatgtccgtagggcaaaatcagtttcagtgtttaggtgtattttgtctgctccctgcattcccatagttttgaccttatattttactcttttttttttgtgaacataccaatgcttcaatttttttccagtaatataatcaactatactataagagaaaaattttgataaaacacaaatttcatgttttcctactctaattggtttttacgtaaaaatacaggtaaaatttatttgtgcttttttgctattattttttgctattctctgtttgtctatgtcttcaccacatagacacaattagggaattttgtacactcttgtgccaactgctttgataggaacaaaatgtatttctcgaactcctaggtataaaactyaagtatccacgatttaaattcttttttgctcacttctattatgtttccagtctcaatagaaatcgatgccaatccagaaatacaagcattattctaatacttctcacacattactgatatagattaaattttctagatctc

SEQ ID NO: 555737 - DNA, 598 bp, Homo sapiens
tatcttgggaaacactatgtatttctttactgtcctatgtgatgtatgacagtaggaatctgtacacattcattttgctacatgtccgtagggcaaaatcagtttcagtgtttaggtgtattttgtctgctccctgcattcccatagttttgaccttatattttactcttttttttttgtgaacataccaatgcttcaatttttttccagtaatataatcaactatactataagagaaaaattttgataaaacacaaatttcatgttttcctactctaattggtttttacgtaaaaatacaggtaaaatttatttgtgcttttttgctattattttttgctattctctgtttgtctatgtcttcaccacatagacacaattagggaattttgtacactcttgtgccaactgctttgataggaacaaaatgtatttctcgaactcctaggtataaaacttaagtatccacratttaaattcttttttgctcacttctattatgtttccagtctcaatagaaatcgatgccaatccagaaatacaagcattattctaatacttctcacacattactgatatagattaaattttctagatc

SEQ ID NO: 555738 - DNA, 428 bp, Homo sapiens
aatttatccctcatatgatcagaagaacaatgcaagatagtttatatctgaaaggaaaaatatctttatatggttctgaaagcgtaaatcattaacaacttggataataatttgcataaaaatacacaaacatgccctcttcctagcagtaagtacacagtgacaacagaatcaaagcatgtggctatgtgcatgtttatatttcaagacgcagagcactctattcctcctctctgccctttctagatggcacaatccctcatgaatctaagtgcagtcatagggtggattagggtgacctgccatttgtatgcaactgatctctagtttggaagtaattaatgtcaaaatatatttttaaaagataatttcaaatttcagggcaaactagcatggtttcrccccttttctttggaacattttttcta

SEQ ID NO: 555739 - DNA, 432 bp, Homo sapiens
aaatattagtttaataattttatattaaactccctctatacttacaatatgaattagataattcagaataaacattccattggaaaaagctacacaatttgttataaaacatccttaaaagcatcagaaagttaatacagcaatgaagaattacaggaccaaattaagaatggtatgaaagcctgtttgtgacgcttatgtttgggttatctctttatttgagtgactataaatctcaaaagagaactaaagggagaaataaccatatctactaacatggtaagggtacttaaacatctcttagtaattgagaaaattgaaagaaaagaaaaargagaaagggagaaagagaaacagtgaaagggataatgaaggagagaaagaagaagagaaaggaagaggaagaaaagtaaaaaggaggagggggaagga

SEQ ID NO: 555740 - DNA, 432 bp, Homo sapiens
aaatattagtttaataattttatattaaactccctctatacttacaatatgaattagataattcagaataaacattccattggaaaaagctacacaatttgttataaaacatccttaaaagcatcagaaagttaatacagcaatgaagaattacaggaccaaattaagaatggtatgaaagcctgtttgtgacgcttatgtttgggttatctctttatttgagtgactataaatctcaaaagagaactaaagggagaaataaccatatctactaacatggtaagggtacttaaacatctcttagtaattgagaaaattgaaagaaaagaaaaaggagaaagggagaaagagaaacagygaaagggataatgaaggagagaaagaagaagagaaaggaagaggaagaaaagtaaaaaggaggagggggaagga

SEQ ID NO: 555741 - DNA, 465 bp, Homo sapiens
aatttattttggtcctttgaatgagccacactttcccattctttgtatgccttgtaacgtttttgaaaactggacattctaataattataattactatgtggttactctgtaaatcagaacccccccctacaaacacagtaatgttttgtggttttaaattttctttacttattatattgtgaaggatttttttttttttagtgaaattttccaaagtgatttacaaaactgtttggtttataaggtgtggtcaccgaagtctttttgtttcyttaacaaatgttaagctaatgttttcacagtgattttctggtatgtcaggaaccaatcaaacaggcaaatacaagaaaaacaaaaagaaaaacaagtaatcattgtccagcaaaatatgtctctaggccatgcagactggctttgtgctgggttctttaaagccggcacaaagtgtgtgttcactcttgcac

SEQ ID NO: 555742 - DNA, 465 bp, Homo sapiens
aatttattttggtcctttgaatgagccacactttcccattctttgtatgccttgtaacgtttttgaaaactggacattctaataattataattactatgtggttactctgtaaatcagaacccccccctacaaacacagtaatgttttgtggttttaaattttctttacttattatattgtgaaggatttttttttttttagtgaaattttccaaagtgatttacaaaactgtttggtttataaggtgtggtcaccgaagtctttttgtttccttaacaaatgttaagctaatgttttsacagtgattttctggtatgtcaggaaccaatcaaacaggcaaatacaagaaaaacaaaaagaaaaacaagtaatcattgtccagcaaaatatgtctctaggccatgcagactggctttgtgctgggttctttaaagccggcacaaagtgtgtgttcactcttgcac

SEQ ID NO: 555743 - DNA, 465 bp, Homo sapiens
aatttattttggtcctttgaatgagccacactttcccattctttgtatgccttgtaacgtttttgaaaactggacattctaataattataattactatgtggttactctgtaaatcagaacccccccctacaaacacagtaatgttttgtggttttaaattttctttacttattatattgtgaaggatttttttttttttagtgaaattttccaaagtgatttacaaaactgtttggtttataaggtgtggtcaccgaagtctttttgtttccttaacaaatgttaagctaatgttttcacagtgattttctggtatgtcaggaaccaatcaaacaggcaaatacaagaaaaacaaaaagaaaaacaagtaatcattgtccagcaaaatatgtctctaggccatgcagactggctttgtgctgggttctttaawgccggcacaaagtgtgtgttcactcttgcac

SEQ ID NO: 555744 - DNA, 196 bp, Homo sapiens
cagtcagaacagacacataataatttgyggttaagatcttctcttgttcctttggaccatggaccaggcttcctcactgggaacgtgggcttctgacacttcagaactgccaatttgctggggcaaaggcaagttaaaaatgtcgtaaagttttccagttgtctttttcttgagtctgctttcacttggatgttgt

SEQ ID NO: 555745 - DNA, 196 bp, Homo sapiens
cagtcagaacagacacataataatttgtggttaagatcttctcttgttcctttggacsatggaccaggcttcctcactgggaacgtgggcttctgacacttcagaactgccaatttgctggggcaaaggcaagttaaaaatgtcgtaaagttttccagttgtctttttcttgagtctgctttcacttggatgttgt

SEQ ID NO: 555746 - DNA, 472 bp, Homo sapiens
attgctgagtgacattaattaatgccaatwttccagaagatgttctagtgagtgaaatgtatacaacgtgcaaaagattcagaactctgaagggtaacattattctataattaagaattaagaattaattcacatcatttattggggagaaataatttttaagaattaatgactgagaaaatgtttttattttttacttagaaaattattttgtgcatgagcattaccgcaagttttgcaagaaacataaatttaaagaaacaattatgtgcacaagatgaatttaataacatcttgatatattccatgattgcggttttatttggtaaatctttaaatgcacaccatttaacgataataaatgaatcttggaaaccttgtaggtaagggtaaatattaggatgcatccagttacatttacacacacatacatgcatacagactgattcacgtgtgtatatatatatatgac

SEQ ID NO: 555747 - DNA, 583 bp, Homo sapiens
attttagtcaaagatggattacatatwcaaaagtggtcccatgagattataatatatatttttacatacttttctacgtttaagtatgtttagatacataacctcttaccactgtgctcttattgcctgcagtattcagtagagtaatgtagtacacagatttgtagcctaggagaaagaggctataccatataacctaaacgtggtaggctgtacaatctaggtgtttgtaatattctctgtgatgtttgcaaaatgatgaaattgcctatgaatacatctgttaaaacgtatccctatcattcagtgatgtgtgactgtactaaaatgctcaatgtaagtttcaatgccctccataaaattgttgtactgtgaaatgcaaatctctcacccatggcctgaatatgtttgcaaactaagcagatcatgggaaggagaatgtgctggcatcgctgggatgattttctcacactacatgaataatatctacagacttcgtgaatatgagccacttgcatagagttaaagtagacatctctttgctgggaaatttatcaaatgggagtatgaagtgtttttacaa

SEQ ID NO: 555748 - DNA, 589 bp, Homo sapiens
cagaactcattgaatgccactgtactcatggtttataatagagaaagggtagaaattaggaccaatagaagagacatatcatataaggtggaatctaggagattttgaatgttaagtttccattgtcttcaggacatattacctgtcactgttgtacarcaacaaacatggagtactaccaacctggggagctcacctgatgctaacaagacactatttacaaaatgaaaagacaaatgaaaggatgagataagatgacgttccacattaaggcactggaacgattagcaaactaaacctaaagcaagcagaaggaagaaaattaaaattagagaaattaataatttataacaataatatttgttagtgttgaataattgatattacttcttgactagcttttttaaaaaagagaaatattcacttcccaatttattctgtggggccagtgttaccttgatacaaaaattagtccaaatagcatagaaaaataaaactactataagtataaatgcaaacttccttaaaaaatactaacaaatcagatctagcaacatataaaagaattatacactatgacaaagtgaaa

SEQ ID NO: 555749 - DNA, 566 bp, Homo sapiens
tggtgtttcaaaggacaaacaagcaagtcaaaaggcagctcaaaaattgtgagaagatatttgaaaaacacgtatctatatgtctgtatatatatatgtatcttgaatatagaaaaattgttttaactccgtcacaaatatcccaactcaaaactgataaatgataggaatagatgtgtttcccaagaagatacacgaacggtcaataatcccataaaaatatactcaatarcatcactcatcaggcaactacaaatcaaaaccacagttagatactctatgggtagaactggccaccttggaaaataatttgatggcttctaaatatatgaaacatagaattgtcatatgacccagaaatttattcctaggtatacacccagattattggaaagaggtgttcaaacacaaattgtacacaagtatttttagcagcagtatttaaaatagccgaaggctgaacacaactcaaatgtcaataaaaatattattggataaacaaaatgttatatccaagaaattgaatgttatacagttataaaaggaaataaagtaccaatacgtac

SEQ ID NO: 555750 - DNA, 443 bp, Homo sapiens
caaatatcccaactcaaaactgataaatgataggaatagatgtgtttcccaagaagatacacgaacggtcaataatcccataaaaatatactcaataacatcactcatcaggcaactacaaatcaaaaccacagttagatactctatgggtagaactggccacyttggaaaataatttgatggcttctaaatatatgaaacatagaattgtcatatgacccagaaatttattcctaggtatacacccagattattggaaagaggtgttcaaacacaaattgtacacaagtatttttagcagcagtatttaaaatagccgaaggctgaacacaactcaaatgtcaataaaaatattattggataaacaaaatgttatatccaagaaattgaatgttatacagttataaaaggaaataaagtaccaatacgtacatgaaccttga

SEQ ID NO: 555751 - DNA, 566 bp, Homo sapiens
tggtgtttcaaaggacaaacaagcaagtcaaaaggcagctcaaaaattgtgagaagatatttgaaaaacacgtatctatatgtctgtatatatatatgtatcttgaatatagaaaaattgttttaactccgtcacaaatatcccaactcaaaactgataaatgataggaatagatgtgtttcccaagaagatacacgaacggtcaataatcccataaaaatatactcaataacatcactcatcaggcaactacaaatcaaaaccacagttagatactctatgggtagaactggccaccttggaaaataatttgatggcttctaaatatatgaaacatagaattgtcatatgacccagaaatttattcctaggtatacacccagattattggaaagaggtgttcaaacacaaattgtacacaagtatttttagcagcagtatttaaaatagccgaaggctgaacacaactcaaatgtcaataaaaatattattggataaacaaaatgttatatccaagaaattgaatgttatacagttataaaargaaataaagtaccaatacgtac

SEQ ID NO: 555752 - DNA, 379 bp, Homo sapiens
ttcttccctgggaagctaatatttcaaacacttaaagagtatatagatttccaacttgtatcccgtttataaaactatctctaggctgctgatttcaggaggaggctcatgartattctctttgcagagaatatatcaggagttaacaacagcttcaatatttgtggacgaccagttaactaagccagctcttagtgtctttagttgggaaatcttagctgaagatattcaataatgaaccaagagtgactaaaaaattcaatatttaagtatatttcattgtaattaatttgaattgaaatagccatatacagctagtatttactatattgaacaatgcaaataagaggagaaaattaataaccatctctaataccac

SEQ ID NO: 555753 - DNA, 431 bp, Homo sapiens
gaattctgcattaacatttaacaaaatatatgctatcctaatattgatkcattatatttatctatacaacatgcaacaagagagaaatactggatgaatcagaatatttgcagcctatggcaattatctgtagcaacattttttttgtcttcagaaaaatatagatgattttggaaatggattagttctagtttcaatctaggaagaactacttatggaagttttgtgtacaggatactgatgttttcaaatataatgcattattattttagtttagtttcttttaccacatacttagaaattgttcaagtgaacaggctattaaaactaatggtatagataaatggtatagataggccttgtaaacatcccacttttcccaagccatgaattttaacacctgattaaggagatgaaaatggagccattgg

SEQ ID NO: 555754 - DNA, 431 bp, Homo sapiens
gaattctgcattaacatttaacaaaatatatgctatcctaatattgatgcattatatttatctatacaacatgcaacaagagagaaatactggatgaatcagaatatttgcagcctatgrcaattatctgtagcaacattttttttgtcttcagaaaaatatagatgattttggaaatggattagttctagtttcaatctaggaagaactacttatggaagttttgtgtacaggatactgatgttttcaaatataatgcattattattttagtttagtttcttttaccacatacttagaaattgttcaagtgaacaggctattaaaactaatggtatagataaatggtatagataggccttgtaaacatcccacttttcccaagccatgaattttaacacctgattaaggagatgaaaatggagccattgg

SEQ ID NO: 555755 - DNA, 431 bp, Homo sapiens
gaattctgcattaacatttaacaaaatatatgctatcctaatattgatgcattatatttatctatacaacatgcaacaagagagaaatactggatgaatcagaatatttgcagcctatggcaattatctgtagcaacattttttttgtcttcagaaaaatatagatgattttggaaatggattagttctagtttcaatctaggaagaactacttatggaagttttgtgtacaggatactgatgttttcaaatataatgcattattattttagtttagtttcttttaccacatacttagaaattgttcaagtgaacaggctattaaaactaatggtatagataaatggtayagataggccttgtaaacatcccacttttcccaagccatgaattttaacacctgattaaggagatgaaaatggagccattgg

SEQ ID NO: 555756 - DNA, 564 bp, Homo sapiens
ccacaccagtatttttaacatgacgtggatgaagtggttctgtcatcattaaatgagtactttcggatccaagtctgacataaaaacttacttccctgaagactttaattttgcatgcaaaatacactgtttctaaattaaatttttttgtaacaaagagtttttgagttcccctcatgaaattttaataaatcattaatttcttctttttctctttaatgcacaagcaatggataaaacatttcaaagatccctacagatgtttcttcacttgaaatattgttcacattacaatgagaaggatggaataaamcataaaaaagataggcagttttgttttgttttgttttgttttgtttttaagatggagtcttgctctgtcgcccagcccggagtgcagtggcgcgatctcggctcactgcaagctccgcctcccgggttcaagctattctcttgcctcagcctccaaaatagctgggactacaggcgtctgccaccacgcccagctaagtttctgtatttttagtggagacgaggtttcaccgtgttagccaggatgatctc

SEQ ID NO: 555757 - DNA, 564 bp, Homo sapiens
ccacaccagtatttttaacatgacgtggatgaagtggttctgtcatcattaaatgagtactttcggatccaagtctgacataaaaacttacttccctgaagactttaattttgcatgcaaaatacactgtttctaaattaaatttttttgtaacaaagagtttttgagttcccctcatgaaattttaataaatcattaatttcttctttttctctttaatgcacaagcaatggataaaacatttcaaagatccctacagatgtttcttcacttgaaatattgttcacattacaatgagaaggatggaataaaacataaaaaagataggcagttttgttttgttttgttttgttttgtttttaagatggagtcttgctctgtcrcccagcccggagtgcagtggcgcgatctcggctcactgcaagctccgcctcccgggttcaagctattctcttgcctcagcctccaaaatagctgggactacaggcgtctgccaccacgcccagctaagtttctgtatttttagtggagacgaggtttcaccgtgttagccaggatgatctc

SEQ ID NO: 555758 - DNA, 564 bp, Homo sapiens
ccacaccagtatttttaacatgacgtggatgaagtggttctgtcatcattaaatgagtactttcggatccaagtctgacataaaaacttacttccctgaagactttaattttgcatgcaaaatacactgtttctaaattaaatttttttgtaacaaagagtttttgagttcccctcatgaaattttaataaatcattaatttcttctttttctctttaatgcacaagcaatggataaaacatttcaaagatccctacagatgtttcttcacttgaaatattgttcacattacaatgagaaggatggaataaaacataaaaaagataggcagttttgttttgttttgttttgttttgtttttaagatggagtcttgctctgtcgcccagcccggagtgcagtggcgcgatctcggctcactgcaagctccgcctcccgggttcaagctattctcttgcctcagcctccaaartagctgggactacaggcgtctgccaccacgcccagctaagtttctgtatttttagtggagacgaggtttcaccgtgttagccaggatgatctc

SEQ ID NO: 555759 - DNA, 393 bp, Homo sapiens
cagagatgagagataatagataatagaataatcaattctcaagaagatgtaatcatcctactaattagggtatgcagctcacaacagaacctccaaatacatgaggtaaaacaggaaagaaatcaaaggtgaactggaaaaatccaaaattatatttgccgacatcaacacttttgtcttagaaatggaaagactaggcactaactcagtaatcatgtggaagataagaacamcaatatcaccaacaagacatccaatcttcaatggcagatactctttcctttcaagtgaaaaaaaaaacagtatggcatattctctaacaaacccagaatttctaatatttgcgttcttccttctttctttccatcttcctttctcttctcttcccttccc

SEQ ID NO: 555760 - DNA, 372 bp, Homo sapiens
aaataggagaaacctagaatttatgtaaacagtgagaagattggatgcgttttatgtcacatattttaatactagcagcwtattatatatgtcaatccatcaggcattcagaagtatagcttatgaaaattttttgcaccatcagacaaaagacaagggtagaagacatttgtaaccctataaacactagtaaattaaaaacagaagggacttttatgtcctaacgtatctgtgttgtgaaaggctgccctgtgaaatacgggatttccctaaacatattttgaaaatcataggtgtcaatattttttagaaatccatttaaattttctcttgttattttacaatgcctatttatttatatagtggctctgc

SEQ ID NO: 555761 - DNA, 476 bp, Homo sapiens
tcaatgtgaatgccatggcaatattaaaaggtacgaattcgctacatacgtgcttgaggtaaataggagaaacctagaatttatgtaaacagtgagaagattggatgcgttttatgtcacatattttaatactagcagcttattatatatgtcaawccatcaggcattcagaagtatagcttatgaaaattttttgcaccatcagacaaaagacaagggtagaagacatttgtaaccctataaacactagtaaattaaaaacagaagggacttttatgtcctaacgtatctgtgttgtgaaaggctgccctgtgaaatacgggatttccctaaacatattttgaaaatcataggtgtcaatattttttagaaatccatttaaattttctcttgttattttacaatgcctatttatttatatagtggctctgctgattttgatgtatatcctaaacttaatattttctttaaaggat

SEQ ID NO: 555762 - DNA, 476 bp, Homo sapiens
tcaatgtgaatgccatggcaatattaaaaggtacgaattcgctacatacgtgcttgaggtaaataggagaaacctagaatttatgtaaacagtgagaagattggatgcgttttatgtcacatattttaatactagcagcttattatatatgtcaatccatcaggcattcagaagtatagcttatgaaaattttttgcaccatcagacaaaagacaagggtagaagacatttgtaaccctataaacactagtaaattaaaaacagaagggacttttatgtcctaacgtatctgtgttgtgaaaggctgccctgtgaaatacgggatttccctaaacatattttgaaaatcataggygtcaatattttttagaaatccatttaaattttctcttgttattttacaatgcctatttatttatatagtggctctgctgattttgatgtatatcctaaacttaatattttctttaaaggat

SEQ ID NO: 555763 - DNA, 476 bp, Homo sapiens
tcaatgtgaatgccatggcaatattaaaaggtacgaattcgctacatacgtgcttgaggtaaataggagaaacctagaatttatgtaaacagtgagaagattggatgcgttttatgtcacatattttaatactagcagcttattatatatgtcaatccatcaggcattcagaagtatagcttatgaaaattttttgcaccatcagacaaaagacaagggtagaagacatttgtaaccctataaacactagtaaattaaaaacagaagggacttttatgtcctaacgtatctgtgttgtgaaaggctgccctgtgaaatacgggatttccctaaacatattttgaaaatcataggtgtcaatattttttagawatccatttaaattttctcttgttattttacaatgcctatttatttatatagtggctctgctgattttgatgtatatcctaaacttaatattttctttaaaggat

SEQ ID NO: 555764 - DNA, 476 bp, Homo sapiens
tcaatgtgaatgccatggcaatattaaaaggtacgaattcgctacatacgtgcttgaggtaaataggagaaacctagaatttatgtaaacagtgagaagattggatgcgttttatgtcacatattttaatactagcagcttattatatatgtcaatccatcaggcattcagaagtatagcttatgaaaattttttgcaccatcagacaaaagacaagggtagaagacatttgtaaccctataaacactagtaaattaaaaacagaagggacttttatgtcctaacgtatctgtgttgtgaaaggctgccctgtgaaatacgggatttccctaaacatattttgaaaatcataggtgtcaatattttttagaaatccatttaaattttctcttgttattttacaatgcctatttatttatwtagtggctctgctgattttgatgtatatcctaaacttaatattttctttaaaggat

SEQ ID NO: 555765 - DNA, 314 bp, Homo sapiens
tcattctcagacaaaatctcccaacatttaactgattcctaatagcttaaaatcactttgaaaaatccatatatttatawccttttcttccctctatgatttctggtcagcttgggttttgtttttcattccatttacctcatcctcgaaaagatgtatcttacgtctatttattctcatttatggacattgagaaaagaaaataactttcatgtgagaaatgcaagtccttttatataatcaggcccagagagttattcaaatgagacagcagttctgtcctgctcctctttgagctgtgtgttcatctaggc

SEQ ID NO: 555766 - DNA, 314 bp, Homo sapiens
tcattctcagacaaaatctcccaacatttaactgattcctaatagcttaaaatcactttgaaaaatccatatatttatatccttttcttccctctatgatttctggtcagcttgggttttgtttttcattccatttacctcatcctcgaaaagatgtatcttacgtctatttattctcatttatggacattgagaaaagaaaataactttcatgtgagaaatgcaagtccttttawataatcaggcccagagagttattcaaatgagacagcagttctgtcctgctcctctttgagctgtgtgttcatctaggc

SEQ ID NO: 555767 - DNA, 432 bp, Homo sapiens
tcctgctcctctttgagctgtgtgttcatctaggctgcttgctgttgccacagtagctataaattaaccaataacgccacaccagacactataatccacacccmaaaatagtgtaacagtgtatagccagtcactaataaatgttatttccataagccaatgagaatttgtgacaaacctctttgcatcatcccacttctggacccttttttgcctttaagaaactgcttgttgcaaagctccaaagggagttcatatccaaggatacttgggtctgtttcttccaggcagctgtcctcattgtggctcaagtaaactctttgaattatgttttgtgcttcagccccttccacttagattaacaacatggatttgtgtcaccatatacagcaattaaaatgtttacacttttcccctcgagggcactgatgt

SEQ ID NO: 555768 - DNA, 432 bp, Homo sapiens
tcctgctcctctttgagctgtgtgttcatctaggctgcttgctgttgccacagtagctataaattaaccaataacgccacaccagacactataatccacaccccawaatagtgtaacagtgtatagccagtcactaataaatgttatttccataagccaatgagaatttgtgacaaacctctttgcatcatcccacttctggacccttttttgcctttaagaaactgcttgttgcaaagctccaaagggagttcatatccaaggatacttgggtctgtttcttccaggcagctgtcctcattgtggctcaagtaaactctttgaattatgttttgtgcttcagccccttccacttagattaacaacatggatttgtgtcaccatatacagcaattaaaatgtttacacttttcccctcgagggcactgatgt

SEQ ID NO: 555769 - DNA, 322 bp, Homo sapiens
tgttatccaaaacaaatatttttctttgtttttaaacatctacttccatctacttatctacttatttttacttttatttgtaacttaattccatcaaggagagagagtgcattttctgttatgctaaatttttgaagaatgtattgattttttatgacctgatatatggatgatatgtagatattacatgtttgtattatcaaatttcagggcgttaataaaataaatacttayaatatttatactgtcactgtatattagttattttctttcttcactacaggagtttttcaacctataggctatttttcaattctaggtt

SEQ ID NO: 555770 - DNA, 247 bp, Homo sapiens
tttagcaaattccatcttcatattgtgctatgcttctatgagttccagctgttaacggatcatattttactgctgaaactatcatgtgtgatataattgctcattatgtgccttaaaacacaagcaatataattattttcaacttggagcaaattaaaatcttatcagcaatttaaaawctctagagtcgtcttcttctggttaattattttaaacttgtatttttctctttatgtttttagtgagt

SEQ ID NO: 555771 - DNA, 553 bp, Homo sapiens
ctgttaatatatgtcttaattatatatatcttacggcttctttgcatgtcagagtttttttgggggggggtattttggtgttatgctattgaatatctagatttgattggctacctttgaacaatgttgtggcaggcagttcagtaacttcaggatgagtatttttctgttgttgttttaaatgttttctttaaactttgttgagttaktctagagccatctgtaatttggagctaaatgagcactgtcactagggcatgaacctccagtggtctttactgaatatcctggaggtacagaggggattcccttctctggctggtcagagctaacgtgtcttcctgtcatgtgatgccagggaaatgttcttcttccaactccctggtagagtcctttgctgagctccttagaatttcatcctatgtacatttggcttagggacttgggagaatccttaggctgattcttggttcctttttctgtaaacgttctcttctactacacattccagctgcttaaccttttttgatttttatctggttcctcagtgcaa

SEQ ID NO: 555772 - DNA, 553 bp, Homo sapiens
ctgttaatatatgtcttaattatatatatcttacggcttctttgcatgtcagagtttttttgggggggggtattttggtgttatgctattgaatatctagatttgattggctacctttgaacaatgttgtggcaggcagttcagtaacttcaggatgagtatttttctgttgttgttttaaatgttttctttaaactttgttgagttattctagagccatctgtaatttggagctaaatgagcactgtcactagggcatgaacctccagtggtctttactgaatatcctggaggtacagaggggattcccttctctggctggtcagagctaacrtgtcttcctgtcatgtgatgccagggaaatgttcttcttccaactccctggtagagtcctttgctgagctccttagaatttcatcctatgtacatttggcttagggacttgggagaatccttaggctgattcttggttcctttttctgtaaacgttctcttctactacacattccagctgcttaaccttttttgatttttatctggttcctcagtgcaa

SEQ ID NO: 555773 - DNA, 553 bp, Homo sapiens
ctgttaatatatgtcttaattatatatatcttacggcttctttgcatgtcagagtttttttgggggggggtattttggtgttatgctattgaatatctagatttgattggctacctttgaacaatgttgtggcaggcagttcagtaacttcaggatgagtatttttctgttgttgttttaaatgttttctttaaactttgttgagttattctagagccatctgtaatttggagctaaatgagcactgtcactagggcatgaacctccagtggtctttactgaatatcctggaggtacagaggggattcccttctctggctggtcagagctaacgtgtcttcctgtcatgtgatgccagggaaatgttcttcttccaactccctggtagagtcctttgctgagctccttagaatttcatcctatgtacatttgscttagggacttgggagaatccttaggctgattcttggttcctttttctgtaaacgttctcttctactacacattccagctgcttaaccttttttgatttttatctggttcctcagtgcaa

SEQ ID NO: 555774 - DNA, 315 bp, Homo sapiens
ccaggctggtcttgaactcctgacctcaagtgatccgcccgcctcagcctcccaaagtgctgggattacaggcgtgagscactgtgcctggcctatttacttctaaaagataaatttaaagacagttctacccatgtatctaggtcacagtcagtggtgtgagatcgagaggcatttagagcttttgggtcatagtgttcattggatcattattctcgtagctaaagtaaaacgaactttcaggaggttaaatggcttgaacatacataccacaggctagtggcagagagataacagaatgcatacatacaactt

SEQ ID NO: 555775 - DNA, 601 bp, Homo sapiens
tgtgtagatgcccaaacagttactagaaagaaaaatcctaatattttcaaagtctatcagttattatctgtttttgcaattcataaaaaaaataattattcctctattttaagggtaaacatcccagaccacagttcactgacaatgtcagtttttgccgttatttatcatttatttcatacatgcaaacacacacacacacacatacacacgaatttgtgattatttgttctgggagtcaaaatgctttatgaaaaaggaaagaaaaaaatgaaatgaggttaatcatggggttctacaaggagtatcaggggtagacatctgggggcatttaggcgtttattcacctatcaaatatttctcatgcacccacaattagtgagaacttagaaattatcaggtggcatttcccatgggaagggaagagagaggataaaaaycgaagacaatactagaaatccgtaattctagatttctaaccttatccttaagaagtgtgaggactctgcttctgaagatgagggtgaaagataacctgggtgaccctaaagggctcagattctctgccttagcagtggacactcatgtccagacatcttaa

SEQ ID NO: 555776 - DNA, 612 bp, Homo sapiens
gtaagtccttacctaccgataattatcttaaatgtactcaatcaagagatgcagagtagctaaatggattaaaaagcaggtcccaactattatatatgctgcctatgagactcacttcacctttaagtgccaaaatagagcagggatagctaaacataccagataaaattttgacttgttaaaaactgcaagaagggacaaagaaaatcactatataataatgaaggggtcaattttgccagaggatatttaaatttctasacacccaacatcagagcacctaaatgtataaagtaaatgttaatagatctgaaaggagagacaaactgcaataaaatagtaggggacttcttaatactccatgttcaacaataggcaggtcatctggagagaaaattattaaggaaacattggaactgaactactctttagtccaaatggacctaacaaatatacacagaacattccatccaaagtaacataatacatgtttttatcaagcacacatggaacattctcgtggacagatcgtatattaggccataaaacaagtcttaaacattttaagaatattaaaataatattaagcatctcttttgatcacaatggtat

SEQ ID NO: 555777 - DNA, 448 bp, Homo sapiens
aaaatataaacaaactaaattcagaaatatattaaaatgawcatacacaatgatcaagtgagatttatatctaggatgcaaagatagtttaacatatgcaaatcaataattgtgatacaccacattaatggaatgaaggataaaaattatatgatcatctcaatagatgtagaaaaagcagtcaataaaattcaacgtcatttaaagattagaaaaactctcaacaaattaggtatagaaggaatgtatctcgacataataaaggccatatacaacaagcccacattgaccattatactcagtggttaaaactgaaactttttatcagacgtcaggaacaagacaaggatgcccattgtatctctgttcaaaatagtactagaagtcttagagcaattatgcaaaagaaagagataaaaggcatttaactcagaaaggaagaagtaaa

SEQ ID NO: 555778 - DNA, 618 bp, Homo sapiens
tcctcatagataactatatttagactgacagcaataattcttagcattttcattccacttcttgtctttaaaggatatacaaattctgattacataattccaggaccttctcactccttttcctaatctctgtctcagttgcgtaaatgcagacttatcaataaactagattgcctgcaatggttactgaaagatcatttatgagtttcagtgtcaaacttgaattttatgttgaaatcaaagcagctttgtaaatgggtacataataaaaaggagaggttgagaaggtaaccatgatcccatttattccagacagtccaggctggagtgcagtggtgcaatctcagctcactgcaacctctgcctcccagattcaagcaattmtcctgcctcagcctcctgagtagctgggattataggcaactgccaccgtgcccagctaatttttgtatttttagtagagatggggtttcaccactttggccaggctggtctcgaactcctgacctcttgatccacctgcctcggcctcccaagggagagttcacttctagttggggagatcaagcaagacctcatggtggagcctgcctttgagatgagccttgaggaatgaac

SEQ ID NO: 555779 - DNA, 588 bp, Homo sapiens
tatatttcctaactcctagtccagcaacacagaaaacaatattctaatgagacaaaatgttgcatcatatttcacagcattgcttattgaggagaagctcttgcttgaggctgctaatgacacttttggaggtattctgccaactcaacccaaagagaggttcccagaagatgcaaacactctttttcatggcccaatcagcaaacgcaaagcctatgccttgcctggccaacaacaacaaaaaaagtatgtttatcyggcaacatctttcagatcaaacacggtaccaaaggctggagcctgaagtttatacaatttggagtccctctttaagagaaagaataaaaaattaattgcaaaagtgaatatccacttagaaaataaatcacaacaatttaaaaattctttagtagttataaacaccacaaaaattaaaaatttaaataataatctctagttaactgcatatttctgtaatatttgtttttgtattttttttaccacattctctttgagtacctcttcacattgtggtttaaactataattttctatgaagatactagaatcaaaaaaaataatctgggat

SEQ ID NO: 555780 - DNA, 588 bp, Homo sapiens
tatatttcctaactcctagtccagcaacacagaaaacaatattctaatgagacaaaatgttgcatcatatttcacagcattgcttattgaggagaagctcttgcttgaggctgctaatgacacttttggaggtattctgccaactcaacccaaagagaggttcccagaagatgcaaacactctttttcatggcccaatcagcaaacgcaaagcctatgccttgcctggccaacaacaacaaaaaaagtatgtttatctggcaacatctttcagatcaaacacggtaccaaaggctggagcctgaagtttatacaatttggagtccctctttaagagaaagaataaaaaattaattgcaaaagtgaatatccacttagaaaataaatcacaacaatttaaaaattctttagtagttataaacaccacaaaaattaaaaatttaaataataatctctagttaactgcatatttctgtaatatttgtttttgtattttttttaccacattctctttgagtaccycttcacattgtggtttaaactataattttctatgaagatactagaatcaaaaaaaataatctgggat

SEQ ID NO: 555781 - DNA, 569 bp, Homo sapiens
tgatacaatggactttggggactcaggggaaaagagtgggaagcgggtgagggataaaagactgcaaatcaggttcagggtatactgctctggtgatgggtgtaccaaaatctcacaaatcaccactaaagaacttacttatatcaacaaataccagctgtttacccaaaaaataaaaccatggaaatgaaaaaatttttagaaataaaatacatgggcattatccatcaaacaaacatagaaaatgttgaaatgtggagaaggcaaatgggccagagaccttgggatgtgaggtacctccttagaggggagttccctgaatttctattttgcctcatagatcccagccttgagctgaggaaagcaaagctgacacctgaaaatcccatgaattcaaacccaaaaagccccaacagaagcccaatccctccagccaaagaccaagatggggcagcccatcaagacaggaactttcagacaggaagcactctacgccagccacacaccataggataaaggtctgtggccccactcccacccacygcaacaatgaccacatgggacactga

SEQ ID NO: 555782 - DNA, 473 bp, Homo sapiens
aagccattcttgtgcctcagcctcctgagtagctgggattacaggcgcgtgccagcgcgcttggccaatttttgtatttttagtagagatggggttttgccatgttagccagggtgattttgaactcctgacctcaagtgatccgcccccctcagcctcccaaagtgctaagattacaggcatgaatcaccatgcccggcctgttttttgtttttaaatcctggtcttgcctcgagtaattcccctggaaattcaggctgtaaacttggtgagggatgggttggctagatcctgggtccccagtgcacagcacagagtaaaatatatagggttccacaaatgaatgtatggatgctggcaggggtgctcaggcagaccttgtatctctgctggtgaatagttcaaatgcagccgtgtgaaaacagaaggaagccttcaaagacactgggaycccataggaagtagcagtgggg

SEQ ID NO: 555783 - DNA, 531 bp, Homo sapiens
aataaatgatgttggaaatatacattctttcaaagaaagaatatgtactatacagttccatttatgtgaagtgaaaaaatgtgagataaatgtggaaagagaaagaaagagcagaaaggaaggaaggaaagagggaggaagggaggaaagcaaggaragatggaaataactttttgagataacagaggtaaggttcttcaacacctcatggagggaaacactttttgaattaggtcaaaggaggtagcagccataaataaaatgattgctaaattcaattacattaaaattaagaacttctgattattaaaagatattaatgggatgaaaggataagccacagttgagagaagatatttgtaaccataaacgggtcacattcataatatattttaaaaattctttcacattaagaaaaaggcaaacaaccaaaaagaaaattaagcaagggatttgaaaaagaactttacaaaagagatatttaaatggacaataaacacatgaacagatgctcaacatgattattaataa

SEQ ID NO: 555784 - DNA, 341 bp, Homo sapiens
tggtccccttccatgctgtggaagctttgttctttcgctyttcacaataaatcttgctgctgctcacttttgggtttgcaccaccgttaagagctgtaacactcaccatgaaggtccatggcttcatccttgaagtcagcaagatcacaaacccgccggaaggaagaaactccagacacatccgaacatctgaaggaacaagctcaggacacaccatctttaagagttgtaacactcaccgcgaaggtccgcggcttcattcttgaagtcagcgagaccaggaacccaccagaagtaataaatttcagacacaggattatgggcatgcaccaccatgccca

SEQ ID NO: 555785 - DNA, 341 bp, Homo sapiens
tggtccccttccatgctgtggaagctttgttctttcgctcttcacaataaatcttgctgctgctcacttttgggtttgcaccaccgttaagagctgtaacactcaccatgaaggtccatggcttcatccttgaagtcagcaagatcacaaacccrccggaaggaagaaactccagacacatccgaacatctgaaggaacaagctcaggacacaccatctttaagagttgtaacactcaccgcgaaggtccgcggcttcattcttgaagtcagcgagaccaggaacccaccagaagtaataaatttcagacacaggattatgggcatgcaccaccatgccca

SEQ ID NO: 555786 - DNA, 596 bp, Homo sapiens
tgcccagtggggactctgtgtgggggctccaaccccacatttctttttggcactgccctagcagagggcagcaggcttctgcctggacatctaggtgtttccatacacccwctgaaatctaggtggaggttcccaaacctcaattcttgacttctgtgtacccacaggaccaacaccatgtcaaagctgccaagtcttggggcttgcaccctctgaagccacagcttgagctatacattggccccttttagccatgactggagtgactgggacacagggtaccaagtccctaggctgcataaagtatgggggccctggaccactccaggaaacgtttttccctcctagacctccaggcctgtgatgggagtggctgctgtgaaggtctctgacatgccctggagacgttttccccattctcttggcgatttgcatttggcacctcgttacttatgcaaatttctgcagccagcttgaatttcttcccagaaaatgggtttttcttttctactgcatcatcaggctgcaaatttttcagacttttttgctttgcttcctcttgaacactttgccacttacaaatttttcaccagata

SEQ ID NO: 555787 - DNA, 596 bp, Homo sapiens
tgcccagtggggactctgtgtgggggctccaaccccacatttctttttggcactgccctagcagagggcagcaggcttctgcctggacatctaggtgtttccatacaccctctgaaatctaggtggaggttcccaaacctcaattcttgacttctgtgtacccacaggaccaacaccatgtcaaagctgccaagtcttggggcttgcaccctctgaagccacagcttgagctatacattggccccttttagccatgactggagtgactgggacacagggtaccaagtccctaggctgcataaagtatgggggccctggaccactccaggaaacgtttttccctcctagrcctccaggcctgtgatgggagtggctgctgtgaaggtctctgacatgccctggagacgttttccccattctcttggcgatttgcatttggcacctcgttacttatgcaaatttctgcagccagcttgaatttcttcccagaaaatgggtttttcttttctactgcatcatcaggctgcaaatttttcagacttttttgctttgcttcctcttgaacactttgccacttacaaatttttcaccagata

SEQ ID NO: 555788 - DNA, 565 bp, Homo sapiens
tgttcctattaggccatcttggaacctcccatgtattgtcattttaacaatattaattattccaatccatgagcatagaataaatttccttttttctgtgtgtctttttctatttctttcatcagaggtttatagttttccttgcatagatctttcacttctttggttagattgattcctaggtattttatactttttgtagctattgtaacaggattgccttcttgatttctttttcaaattgtttgctgttgacatatataaatgctattgatttttgtatgttgactttgtattctgcaacttaactgaattcatttattagctcttaacagttttttggggaaactttgggtttttctaagcataggatcacagtgtctgcaaacaaggcttattttgctcctaccttttcaatttggatgccctttmtttctttctcttgtctaattgctccagacattacttccactactatattgaaaaacagcagtaaaagtgggcattcttgtcttgttccagtctttaaagcaaaggccttcaatttttccctattcattatgct

SEQ ID NO: 555789 - DNA, 555 bp, Homo sapiens
cttggctcctccaatctattttctaacagctggatatatctattatagaggagtacagataactattaaatttccacttatatatattttcccttatagagtacaatttatctgttgttgttattgttgttgttgttgcttttattttcctttaaattctgggatacatgtgcaaacatgcaggtttgttacataggtatacatttgacatgatagtttgctgcacctatcaacctgtcatctaggttttaagccccgcatgcattaggtatttgtcctaatgctctccctccccttgccccccacctcgcaacaggacctggtgtgtgatgttcccctccctgtgtccaagtgttttcattgttcarctcccacttgtgagtgagaaaatgtggtgtttggttttctgttcctgtgttagtttgctgagagtgatggcttccagcttcatccatgtccctgcaaaggacatgagctcattctctttaatggctgcataatactccatggtgtatatgtgccacattttctttatccagtctatcactgatgggc

SEQ ID NO: 555790 - DNA, 562 bp, Homo sapiens
aactttaacactcaaaaactcattccctcctcctaatatccctgagagataggcaggaattcctgtccctgacaaatgcagaaagatccaacctgatgcaggtgggttgggacaaggtaaagttagggcttaaactctcctgccctttagaggccttgctgtaagactctgctgcctgctaggagaggaagcagtcttggctcccgttatgaatagatgtcagccttttggcacaatgcaacccaactgtcagcctaaaggaagccgcatgtactcagggaaaccctgtctgctctgcctttcacaggaagccaggatgtggagccaggagagaaggggcattcaaagggcctgggagacccttggtgaaaacaatcagttggtttcaacatcccagagagattctcaatcagggtgagtctcaaatattagtagacataaaaatcacctggggagagtgtaaaaaaataaaaattcccagaaattctggttcagtcattttggggccaacctagtcatttgcattartcagcatgcactccctgatgattctgatataaat

SEQ ID NO: 555791 - DNA, 588 bp, Homo sapiens
aactcattctattcaagatcaatttttctcttstgccagcattttctctctctttactagacacctctgtggaaataaacagagcatgcaaagaagaataggaaaaggccactgattcagagcatgctagagcaagggagtcagccaccatcacttgtgtctggcagagacttgtgggcaggcagaggaaggagaaagctttaccataaaaaacagaaaggctttagaggtagcctgattataggctgttggaatggggaagctgtagacaggatagctagaagtggacaccctgtgttattggttaggggcatatatttgactgttcaaagttgatcctatcttgaaaatgggggaaaaaatagagatgctgccagttattaatcaagtcctggctgtttagagcctattgttacaaagatattgtttggcttcctggactggttgccagagacagtagtttgacttcctggactggttactctacatagcaggttggcttcctggggtggttactgcagattgtgggtcagagttcatttttatcgatggtctggctgtggttcctttgtatattcagtttctcag

SEQ ID NO: 555792 - DNA, 588 bp, Homo sapiens
aactcattctattcaagatcaatttttctcttctgccagcattttctctctctttactagacacctctgtggaaataaacagagcatgcaaagaagaataggaaaaggccactgattcagagcrtgctagagcaagggagtcagccaccatcacttgtgtctggcagagacttgtgggcaggcagaggaaggagaaagctttaccataaaaaacagaaaggctttagaggtagcctgattataggctgttggaatggggaagctgtagacaggatagctagaagtggacaccctgtgttattggttaggggcatatatttgactgttcaaagttgatcctatcttgaaaatgggggaaaaaatagagatgctgccagttattaatcaagtcctggctgtttagagcctattgttacaaagatattgtttggcttcctggactggttgccagagacagtagtttgacttcctggactggttactctacatagcaggttggcttcctggggtggttactgcagattgtgggtcagagttcatttttatcgatggtctggctgtggttcctttgtatattcagtttctcag

SEQ ID NO: 555793 - DNA, 588 bp, Homo sapiens
aactcattctattcaagatcaatttttctcttctgccagcattttctctctctttactagacacctctgtggaaataaacagagcatgcaaagaagaataggaaaaggccactgattcagagcatgctagagcaagggagtcagccaccatcacttgtgtctggcagagacttgtgggcaggcagaggaaggagaaagctttaccataaaawacagaaaggctttagaggtagcctgattataggctgttggaatggggaagctgtagacaggatagctagaagtggacaccctgtgttattggttaggggcatatatttgactgttcaaagttgatcctatcttgaaaatgggggaaaaaatagagatgctgccagttattaatcaagtcctggctgtttagagcctattgttacaaagatattgtttggcttcctggactggttgccagagacagtagtttgacttcctggactggttactctacatagcaggttggcttcctggggtggttactgcagattgtgggtcagagttcatttttatcgatggtctggctgtggttcctttgtatattcagtttctcag

SEQ ID NO: 555794 - DNA, 597 bp, Homo sapiens
atgttattttaagccactacatttgtggtaatttgtctagcagcaatagaaaactaatatgtcatccgtattttatttacsttgcagaatatgaggtcattcagagtttcctgaatctttgtcctaggttctagctttttgctgttgggttatctcaaattaaatgcattttaacatgcagatgtgaacaataaccagcagatgatatggagtaccaaagaaacagaacagagaaatggagaaagtaaaagaacatgagatcacaaagaaggcctgattatgcaattattacctatgggggttagggatagctgtactgcagcagaggcaattggagccaatattacacagtccttaagctaaaaatgccagaggtaagcctgagacccagtgccgactaatttaattaagaagatctctgctggaaggtgtctgggaaagaattttcttcttaaagagagatggatgaaggtaagacttttccctccctcccttcttgttgggtatgtttggtgtgaagatatgccatacagatctactgcacctatttgggcaccatgaggaagaggccaacaaaattctagagaaggcaaccca

SEQ ID NO: 555795 - DNA, 597 bp, Homo sapiens
atgttattttaagccactacatttgtggtaatttgtctagcagcaatagaaaactaatatgtcatccgtattttatttaccttgcagaatatgaggtcattcagagtttcctgaatctttgtcctaggttctagctttttgctgttgggttatctcaaattaaatgcattttaacatgcagatgtgaacaataaccagcagatgatatggagtaccaaagaaacagaacagagaaatggagaaagtaaaasaacatgagatcacaaagaaggcctgattatgcaattattacctatgggggttagggatagctgtactgcagcagaggcaattggagccaatattacacagtccttaagctaaaaatgccagaggtaagcctgagacccagtgccgactaatttaattaagaagatctctgctggaaggtgtctgggaaagaattttcttcttaaagagagatggatgaaggtaagacttttccctccctcccttcttgttgggtatgtttggtgtgaagatatgccatacagatctactgcacctatttgggcaccatgaggaagaggccaacaaaattctagagaaggcaaccca

SEQ ID NO: 555796 - DNA, 597 bp, Homo sapiens
atgttattttaagccactacatttgtggtaatttgtctagcagcaatagaaaactaatatgtcatccgtattttatttaccttgcagaatatgaggtcattcagagtttcctgaatctttgtcctaggttctagctttttgctgttgggttatctcaaattaaatgcattttaacatgcagatgtgaacaataaccagcagatgatatggagtaccaaagaaacagaacagagaaatggagaaagtaaaagaacatgagatcacaaagaaggcctgattatgcaattattacctatgggggttagggatagctgtactgcagcagaggcaattggagccaatattacacagtccttaagctaaaaatgccagaggtaagcctgagacccagtgccgactaatttaattaagaagatctctgctggarggtgtctgggaaagaattttcttcttaaagagagatggatgaaggtaagacttttccctccctcccttcttgttgggtatgtttggtgtgaagatatgccatacagatctactgcacctatttgggcaccatgaggaagaggccaacaaaattctagagaaggcaaccca

SEQ ID NO: 555797 - DNA, 597 bp, Homo sapiens
atgttattttaagccactacatttgtggtaatttgtctagcagcaatagaaaactaatatgtcatccgtattttatttaccttgcagaatatgaggtcattcagagtttcctgaatctttgtcctaggttctagctttttgctgttgggttatctcaaattaaatgcattttaacatgcagatgtgaacaataaccagcagatgatatggagtaccaaagaaacagaacagagaaatggagaaagtaaaagaacatgagatcacaaagaaggcctgattatgcaattattacctatgggggttagggatagctgtactgcagcagaggcaattggagccaatattacacagtccttaagctaaaaatgccagaggtaagcctgagacccagtgccgactaatttaattaagaagatctctgctggaaggtgtctrggaaagaattttcttcttaaagagagatggatgaaggtaagacttttccctccctcccttcttgttgggtatgtttggtgtgaagatatgccatacagatctactgcacctatttgggcaccatgaggaagaggccaacaaaattctagagaaggcaaccca

SEQ ID NO: 555798 - DNA, 465 bp, Homo sapiens
gattacaggcgtgagccaccgcacccggcaaaaaaaaaaaaacttcttaagtcgaaaatataaaaacatgacaaaaataatagtagctttgatatggtgaggaaatatccattccacagtctcaggccacctgaatttttttcacaggcacaagttccttttgctgctgaccaaacagaactgggtatgcagaagttgcctggtaaatgcttagactcttgcaagatccccagggtctgggagtgaaactccttttccagtcctgcttatcttgctgtgtggctcctggtagctcctggtagcccccrgcctcttcaggaatttgccactgctataggctgactttctgtcccccaaaattcaaatattgaaacctaatcccccatgtgacagcagtaaaaggtggggtcattgggaggtgattagcagtccccatgaatgggattggtgcccttatgaaagaga

SEQ ID NO: 555799 - DNA, 578 bp, Homo sapiens
agacaataatatatataatatatttacattatgatttaaactatcataaactatggttctgaaaaaagttatctttttataatcaatgaggatagtatcacctaagtcaaaaatgggggaaagataaactgtaaagaagatattaaaactgccaaaagtacttggcacttgacgacagtgagaagttctcaactttgagtgcacggaagctttataaaatattgatggctgaacccacccctagagattctggtttaattggtctgaggtatagtgtgagtggaatgatttctaaagctcccacatgcagtcgtgatgcagtgtcctcccatgcacagtgattctcagttcatggacccaacattgctatgagatatctttcagttgcaaaggttttgtgatgatttctggaattgaatagtgaagagatgacagggtcttcatytgaaacttcagtgtttgcaggatcacctaatacttccattcctatgagcgtacatctttcagtaagccttgattttttttctagctcctcctgccacacccaaaaccaaattttactaaggcttaaggatcgt

SEQ ID NO: 555800 - DNA, 578 bp, Homo sapiens
agacaataatatatataatatatttacattatgatttaaactatcataaactatggttctgaaaaaagttatctttttataatcaatgaggatagtatcacctaagtcaaaaatgggggaaagataaactgtaaagaagatattaaaactgccaaaagtacttggcacttgacgacagtgagaagttctcaactttgagtgcacggaagctttataaaatattgatggctgaacccacccctagagattctggtttaattggtctgaggtatagtgtgagtggaatgatttctaaagctcccacatgcagtcgtgatgcagtgtcctcccatgcacagtgattctcagttcatggacccaacattgctatgagatatctttcagttgcaaaggttttgtgatgatttctggaattgaatagtgaagagatgacagggtcttcatctgaaacttcagtgtttgcaggatcacctaatacttccattcctatgagcgtacatctttcagtaagccttgattttttttctagctcctcctgccacacccaaaaccaaattktactaaggcttaaggatcgt

SEQ ID NO: 555801 - DNA, 506 bp, Homo sapiens
ttttggagaaaataaaggaaacataaataacatactatatataattatatttttacataaaaatattcataatagtgaaaaaacttaaaaatctgaattgctattcatacaatattaccaagcaaaataatcatttccataaaaggtgatataacaatcaaaaatgcagtcttctcccaagcagaaacagtatgattttatataargaaaataaaaagtgggcatctacaaaaaaaaaaagaaaggataaacacaaaggtatttatgttgtttacttctggtcaatagtatttttgatgtctgctattccctctttcttgcctgtctttgccaattgtcttttctatattgaatatgtactactcttacagtggaaatgtacagtatatccttttaactaaacaagcaacaacatttttcctacctggatgccattatcatacagagtttaaatgtatgaatgcataagcaaatgaataaacacagaaataagtataactaacttt

SEQ ID NO: 555802 - DNA, 614 bp, Homo sapiens
ccttaacatattaataatggctattttattcatctgattgctttaaaatctaggtcatttctttggttttgtggattgcttttaccattaacaattgatagctctttttgggtttcatttgtgtgccttgtagtttcaattgagtgattccattgtgtgaaaaggaattactgggtctgagattaatagtatttatgtctggaaaaggacttgcatcttctttggtgaagttcttagcatggtgagtggatttaatatagttagttgttgatctgggcttggattattttccttgataatgctgttctaatgtagcactggctttaaatcttacagcatttgtcttccattagcttgtgcttagtgtggtgcctggggacctggaggatctttctcagtgctggagttgtactctctgkttttggtagaaccaccctgcatagctgtgccacacagggagtttctctcctagctcgtgaccagcagtacactgttgttgcatgttagttttgctaggtttgtaatggaatgatggcatttttgttttgttttattttcctggtcagtcttaggcaagatttgtgtgcctgggcctcaggggtggggctttctct

SEQ ID NO: 555803 - DNA, 614 bp, Homo sapiens
ccttaacatattaataatggctattttattcatctgattgctttaaaatctaggtcatttctttggttttgtggattgcttttaccattaacaattgatagctctttttgggtttcatttgtgtgccttgtagtttcaattgagtgattccattgtgtgaaaaggaattactgggtctgagattaatagtatttatgtctggaaaaggacttgcatcttctttggtgaagttcttagcatggtgagtggatttaatatagttagttgttgatctgggcttggattattttccttgataatgctgttctaatgtagcactggctttaaatcttacagcatttgtcttccattagcttgtgcttagtgtggtgcctggggacctggaggatctttctcagtgctggagttgtactctctggttttggtagaaccaccctgcatagctgtgccacacagggagtttctctcctagctcgtgaccagcagtacactgttgttgcatgttagttttgytaggtttgtaatggaatgatggcatttttgttttgttttattttcctggtcagtcttaggcaagatttgtgtgcctgggcctcaggggtggggctttctct

SEQ ID NO: 555804 - DNA, 586 bp, Homo sapiens
cacaagcttacttatcggaccttcacaccgkggttaggaatggagtaggaagcacaaccaatcaggcccagtaactgagggtgatagccaggaaattacaagggtgctgttgtaattgtttctctaataaacattaggtacatgtcatcaaatattaataacttttaaatatattttataattcttttttgcactttttctatttttacttttataaggttacatccttttttatatgttttttttaaatgtttgtcagtagatgttgctaggacatgacagaaaaaaaagagaactccacaattttgtagtgtaaagacaaagagatatattctttcatttccctcctgttgagaagttatgtattggcatgtgaccgtattcctacacaaagatttagttgcaataaaatagttaactaacttaaaagaatgtgcttcagtctccctctgagggaaagatagagcaggtacattaaataagcatttgtcattagcaaagaccactagcaaggacccaatgtcgtggagtttggagcatgccctgggcggttgagacaagcgttcagggaaaaaaatgaatttac

SEQ ID NO: 555805 - DNA, 588 bp, Homo sapiens
gtaggaagcacaaccaatcaggcccagtaactgagggtgatagccaggaaattacaagggtgctgttgtaattgtttctctaataaacattaggtacatgtcatcaaatattaataacttttaaatatattttataattcttttttgcactttttctatttttacttttataaggttacatccttttttatatgttttttttaaatgtttgtcagtagatgttgctaggacatgacagaaaaaaaagagaactccacaattttgtagtgtaaagacaaagagatatattctttcatttccctcctgttgagaagttatgtattggcatgtgaccgtattcctacacaaagatttagttgcaataaaatagttaactaacttaaaagaatgtgcttcagtctccctctgagggaaagatagagcaggtacattaaataagcatttgtcattagcaaagaccactagcaaggacccaatgtcgtggagtttggagcatgccctrggcggttgagacaagcgttcagggaaaaaaatgaatttacttctgactattttgtgttaaatgggttactccaatttaataagctt

SEQ ID NO: 555806 - DNA, 534 bp, Homo sapiens
cagagaactgttagtcctttttagataggaaaactgccccatagctgagctttccttggatcccttcagttttgcattcagatgcttcaccagtcactctctcactccccctgtagaatgagaaatccagtcaagctttttactggttttgcattgctaataaaataataacaattgatattccattttgtggaggttgggagggaaggggacctaaattagtctttttgaggtcatttaaaagcagwctcaagataagaggaaaatagtcattctaaatacttattgatgaattgatcaattagttttggcaaaataattccatgatatatagtgtttaaaatgactaccacattacctgcaaacactgtatgctcagtaaatgttaattatatctgaatcactcagagataccagtgtaaatataaggttagagataattaaggactggggagaaaaaaaagcatctgcattgtatttcttcttaacatacactattttattttaacactctaattgcaatgaattttcatt

SEQ ID NO: 555807 - DNA, 534 bp, Homo sapiens
cagagaactgttagtcctttttagataggaaaactgccccatagctgagctttccttggatcccttcagttttgcattcagatgcttcaccagtcactctctcactccccctgtagaatgagaaatccagtcaagctttttactggttttgcattgctaataaaataataacaattgatattccattttgtggaggttgggagggaaggggacctaaattagtctttttgaggtcatttaaaagcagactcaagataagaggaaaatagtcattctaaatacttattgatgaattgatcaattagttttggcaaaataattccatgatatatagtgtwtaaaatgactaccacattacctgcaaacactgtatgctcagtaaatgttaattatatctgaatcactcagagataccagtgtaaatataaggttagagataattaaggactggggagaaaaaaaagcatctgcattgtatttcttcttaacatacactattttattttaacactctaattgcaatgaattttcatt

SEQ ID NO: 555808 - DNA, 577 bp, Homo sapiens
cagattccagaccctcagaaactgtgagataataaatttgttgttctaagctactaagttttggtgtaaaacagccatagataactgatacaaatcacataatttttaatagctgcttcatatgttaatatgtctgtaccataatttactcaatcttttgttgctgcacattttggttattttgttttgctattataaacagggctgcaatgaatattattgtacttaaacattggtacacgttcttctttcctaaggataaattccttgaagtaaaatagctggctttcaatgggtatgcatttttttaaagcttttggtatgttattccccaatcactttctgttaggattgtattcatttacagtcctgctggctgtagttcaggttaatttcaactactttatcttgagttgtctccatgaaaaccagttagaaaccgaaaccaaagccccaaacaagaaaagccccaaacaagaacccaggaaagaaaactaaggtwgaatcttgaaaactatgagataaatttgaagctaaacaattttcaaagtaccattgttttgaaataagtctgata

SEQ ID NO: 555809 - DNA, 579 bp, Homo sapiens
gctaatggactgattggggatgcccagtaaggcctgtctgtctagattcttcttggcctctttgaacacacaatctttccgtggatgtgtggcagaactgtctctggaatgggggtcttatgacctacagtcaaagaagataggtcagataatttcttgatggccatcttgatttacacagaaaggcagtgggggtgggggaagagttagagtaatctttgtaggttttatggctggattgggggaaatggagttctagtttctatgatcttctgtagggcagaggggttctagtttctatggctagccttgggaagaatgagaggcagagagaggagggcaggtcagagaaagacttttgcttctgagggatttgttttkgggtatgtttttctgtgaccctacatcagtcactcagatctcattttgaataagggtgtaaggcattccctctcttcatttgaaataataatagtcagctgggtgcagaggctctttgaaagggaaggagaaagaagcctatccagagtagtcttttccataatccaggccttagggagagaaaacaggtgcaattag

SEQ ID NO: 555810 - DNA, 621 bp, Homo sapiens
ccattgtatgtatataacattttccaaaaatccattcatccattgatggacatttaggttgtttccatctcttggctattgtgaataatgttgcaataaacatgaaagcaaaaatatattttcaagatcctgatctcaattctttttggtcagtacccacctgatttcaattctttttggccagtacccacctratttcaattctttttggtaagtacccaaaagtgtgattgctggatcatatggcaggactatcttaatttttttgaggagcctgcatactgattttcacagtgaccgcaccattttacattcctaccaacagtgaacaagagttccaatttcagcaaagtaaacaatcaacagagtgaaaaagcaacctacagaatgggagaaaatatttgcaaaccatatatctgataagaagttaatatcaaaaatacataagaaactcctacaactcaacaacaacaacaaaaaacccaaataactagattaaaaaatgggcaaaagccttgaatggacatttctctaaagaagacatagaaatagccaacatgtatatgaaaatatactccatatcactaatcatcagggaaacgcaaatcaaaatcacagcac

SEQ ID NO: 555811 - DNA, 631 bp, Homo sapiens
taattttaaataaaagtagactatgtattatttttgtcaaagactatttaytctgccaaaaccttgcaagtcatgcaactgtgcctattatttaacagaaaatgagttacgtaagtctctgaaaaatacactcttgataacattaagctttaataaaggttatttatggctcccgaaaagtagttcttctcttgtcaattgtattccgtaatttgaggaaacttaaaaacttgcaccatgtagagcagagaaacctgagtcagcatcttctcatctcataattgggagaaagggcaggagccacgttcctcctaagacagcagggagatgaagcactcttcagccacctcctcatttctgccccagtcctctgctcctgggaaccaacatccttctttgcagccacactcagtcttgcttggaatgtaggcttttccccaactccccgctgctgtggcaggccaggtcattgcagctaacctgactctgggtttaccccgcccaagggttacacatcaatgctaggacaggtactcccagaaggcttcctatagcaacaacatatgcggaaaggattatgtcattaattctgatcagtttaactgcaagatcttatggtgtttggaatctc

SEQ ID NO: 555812 - DNA, 602 bp, Homo sapiens
cagggtctcactctgttgcccaggctggagtttagtggcatgatctcagctcactgcagcctctacctccctgggctcaagtgatcctcccacctcagcctcccaagtagctgggactatggrcacctgccaccatgaccagccaatttttgtatttttttgtagagatgtggtcttaccatgttgcccaggctgatcttgaactcctgggctcaggagatacgcccacctccaccttacaatgtgctgggattacaagcctgagccactgtacccagccttataatcatttttgtcatgatgaggcagctctacctgagaattgaggtactacctgatggggagcagaaccagcaaaatcatggcaaaacagagctgggactatgattactaatctactttttaaaactgatctactctgcacattttctaagataaaaatttccccttattgtttaagcagatttgggttagcttttctgtcacaacaaaaagtgtttgcagtcatattaccaatccccttgaagtctacatttggaaaggcaacattcaaattaaatttaatttattttgtgtgtggcaaaagtgagggcaagtacaat

SEQ ID NO: 555813 - DNA, 585 bp, Homo sapiens
aaataaagccatatacttacagccaactgatctttgacaaaactgacaaaaacttacatggggaaaaggatgccctcttcaataaatggtgctgggaaagttggattagccacatgcaaaagaatgamatggaacccctatgcccctatatctcactatacataaaaaatcaactcaagatggattaaaaacttaaacataagacctgaaactctaaaaatacttgaagaaaacatagggaaaactctcctggactttgatgtaggcaaagaatttataacaaagacctcaaaagcacaggcaacagaaacaaaaatagacaaatgggacttaattaaactaaaatgcttctgcaatgcaaaagaactaatcaagagtgaagagaccacctgttgaacgggagtaaatatttgactacttgcaaactattcatcctacaggagactaatagccagaatatacaaggaattctaataattcaacagtaaaagaacaaaaaataaataatttcgtttaaaagtgggcaaaggataagaatagacatttctcaaaagaagacatacaaatggccaacagggttaagat

SEQ ID NO: 555814 - DNA, 486 bp, Homo sapiens
tacattaaatgtaagatatttataactacatgccactacttttcttatatagttctatttaacactctctttgattgtgactgcctgggtttcacctcttaataacttcaggtccaatgaggggttataaaatcttaaagttttgcagtacaatgcataagaaaattttcaattaatattatagaaaatgtttcttgatgtgtgattgaaatttatttctaatttgtacatcaattaaataatactttttaacagcttaattccttctggttgaatgtgtgtayagatacgaaactaaataaataggtaagtaaatacatctgattttcactttagataaattcacacattttaggtaaatttaatttttaaattagatttgttttctttaatatgatagaaactgtcattaagacacgtaattcattatcataagaagtataattataggtttctcagtttgtttgggctgccgtaagaaaattc

SEQ ID NO: 555815 - DNA, 544 bp, Homo sapiens
atgtccctgcactccaggctgggtgacagagcaaaactctgtctcaaaaaataaaaagtcttaacggagtgcataatagaatgttaagacattttcaaatgtaaagagtaacagagaccagatcagcagtgctgtacatatgaagagtgtaagaaaacagccactagctcagtraccccttctgagatgtgtaagaggagcttggagaagagcaagtcaaactagtggtggttccttctttggagagttgtttcctaggcagcaatgacaggaagcaggacaggaaacttggcatgtatctgttggaaggtcgtgggctgaaggtgagacattgtggctaacgctgcctcccatgatggaggaagaagaggcatgtctcggatcctcctccaagtcacgtgcagcctggagctgggctggtgtcaactaagtgctggctctgcggagactctcattcagtagctgcctggagggagcaagtgaagctctttcctatttgttttgagctttagaaaagataaagcaaacaggctgggtgcagtgg

SEQ ID NO: 555816 - DNA, 581 bp, Homo sapiens
gagtcagtttgctcatagcaatgagcttatgagagtggactggaaacaagaagatgtgaagtttgattcatattcgtaatgggagcccagtgtaagataggaaggaaatgaaggatgaggtcaaaatgttaaatgtgaaatttaacaaagattattcagatggatttaaaggcatagttaccagagaaaacagatgatccakgaggaggatttattttggaataaaaagcataatggggccgggtgcagtggctcacgcctgtaatcccagaactctgggagaccgaggagggaggatcacctgaggttaggagttcgagaccagcctggccaacatggtgaaaccctatctctactataaataaataaataaatactagctgggtgtggtggtgaatgcctgtgatcccagctactcgggaggctgaggtaggagaattggttgaacccgggaggcagaggttgtggtgagccgagatcgtgccactgcacttcagcctgggtgacagagcaagactctgtctcaaaaaaaaaaaaagcataatggcttcatgacaatttgaatgtgaagagatgaagag

SEQ ID NO: 555817 - DNA, 581 bp, Homo sapiens
gagtcagtttgctcatagcaatgagcttatgagagtggactggaaacaagaagatgtgaagtttgattcatattcgtaatgggagcccagtgtaagataggaaggaaatgaaggatgaggtcaaaatgttaaatgtgaaatttaacaaagattattcagatggatttaaaggcatagttaccagagaaaacagatgatccatgaggaggatttattttggaataaaaagcataatggggccgggtgcagtggctcacgcctgtaatcccagaactctgggagacygaggagggaggatcacctgaggttaggagttcgagaccagcctggccaacatggtgaaaccctatctctactataaataaataaataaatactagctgggtgtggtggtgaatgcctgtgatcccagctactcgggaggctgaggtaggagaattggttgaacccgggaggcagaggttgtggtgagccgagatcgtgccactgcacttcagcctgggtgacagagcaagactctgtctcaaaaaaaaaaaaagcataatggcttcatgacaatttgaatgtgaagagatgaagag

SEQ ID NO: 555818 - DNA, 543 bp, Homo sapiens
tgcggccttcttggcactgcaagagagcaagactatgggtatcaagaacaacaaggtcgcctttcgacatcctggatggtgtcacccccagcccccagccacaaggtgaacagctgggagtccagatgctgttgacggagtgatgatggtgactactaccaggaaagtaatggtccaagagacaattatgcagctatttcacaagtggatcgattcccatccagcctgaaaatatatgcagatgcaaagaagagaaaatggaatgcttacagcccttgctgcttattctcmgaagcaagaagcagagtggaaagaaaaagcgataaatgagctagaagaatggcgtgcaagacaagacgagcagctacagaaaagaaaggcaaactacagggcagaagattttgtaaatgacattgacgagtcatccccctgcactgggtggtaacaggtggcccggttgtttgactgtaaccccaagtcagcaagcagggcaaagaggtctcctgtatgcactcagtcctcaactccctcaagcaggcgacc

SEQ ID NO: 555819 - DNA, 598 bp, Homo sapiens
ttcttaatttcaagtaacatacttgaaaataaaaaattatatattttgtttaatattagtgtttctatacctcttatatggcaatatcaagaatgaataaaagtaaaatggaaattaagctaaatatactatatatcagtatgtgaaataaacctgattttacttaagttattactgaattcttgggaagatgacaccagtcagtacrttctggtttttcaacatttttaaattgtgctagtggtaaatactccttaaggagtccttttaaacacgtaatgttccgaaaataagaatggctatggtggaccaaaaggttacttgaaaagagagctagggtaacaaaaagcaaactaaacttagaagtcagtttccagtgttaataatagccattcaatttaatgaagtagttgttacttaatcagttcagtaatttgggcctcagtttcctaatctgcaaattggaaactgacagcatgaaggaaacaatgtagtgcagtactttataaaatcgattttagtcatattccctgaagtcaattctctgtcctgggtttcatgagtaagacctttagcaaattactctaaacttcaaatt

SEQ ID NO: 555820 - DNA, 272 bp, Homo sapiens
aaaaaaaaaaaaagattgttggggaactagtgtggccatttggaggtaagaagacactctggctttttgaattgccagagttcttgcactggatgtttttatcttcgtgggctgatgtcccttcagtcttaraagttgtcatcctttggatgagttttttgttcttttatccgctttgatatccttggggccttgattatggtataaggtgggcatggttgactggctttgattctggaagattttggggggccatggcttagctcaggact

SEQ ID NO: 555821 - DNA, 551 bp, Homo sapiens
cacacacaaacacacaaataggaacgcttttgactcttaacctctttacacatagtgaataaatgatttgaaaataaatacacaagaatctggttttaatattgtgctagcagatgacacatttaattggcaacaatatgctatgagatcacactataaggcattttggatattccaataacttatcacagtaataaattagataaacactgtaatgtgctctgactttattatttgagaatattcagttattttatagataagaataagatggatgaaactcataagaagtgttatatatggacagtaatgagtaccatgtragaatataggcaaaactaataagatacattaagtacagacagtaagttaatgacctagaagatacatgataaaaagcatgaaacaagcaagaatgttacttatagagagaaataaatggaaagacagctcataagataaagctgtaacacctctcgaaaaaaaaaacacaggagaaaatctgcatgaccttgtatttgccaatgagtttttaagatacaacaccaaag

SEQ ID NO: 555822 - DNA, 458 bp, Homo sapiens
attatttgcatctgctggacctacagttctcacccttatacatgtcattttattcttgatgtaatccagtttttccacccataaccttaagagggtgggcaagggaagaaggcaaatttgagtagatttatataaatggtgagtcaactgacaatttattcttagatcactaagtccagaagtccagaaaccagctctctgttaaaatgttcatagaaaatgcayatacatagaatgaaaactctccaaaaaatgagagtgaaagtattatgaggaaaaggatatttacagagtctcccagtaactcccctcaaggtacttacaaattacactgtgaaaaataagaaccttttagtggtgggacatggtggataacccttaactaagtaatcatgttaacatcactagtagggagacaaaaagacttctatgtcttttgctatgatgcaatgagcagg

SEQ ID NO: 555823 - DNA, 604 bp, Homo sapiens
agtgactctatacttgggctcaacaattaaaattctttgaatttatattcaatcatttacgcatgttttcccgaagaaagacttcatgcaagaatggccagtgcttagggatttccagagtaagcaacacttttggccagaaaaagccttttcttaggacggccagagcttgtgttgaaaactagtatcaagccacccttgttattaatgttaccatccttgtgaattctccaaatgctcctggagtgctactctcagaatagtttgtcaagtgccactctagtccattccatcactttcccaagctttgtgttggggtcacaatcactttcctccctgaggatctctgggatccctgtgtcaataagttatctactaacccggatactcaatgagaaacaccaaagatcatgtgatcttcttcatgtagggtagatatattgctacctagattgctcatgtgattcttccccccactccactaataatagcaatttattccaagatgtctttctatgtaaactttttaagatgttggcgcatacatrtatataatataatatgtaatatatatttatatatagaatatggaggttggcatgaa

SEQ ID NO: 555824 - DNA, 531 bp, Homo sapiens
tgcttctattaaaaatacaaaaattaggttgggtgaggtggctcatgcctgtaatcccagcattttgggaggccgaggcaggtggatcacttgaggtcaggagttggagaccagcctggccaacaaggtgaaacagcacaatattatattgtattgtaattattataaacaatacaaataattatttgtatttttaaatacaaaaaattagccgtgcgtggtggcgggtgcctgtaatcccagctactcgggaggctgaggcaggagaattgcttgaagctgggaggcggaggttgcagtgagctgagatcgcaccactgcactccagcctaggcgacagagggagacttcatgtcaaaaacaaaaggaaaaacaaacaaacaaaaacgaacccacaaaaattagctgggtgtggtagtgcatgcccgtaatcccagctacttgggaaattgaggcatgagacttgcttgaacccrggaggtggaggttgcagtgagccgagactacgccactgcactccagcctgggtga

SEQ ID NO: 555825 - DNA, 404 bp, Homo sapiens
ggtcacagtccgttcacttaagagagaagtatttgtgggggaaaaaagttgcctataaagcatatttccaagttttactcttccttattaattttcattataaacttggaaatgtgtttctagggagaatttttggccctaagaggtaataaaatcacactgcagaatgcagcagaccttataaaagcacatatttaagggaaaattctaattttacagcacacttttgtgttcagcttgtgtgccttacttataccggtgagggcgtttggatttgacacagctgctcaaaaggtctaaagtaaaaccgccggctgcctagtgctgagaacctgactgtwgctctcaactcctacctggaaaaagacacaaacagaaacaactgtaactgagtactgtgcact

SEQ ID NO: 555826 - DNA, 458 bp, Homo sapiens
aacagaagcagagtaggcctggtagaaggaatggcatatgaaaaacagaggcatgaaggggcaagttcatgaaacagtgaagagtttaatatgactagagtgcgcactgtgtacagaggactatccagataatggactggggatagagagtgagagaatcaagagctccagcttcaggctcagctggtcaggcatgggcttggaccccagcttcataaccccttggggatgttacttaatgtctctaagcttcaggttcctcattttaaacataggaactgttttttgtttttagtttttttttttttgagatggagtcttactctgtcacccaggctggagtgcagtggcacgatctcagctcactgcaacctctgcccctgggttcaagcagttctcctgcctcagcctcatgagcagctgggattacaggtgygcaccaccatgcccggctaatt

SEQ ID NO: 555827 - DNA, 628 bp, Homo sapiens
aatataggcaactgacctttgacaaatggataagggcaacacagtgtagtagagataattttttcaacaaattatgctggaaaaactgaacatccctatgcaaaaaaaaaaagaagtagaataacctagatgcagactttacaccctttacaaaatgaactcaagacatatcacaaacataaatgtaaaatgcaaaaccataaaactcctggaagataacataggaaaatatctagatgaccttgggtttggtgataactttttatctaaacaccactttgtatcccaatgccaaaagtacaatccacaaaataaagaattgataagctgaacttgattaaaattaaagtgttcttctctgtgaaggactttgtcaagagaataaaaagtcaagtcacagactgtgagaaaatatttgcaaagatatatctgatatctgataaagaaatgttatccaaaatatataaagaactcttaaaacttaacaataacaaaaaaaacaacccaactaaaagctgggccaaagacaagaasagacacctcaccaaagaagatatacagatggtaaacatgcatatgaacaggtgctgcacgttatatgttatcaggaaaatgcaaattcaaacaa

SEQ ID NO: 555828 - DNA, 600 bp, Homo sapiens
tttatagtcataatgattcaactttgtgtgaatactcatacattttaatctagaagtattactgattacagaatgctgccccagtttctgttgttacaagatatatagtaaattaacatttctaaaaccagaaaacttctaaattctgaaatacatccaatcccagagacaaataaggaatgtagactatacttatatacctttttttaacttttcttattgagctagctagaatttttttctgtgttgaataagtgataagtgatttttactcttttttactttaatgaagtgtaataatctaatgccttagagttaagtatgatattgactaaaatcaaaatgggcattctttatcatgatgaaaaagaatgsctttttaaaatgatgcgaatttttctaattttccaactatttggaagaagtatagaaatggagctttgcacaaaatgatgaagttcctttagtacccgaattgtgacttaataccaacacagaaaattctgaaaagagcatactgagaatagatacacacattacctaaaactgaggtttaaccattgacaagtgtagcaatttctgaggccccagggtaggcaa

SEQ ID NO: 555829 - DNA, 636 bp, Homo sapiens
tatatgagaaagtgattgtgtgttacatttgtgtcttgcaaccttgctataatcacttattaattccaggagttttgttagttgattttttctgattttctacatagatgatcatgtcacctatgaacgaagactgttatactacttccttcctaatcagtagtatacttctatgtctttttcttctcttattgccctatctagaacttccagtataaaattgaaaargagtggtgaggggaaatatcttgctttgttcctgaccttagagggatgctttcctcaaagtttcttagaattaagggtaatgggaattgtggttccttgtagaagttctttaccaaattgaggctattcccctctattccttgtctattgagttttgttttgttttttggtatgaatcagtgttggattttgaaaaaatgttttttctacatctattgatatgatcatgtgttttttttctttagccttttgatgtgatgaattgtactaattgatttttgcacattgaaccagccttctatgcatgggataaatcccacttggttatggtatataattcattgcatacattgttgggtttgatttgctaatattttgttgaggatttttgcatcagtgttcatgaga

SEQ ID NO: 555830 - DNA, 390 bp, Homo sapiens
ccaagctttttggataagctyggattttgagagaccctgtaggcagctgtggggacagggaacctgggagtggtttgggtgcctggtggatgggagagagatgtcactgtgatgtaaacatccaggcggccagtgagtgagggactgaccccaggtaggcttgatggggtcagggagaagaggaagaccacagagaggtggctgggcccaggtggattccatagggtgtggggtgggggaaaatggggagggagatggaggggtaaggcaggttcgggccctggcttctgggtgggtggtgattccacacggctctgaaggcctaattaaggatctatcttcatcctaagcctcatggagctttggagggctctaggtggggaggactgc

SEQ ID NO: 555831 - DNA, 643 bp, Homo sapiens
gaattctattgcttgtaatttatgcaaatatgaaactaacaatgaaacctttgctgctgggatcccaaactcagatgctgacagggactggggtttgggtagatattagctgcagtgatgaaatgctgayggtgtacacccagtagatgcgggccccgttctaagttcctcacacaggttctgtcaatcttcacaacacttaggcttactgtctcattttctatatgaggaaatgaaggcccagtaaaatcaaataccttgtagctcaagggcatgtggccaaataagtggtggagccaggactcaaactcaggctcctgactctagtaactctttttaacccatgcagtgtgatacaatagggagtggtgaggtctgtgtcaaaccgaaattgctccagggcagccatcgctgattgttgccatgttggggatcagctaggtcatctacttttttttttttttttaagacagagtttcactcttgttgcctaggctggagtgcaatggcgtgatctcagctcaccgcaacctcagcctcccgggttcaagcgattctcctgcctcagcctcccgagtagctgaaactacaggcacgcaccaccacgcctggcgaattttgtattttcagtagagacggggtt

SEQ ID NO: 555832 - DNA, 537 bp, Homo sapiens
tcccctcccgctgtctcccatctgtctggaggtcaaggggtccctcttcctctcttctgtccagtgggacccctgctcctccccctccccgtctgagcaagatgcctgggtcttgagaggtgcgggcaccgcaggaggggagttgaaagctgggaggccaggtactgggctgtctggaatttactcttgccttctgagcccacactggagctgcccgaagtggggaggctcgtagggggtggaaaggctggtccttgccccttagtgggggttggttgtcatggcaacatccccttctctacacaatgggaagcccccctcakcctcccgcgtggatggagccgacagccccatcgctggctatcagcctcagggacttggcaaccgtcactatggcaacccagagcccagcaacagggcccactgagaaagggaggggtccaagactggggcagggtggtgtgtgaggggcaagggagatcagggagactccccctccacctacatctagaggcacaggtggagagacaagaggga

SEQ ID NO: 555833 - DNA, 626 bp, Homo sapiens
tatatgattctgctcttctcactacagttttacaagctgtcatatacaaatatatttgtttccaaagtaacttcaggctgggtgcggtggttcatgyccccaatcccagcactttgggaggcagaggcaggcggatcacctgaggtcaggagtttgagaccagtctggccaacacggtgaaaccccttctctactaaaaatacaaaaattagctgggtatggtggcacatgcctgtaatcccagctacctgggaggctgaggcaggagaatctctggaaccctgggggggcggaggctgcagtgagctgagatggtgctattattgcactccagcctgggcgatcaatcgagactccatctcaaaaaacaaacaagtaacaaaacagcagggtgtggtgaatgcctactcaggaggctactgcgggagaatcgcttgaacccaggaagcagaggttgcagtgagctgagatcgcaccattgcacttccaggctgggcgacaagagcaaaactctgtccaaaacaaaaaaaaccccacccccaaacagaaaaataataacttcagaattttaatgctagaaattaaaggtagcatccacacataattccacctgcaaaatctttagt

SEQ ID NO: 555834 - DNA, 480 bp, Homo sapiens
ggaggcgaaggttgcagtgagctgagatggcaccactgcactccagcctgggggggacaagagcgagacttcatctcaaaaaaaaaaaaaaaagattttcaccaaataatacaattaaaaactgaaaagcagcttacttactgttttttggtccctggctcaactcatcttgccactctttgggagcaagagtctcagaagcatctttctcaggaatgcaatcyctcttctaagctaagtgcgtaaaatatccatcaagacaacgagaacaagtagggatacacacctgaacttcatcatcctttcggatgggcatggatcgcacgttgtacttctgtctcagctctttggaaagaggggaagacataatcttccttcgaatgtgggaaggtgcattgaaatgccttttgcgattcttgcttcggtcggaagtcacaaagggattaaacttcattttggctaaataaaaagttaaaaaga

SEQ ID NO: 555835 - DNA, 601 bp, Homo sapiens
gaaatgaatgaatgtttctatttacaactgtgcttatcaaaattgtgaacacccccacccccgcatttttgtgtgttgaaattcttgaaggttacattaaataaaacaaaatctctttattataaaatactgaaggtcccaggtggaatgatgagttttmtaagcatgtctgagtccagaggaactgcctgggcatcctccccagtactcaggtgctcatggccttcgccccgcctgggagcaggtgccaggtgcctttgtagcgagaggtgattattatttttttttaaataagacagtttggatatgtcacatgtgagcacagaataaccaaaagaagtacacattttgttaccaggaggaagtgttcaaaactacggtgctattccagtgactacatttttttaaattttgcgaagttcaacaggtctccctccggctgggtgctcactggccctgccacccgtgctggaccgaggcgctttcccctggggacaggaactttttactccactgagacaaagagactctccttttcaaagtgtcatttttgtttaccttttgttgtttcccccccaaaacaaaagactttgtacaactt

SEQ ID NO: 555836 - DNA, 590 bp, Homo sapiens
tgctcatggagaagctgcagcaagttctttagaagatctagctaagaccgtcaatgaagatggctccactaaacaacagactttcagtgtagaccaaacagccttctattggaagaagatgccttctaggactttcatggctggagagaagtcaataactggcttcaaatcttcaaaggtcaggctcactctcttgtggagagataatgcagctggtgactttaagttgaagccaattttaccaatccaaacatcctagggctcttaaggattaygttaaatctactctgcctgtgctctataaatggaccagcaaagcctggataacggcacatctgtgtacagtatggtttgctgaatactttaagcccactgttaagacttacttcttaggaaaatgattctttccaaaatattgctacttattgacagtgcacctggtcacccaagatctctactggagatgtacaaggagattaatgttgttgtttgtttgtttgtttgtttgttttgagacagagtcttgttctctcccccaggctggagtgcagtggcatggagtgatcttggctcactgcaacctctgcctc

SEQ ID NO: 555837 - DNA, 511 bp, Homo sapiens
gcggcccgctctcgccagcgccacagccctgactcccacccggaggcctgagttcaaccgctttcgcttccttgcgggccgttcaaccctctgaatacgcagattcatttatttatgttttttaatgtagtaagtgggcagctaaatgaattgcaatttgtcatttttatggttaatttgaaatctcgctcttgttgsctaatcctgttagttggtggcaaaacaaggagaaacgcgtgtttcggcagcagtgattctaacaggcgttttatgttaaattacagcagaacccagaacaaaagcaggcggcggacttgcagtcccagcggcctcggccggtccgcgctgccggtgtgagccccgaaggaaagcaccccaagctggctgaccccgcgcacccccggccacacccgcccatcctggcttcgagattaagaagcccagtttggcaccccaattatgtttggcaatgtccccggtgccccagacccgcactccgctgcctcctggc

SEQ ID NO: 555838 - DNA, 596 bp, Homo sapiens
taatctcatattgcagttgaacaatctgaagcacagataaatcatttctgaagtacatacaggtaacaaatggtagaatgagaactcaaatccaagggctttgactctaaacctcactttttccccactgtactatgctaagtgaaaagaataaacaactttcttatcaaactctaagagcacagataatttatttgtcaaattttaagctcctagcgatgttataaccttcacaagatcacgtcttcaacatttttttgagcgaattgctgtagttccaggcagtgctgggcacataaaaagtgctgctcagcaaatactcttgacttaagtccaaataaaagatatcttcaattgagaggttaattattaatttattgatgagaaagctaccatttaatcatttccagcatcatctctgtrtagtaagtgatgtagaaagaatcacttgaatagttacgtaattgaaaggcacatatgcacccagtttcctagggaaaggttgtaatggtaacttttctgcaacttgaaaatggcttcatctcccaatactcttttggtgtgaaaatcttgagactggggagaaaatatgcaaa

SEQ ID NO: 555839 - DNA, 597 bp, Homo sapiens
ccatccaatttttgtttaaaaagttacaaaccctgtgtgtgtgtgtgtgtgtgtgtggtgtgtgtgtgtgtgtgtgtgcccttagtaggaaatctagaagaaaatacatcattcttttaacagtaattttccgtagtgcatgagagtgaggtagttaagggtagggaatgtaggtaagatttaatttttttaacaaagctgcacatgcacccctgaacttaaaagtttataaaaaagatttaattttttactttatattcctggatttttggattttttaaattataggcttttgttttgtagttaccctgaaacttacatacaacactttataactagtatgttaagctgataacaatttaacttggataacatacacaaacactacacttttatctccctttgcccsacattttatgtttttgtttctttgtgttttgagatggagtcttgtttagtcactcaggctggaatgcagtagcatgattgtagctcactgcagtattgaactcctgggctcaagcaagcctcctgcctcagcctcctgagaagctgggactacaggtgcacaccagcacacccagctaatatttaagt

SEQ ID NO: 555840 - DNA, 618 bp, Homo sapiens
ttggccactacacgctctcctgggggctttttaaagcattcatcctgcatgggccattttccaccacaggggagatttgcccctaagaaaagtaggatttctctatcatttcatttgttagtttctttaacacccggcctcaagtccagaggaactcaaggcagcaaaaagtgaaaacaccaagacaggtgagaaggaaaaaggccaggcacctcctggtgctttcyagtctcaggactcaggtttaatgtctccttttcaacttccccacctttatcctaaagagttcccctttcctctcaatgttgtcttctctgtatgcttgcttaatatccatctctcccattagataataatttccaccagggcaggtaccatactactcttattctactgcatcctgagcacctagcatgatgtttaacacataatacataacaaataagccagacacggtggctcatgcctgtaatcccaacactttgggaggtggaaatgggaggatcacttggggccaggagttcaagaccagcctgggcaatacagcaaaacacagtcccttccatcacctacaaaaaaaaaaaaataaatgtttgttgaatgaatgaatggtagcca

SEQ ID NO: 555841 - DNA, 551 bp, Homo sapiens
acatcctgaataagtatattttatttcttgtcaaaatatactgtttatggtttccaataccaaagagggagtagattattttcagtataagtaatcctgttgttctttttttcctcctctactcaagatagacaaaaatttgagagctattttcttagaaaaaatgacctcaatgtcaactgtcttctccagctacaattttggcaatctcactaactacctggtgactttgtattgtctcttattgtggatttaaacattctgtaatcagaaaaaactcaacttttcaagtcttgggcctatttatttattttttttagcttaacctgttctgcctctctataagccatacatggaaataaggcctgtaaaactggcaagataaatgtaaagatcagggatcaaaggaaactctactgagaaataaaattatttttaatagaaatttttaaaaatatagtttggtgtcttgggcaaatagagtagcagtactattattctgtctgtaattgactttaaaatatytcaacatagacttcaaggtgataaat

SEQ ID NO: 555842 - DNA, 551 bp, Homo sapiens
atacacacatggcaaataagcaaatgaaatgatgttcaacatcattagccaccaaggaaatgcaaattaaaaccataatgagataccactatgtacctgttagaacggctaaaattaaaaaatcatgatagcagcaattgctggagaggatgaagagaaactagattattcatacttcgctgtttggaatgtaaaatggtagagtccagaaaacattttggcagcttcttaaaaaactagacatgcaactactatatgactcagaaattacactgtcaggcattttttccagagtaatgaaaacttgtgttcacacaaagayctgtgcattaatgtttatagcaattttattcacaatggccccaagctagaagcaatctatcagatggccttcaactgtacatgtttaaacaaactgtaggacattcataccaagaaatactgctcagcaacaaaaaagaacaaactattgacacatgcaacaacctagatgaatctcagagaattatgctgagtgattagagccaatctcaaaattacatattgtatga

SEQ ID NO: 555843 - DNA, 443 bp, Homo sapiens
attcactatcacgagaacagcatgggaaaggcccacccccatcattcaattacctacaactgggtccctcccatgacawgtgggaattataagagctacaattcaagatgaaatttgggtggggacacagccaaaccatatcaaactgtacgtgcaaaggccgagaggagagaaagcccagggtgatgggatcatagagggtagggtttgagggggtgaggatgaagggacagcaggcactgaaaggtggccagagcctgaacataaatggcctggcaccttgaggggcctttatcttgaggacaacaggcatttctggcatgtgtcccacggtggggcgggggacaattcgtttcccagctacaaaacaatgcttggctctgggtggagaatggaaggtggggggcggggccttgagtcagggggaccagctaggaggttgc

SEQ ID NO: 555844 - DNA, 605 bp, Homo sapiens
ctgtggggatatcacagaaaaagcattaaactttccagcatgcctgggcccaatattaatcacctgtcagccaggaatcttggtgagcaggaaggagaaaatgaggtgtgtgtgtgtgtgtgtgtgtgtgtgtgtgtgtgtgtgtatggaggggtgggggatggagggtggtgagaggctgaaagatagcactccaggagctaggccaaatgaagagtacaggaggtgaaggaaggaatgctgagaagatagtcaagtggaaagaaaagcagatgaattggggaggaaagtgagagacattaaagaagktatatggaaaaatgaagtgggggcagaagatgcaagatggatgtgagaattatttgaaaataaaatggtattgaaaagtgcaatgtcattacaggtaggcacacagaggtattggagaggagatggcataaaagagggagaagaaaaacaaagatgagcaagaaggatattgagatagattgagaacagacaggcagagaaagacacacacaaagaggaaatgaatattctagggtcataagaaaccagggactagagatcttgtgacatcaacagaaggcagagactgcaagaca

SEQ ID NO: 555845 - DNA, 585 bp, Homo sapiens
tggccgctgactgccttcttgtcagcaagaagatagatatcagccaaagatagaactagcaggatgtagaaggacaggaaaggagaagccatggtattttttcctttttctctctcactgcgtagggcagaacttgcagcaacagctgctcagataccttggttccatctcccaccagccagtcgctccctctaagggttgatgccttccaagctccagtgtgatttctagagcccactggagatgcccactccttgactcctctaacacagttacttcctttgtctctgcagtcctagatctagtgatggcttcctccagatgctgatctgtagatcacaatccctttctgtgtctgttcttcttrctctgcaaaacatcacagtatccttgtataaaattctttctaccgttacttgggtgggttttgctttcctgcctggatttcctgatgaatacagtttcaggttcaggaggaggaaaaatggactctgaacacttaattgaccacctgtaaccccatcaatatccaatccaaagtccagacatgtctggtgtggtatgatatcacacaacattggattt

SEQ ID NO: 555846 - DNA, 446 bp, Homo sapiens
actgtcttccacagtggcaacccccctttcttaatctctgattatttatttgctcatggctcattttaaagcaaatattctactggtttatattgctagaaaggtttggttttctccagttgtatcctgagaagtrctccccagtatgtacatattctgtggaaatggcttctctttcattttttaaccttgatttttaattttatttttatgtttcttaatacaatattggatatatttcaggtatataacatcttttattgtatacatagtgaaattaacatatccataatctcacataattacctgtttttttgtggtaaaagtaccttgatatggtttggctgttgtccctactcaaacctcatcttgaattgtagctcccataattcccacatgttgttgggggcacctggtgggagatatttgaatcatgggggtggttt

SEQ ID NO: 555847 - DNA, 543 bp, Homo sapiens
aatgtataattcaaaataaatatttacataaatattgacagatgaagtgctttttgactcatgctgaagttaactagctgccccttgaaaaattagttttctccattaaattattaawatttaactaattctggagtttttctatggcatgctggacataataggaaccatggacttgctgagagtcctagtctaggagatttccttccagcacctgaaatacttcatgggagaccacagttttcattccatattttgatgttacaatatgaaccataaaaactttcttctatttctattttttactttttgcaagactaaagacaccccccccaatagtccagaattttattcctactttcttcctttttcacttgagaatgtagaaacaataaataactcaaatctacattttatcagtcagtgccaccatttaaaacacagcattttgggcatgatttcatttaaccccttaattgtatagttatgattccataacactgcacactgtctattccttaaaattttcttaagttttacttt

SEQ ID NO: 555848 - DNA, 588 bp, Homo sapiens
tgctgggattacaggcatgagccaccacactcaaccaaaaaatatagtgttaagagatcacactgtgacctataacatttatatatttagagcacctttggagctaactgagattagggatcaagatatatgtatatgtatayacacacacacacacacacacatttaataacacaagcatgcacttttgtgaaatagaatacgtaagttctaagcaaggagagtgcaaactgcatttatttttcaaaaacaagaaaaatacagtcataagaggttttaagtaactagttttaatcaatccatatggttgcatacttagagttttcttagaaatacattttacatttagcattgaccttggtatgtctaatattttctaggtatttttcacatatttctaagggctaaaaatatttattcatttatactttcattcagtcaatagatatttattaacagctttctcttatccaagcacatgtttgggaacagtcaacttttgttttatgatacagattaaaccaaagggacatattaatttgtgatcaactaataaaccaacagagagcttctaaaagctgaaggatt

SEQ ID NO: 555849 - DNA, 615 bp, Homo sapiens
taaagctgatgaagcaaattgggactttgttactgagaacaacatgccaattcaatacattgtgccaaggcaggataaatctttattttctaataygaacataactgtctatgtagtttttagatttcacaagtggcaaggaatttataacttccttttgagaactatttcatagtttaatcatctttcacagctcacgtaggtctttactaaatcctttgtgatttaagatcatttcttccagctcttctgtggtgatagattacagccaactttagacatactaaattaactacatcaactcttagtcataacaggaattccttctacaatattatgcacacatggtcttgcagggccatttgtcactttttctatttgatacaaaattatttctcattaataatctaatcatgaaacacctgtttgttaggcactgaaaaaattttccctgtttgaaagcagaaaaacaaagatttgtatgtttacttcagagaggattttgtgatttctaataggaagcaaacaattgtttttcttttctcaagtcttttaaactactctgccttctattgacagagtaagaaattaaatcttcaattatttaacatagca

SEQ ID NO: 555850 - DNA, 615 bp, Homo sapiens
taaagctgatgaagcaaattgggactttgttactgagaacaacatgccaattcaatacattgtgccaaggcaggataaatctttattttctaatacgaacataactgtctatgtagtttttagatttcacaagtggcaaggaatttataacttccttttgagaactatttcatagtttaatcatctttcacagctcacgtaggtctttactaaatcctttgtgatttaagatcatttcttccagctcttctgtggtgatagattacagccaactttagacatactaaattaactacatcaactcttagtcataacaggaattccttctacaatattatgcacacawggtcttgcagggccatttgtcactttttctatttgatacaaaattatttctcattaataatctaatcatgaaacacctgtttgttaggcactgaaaaaattttccctgtttgaaagcagaaaaacaaagatttgtatgtttacttcagagaggattttgtgatttctaataggaagcaaacaattgtttttcttttctcaagtcttttaaactactctgccttctattgacagagtaagaaattaaatcttcaattatttaacatagca

SEQ ID NO: 555851 - DNA, 584 bp, Homo sapiens
tggacagtgggtgcagcccatggagggccagccaaagcagggcagggcrtcacctcacccagaaagcacaagggtttgggggatttacctttcctagaaaagggaagccatgagtgactatacctggaggaacggtacacttctgcccaaatactgcgcttttcccatggtctttgcaaccagcagaccaggagattccctcccatgcctggcttggcaggtcccatgcccatggagccttgctcgctgctagcacagcagtctgagatcaacctgggatgctagagcttggcaggcagaaggacatccaccactgctgaggcttgagtaggtggttctatgctcacagtgtaaacaaagtggcagggaagctcaaactgggcagagcccaccacactcagcaaggcctactgcctctctagattccacctctaggggcagggcatatctgaataaaaggcagcagacagctttggcagacttaaatgtccctgcctgacagctctgaagagagcagtggttctcccagcatggcgattgagctccgataatggacagactgcctcctcaagtgggtccctgac

SEQ ID NO: 555852 - DNA, 584 bp, Homo sapiens
tggacagtgggtgcagcccatggagggccagccaaagcagggcagggcgtcacctcacccagaaagcacaagggtttgggggatttacctttcctagaaaagggaagccatgagtgactatacctggaggaacggtacacttctgcccaaatactgcgcttttcccatggtctttgcaaccagcagaccaggagattccctcccatgcctggcttggcaggtcccatgcccatggagccttgctcgctgctagcacrgcagtctgagatcaacctgggatgctagagcttggcaggcagaaggacatccaccactgctgaggcttgagtaggtggttctatgctcacagtgtaaacaaagtggcagggaagctcaaactgggcagagcccaccacactcagcaaggcctactgcctctctagattccacctctaggggcagggcatatctgaataaaaggcagcagacagctttggcagacttaaatgtccctgcctgacagctctgaagagagcagtggttctcccagcatggcgattgagctccgataatggacagactgcctcctcaagtgggtccctgac

SEQ ID NO: 555853 - DNA, 580 bp, Homo sapiens
tcaaatgccatcatctccaagaagtcttctagatcacccttactaaagttaccacctctcacccagttcatctctagtccgttgacttattttcttcagagaccttataatgattataagtctttctactcatctgtttacatgtttattttctggccctatttccaaccctctgaaattaaactttatgaaacaggaactcagaactgtattctcaccatacagaatatgcaggaggcaaggttaccactgggccataaggaaactttgtgagaagaagaaaatkgagtccttgctggctggatgcaacacctcaagcacataggctggtgtggcaaggaggggctggatttcaggccccacgtatgccaggggcccttgggcaggtcacccacagtacaactgtatgcaatgggtctgattgggtagtcaatgcactttgttaaattagtcaatggaaaaatgtacttatctcttttctctgcctgattcaagatataccatgactttcaagggcccctgggtacttttgccttcatgagtctatttctccattgaaaaatactaaaaatgatatttt

SEQ ID NO: 555854 - DNA, 580 bp, Homo sapiens
tcaaatgccatcatctccaagaagtcttctagatcacccttactaaagttaccacctctcacccagttcatctctagtccgttgacttattttcttcagagaccttataatgattataagtctttctactcatctgtttacatgtttattttctggccctatttccaaccctctgaaattaaactttatgaaacaggaactcagaactgtattctcaccatacagaatatgcaggaggcaaggttaccactgggccataaggaaactttgtgagaagaagaaaattgagtccttgctggctggatgcaacacctcaagcacataggctggtgtggcaaggaggggctggatttcaggccccacgtatgccaggggcccttgggcaggtcacccacagtacaactgtatgcaatgggtctgattgggtagtcaaygcactttgttaaattagtcaatggaaaaatgtacttatctcttttctctgcctgattcaagatataccatgactttcaagggcccctgggtacttttgccttcatgagtctatttctccattgaaaaatactaaaaatgatatttt

SEQ ID NO: 555855 - DNA, 564 bp, Homo sapiens
cccccgaacctaaaataaaagttagggaaaagatataaataaaagtgtttggcacctccccacttgctatgttgctccttctcatcatgcgatgctcctgttccccyttccccttacctcatgattgtgagttccctgaagccctcaccacaagcaatgccagcacgatggttcctgtgcagcctgcagaactgtgagccaattaaatctcttttctttataaattacccagcctcaagtatttctttataacaaagcaagaatggccaaatacatatgaatgtaccactgtttgttaatccatctactatttgaaggatatttgtttccaatttggtcaattatgagtaaaaccactataaacatttgtgtgaatctaggttttcatttcacttctgtaaatacccaagagtgagactaccttgtcaaatgataagtgtatctgctgttttatattaaaaaaaaaaataagtagaacatttttgtgttttttttgttgttgttgttacttgtttgtttttgagacagggtctcactctgttgctcaggcttgagtgcagtggc

SEQ ID NO: 555856 - DNA, 593 bp, Homo sapiens
cttaacctggttttcttttctctcatctcaaaaaaccacttctgctcattcagaatttatcagtatccctgtaattctttttagtcttgttctaagaattacctgacagtattaataaaggctgactagctttagttatgactccagagttggatttagctaaaccaacccaattaggccatcagtgctaagggcagcatcggcctttcatagtgacaaccggcctatccccttcctttccaccaggcaggaaggaaacacttttgtcatttctaaccaacaaggaaacattttctggttgctccttaacagaaaacaggaaattctgttggtcattttcccatggtaatcatctaaatacctatctcttgatagatcccagataattctaggactggaagagaagcctcagatcatatggtccgtttccatgacagccctttatacccatattaaaaagtctaagtcggctctcagccatctcctcaccatattacatggtattttctctacgggagttsatagtattcacctcctctcttggaaacaaaaaagcattcctcttactcctctctgaagcactggagagtgtc

SEQ ID NO: 555857 - DNA, 540 bp, Homo sapiens
cctcaaactacaaaattactacaaaaaaaaatgggaaaacaatttaggacattggtctgggcaaaaatttcttgagtcatagcccacaagcacagataaccaaagccaaaatggacaaatgggatcacatcaagttaaaaagcttctgcacagtaaaggaaacaattaacaaattgaagagacaacccatagaataggagaaaatatttccaaactatccatctgacaaaggattaacarccagaatatataaagagctcaaacaactctataggaaaaaatctaaatctgagtagacattttccaaaagaagacatacaaatggcaaagaggtatatgaaaaggtactcaatgtcattgatcataggagaaattaaaatcaaaactgcagtgtgatatcatctcaccccagttaaaatggcttgtttccaaaagacaggcagttacaaatgctggcaaaaacattgagaaaaggaaaccctcaaacactgttggtgggaatgtaaattactacagccactatggagaacagtttggagg

SEQ ID NO: 555858 - DNA, 326 bp, Homo sapiens
tgtattggatttagagcctcttcttgtgaaaattgctagtatttccagtccttcagttctttcttctacacctggcagtgtcctgggggtggagtgaggtggctcacgtttctctggatgggaattaaagcttttctgtggctgccactgtgggcrgccatcacttgacactcagtgactgtgacacttctgatgatgttaaacttgcaactgtgacagaaatagaggatgattttcttctcccagcctgcttggtcctagagatatagcttgatcactagataccaggagaatggtctgcctcttttccttcatatgatactctc

SEQ ID NO: 555859 - DNA, 326 bp, Homo sapiens
tgtattggatttagagcctcttcttgtgaaaattgctagtatttccagtccttcagttctttcttctacacctggcagtgtcctgggggtggagtgaggtggctcacgtttctctggatgggaattaaagcttttctgtggctgccactgtgggcagccatcacttgacactcagtgactgtgacacttctgatgatgttaaacttgcaactgtgacagaaatagaggatgrttttcttctcccagcctgcttggtcctagagatatagcttgatcactagataccaggagaatggtctgcctcttttccttcatatgatactctc

SEQ ID NO: 555860 - DNA, 671 bp, Homo sapiens
aagtgaggctttgtgaaatgggttgtttctgtttttgcatctccctgccccaatccatctcagcccctgcactggcctcccagttttgcgtgcttaatagatccatgggtccccaccacttggcatgctgagacctcagcatctggtgacagtgggttcagctcaacagttcaagccttttttaaggctcaccttgtgtcaggaatggggctgggctctgaagacaaggaactgaacaggacatggcccctgctttagagcgcccaggtgggaggggtggacaggtgtaaggcatggtaggtttggcatggcagagactgcatagggtcaaagtcaagagcatggcctctagwgccagattgcctgggcttcagattcacttatgcaaaatggggttatcaaagggctttcatcatagaccattttgtgttacgttcagccagtgcttagaatggtcagtgcttagaactcagctgatgcaagtggctgagcccagggcagttagagccatgggcccttaaattactgccttcaggactaaatatgtcaggcagctttcctgagggcccttgtcaaagacaaggggctgatgattctgggcttgcatctccctagttcagtatctgatgagtgtggcacagccaggttatgtggtacacagtttgctatta

SEQ ID NO: 555861 - DNA, 671 bp, Homo sapiens
aagtgaggctttgtgaaatgggttgtttctgtttttgcatctccctgccccaatccatctcagcccctgcactggcctcccagttttgcgtgcttaatagatccatgggtccccaccacttggcatgctgagacctcagcatctggtgacagtgggttcagctcaacagttcaagccttttttaaggctcaccttgtgtcaggaatggggctgggctctgaagacaaggaactgaacaggacatggcccctgctttagagcgcccaggtgggaggggtggacaggtgtaaggcatggtaggtttggcatggcagagactgcatagggtcaaagtcaagagcatggcctctagagccagattgcctgggcttcagattcacttatgcaaaatggggttatcaragggctttcatcatagaccattttgtgttacgttcagccagtgcttagaatggtcagtgcttagaactcagctgatgcaagtggctgagcccagggcagttagagccatgggcccttaaattactgccttcaggactaaatatgtcaggcagctttcctgagggcccttgtcaaagacaaggggctgatgattctgggcttgcatctccctagttcagtatctgatgagtgtggcacagccaggttatgtggtacacagtttgctatta

SEQ ID NO: 555862 - DNA, 522 bp, Homo sapiens
actctgctttcttaccagtgagaattctgcttctgctatggccaccatgcctctacctttcctctctatcttctaaactcctcctgcttcccaaagtccctggagaaactgacatccagatgtcttcctgcttggtgagcagaccaatctttagagggcattaaatgaagcttctataggaagaacttcacttcactgtgtgtgtgtgtgtstgtgtgcatgtgtatgattgtgaaagagtactgtgtggagcattgttacagaaggcatgacaggtggaagaatcgctagtgagtgcttgctgtagcatcctctggtcattgggcaactctatacaacctaaggcttgttcaaccatgtacatgctatattctgacctcatccactattattcttccttgaatgtcatttctttcttttttttttttttttttttggcctcaagtgatccactcacttggcctcccaaagtactgcaattataggtgtaagccactgcacctggcctcatttatttcttat

SEQ ID NO: 555863 - DNA, 506 bp, Homo sapiens
gattttatagccacataaaaaaaactcagaaaaaaagtaaaaaacaaatataaaattatatccacacaaggattacagctatgtaagaatctctgtaaacagacatggtctagaagaaaatcaataaaaataaaattggcagatgtccaggttgatggaactgtgaataactttaaatatattcttacattagttttaggccaggagtagtggctcacgcctgtaatcctakcactttgggaggccaaggcaggaggatcccttgggcccaggagctcgagaccaatctaccattctgggcaacagggaggtcctgtctctattaaaagacacatacacacacacactctcactcttatgttagctttatataatgacacttgcacagtaaatttgtgggaggaaataagatgaaagagaatacagacatagaaatcctcaatggctcagtttttttgtattactaaatttttttcaggttttgaattatacagcataatttaaga

SEQ ID NO: 555864 - DNA, 375 bp, Homo sapiens
ataaactggcttgttgcaggttcatgggttgcctctgccagcgaagacatattgtcaatttactctgtaaactttccacaggcgaagtggctatttcaaaatattttcagtgggttcttcataacagaatagcagaaatgtgagatttgcagtgaccttttcatatgcctttaagagatttttttgaattgatcaagtaaacaaatggaaaacttgctgtttaattcaatgtcactgctttcactgagtatgatatccacccccttcttgctccctgcccccagtgtaacaacagatttcgttacacccrttttaataaatggccagcatttcacaatatatgtttatattatcttaaacctgtaatcccttaaa

SEQ ID NO: 555865 - DNA, 611 bp, Homo sapiens
acaagggtattgattggggaagtgataagtgtccatgaaatcttcacaatttatgtttagagactgcagtaaagacaggcataagaaattataaaagtattaatttggggaactaataaatgtccatgaaatcttcacaatccacattcttctgccatggcttcagccggtccctccgtttggggtccttgacttcctgcaacaaaaaccaaacaacccaattacaaagtgggcaaaggacatgaacagrcacttttcaaaagaagatatatatgtggccaataagcatatgaaaaaatgctcatcttcactaatcattagagcaatgcaaatcaacaccactatgagataccatcacaccagtcagagtggctatttttaaaaagtcaaaaaataacaaatcatggcaaggttgtggggaaaaggaaagcttatacgctgctgtatagtgtaaattagttatatgggaatgtaaattagttcagtcattgtttggtgatttctcaaagaacttaaaactgaattactatttgacctagcaatcccattattggatatatacccaaaggaatataaattgttataccataaagactcatggaatcatgttc

SEQ ID NO: 555866 - DNA, 505 bp, Homo sapiens
taagtccaaaagttcaaaagctgaagaatttagagtctgatgttcaagggcaggaagcatccagcatggaagaaagatgaagttgggaaaactaagcaagttagcttcttcctgtttttctagctgcsctggcagctgattttatggtgcccacccacattgagggtgggtctgcttctccccgtccactggctcaaatgttaatctcttccagcaacgcccagaaacacccagatacatccagaaacaatactttccgtgcttcaatccaatcaagttgacacttaatattaaccatcatagcacctattaaaaatgacaaagtcatgtcaaagaaatggaggatttttatataaaaggcttcccaaatagtaacgcttcttgaataggaaacattttgttctcttttaaagcagaattcatttaggatgaatatgaggaagtatgtgagaaacagataaaaactcaaaaatgaatttttaacctatgagctgcccagctgtgg

SEQ ID NO: 555867 - DNA, 632 bp, Homo sapiens
  misc_feature 1, 2, 3, 4, 5, 6, 7: n = A,T,C or G
nnnnnnngatatgcacataaataaaaactgacagtgtgcaaagacaaatcagtgtttctaatggtgtgagtctgtaaacattgttttggaagagaaagatatgaatgttctttttgatcaaaagggtgattttttagaagccttggattggtagggctgtacccaaggagtattccatggactctttttgtcatctgtggaaggagagataactctcatctgacagtggtgattcttcctttctgtcatcatctacctccgcctttcrtttccttcctcccatgaattcactgtctcctcatgacttgtaattggcctcagtgcctcccacatcttgtttaatctctttggaaatctgtacctaataaaaaaggagaaaaatgggatttagcctttgttaggtatacaccataggtcagatgctgtgcaagatgctttacaaaggtttttctcacctaatcctcagcaccatttggtgtataattatctgtaccttaaatatgaaaactgcagctccaagatgtgaagtaatgtagccaagtcacgtgtctaacacgtggtaaaactaaagttcccaacctaaattttcttccccaggcttggtgcctgaagactgcactctactttctttt

SEQ ID NO: 555868 - DNA, 632 bp, Homo sapiens
  misc_feature 1, 2, 3, 4, 5, 6, 7: n = A,T,C or G
nnnnnnngatatgcacataaataaaaactgacagtgtgcaaagacaaatcagtgtttctaatggtgtgagtctgtaaacattgttttggaagagaaagatatgaatgttctttttgatcaaaagggtgattttttagaagccttggattggtagggctgtacccaaggagtattccatggactctttttgtcatctgtggaaggagagataactctcatctgacagtggtgattcttcctttctgtcatcatctacctccgcctttcgtttccttcctcccatgaattcactgtctcctcatgacttgtaattggcctcagtgcctcccacatcttgtttaatctctttggaawtctgtacctaataaaaaaggagaaaaatgggatttagcctttgttaggtatacaccataggtcagatgctgtgcaagatgctttacaaaggtttttctcacctaatcctcagcaccatttggtgtataattatctgtaccttaaatatgaaaactgcagctccaagatgtgaagtaatgtagccaagtcacgtgtctaacacgtggtaaaactaaagttcccaacctaaattttcttccccaggcttggtgcctgaagactgcactctactttctttt

SEQ ID NO: 555869 - DNA, 419 bp, Homo sapiens
tgtcactatccgacgggtcctaggacagccagtcactggatacttctcccagccactaagttgtgactggggaagtttactcttttcacatgcctttctaactatgcctgaaagccccactcctttgttagggagagacatcctaacaaaagcaggggccattatacactagaattgggagaaggaaaaaggrtaaatatatatacagacctaagtatgcttacctagtcctccatgcccacgcagcaatatggagagaaaaggaattcctaacttccgagggaacacctatcaaacatcaggaagccgttagcccaaaattctccttacctctgagtctacttcctccgatccctgcctaaagataattttatggggaagatttgcttgtgtctctccaggtgatgatcaggtgccta

SEQ ID NO: 555870 - DNA, 419 bp, Homo sapiens
tgtcactatccgacgggtcctaggacagccagtcactggatacttctcccagccactaagttgtgactggggaagtttactcttttcacatgcctttctaactatgcctgaaagccccactcctttgttagggagagacatcctaacaaaagcaggggccattatacactagaattgggagaaggaaaaaggataaatatatatacagacctaagtatgcttacctagtcctccatgcccacgcagcaatatggagagaaaaggaattcctaacttccgagggaacacctatcaaacatcaggaagccgttagcccaaaattctccttacctctgagtctacttcctccgatccctgcctaaagataattttayggggaagatttgcttgtgtctctccaggtgatgatcaggtgccta

SEQ ID NO: 555871 - DNA, 468 bp, Homo sapiens
ttttcaaccactttgggacttgtgtttatgttgtattcaaactgcatttgaaattaagtttaagcacaaatwtcttcagggcaaaatagagctaaacatgacagcactttggaagatgtggaaatagtgcaagagtgcaatagactgaagatagtggaagaggccactttttcatttctttttctctgtgtatatatacagaaagctaaacatttaaatgtgcgcaattcagattttttccagttgatattctctaactagaaaccattggactgagtaaattggtgaatgtggctttgctgaacatatagtttcagaatatgatttcgtatatctcatttatttagtatgtcttgggatacaaaagtcattatactgaaacaaggcacgtgataggcagaataatggcctccgcccaacgatgtccatgtcaaaattctcgtaactcatgaatatgttaccttatgt

SEQ ID NO: 555872 - DNA, 468 bp, Homo sapiens
ttttcaaccactttgggacttgtgtttatgttgtattcaaactgcatttgaaattaagtttaagcacaaatttcttcagggcaaaatagagctaaacatgacagcactttggaagatgtggaaatagtgcaagagtgcaatagactgaagatagtggaagaggccactttttcatttctttttctctgtgtatatatacagaaagctaaacatttaaatgtgcgcaattcagattttttccagttgatattctctaactagaaaccattggactgagtaaattggtgaatgtggctttgctgaacatatagtttcagaatatgatttcgyatatctcatttatttagtatgtcttgggatacaaaagtcattatactgaaacaaggcacgtgataggcagaataatggcctccgcccaacgatgtccatgtcaaaattctcgtaactcatgaatatgttaccttatgt

SEQ ID NO: 555873 - DNA, 567 bp, Homo sapiens
tcctggtcctgatatacacatactttcttccaattatttaatcaaacactaatctaggtgctgctgtggaagttttgcagatctaggaagttttgcagatgtgattgagctcccaaatcagttgacattagatagggcgwgcatgtgggtgggcctgacctaatcacatgagcccttcaaatttggatctagaggtcagagacaggaagtcagtaattcaaagcacaagaaggacttgaggccaggagcactggctcacaccggtaatcctagctctttgggaggctgaggggggagaatggcttgagtcaggagttcacgaccagccccagcaacatagcaagacctgtataaaaaaaactaaaaaaaattagctaggtgtggtggctcatacctgtggtctcagctactcagggggctgaggtggggaggactgcttgaatctgggagggtgaagctacagtgagctgtggtcctgtcactgcagtccagcttgtacaacagagtgagatcctgtctttaaaaagaaagaaagaaagaaagaaaaaaacccaacttgacacacca

SEQ ID NO: 555874 - DNA, 567 bp, Homo sapiens
tcctggtcctgatatacacatactttcttccaattatttaatcaaacactaatctaggtgctgctgtggaagttttgcagatctaggaagttttgcagatgtgattgagctcccaaatcagttgacattagatagggcgtgcatgtgggtgggcctgacctaatcacatgagcccttcaaatttggatctagaggtcagagacaggaagtcagtaattcaaagcacaagaaggacttgaggccaggagcactggctcacaccggtaatcctagctctttgrgaggctgaggggggagaatggcttgagtcaggagttcacgaccagccccagcaacatagcaagacctgtataaaaaaaactaaaaaaaattagctaggtgtggtggctcatacctgtggtctcagctactcagggggctgaggtggggaggactgcttgaatctgggagggtgaagctacagtgagctgtggtcctgtcactgcagtccagcttgtacaacagagtgagatcctgtctttaaaaagaaagaaagaaagaaagaaaaaaacccaacttgacacacca

SEQ ID NO: 555875 - DNA, 559 bp, Homo sapiens
catttcctaccatgtccatttatratctcttaacatcacagacccataacccaggggcagaatcacaagccttcaaaactgttggggttgagtgagtttgaaagacatcatttttccttaagcaggttcagaatggaaactccagagtcaggtagatggagatcaacaaattatctttagtgctgacaaaactttaaagaggccgaggcttagtcttagagtcaaatggacttccttagtttgcccccgagaattaaaacaactcacttctttaagctggtgtttgggatgtacactttctcctgcagggacaaagcctctacatgaaaatttacccttagtcctaagagtatgacaccttctctatgggcaggcagatgccagaaaagagagggatatattggttcaattctttaatttcttgctctggtggggaggaaggagtagagggaaggaaggaggctgaggtttcgcctccaggatgtccctccacgtggtgtgagagataaatcttcctcactgccagtggagattcgcccaagaccttgtgcagaacatg

SEQ ID NO: 555876 - DNA, 559 bp, Homo sapiens
catttcctaccatgtccatttataatctcttaacatcacagacccataacccaggggcagaatcacaagccttcaaaactgttggggttgagtgagtttgaaagacatcatttttccttaagcaggttcagaatggaaactccagagtcaggtagatggagatcaacaaattatctttagtgctgacaaaactttaaagaggccgaggcttagtcttagagtcaaatggacttcyttagtttgcccccgagaattaaaacaactcacttctttaagctggtgtttgggatgtacactttctcctgcagggacaaagcctctacatgaaaatttacccttagtcctaagagtatgacaccttctctatgggcaggcagatgccagaaaagagagggatatattggttcaattctttaatttcttgctctggtggggaggaaggagtagagggaaggaaggaggctgaggtttcgcctccaggatgtccctccacgtggtgtgagagataaatcttcctcactgccagtggagattcgcccaagaccttgtgcagaacatg

SEQ ID NO: 555877 - DNA, 486 bp, Homo sapiens
atatttactgaccctctaaaattccatcaacaacctgttttccttcttaaatacattctcatacacaattttgaggcagttttttttttctccctcactccatttatttcaatgtcaagagcttggaaaattttaatcagggcactgtttagcttcattaaagaaaaaccagggcagtgatgctcaaaggctkgatctcagcagggggagggttgctaggctgtgcatcacctggaactggagagtgctgaagatgaggcctggtgagaatcccaccataatcaagatacccgtaaatcttctctcagaagtggtgtggatcaatgaatgacatcatcattcctgcacccctacagactttatgatttgccaaagtatttgaggtcaacattgtgtgtaaatatgggttcacaacaaattctgaggccataatccaggcccatgtttttttctttcctttttttttttttttccagagatggtctt

SEQ ID NO: 555878 - DNA, 486 bp, Homo sapiens
atatttactgaccctctaaaattccatcaacaacctgttttccttcttaaatacattctcatacacaattttgaggcagttttttttttctccctcactccatttatttcaatgtcaagagcttggaaaattttaatcagggcactgtttagcttcattaaagaaaaaccagggcagtgatgctcaaaggcttgatctcagcagggggagggttgctaggctgtgcatcacctggaactggagagtgctgaagatgaggcctggtgagaatcccaccataatcaagatacccgtaaatcttctctcagaagtggtgtggatcaatgaaygacatcatcattcctgcacccctacagactttatgatttgccaaagtatttgaggtcaacattgtgtgtaaatatgggttcacaacaaattctgaggccataatccaggcccatgtttttttctttcctttttttttttttttccagagatggtctt

SEQ ID NO: 555879 - DNA, 556 bp, Homo sapiens
atctcagcagggggagggttgctaggctgtgcatcacctggaactggagagtgctgaagatgaggcctggtgagaatcccaccataatcaagatacccgtaaatcttctctcagaagtggtgtggatcaatgaatgacatcatcattcctgcacccctacagactttatgatttgccaaagtatttgaggtcaacattgtgtgtaaatatgggttcacaacaaattctgaggccataatccaggcccatgtttttttctttcctttttttttttttttccagagatggtcttgctctgtccctcaggctgaagtgcagtggtgagaccttggctcactacagcctgaacctcctgtgctcaagcaatcctcccacctcagccacttcagcagctgggaccatrgttacatgccaccatgcccagctaattttcattttttttgtagatgaggtctcactatgttgccccggctggtctcaaactcctgagctcaaaggatcctcccaccttggcctcccaaaatgctgggattacagatgtgagccaccatggcca

SEQ ID NO: 555880 - DNA, 571 bp, Homo sapiens
caatattactcctgtagacctggctctctcttcccttttccttcctcatacaactcttgagcaaaaaactgaacaagatggagcttcccttgtttaaaaatgagtcataatgtgactgggcatggtggctyatgcctgtaatcccgtggtggatcacttgaggtcgggagtttgagaccaaaataaaaaaattagctgggggtggtggcatgcacctgtagtaccagctacttgggaggcttgaggaacaagaatcgtttgaacctaggaggtggaggttgcagtgaatcgagactgtgccactacactccagcctgggcaacagagtgagaccctgtctcaaaaacaaaaaaaaaagtcataatgagaaagaatctagcatagactcatgtacaggtatttgacagctagaaggcaaaaaagaaagaccacaaaagcaagtagggtgagtggagtaaaaaacaaaataaaggcaaatagacaatacacatccaaaggtgaatttaatcatgaagtgaatacaattttaaatacttttgcatgaggaagggaacagaattaatagaccccc

SEQ ID NO: 555881 - DNA, 601 bp, Homo sapiens
tgtactttttgtgaccacactggtacttaatgcccagtagtacagcagcttggggaatctgtgcatgaatgagaatgaaggagttgagcggatgttgtctaaagggaatcggcaatcaacatgtaaatgcctttttctttctttttggtttgtgacagataatccaaagcaaagtagtcgagtacctctatatattaaagttctagatgtcaatgacaacgccccagaatttgctgagttctatgaaacttttgtctgtgaaaaagcaaaggcagatcaggtgagtttcattaaaaagtatattcaagttgaacatcagattaatttagatcttcttatcattcagatgattcacagagctgaaggagagttgtgaattatctatgaagtgaatgctacggaaattaatactataaataagaaccaggacttacatatgagaactaacagtttcgaagaactggaagttcatcaaagactgaggctgattccaaatcgatcttaagttttkattaaatagattagtctcacctttattggaaaaatctttattggtgaacagatagtttaattaccatatgtacttgaagtaataactaca

SEQ ID NO: 555882 - DNA, 586 bp, Homo sapiens
aaaacaataaatattggggtaatacacttcaagccacatctgaatgctttcacatcctttatggattctttctaatgtctgtatcttatctaaaagatcagaaaatgtatttaatttctgaaacatctgagatcacttgaaaggtacgctataatgccaagtacacaacacaatcgccaaaaaaacaaagctccaggtacttgggattttaatgacatggtgcagatttcaaatgcagtaaaactaataacttcatggaaaagggaaattaaaagtagccaacaaagataatggaatgaacatagtaatcttaaaaaaaaccatgtaaaacaaccccatgatcttgataaaatgagcaaactcatcttgtactttcatttgggggatttatgagaagggagcatagcaatttcctttgtgttcgtacgctccatgggatgaatgtgcacgagtggcttcttgaaggtagtactattacagtaatcatgcctttgctatggaaagtttagcatcctcattttatttattgaaccttaattatmactctgatgaggaaatgctatgagcctttcatagaatacagttt

SEQ ID NO: 555883 - DNA, 618 bp, Homo sapiens
tcttgccaaaaacccagagcctgaaccaaaaatcagtgggggagaaggaagctacacatcatccatattctcatcgtcagtttaaatttagaaaatgagttgaaaagagagaagaccttgctctttacctagacaagaaagtctgaatggcagttctctaaatgacaactttcatccttgtcctttgctgaactctacttcataatgaatcatgttatttgccaaagaacatgacccaggggtatcagcaagaaagaaaacctgaggttatggcagttcagtgcaccagtgggtgcagaccaattacatgccaggccccgtgctgacagctgaagatcctgagaggagcaacgtgctgctgctgccctcaggaactgacaccctcctcrgaagccacgtgcagaccggctgttgcaatgcactgtggtggctgcagtgccagcacagagactgcagatacatgcaggtgctcctctagacctcagctttccagggaggcctcctggaggagggctgacatttgagtaaaagcatttcagggcctcatttacctggctgtaacaccagaatcataaggtgcttctgaaaagctggtgcccaggcttctttcaagaacca

SEQ ID NO: 555884 - DNA, 546 bp, Homo sapiens
tatgataaacacaacagaaatgttagctgttgctgtgttattcacaacagcatcatcataattcgacaaaatatgtttgctcttcagttatgggaaaaggttctagaaaattctaagaattcctctgaatttgttttcartgtaaaatgttttggatacccgtcctgtccactcactgtcctcaaaattccccattttaccaggtgctaacctgtcatcaacaactttaaaaaaaatacttccaaaaagacaaagtttaatttgaaatcaccagaaatgactaagaagactataattaaagctctctgtaaacctgaggaaaggactgctgaattcctggtgcaatgtcagagaccaatgtaaatatcccagatctcaaactctggtattgagaatccaggatgttttctattatgccagcatagcagtctttcatcattactttaaactttcataataaaaagatttattcgtttaaataaaacatacatattgacaatcttccttcaagttcccaatttcactcttgaatctgaagggaaaaac

SEQ ID NO: 555885 - DNA, 437 bp, Homo sapiens
tgagaatccaggatgttttctattatgccagcatagcagtctttcatcattactttaaactttcataakaaaaagatttattcgtttaaataaaacatacatattgacaatcttccttcaagttcccaatttcactcttgaatctgaagggaaaaaccacagctgggggatgagctaccaaagagggacacctagtgtaaattaagcagactgtgatttattattttgagggcttaatataagaacacggggtgaaagcagaatatactattgaaagtgacaataatatgccacacagctctattataacaagagtggtcgccagatggtctccatttcctgtgataactaaagaaaaggtacataaatgctagcaggcaaatacaggtcagatacaaagagccaaattatgtcagtgacagaaatcctcatacagg

SEQ ID NO: 555886 - DNA, 599 bp, Homo sapiens
gaatcaagactgggaatccgtcttcctgacatgttcccaggtgatgcagatgctgctggtctgggtctgccctttaaaaactactgcattaaagtaatttactactgtgttttctagggaccaacttattttggcaatgagcatcattaaaacagagttcaatgtacattggagattattataccactagacaggtggtgctccaacaatgagcctttaacaactggyagagagcaaatatgaaaagtgtgattaaaatgaacatttgcaacaactttgggcactcatgtattaataaaatatttttaaagtactctgaattaatgtcatttcttactgtaaagcctcttatgagagttcaaccacttcttacatttattttatatacatatataaaaataagtatatgaggatacatatgcatgtttacatatatgcatatatcccaaagtaaaacagaaataaaggcaaagaatagtaagaattcttaaaccatctggggaaataggtgccaccaccatatgtagagcttttaaattccaaaatcttgagtgaaaagctatcacactatactaattttttaatttacaggttttata

SEQ ID NO: 555887 - DNA, 655 bp, Homo sapiens
attctcttcaaattacaaagaccagctgaaataaaatattctgtaataatatataacaaaaaaaatcaaatgattccatagaaataccggatcattaaagagcaagcgtccaaataactgcttggcttcctccaggcttccctccaagtaaacagctcctagatgaaaaacagagmatgccaaaagagagtctccatcaacagtcaaagaaaatgacatatctctataataaagcaaaaacgcaagccaaaaactactcacagaaaacaaatcaacatgttcagaagcaattgtcttaaaggtgacatttcccctttttgctatcctttgcattacaaattagactgaaataatatgaaattcaatttactaacatctaaatctaatattgtaagtaaaagaggccaaatatcaactattatgaagggtaaaggtataaaccttactaagggagcaatgcacaaatacttgactttagtaaagcaaatgttctgttttattttatgcatttatagtatacgtttcagatcaaatgtatatagatacctaaggaaaaaaaaacctgatagacaaaacccgagtctagatcaatgaaggcatctgcaaacaaaatatcaggggaagctttacctttaatttggaataattaagcatt

SEQ ID NO: 555888 - DNA, 609 bp, Homo sapiens
ttggggacccctctgcacttgtgtccccctcatgaggtttccatactcatctctctgtgggttcactgagaccttctaagcaatgaattggattgatcttaagggctctgaaaatagcatttgtagtgaattgtgtttccttttctgatttggcctcagaagagtttagagccaaatttgtagcccagttgtaggtgtagggctgatgaatacgtcagtgtatactaactttacctctggattcatttcactatcttactcatagttttcctttactttgatctctgtggctgcttatttcttatcccatggcattacaacatacaaatcaattccagccttttagaactagacacaatgtgaaagaatattttttatgcaactcctgagattgaataaatggaaatcataattctttccataaaaaagaaagytacaaacattgcataaatatgcaataaatccatttccattaccatgtaattcaattcaataaatactaagcaataacatgccacataacatggaacaaatcacaagtcaatgaacagcctaggacaatatgagttccaccagtcctcagacaaaagacatagattctgtgtgtct

SEQ ID NO: 555889 - DNA, 205 bp, Homo sapiens
ccacccccactattgattaagttccttttacaggccaaatagcacaagaggcccattaaatggcrtatttcagaagttcatggaactacctttttccttgagtgcaccaacggaggaacacttcagtcagcctctcaaccttagttccctcctttataaacaggctgattggcctaaatcacagtaagtgacaaagccagaattc

SEQ ID NO: 555890 - DNA, 563 bp, Homo sapiens
gatacccaatgtgagagatggggcctggtgggaggtttttgsgtcatgggtggatccctcaagaatagcttggtgccttccccacagtaatgagttcatgtgagatctgcttgttaaagagagtctgggacctccctcctccctctcttcctccctcttctgtcatatgacgtgcctgctccccatccaccttctaccatgattaaaagcatcctgaggcctccccaaaagccaagcagatgctggtgccatgcttcttgtacagcctgcagaaacgtgcaccaaataaacctcttttctttataaattacccagtctcaggtattcctttagaggaatgcaaaacagactaatacagggataaaaaggctctcttaaatattaaaagattttttaaaatcaattcgtataataatggggggaggagggtaaagtatgatttttttaaaaaaatatttttccatcttgtaccagaagtatagtgtgatacaacaatcacgaaataaacctgaagcacatcatcgttaatcaccaaggaatggagtttgatacagacctccctc

SEQ ID NO: 555891 - DNA, 608 bp, Homo sapiens
tgcctttgcgtatgtgttgtacggttttctaggtatttaaggcaagagggttaatccatcttggccataagttggggaagyctccacaatttttacaacattttgggagtctgaagggggaagactgcttgagaccaggagttcgaacccagctcgggcaacacagcaagaccccaatctctacaagaaaataaaaatactaaaagtagccgagcatgacaatgtgcgcctatagtctcagctactcgggaggctgaggtgggaggactgcctgagcccaggagatccaggctgcagtgagccatgttggcaccactgcactccagtctgggtgacacagtgagaccttgtctcaagaaaaaaataaaacattttaagttcctggaagggtgagttagaggctatataaagaattaaagcttttttaaaatcacattcccaaattattggtcaaaagggagcagtgggccgggtgtggtggctcatacctgttatcccagcactttgggaggccgaggtgggcggatcacctgaggtcaggactttgagaccagcctggccaacacggcaaaaccccatctgtactaaaaatacaaaaatgagccagg

SEQ ID NO: 555892 - DNA, 565 bp, Homo sapiens
cctcctgcttcagtctcccaaagcactgagattccaggtgtgagccacctcgcccggccacaggttctctctctaggtgagtggcaccaagatcyatctcacccaagcagaaaactagtactcagtgtccgtgaggtatgttttaaaatttcactgcttaaagctcttcagtggctcctcactgatggtgccaaacagagcttgcctggccctgcgagccctggactccgcttgcctctcgggcctcaccctttactccccccgaccctgcaatggcactgaccttgcacggcctctgatctctgctgcctctgagacttgccacagccgtttcctctctgtgactggctcccagggatttctatctcctttgcccaagactgggttgggtgtcctcctcttgcggtgctcattatgacaagaagcacatgcattgtcagagcaatgcctgccctgcccagcctctctgccctgccacccccagcccaagaccatgtgaggctctagtcctccctggccaagatgtgcctttgcactcactgcccctcagctggaagtcagctcc

SEQ ID NO: 555893 - DNA, 531 bp, Homo sapiens
  misc_feature 1, 2, 3, 4, 5, 6, 7, 8, 9, 10, 11, 12, 13, 14, 15, 16, 17,18, 19, 20, 21, 22, 23, 24, 25, 26, 27, 28, 29, 30, 31,32, 33, 34, 35: n = A,T,C or G
nnnnnnnnnnnnnnnnnnnnnnnnnnnnnnnnnnnttaccagtgaaaacttctttcagattttggatatttgaaaaaaaaagtttttatttcacttcgtgtttcaaagatattttcacaaagatttattatagagtttcaataataaattytagattaaaagaggagttttttttttcctttcattactttaaggatgttgctacactctcttctcacttgtattgttcccaatgagaaatttgcttgtcattcttatttttgctgcttggtatttcacgtgctctctttgccctgcagctgctttaaagattttctctctttcactgttttaagcaatttcattataacggatactgatctgtgggtttagttttaattatatattgaaaattttcagacattgtttatttagttttttttttctttccctcccactttggagagtccaattacacatatattggcttcttcagttgtttctttgttcattgatgctttggtagttatttttagtcttcttttttttttt

SEQ ID NO: 555894 - DNA, 531 bp, Homo sapiens
  misc_feature 1, 2, 3, 4, 5, 6, 7, 8, 9, 10, 11, 12, 13, 14, 15, 16, 17,18, 19, 20, 21, 22, 23, 24, 25, 26, 27, 28, 29, 30, 31,32, 33, 34, 35: n = A,T,C or G
nnnnnnnnnnnnnnnnnnnnnnnnnnnnnnnnnnnttaccagtgaaaacttctttcagattttggatatttgaaaaaaaaagtttttatttcacttcgtgtttcaaagatattttcacaaagatttattatagagtttcaataataaattttagattaaaagaggagttttttttttcctttcattactttaaggatgttgctacactctcttctcacttgtattgttcccaatgagaaatttgcttgtcattcttatttttgctgcttggtatttcacgtgctctctytgccctgcagctgctttaaagattttctctctttcactgttttaagcaatttcattataacggatactgatctgtgggtttagttttaattatatattgaaaattttcagacattgtttatttagttttttttttctttccctcccactttggagagtccaattacacatatattggcttcttcagttgtttctttgttcattgatgctttggtagttatttttagtcttcttttttttttt

SEQ ID NO: 555895 - DNA, 531 bp, Homo sapiens
  misc_feature 1, 2, 3, 4, 5, 6, 7, 8, 9, 10, 11, 12, 13, 14, 15, 16, 17,18, 19, 20, 21, 22, 23, 24, 25, 26, 27, 28, 29, 30, 31,32, 33, 34, 35: n = A,T,C or G
nnnnnnnnnnnnnnnnnnnnnnnnnnnnnnnnnnnttaccagtgaaaacttctttcagattttggatatttgaaaaaaaaagtttttatttcacttcgtgtttcaaagatattttcacaaagatttattatagagtttcaataataaattttagattaaaagaggagttttttttttcctttcattactttaaggatgttgctacactctcttctcacttgtattgttcccaatgagaaatttgcttgtcattcttatttttgctgcttggtatttcacgtgctctctttgccctgcagctgctytaaagattttctctctttcactgttttaagcaatttcattataacggatactgatctgtgggtttagttttaattatatattgaaaattttcagacattgtttatttagttttttttttctttccctcccactttggagagtccaattacacatatattggcttcttcagttgtttctttgttcattgatgctttggtagttatttttagtcttcttttttttttt

SEQ ID NO: 555896 - DNA, 531 bp, Homo sapiens
atccttcttcacatggtggcaggaaggagaagtgctgagcaaagagggaaaaagccccttattaaaccatcagatctcatgagatctcactatcacaagaacagcatggggataactacccccatgattcaattacttcccactsggtcactcccatgatgtggggattatgggaactacaattcaagatgagatttgggtggggccacagccaaaccatatcagagactattatgcatacctctatgcatgcaaaattgaataattaggagactggacaaaatccaggaaacataaaactttccaagattgacccaggaagaaatttaaatcctgaaaagaccaataattagttccaaaattgaattagtaaaaaacaaaacaaaatgaacaaaacaaacaaaacacctaccaactaaaaaaagccctggatcatactgattcacagctgaattctaccagacatagaagagctagtaccaatcctactgaaattgttccaaaaattgatgagggactactctcaaattc

SEQ ID NO: 555897 - DNA, 559 bp, Homo sapiens
tcattgaccaaaaagttattgggctgcctctcctggaattgctttcagactctgtagcatattatcttaagtatgtacttctacctaaatggtagaaaatcttcttcctctgagattgaatacaatttatgaacataaccaaaagtcaaatttaagctagggaatagagaatataaataagtagagtaaaatttaggtcaaaccaagtttcacttaaaagttataataaatttaggccaggtgcagtggctcacgcctgtaatcccagcactttgggaggatcacgaggtcaggagattgagaccatgctggctaacacggtgaaaccccatctctactaaaaaatacaaaaaattagccgggcatggtggcgggcgcctgtagtcccagctactggggaggctgaggcaggagaatggcgtgaacccgggaggtggagcttgcagtgagcygagatcacgccactgcactccagcctgggtgacaaagagagactctgtctcaaaaaaaaaaaaaaattataataaatttaacgtggctataatactactaaaaacgc

SEQ ID NO: 555898 - DNA, 610 bp, Homo sapiens
atttacttagctttattgtgtttggttttaatttctctctctttgtgagatcaatttctcattagtgcaaagccgaatacttccaggggaaaacgaaggaatgtatttagttgagacaggtttttaccaaactattcgaaaagctaaaagaaaaaaaaacctctaatatatagtagaaaaaaatgttataaatacgttggtttatatctagctataaatagtgttttttcaaagtatggttcaaaggagaaacaaccattaagttttcagtagctttgtactgtcaaggaaaaaccagcttattcatgttaatacacatactgtagtaccatatgtacctaaaacagtgaaaaatcataaaaaatattttagcagtggaaataaagacagtaattgcaatccagtcaaatgaagttaattcaaaatgcaaamgcagtttgcattaaaactaataatattaaaacaaatactattaaaactaatagtagttactgtctctatctgtaactttcactccctgccacccaactgtagttagatagccagagatctcatcatgaaccttcatggggaaaaaaaaaatgtggtctgataaattaattacattaaa

SEQ ID NO: 555899 - DNA, 562 bp, Homo sapiens
ggttctcccacttcaacctcccaaagttctgggatttcaggtgtgagccactgtgcctggcccaarttgcaagttttcaggtgcacacccctatttaattgatgtctttttgaaaatatatataataaagcaagccagggttctctaattttttctacagtctgtacaacctgacttgagttcagggccacaatcaggacctcatgactgctcaacagcttttgccaaagtggcccagtcacaagaattacacgtggattttgttaggaatacagacacctaggccccttcccctggaaattctgatgcagcagatctaggtggatccccatgatctagaagttctattagtgcctaagtaactctcatgagcaggcagaaggagcaaacacagctggtcaggattaacatttcccttcagggtgaacaggagaaagtttcactctccagatttgtaccaattaactcaaattatgcaggttattcataactgtgtcggatccttttgtttacctgaaaccagacatatttaggctttatttaataatggtggttaattaca

SEQ ID NO: 555900 - DNA, 494 bp, Homo sapiens
acataatattaactcaaaagctatgatgatgtctgcttccattgacaattttatttacatatttgaattatctctagttatataatttccatttctttttattacacaaatgtttaatggaaattggggctttgttttattcttttccagtagatgataaattctgtctgccattggaaagaagcacaatgtagattcaaatgagctgccaaattgacttttgtgtttgccctgctttagccttgactgtttctatagcttgcacttttagtgaggattttctgtgcatattagttcatcatatcaggatacaagcagtttatcactatgtagcaactttacagcccaggtgcaggaaagctgtggattagcaattctcagttaggggaagttcagtgcaaacatcacccaatgtgagagtattaggagaggttctatttaatataccttttgttttatgattaaaaaccraaaaatcttcttccacagcttca

SEQ ID NO: 555901 - DNA, 552 bp, Homo sapiens
acagagccagctggaggactaggacactggagcagctttaagcaaagctaatgcctttgttgcaaaggaaatgttagaaatctcrcagaaaaacagctgggggagggagggcagaggagagagagagagatagccataaaaagaaaagagaggccacaaaaaaaaaaaaaaaaagatgaccacaaacccatggatattattacaaactctatggtgtgggagaaaactacatgtcacaattctcttaaaactagatagatttttacaaattgaatagtccaactccttcgttttagagatggattttaatgtagagaggttaaataatttgttttaaattttaagtgaaagtgacattctttaccattcaaagcaatcagtgaacctgatattgacaaatttcaaggtgctttcaaaaatcatcatagataacaaccagggtaagacttaggggaaggaggtcgggtgcgggggctcatgcctgtaatcccagttctttgggaggccgaagcaggtggatcacaagatcaggagttcgagaccagcctggcc

SEQ ID NO: 555902 - DNA, 552 bp, Homo sapiens
acagagccagctggaggactaggacactggagcagctttaagcaaagctaatgcctttgttgcaaaggaaatgttagaaatctcacagaaaaacagctgggggagggagggcagaggagagagagagagatagccataaaaagaaaagagaggccmcaaaaaaaaaaaaaaaaagatgaccacaaacccatggatattattacaaactctatggtgtgggagaaaactacatgtcacaattctcttaaaactagatagatttttacaaattgaatagtccaactccttcgttttagagatggattttaatgtagagaggttaaataatttgttttaaattttaagtgaaagtgacattctttaccattcaaagcaatcagtgaacctgatattgacaaatttcaaggtgctttcaaaaatcatcatagataacaaccagggtaagacttaggggaaggaggtcgggtgcgggggctcatgcctgtaatcccagttctttgggaggccgaagcaggtggatcacaagatcaggagttcgagaccagcctggcc

SEQ ID NO: 555903 - DNA, 552 bp, Homo sapiens
acagagccagctggaggactaggacactggagcagctttaagcaaagctaatgcctttgttgcaaaggaaatgttagaaatctcacagaaaaacagctgggggagggagggcagaggagagagagagagatagccataaaaagaaaagagaggccacaaaaaaaaaaaaaaaaagatgaccacaaacccatggatattattacaaactctatggtgtgggagaaaactacatgtcacaattctcttaaaactagatagatttttacaaattgaatagtccaactccttcgttttagagatggattttaatgtagagaggttaaataatttgttttaaattttaagtgaaagtgacattctttaccattcaaagcaatcagtgaacctgatattgacaaatttcaaggtgctttcaaaaatcatcatagataacaaccagggtaagacttaggggaaggaggtcgggtgcgggggctcatgcctgtaatcccagttctttgggaggccgaagcargtggatcacaagatcaggagttcgagaccagcctggcc

SEQ ID NO: 555904 - DNA, 593 bp, Homo sapiens
tgggggcgtgtgtgtgtgtgtatgtgtgtattatgtgtgtgtataaaagaaaacactgcagactgagtagcttaaacaacagaaatttattatgctacagtttgggagcctggaaagtccaatattaaagtgtccatccattcaattttggatgacagctctcttacyggcttgcagacagccaccctctctgagtggcctttcctctgtgtacagggaaaaagagctctggtgtctctttttattctcataaggacaccagtgttattggattagggccccacctttataattccattgaactttacctcctaaagttcctctcttcaaataagtcacattgggggttagggtttcaacctatgaattttccgggaacacagtttagtccatagaacactgaacttgaaacagcttttagctctcaaattgcaatcttggtgtatattactaaattctgcaaattcaacctcaatgatctaaccatatttcctttgtgaaatttctgaaattgaatttcctttccattccttccatcatggcactattttctactttatgacaaaacaatttcccaactagtcttcttgtct

SEQ ID NO: 555905 - DNA, 593 bp, Homo sapiens
tgggggcgtgtgtgtgtgtgtatgtgtgtattatgtgtgtgtataaaagaaaacactgcagactgagtagcttaaacaacagaaatttattatgctacagtttgggagcctggaaagtccaatattaaagtgtccatccattcaattttggatgacagctctcttaccggcttgcagacagccaccctctctgagtggcctttcctctgtgtacagggaaaaagagctctggtgtctctttttattctcataaggacaccartgttattggattagggccccacctttataattccattgaactttacctcctaaagttcctctcttcaaataagtcacattgggggttagggtttcaacctatgaattttccgggaacacagtttagtccatagaacactgaacttgaaacagcttttagctctcaaattgcaatcttggtgtatattactaaattctgcaaattcaacctcaatgatctaaccatatttcctttgtgaaatttctgaaattgaatttcctttccattccttccatcatggcactattttctactttatgacaaaacaatttcccaactagtcttcttgtct

SEQ ID NO: 555906 - DNA, 593 bp, Homo sapiens
tgggggcgtgtgtgtgtgtgtatgtgtgtattatgtgtgtgtataaaagaaaacactgcagactgagtagcttaaacaacagaaatttattatgctacagtttgggagcctggaaagtccaatattaaagtgtccatccattcaattttggatgacagctctcttaccggcttgcagacagccaccctctctgagtggcctttcctctgtgtacagggaaaaagagctctggtgtctctttttattctcataaggacaccagtgttattggattagggccccacctttataattccattgaactttacctcctaaagttcctctcttcaaataagtcacattgggggttagggtttcaacctatgaattttcygggaacacagtttagtccatagaacactgaacttgaaacagcttttagctctcaaattgcaatcttggtgtatattactaaattctgcaaattcaacctcaatgatctaaccatatttcctttgtgaaatttctgaaattgaatttcctttccattccttccatcatggcactattttctactttatgacaaaacaatttcccaactagtcttcttgtct

SEQ ID NO: 555907 - DNA, 273 bp, Homo sapiens
gaaataaactgtcttgttgttgttattgttgtttgtttgtttgtttgtttgtttttggcttttttttccccacaaatgtacattargaactgttagtacttttaaaggatgatataaaagccaacgggggaatccattaaataaaattcaagtcagtattctccattttaatgtaatcactcttcccattaaaaatgaagagtcacatactcatcgtgtgtatcgcaatatacaagaataagaaagaactgtaagctaaactgcataaacaaa

SEQ ID NO: 555908 - DNA, 342 bp, Homo sapiens
ggctgggcctcagggaggatcatgggggcctcctgggtagcagaggggtagcatgtgactgacaggggtgaggcaggcgggcactgccagagactggctggaccccctccgttctgctggcatctgcagggtatacagaacctttcaccaggcacctgggggccacctggcatgatggttccgattaaggtgtatgataggacttgggagaaattactcacgggtgactatgatgtgcacccgattaagaaacactgtatcccagcactttgggaggccaaggcaggcagatcacttgagaacaggarttcgagtccagactgaccaacatggtgaaaccct

SEQ ID NO: 555909 - DNA, 615 bp, Homo sapiens
aatgacaaaattatagggatggagatgaaattagtagatgccagggatcatagtggagaaaaacatggtgggtgtgactagagagggctgcatgagggaaatcatgtagtagtgaaatagttctgtatcttgatgccagtggtgttcacagaaatctatgcatatgataaaatggcataaaattatgcacagcattgcaaaaatatcagtctcyggacttggtgttacactatagttcattagatgtaaccactgagggaaactggataaaaaggctacacgggaccttttcctactttctttgccacttcctatgaatctataattatttcaaaataaaaagctaaaaacaaaaggacccagctaggaatgtgaaaagagaagctacaaagtggggaaaaaaattgtaaaacacatatctgaaaaaggacttttatccagagtatttaaaaactctcaagaggcaatagtaaaaatacagacaacccaataaaaaatgggcaaaagatttgaacacatacttcaccaaagtaggcagcaaatcacgaatacccagatttttatgaaaaaatgcttagtatcattagctataggaaaatgtgagttaaaaccaca

SEQ ID NO: 555910 - DNA, 623 bp, Homo sapiens
gtgtggtattataaatctcatctctggtatgttctaccagtgtgaatgtgatacaaatatttgcaagcatctgtgtgatttgaccctctagattggtttcagcccacataagggattgtgatctctacctgggccaacttctagatgatatgactctcctcccttggatgtcctctcaggattgtgacatatcactggatgtaaaacccaggtgatgttacagcttctagaggatgtgaccatcctgcctttgccattctctaaggattgtgaaatattaccagatctaacacccagatgatgttacattcttgcctgcgccatttcygcagacatcattgtaacatatcactgtgtccaccacttaggaaatgtaactctcctctctggaaaggaccctgaacacagcaggtggtagtaacatattgctaggcccaggcacacaagtgacggtactcttttgccagggctgtgttttaaacagggcattgtgacatatctttgggcatattaccgaggtgatgtgactcaaagcttgggcctcacccacgtaaggcactgtgacataaaagttgaacctacaccaaggtgatgtaactctttcaccttgattctatcctaag

SEQ ID NO: 555911 - DNA, 322 bp, Homo sapiens
aatgcacaagtttcttatttagggggctaaaccacctcccagagcagaataggtattttaaaatgtagacttttgggacaggggatgcttttgtagtttattttcttggttttggcagggaagggtctcctcagatgagaaaaatctcagtaattcaggccctgctaattcagaacttgttacaatttaacaggtcctgagttttatcatagacacttgtaaatactaaaattttatatatatatatatatatatatakagagagagagagagagagagagagagagagagagagagtcttgcgttgtcagagtgtactggc

SEQ ID NO: 555912 - DNA, 480 bp, Homo sapiens
tacatggtaggtatatatatttatgatgtacaagagatattttggtacaggcatgcaatgtgtaataatcaaatcatggagaattgggtatccatcccctcaagcattctttgtgttacaaacaatccaactatactcttttatttttatgtgtacaattaaattattattgactatagtctctttgttgtgctatcaartaactaggccttatttgtcctttttttttttttttgtaccctttcaccatccccacttccccgcctggccccttactactgtcccagcctctggtaacattccttctattttctatcttcatgagttcaattgttttgattcttagatctgacaaataagtgagaatatgtaatgtttgtctttctgtgcctggcttattgcttttaacataataatttccagttgcattttggtgcaaatggcagaatctcattttttatggctgaataatactccatt

SEQ ID NO: 555913 - DNA, 446 bp, Homo sapiens
gatggattttatttaaccatatatatatatatcgtgacttgctttccaaactgactctggcataacatgatgagacaaggaagaaaatcaaaatattttacccaaaacatgcttctttgccataccttgaaatggccctgcaaaggtgtcctttgtgggggaaaatgtgcccctgtaaagaatctctattaacatmacaagatctttttcttccaggccctcccaatcctgaagaggttaagagtctagcacctttttaaaggtctgaataggaaacaatttgtcatctgttgtctctaagggcagccactatgagacttcaaaagaaccttagcctccacaatcttttatcttaacctgaacatttcccttctattgatcccaggtcttcagacaaactcagccacttgtcaatcagaaaatggttaaatttacctgtaccctgg

SEQ ID NO: 555914 - DNA, 435 bp, Homo sapiens
aatgggagaaaatttttgcaatctactcatctgacaaggggctaatattcagaatctacaaagaactcaaacaaatttacaagaaaaaaacaaacaaccccatcaacaagtgggcaaaggatatgaacagacacttctcaaaagaagacatttatgcagccaraagacacatgaaaaaatgctcatcatcactggccattagtttctgataatctttttttttttttgtacattgttttcattttattatcacagcatgtttgtgagaaatactttaaaattcttcagcctaagagtaaaaaaagcccccccgccccaccccctgctccgctgtcagttttctcccttctgtgtcttgcatactggctcattgactttctccactccaggtatcctaacatcttaacagtctccttgctggaaagaaatcttcag

SEQ ID NO: 555915 - DNA, 538 bp, Homo sapiens
tgaattctgtttgaagtttttgatctgagaagaagcattataagaacaatatataactgcagctccatttatagcacaggcagcactgatttggacaataaaaataaggaaacataggaaatacaggaaaaaagactgctctagggtgctcacctgactgttacattaataatctggggataagaagtagcaaacttaaaaaatatcaaagttggatggggacgaaattatggggaactgtaggtaaatttaacctctggaaacttagggacaggactgattttataatttactggtcccagtgcaaaatgaatgcaggacaccttggtaaaacactatttaaatttcaagattgcgacagcagagcataaataaaggctgggtgctcctaaaggcaggaccttgtgcagctgcgcaggctgcatgcttatgaagacgtccctgcygaaggagtttggtgaactctagaagggtctaaccattagctacctgcatcaccatctcattattattttttctttaaacagatcttaggtgc

SEQ ID NO: 555916 - DNA, 568 bp, Homo sapiens
agttttggtctgttctggatttccagtgtttagaacaatgcttggcacctaacagatagtcaataaatattcgttgagtcaatcaatctatttgttaaactaaaatggagactgttttctggcttaagcgagagttgattaatttatgtaaaacaaacccaaaatttagccttcaactggtgccatttattttctttttatactgtattttttagaggcagaataagtcaatcataatctttactttctcacatctatatatatatcacaaagagagtgttgctacataaggagaaatgaaaaaaatataytgttgaggctcagagctgtaatatttgatgaatattcttgttttttcataagtctgattctttttcatatgcctggagaggcctttacatgaatttaaagtaaaaaccatttcatgatactagtagaaaagtatatacccaatctacattggattatattaaataccctttcctatcttcaagaatcaacaatgatggaaattcaaagccagttaatggaaaagaatttccatgaacaatatttttccaatgaaatt

SEQ ID NO: 555917 - DNA, 567 bp, Homo sapiens
cttttctacaatttcttctttattgtagaaaggttggtgtttttcaggattctgtcttaatgcagcttcctttcttactctgcacattcatcctgggtgatcttttttattcctatggctttaactaatcacaaattttgatccaggtgggatctcatttcttagaatcagatcaatatctccaaccattagacatttccaactgaataccataaaagcatttcaaacaaatcccaaactgagctcatcatttctccctatgcttttgtgattcctgactctgtatgtagaattactgtttttctattgttgaagccacacatgtagatatcatcttgactcagtcatcaagtcctgttattctgtctcctaattcaagacaatattactttgcacttgaaatccttcaataattgtgtccctgccracattgtccctgaaccattctcttcactacaaccagagcatgtttttaaaaaacacatctgattacatcacttgcagatgatgttccaatggcttcccctgtaccatttggagaagatcccctagcttataaaaccctgc

SEQ ID NO: 555918 - DNA, 561 bp, Homo sapiens
taccttcgggtctcaggttcaacacccccaccccaccctaccaagtagaaagatttcatataagcccagaaatatgaaaaagaagaaatctcaaaagcaaagcaataacattagacttgccatgtatgtttcatttgcccaggatagtctcattttacatctataatcccagggaagttgttaatgttgccctcttccattctttaaattataggcttgggtgggaaattatttggtcaccctaatagaacctgtaggggaaatagctctgtgttatgctgtgccatattgaatacaaaataaaaggcagcagagcaagtcgttgaccrtcttccatgtctcgttgtgttctggagcgtccatctcagcggttgtactgtaagaaccaaagcctcaaaagggagctcccttcattctggcaaaatgctcgagtctagtctctaaggaggacttacctgcgccggcaagttcatgcggcttctctttgcactgaatgctgcctctgggatgaaggctacttcacttggtcctgaaagatctgcgctggggtgaaaactctgt

SEQ ID NO: 555919 - DNA, 568 bp, Homo sapiens
actcttcactagtccttagtctgaagtcatggaggctgtggctgcgtggtatatgggtaagaactttgggatctgaaggccttgtcctattcatggtgtcaacctctgtctggtgcctgatattctagtcagtagatgcacaattatatctatgggatggatataaataaatattttacttactttaaaaacagaagtttgaatgaaaaggtcatgatacagtatgactggttacacccctgctatcacacacacatacacacacacacacacgccaaagccataaagaaaagactagaagtaagtggaggaaacatacagaaatgttgacagtgattttgtatatatattatatggaggatctatgggaaaacttaacttatattttaaaattttgaatattccatattttctagtagattatgcatataatctaatatakatttctgtaatttttaattttctgttttttgatgtgattttctataacataatttttttaatagaaataaataatttagtataggaagaaaaaatgttgttaaaaataccctgtctcctcctctta

SEQ ID NO: 555920 - DNA, 518 bp, Homo sapiens
aaagaaaagaaaagaaatccggtatttggatatgcaaggatagacctgaagcatagtctaagggggagctgaaagctgtaatttttgtgcctgagtaaacaacaagaaatgtgggtctgcacctgcatctggagagatggagagcctaggagacagatgggcctgagcaaagtaatgacaggcagaatccaagaaaacatggccatggagaaatttcccatgatggggttgctgtaaattattgagaatagcaatgtctggctttccgtgttaatttctggcaaggaaacatcttcttaygggccaggccatatgctggagctggggttacaacgttaaaaagagagacaagatctctgttttccaggattttgtgttctcgggagggggagaataataatagtaatatttataatatttataatatgtatatagcattaaatatgcaccaagcactgttctcagtgctttatatgtattaactcctttaatcctcacaacaacctcacaacaatgag

SEQ ID NO: 555921 - DNA, 457 bp, Homo sapiens
catgtgcttattttgcacattactgcaatattccaggaaagaatatgctggtagaaccttaagcagaccttcactgatgggttcccacacaaatgctctaggcaggaaatagcacctttgtaagaaccatcatggacaatgttttgaaggaagtcagcatattttttgccttttgaactctataaagctcactttccccatttctcttcttctctttgtaaaagatctaatagcttccatttagaagttgaggtgaattaaagtcatgtgctctccttttttcaaggacactagcattctagatttaactcctattgcagatggaaaggctttgtactttattttaagactcttagaaatcakccagctggtgggaaagaaattgcggaagtttgggcagtgaaagggttgagttgaggatcttcacaagtgtgcctgtgtatattttgaccacatg

SEQ ID NO: 555922 - DNA, 281 bp, Homo sapiens
tatcatttatataaaagtcaaaaacatgccaagtaatactacaatttttaagaatagatacatacctagtaaaaatataaagaaatgctcaaaatgataaactagtaatctctgaggggaagatatggratgtaattaaagaatatgcagggtgttttagatagatttaatattgttttcacatttcactctaaatgcaagggacatgctattatactttttatcttattgcatatattacatcttatgataaatataaaaatcaaatctattaataaaca

SEQ ID NO: 555923 - DNA, 224 bp, Homo sapiens
ttctggtggttgctctgcctcccattcccctttccatgttttttaaaaagtttattaacatataatttacataccacaaaatccacctattttagtatacacttaaaatttagttagtaaacatacagttgtgcagccatcaccactcaaaaagttccctcctgcctcatttgccgtcagtctccactaccacctcctggyaactatttatctgctttgtcttt

SEQ ID NO: 555924 - DNA, 616 bp, Homo sapiens
caagaggctctgataatctgccatcattataggtttcttgcttcttatcacaacagcaaggcttctttgatggggttgagtctaggcaaatgtttggttggtaattaattgtccatatcttacatttcatctggatttttctgttaatgtgatccttctatgtgtattgtcctttggtacttacaaaaagctaatagatattagctttgtacctcttccagatttactgttatttagcagtagggaatcattaaggccgcattctcatcctagatctgttttcttatgtctgtcaagagaaagtacatgagaaaatagtcaaagttagttttaagaatgcatttcctgatggagtttagaatgatacatctggtggtaagctttctcatcctaactcttttctttaacccacaaagggtgcttaaccaaaagtggctaggctgatggttagtaggtaggacatttcaacctytggcaaatttgtcattgagcagcatcagtaaaaaggtggaagattctccactatcctcaaaactttttcaatgactataaatcaaatgtaataaagaggcatctaaccaaaataaaatttaagctgttgtgcctaaggtgatcc

SEQ ID NO: 555925 - DNA, 562 bp, Homo sapiens
ctggtgcctttgctccagccaaactggataattgactgttcttttcccaactgctgctcccctccatataccccctgacacacttacacacatattttttcaaccacttttcccttctacatagaacctttagcttctgttttctaggttccacctgtccttcaaagtgcaatagcaactctgtctagtcatgatatttcctctcatggcctctcatcctccctccctaagtcccggaagacagctggctgagtttatccttcctcagatattcttataagaaatgtcacctcctctgtgggggtgtttaaccagactttggctccacttatctcgtgctctagaacgtgtgtgcgtagaagttgatctgcagcgggcgagagcaggggcgctgtttttctatgcatctcaggctaacagtgagtgttwgcggcagtgcttctgcatggagctgcgtatttccatttttttttttttcagcagtacaaataaactttaggccttttctgataacatgttaaatataaagtatttttcttatatggtcaatacaagtgaattt

SEQ ID NO: 555926 - DNA, 610 bp, Homo sapiens
tagaaaaaaacagcatgcttgtatttttataagaagaattcagtggttagagaaaaaagtcaacaattcaggagataagtgggaggtagctgaagtgatatccttggataagtaagaaggaatgagattgagtgcataaagaatttgttatgagccttgtcagttcatctatcatgacaggatctatgaatattgaatagatatgtagccgatacagtacatatagtaatatgtacatatagtacctacgtatagtaatrtagtacatgtagtaatatgtgtacatgcatacgtacatatatgaggaaggaagtatttgaagtttgaagagagaagaccatataaaatagtagtccaggactgtgggagagtgaataaactagggaaatgtattattgaccagtggcactgaaggactcacttgaaacaaatggccatgaatgtgaagtgagatcattccacatggttgtttatttttctccagctatgtccagttgcatgggggcaggtggaagtaagcccagattttatcctcaccagcaggcatggggttttgtaaagtcaaggcagaagagctcaaggtgtatgcaagagaattgtttaaatgatt

SEQ ID NO: 555927 - DNA, 612 bp, Homo sapiens
aatgctgaacaagtgaacacagtggctgtttggtgacaagccctggacttgaaatttgaaggcttgagtttcataccccagttttgctacttgtcagctttatgaggccggataaatcacgggacaaactgagtctcagattttcttgcaaaaaatgggaataaattttcccaccccatctggtggttgtaagccttaaataaaatggcatctatgggaaaacacttggtaaactataaagcattgtatgaaagagttgtatatattatgtgtacatgtattatgttataggttatacatatatatgcatatatgtatatatgtgtgtgtgtatcacagtcctgcccccttccacagacaaaagttactgtgatcaaaaatgagttgctgagatgggccaaaaaccaatctctccctaaagagatctcagcctttcccacratttcctgatgaaaacagaaatgcatcattaactctgtctcttctagatgaaagctaaaagccatccaataagcaataaataaataatttcccaggaaatacacacactagcttcactaagctgagctcagtttctacccaatgaaaatacacaaacacacgcagttgatg

SEQ ID NO: 555928 - DNA, 621 bp, Homo sapiens
aaggttatccctatcatcaagtatcttatagtctgatgaaaaaccaattactacacataaaataatagtgaatgataactatacaacrcataaactatatgtagattttaaggctggaaaatctatttgggtttatggaggccagtgagattccactggtacttgaaggataaataagatttggaaaattattaatctctacaagtgagaggaaatgaatgaattttggaaatgtaaaatgcatagtgtcagcttctgggataatagtaattgcttccatttttttaagtgctttgtatatgccagacataggctaagatctttacctggattaccccctttagtcctcatagcagccctatgaagtgggtactattaacacctctattacatgtaagaaaattgaacttcagaaaattaagtaatgtaacatcagacacgtagctaataagtggtaaaatcagatttcaaacccagatatgtctgtgtctaaagtccatggcatttgccaccatattatgtcactttctgactgcatcagaatgctttcaaatgagtatctggaatctcctgaggaatcagtcagcaattatgaaacctcccgatatctctttaaattcg

SEQ ID NO: 555929 - DNA, 442 bp, Homo sapiens
aggaagaaagtagacacactgtcactttagtatgccatcttcaaccatctagtgggcatctattgattttaattttatttaaatctaaggaataactactgtgttctgagtgtcctgcacttaactaagctgattgtccaaggagaagatatttctctactgtgacaagttctcctatttcctaattaaagtacaattaatactctgaaacaagagtagcaaactttttcataagaactcacacatggtaaagaaagaactagagtgttgacaattacaaagtatcattgattaaatgagagttagaggctgrtatggtttggctgtctgtccccacccaagtctgatctcgaattgtaatctccacaggtcaagggagggacctggtgggaggtgaatggatgatgggggtggtttcccccatgctgttcttatgatagtg

SEQ ID NO: 555930 - DNA, 593 bp, Homo sapiens
atatcagtaattacacattcaaccagatttactgataggaaatagaagtcaaattttgtcagagagacacagagaatactggagattgaggcaagtagaaaactcttgccttgtgtaaagaaggcagcctttgatttgttccacgagattgttgtcatgtggcatgtaagcccagtgctacaagataattccaagttttcaaaagaagcatgcaatctgtattttaatataaattcccccaattcagagattyacaactaatttagaggttcacaactaatttaatttttgtttaaacttgtcatctaaacatatctgtggatttaaacctggtacacacagaccacgattttgtaatctctggtactaacaacctataacaaccttcaattttgaagattttacagcaccttaaaaattttctccaccactgccaggcacccttcttttttttttaaacacatattttattttattaccatataaattaaggaaaatatatacgtcataagtgcactgtttcacaaacagaacttacatgtgtaactagcactcagttgtggaaataaaccattattccaaaagcccaccct

SEQ ID NO: 555931 - DNA, 593 bp, Homo sapiens
atatcagtaattacacattcaaccagatttactgataggaaatagaagtcaaattttgtcagagagacacagagaatactggagattgaggcaagtagaaaactcttgccttgtgtaaagaaggcagcctttgatttgttccacgagattgttgtcatgtggcatgtaagcccagtgctacaagataattccaagttttcaaaagaagcatgcaatctgtattttaatataaattcccccaattcagagattcacaactaatttagaggttcacaactaatttaatttttgtttaaacttgtcatctaaacatatctgtggatttaaacctggtacacacagaccacgattttgtaatctctggtactaacaacctataacaaccttcaattttgaagattttacagcaccttaaaaattttctccaccactgccakgcacccttcttttttttttaaacacatattttattttattaccatataaattaaggaaaatatatacgtcataagtgcactgtttcacaaacagaacttacatgtgtaactagcactcagttgtggaaataaaccattattccaaaagcccaccct

SEQ ID NO: 555932 - DNA, 546 bp, Homo sapiens
tcagcatctaaccacatctgagaataaaagagtgacggtctctgatttttgcaggctaacgttggggtacattatwtgatgccaaacatccagattaacattaaaaatattcagccatccatccacattttccaagtatccagatgtttgacatcttgtaagcatagcatgtgatggcactaattggatactataagaattttcatactccttggtcattaagcatttattataatctgcttatgtgtgagtcgtataggttggattgattcataagccattgctcctgctcattatggaatttactagcattggcatacaagtaacacagaactacagaaaatgtgatgggtgctgtaccaaattaggatggtctcattgcaaagaaaagaacattcaactaaaagcttttccactagctttgtgcttttatgcaaaatttttaaaatatgcctcgttctctaggcaaacacagtcctacatcataatagatatggtggtgggcagcagtatacccttgcacacatgtacatgaacatatgtgat

SEQ ID NO: 555933 - DNA, 546 bp, Homo sapiens
tcagcatctaaccacatctgagaataaaagagtgacggtctctgatttttgcaggctaacgttggggtacattatttgatgccaaacatccagattaacattaaaaatattcagccatccatccacattttccaagtatccagatgtttgacatcttgtaagcatagcatgtgatggcactaattggatactataagaattttcatactccttggtcattaagcatttattataatctgcttatgtgtgagtcgtataggttggattgattcataagccattgctcctgctcattatggaatttactagcattggcatacaagtaacacagaactacagaaaatgtgatgggtgctgtaccaaattaggatggtctcattgcaaagaaaagaacattcaactaaaagcwtttccactagctttgtgcttttatgcaaaatttttaaaatatgcctcgttctctaggcaaacacagtcctacatcataatagatatggtggtgggcagcagtatacccttgcacacatgtacatgaacatatgtgat

SEQ ID NO: 555934 - DNA, 518 bp, Homo sapiens
tgtcatttgtgtcaatgtggataagcctgggggacatcatgttacatgaaataagccaggcacagaaagagaaataatacatgttctcattcatacgtgggagctcaaaaagttgatctcataaaagtagagagtagaatagtggttactagaggttaggaagggtaggtgaaagggtggatagggagaggttaacagatacaaaattatagmaagataggggaaataagttctagccttaggtagctctatgggtaaacaacaattcattgtattttttcaaatagctagaagcataatattttgaatgttaccaacacaaagacaaaatacagttgtgaggtgataaatttgctaattaccctgatttgatattacacattgtttgcatgtatcaaagtagtatacatgtatcaaagtatcacactgcattccataaatatgtacaattactatgtgtcaactaaaaatatgtagtaaacagtttttaaaaacttaaaactagcttaagtaaaaag

SEQ ID NO: 555935 - DNA, 518 bp, Homo sapiens
tgtcatttgtgtcaatgtggataagcctgggggacatcatgttacatgaaataagccaggcacagaaagagaaataatacatgttctcattcatacgtgggagctcaaaaagttgatctcataaaagtagagagtagaatagtggttactagaggttaggaagggtaggtgaaagggtggatagggagaggttaacagatacaaaattatagaaagataggggaaataagttctagccttaggtagctctatgggtaaacaacaattcattgtattttttcaaatagctagaagcataatattttgaatgttaccaacacaaagacaaaatacagttgtgaggtgataaatttgctaattaccctgatttgatattacacattgtttgcatgtatcaaagtagtatacatgtatcaaagtatcacactgcattccataaatatgtacaattaytatgtgtcaactaaaaatatgtagtaaacagtttttaaaaacttaaaactagcttaagtaaaaag

SEQ ID NO: 555936 - DNA, 534 bp, Homo sapiens
attaaagatctaaataaattaaaagatataaaatattccacctccgtaaattaagataacattgttaagatgggaataattcctaaattgattgagagtcagtataatccctttcaaaatcccaacttttttttagatgttgacaagttggctctaacatttatatgaaaatgcaggggggccagaagagtctaactaatcttgaaaaagaagaacaatactggaggattcatgcttcttaattacaaaatatcctacaagctacagtaatcaagaccatggtactggcataaggataaatatatacacrgatggaccataatcccaaatctagatgtaaaccctcacatttatggtcatttgactttttataaggttgacagacaatttaatggggaaaaatagccttttaaacacataaagctaggacactgatatctatatgcaaacaaaaagagagagaaaagaattttgatgcttatctcataccatataaaaaattaactcaaaataaagatataactaaatatagga

SEQ ID NO: 555937 - DNA, 364 bp, Homo sapiens
tattataaagacgcttgcatgcatatgttcattacagcactatttacagtagcaaagacatggagtctacctaaatgcccrtcaatgataaactggataagacaatgtaatatatatatatatatatgtacacatatacgtatatatatgtgtgtgtatatatatatatatatatgtacacatatacgtatatatatgtgtacatatatatatatacacatacacacacaccatggaatactatacagccataaaaaggaacaagatcatgtcctttgcagggacatggatgtagttggaagcctttatcctccacaaatgaatacaggaacagtacaccaaataccgcattttctcacttata

SEQ ID NO: 555938 - DNA, 596 bp, Homo sapiens
ttcatgcattcaacaaatactcgttgggcacacaacacatgctgatgacactgttgtccaagggaaacatggttttgatgctttcaractttacaatcctgaagtaataatctgcaatagtttgtcaatagtttgcttttctcaagttcatgaacaaaatccttccctactccccagaatctaaacaactgtaaagttgatacacctgatattttagagtaagtaactcagcaaatcatggctactgtcaaaggtactgcaatatgtacaattatgatgaaatatttaagttctattcatcatggcataagtgtgtggatgtttattataattatttttaaaaatctgtgtatgatagcttaagatttaggtcatcatctgcatgttcagttacactaatgttacacttctaaaccaattctgaaaaaaacaactctaatcataaaactatacatgaataggctgggtgcggtggctcacccctgtaatcctagcactttgggaggccgaggtgggcagttcacttgaggtcaggagttcaagaccagcctggtcaacgtggtgaaaccccgtctctactaaaaatacaaaaatta

SEQ ID NO: 555939 - DNA, 381 bp, Homo sapiens
aatattgttacacatggtggttcatgccaatattatagcccctatgggaaagctactgctgaaagtatcgctttgatatcaaattgtatctccttatctgtctcatgttaagcctttttaaaaattcttccattcatttcatagagatatttgggaacaacattagctgttcactacacattcaaaaataatctgrcagagaacagtgtgtgttcatctatgagctttctgtttttttttttttttgagatggaattttactctttcacccaggttggagtgcaatggcgtgatctcagctcactgcaacctcttccttccagtttcaagtgattctcctgcctcagcctcccgagtagctgggattacaggcacccgcca

SEQ ID NO: 555940 - DNA, 381 bp, Homo sapiens
aatattgttacacatggtggttcatgccaatattatagcccctatgggaaagctactgctgaaagtatcgctttgatatcaaattgtatctccttatctgtctcatgttaagcctttttaaaaattcttccattcatttcatagagatatttgggaacaacattagctgttcactacacattcaaaaataatctggcagagaacagtgtgtgttcatctatgagctttctgtttttttttttttttgagatggaattttactctttcacccaggttggagtgcaatggcgtgatctcagctcactgcaacctcttccttccagtttcaagygattctcctgcctcagcctcccgagtagctgggattacaggcacccgcca

SEQ ID NO: 555941 - DNA, 634 bp, Homo sapiens
acccaggcttggaaatctttttaagatataacacaaaaagcacacttcatgaaagaaaaaattagtaagttgaacttcattaaaattaaaaacttctgttctgtgaaaaacactgggagaggaatgaaaagttaacttattgactgggagaaaatctttccaaaacaaatatctgataaaagactggtacctaagatgtacaaagaactcaacaataagaaacaagaactctcatttgttgttgatgggaatgcaaaatgcttccactttggaagacagtttggcagttttatacaaaactaaacatacctttaccatatgattcagcaaacatgctccttgatgtttatccaaatgagttgaagacttaagcccacaaaaatcctgcacacaaatgtttataacagcttcattcataattaccaaaacttgggagcaaccaagatgtccttcaatmgttgaataaataaactgtggtgcatccatacaatggaatattatttagcagtttttaaaaatgaactaccaagccatgaaaacactggagaaaacttaagtacatattgctaagtgaaagacactaatctggaaaagtcacatactatgtgggtattctctgaggccaggattaagg

SEQ ID NO: 555942 - DNA, 230 bp, Homo sapiens
tacctctttcagtcacatacttagcattatctgctgtacaggtttaaagaattttggtcacaggattgaagtgaatatttcatttatgtgtagccaaaatattatcatatgaagcccaaaagaagagtaaaatacatccttgtgatattattaacatgactttgtgccagacaaagcatagttactctacagatggattatgaatagagamaaagtgtgtagttgaattc

SEQ ID NO: 555943 - DNA, 583 bp, Homo sapiens
ctccacccctttggctttgcagggtacagccctgctcctagctgctttcccaggctggcattgagtgcctgcagcttttccaggcacatggtgtaagctgtcagtagatctaacwttctagcatatgaaggatgcctgccctcttctaataggcacagctctaataggcagtgccccagtggggactccttgtgggggctctgacactacatttcccttctgcattaccctagcagaggttctacatgagggccccacccctgcagcaaacttttacctggacatccaggcatttccaaacatcctctgaaatctaggtggaggttctcaaacctcaattcttaacttctttgaacctgcaggctcaacaccttgtggaagctgccaaggcttggagcttgtactctgaagccatggcctgagctgtaccttggccccttttacctatggctggagtggctgggatgtagggcaccaagttgctaggttgtacacagcactagggaccgtgtgcccagcccacaaaaccatgtttttctcctaggcctctagtcctgtgatgggaggggctgctctgacatgc

SEQ ID NO: 555944 - DNA, 497 bp, Homo sapiens
gtgctataatcatttcttattaacaccaataacctattttataaataatgtycaatttaatctaataagatcaaaataaattagcataccatctttgaattaccaaaaaatcaaaataaaaatgtgaaagaaaactagaatttaccacttaagtagatttccccctttctgattataaaattattttctgccataatatttgacctaataaaatagctataaataagataaattaaaaaatacttcatattttgcttaaaatatgaatgtcaggttctgagctgacttaatagtgcagaatttctgactaaagtcaacttagcaaaatgcaaattatttatctaacatcaggaactgaaacaagagtaaactatgatgagtttaaataaaaacagaaaaatcatctttgtcaattatacttgagataaaaattcattgtcgaaattttgatttttttttaaatttccctactcatggattagaagcaaaatatactc

SEQ ID NO: 555945 - DNA, 497 bp, Homo sapiens
gtgctataatcatttcttattaacaccaataacctattttataaataatgttcaatttaatctaataagatcaaaataaattagcataccatctttgaattaccaaaaaatcaaaataaaaatgtgaaagaaaactagaatttaccacttaagtagatttccccctttctgattataaaattattttctgccataatatttgacctaataaaatagctataaataagataawttaaaaaatacttcatattttgcttaaaatatgaatgtcaggttctgagctgacttaatagtgcagaatttctgactaaagtcaacttagcaaaatgcaaattatttatctaacatcaggaactgaaacaagagtaaactatgatgagtttaaataaaaacagaaaaatcatctttgtcaattatacttgagataaaaattcattgtcgaaattttgatttttttttaaatttccctactcatggattagaagcaaaatatactc

SEQ ID NO: 555946 - DNA, 515 bp, Homo sapiens
gttagaatttaaggtattggttatcttagcagggaagatttcaggaggcctaatggtgctctgggagcctggtctatttttttttttttttatcagagcagtggttacctttttttatcagagcagtggttacctgagtgtatccatgttgtggtaattcatttgtgatttatgtagtttcctacatgtacatgtcaataacaaaagtaatttttaaatattttaaaaggcacgtggtcagtaccttgcctgaagactagtttaacaggaaattttcttcaaataccttcctgatgtcactagagaacatttgtggcttttatcctaaaaatgacactcaaacctagttaatggtttctcaaattggggaggmtatccaaatgtcaagaacatagtttcataccagcaggaaagcccaaaacagccctttcaaactcaaaagaaaaatatggagtaaaaattgttttcactaaacgtaatagtgtaagattaaaagtatactaaggaaaagtcgt

SEQ ID NO: 555947 - DNA, 601 bp, Homo sapiens
taccttaaattaaaaaattccaacaataaaaaagcataaaacattttagaatgaataaaaagaaacagggaggagagctgaatagctgaggataaaaagaagacatttcaatgcacacagttttgtatcttctaaattttaaaaccaaatgacacaaaataaaacaaacagaataaaaagcaaagtaaaaagcaaataacaccctttaaataccattattcagaattaaccactattaacagtttgctrtgttatctttccaggcctttttccctattcttattaaaattttaaagcacacacatacacacgcctgctagtaaatgggatcatactagatgtgctgtttttgacttttactcagcaatatgtaatagctatcttttggtactggtacacacgagtccacttcattctttcatgtctacttctttccagtatatattcctaaaaacaacataaaaattgtcctttgcaatggtcagatatctaacacaggggtcagcaaactttttctgaaaagagccagatggtaaatattttaggctttgtgggccagacattctctgttgcaactattcatttctgctgctatagtaca

SEQ ID NO: 555948 - DNA, 569 bp, Homo sapiens
actttcaaaataacacaagccatggttagctgccatgtgtattctctctttttagaaaatatttacattttaacaaggttttccccagctaagaggaataacaaaatgtttttctttactcggggtgggagcagagtatcaagaaaggaaaagaggctggggcaccataggtttgtttatctacttaacaattttgctgcaagatcagcattgcacacaagtaaggataaactgcttcctagccattgacaggaaaagacaaaaataatgagaaaatctgaagctttttcttatgtagtttgtcaaattattttctgcctgagtagttttttgtggacttttaaattatagtcacttgccacataatgtttgtggtcagtgacagrtcacatatataacggtggtcctcaaatagtataatacttttatgtaccttttctacatatagatgtgtttagatacacaaataccattgtgttacaactgcctacagtattcaggacagtcatatgctatacatgtttttagcctaggagcaataggctataccatatagcataggtgtgtag

SEQ ID NO: 555949 - DNA, 569 bp, Homo sapiens
actttcaaaataacacaagccatggttagctgccatgtgtattctctctttttagaaaatatttacattttaacaaggttttccccagctaagaggaataacaaaatgtttttctttactcggggtgggagcagagtatcaagaaaggaaaagaggctggggcaccataggtttgtttatctacttaacaattttgctgcaagatcagcattgcacacaagtaaggataaactgcttcctagccattgacaggaaaagacaaaaataatgagaaaatctgaagctttttcttatgtagtttgtcaaattattttctgcctgagtagttttttgtggacttttaaattatagtcacttgccacataatgtttgtggtcagtgacagatcacatatataacrgtggtcctcaaatagtataatacttttatgtaccttttctacatatagatgtgtttagatacacaaataccattgtgttacaactgcctacagtattcaggacagtcatatgctatacatgtttttagcctaggagcaataggctataccatatagcataggtgtgtag

SEQ ID NO: 555950 - DNA, 622 bp, Homo sapiens
ctctttctatctctgtgtgtctctgcctctctctccatctctttctgcccctctgtccctccctctcgtgcccctctgtctttctcctttttcttcttactctgactctgtactactgtctgactgtctttctgtaatgcataatatctccctgcccattctcctcttggcccccagctcctggctccctttcaaacgtcaaggctccagcatgtttgtggagaggcatgcgccccatgctaaatcacccagtgtgtgctacacatctgggaaatcactctacttagatatccttgatgatctgctgccagaggccctgggtgaggagggcgctccttagragggaaactaaattggggctggaaggatgcaggaaaattccagagtattaaggcagcaaggctaaacagctgtggtctccagaacttcctctggagggaaagccactggggcaagcgtcaacagcagagggttcttttgtgttttggagtgtccatcactttgtttccaatatacaaacatctcactccacagtaggtcggcagcgatgtggcagcgccaagtgtgtgctgggaaagcattagcttccccaaatctccatcactcttgccaaagccaacca

SEQ ID NO: 555951 - DNA, 639 bp, Homo sapiens
tatttcaggatagataatcttcctaaatctcaatcaaggtccactccctctctcagtcacctgattcactagagatgagtagtataagtcatctcaggcttagttactgcaggcttattatttaaagcctgcatgtcttgaactgaaatctcttgaggacctggagtttcactaacctcacctgcagcctcaccaacaggcccactctcctgtttcaattaccttagcttcttcctccagagcagagtaccttatggcaacatgagagagttccttcttgtttctaactgaagatgattcttcaatgtatccattatattttctaacattctgcaggttattttaayaaatggcccctaccttcttatcatttttataactgtaatgagccatctaacaacaaaactgttactggaattaagatctcagctcactgcaacctctgcctcccaggttcaagcaattctcctgcatcagcttcctaagtagctgtgattacaggcatgtaccatcacacccagctaatttttgtatttttagtagagatggggtttcaccatgttgaccaggctggtctcaaactcctgacctcaagggatccacccgtctcggcctcccaaagtgctgcgattataggca

SEQ ID NO: 555952 - DNA, 577 bp, Homo sapiens
aaaaacgttgtttgctttttaatggggaactgattttccaaagaataataaacataccctacgctcaggcaaaaatggtcatctcaaagtgtctgactgcaatgaccaattatccatctgaaattcattaatatatttttatatgactaagttacacataccatagacggtttattgaaattgcgctcatttaaaaaaataaaagttattctcatcttttctttacgaggatctcttgaacattatgtctagtgcttcagtgacttgttttttagtttcctaggctgtattgttgcttattcagcaaactaggtcacaggaggcgggagacaactaagtcataggctctgcctttagggagctcacagccaggagacggtgggagcagagcattagcaaacagttacactgcagtgtggtcagtgcctcccttggacagtagtcctccatagcctagacttgagagtggtcaaggaaagcttcctaaaagagatggcactcaagcttcagtgaaagattggtgactcaatgtmctataaattatatcaagacaagcccataacacaaagccaatcta

SEQ ID NO: 555953 - DNA, 560 bp, Homo sapiens
ttcttcctgatttcagaacttcccrcaaggataagcatctgtttcaggagtccctgcagagcttagagatttattgcacagaagatctcaggaaatgttacttcttccagctggaggctgtggcctaattcaatatgtacaaatttagtgtgattgtgattttcaaaatgtcattttagagacctataggcttaaatagcactgacgtaaaaactaagcattgatcaggactttgttggttgcaagtgacagaaaccaaaatgaaactagttgaagcaggaaagggatgtatgagccgctcaggctggtaaggaggctgaaccgcgggctttctagactcctccgatggcccctccttgcctattgaccccacgtggactactgcaggcacagaaagggaaagggtcccttggctgtccaggcttaacagtctatagtgaacatttgttgtttctactcagaaccacttccccgttctttcagtaacagaggcatgatttctgttactgaaagaagaggctgaggcaggaggatcacaaggtcaggagatccagaccatc

SEQ ID NO: 555954 - DNA, 560 bp, Homo sapiens
ttcttcctgatttcagaacttcccacaaggataagcatctgtttcaggagtccctgcagagcttagagatttattgcacagaagatctcaggaaatgttacttcttccarctggaggctgtggcctaattcaatatgtacaaatttagtgtgattgtgattttcaaaatgtcattttagagacctataggcttaaatagcactgacgtaaaaactaagcattgatcaggactttgttggttgcaagtgacagaaaccaaaatgaaactagttgaagcaggaaagggatgtatgagccgctcaggctggtaaggaggctgaaccgcgggctttctagactcctccgatggcccctccttgcctattgaccccacgtggactactgcaggcacagaaagggaaagggtcccttggctgtccaggcttaacagtctatagtgaacatttgttgtttctactcagaaccacttccccgttctttcagtaacagaggcatgatttctgttactgaaagaagaggctgaggcaggaggatcacaaggtcaggagatccagaccatc

SEQ ID NO: 555955 - DNA, 560 bp, Homo sapiens
ttcttcctgatttcagaacttcccacaaggataagcatctgtttcaggagtccctgcagagcttagagatttattgcacagaagatctcaggaaatgttacttcttccagctggaggctgtggcctaattcaatatgtacaaatttagtgtgattgtgattttcaaaatgtcattttagagacctrtaggcttaaatagcactgacgtaaaaactaagcattgatcaggactttgttggttgcaagtgacagaaaccaaaatgaaactagttgaagcaggaaagggatgtatgagccgctcaggctggtaaggaggctgaaccgcgggctttctagactcctccgatggcccctccttgcctattgaccccacgtggactactgcaggcacagaaagggaaagggtcccttggctgtccaggcttaacagtctatagtgaacatttgttgtttctactcagaaccacttccccgttctttcagtaacagaggcatgatttctgttactgaaagaagaggctgaggcaggaggatcacaaggtcaggagatccagaccatc

SEQ ID NO: 555956 - DNA, 279 bp, Homo sapiens
ataaaggggaaataaatttctgtctgtggatgcattcatgattattgaagatgataaaaattatcaaaatgaaatgatcaacctcattttttctaacacaagactttgtggatatccattttgtaagtatcaccaaaatgagttgtggttggtggaattgatgtattctaatatcacagtaagtccctttcagccactcaatccccctgaactctgaataaagaaatttgccaaagkggttcaggaataaaagctgtatttacaaggccattgaaaagc

SEQ ID NO: 555957 - DNA, 655 bp, Homo sapiens
gggtccacactgcctttatgagctgtgacactcacggcgaaggtttgcagcttcactcctgaagccagcgagaccacaaacccaccgggaggaatgwacaactggagacgcgccaccttaagagctgtaacattcaccatgaaggtttgcagcttcactcctgagccagcgagaccaccaacccaccagaaggaagaaactcggaacacatccaaacatcagaaggaacaaactccggacacgccgcctttaggaactgtgacactcaccacgagggtgcgcggctttattcttcaagtcagtgagaccaagaacccaccaattctggacacaacactgtgagacacgagtggattttcatgcatcgtaacagattcaccataaataccatagtccccaggcatcaaatatcatgccagaagcatgtgatacactggcgtggggaactggttaactgatctcttaagtgcacaggattctagagccaatccctctagtggagtttgaatataacagtcctcctgtggactatttcatcttcctccaaacttcaccaatagcagaaatagtgctcttgcagaagtaaaagtatactttttatgaatacagggagtgatgtggtatattcagacaatgttcagtccttaaaaaagga

SEQ ID NO: 555958 - DNA, 655 bp, Homo sapiens
gggtccacactgcctttatgagctgtgacactcacggcgaaggtttgcagcttcactcctgaagccagcgagaccacaaacccaccgggaggaatgaacaactggagacgcgccaccttaagagctgtaacattcaccatgaaggtttgcagcttcactcctgagccagcgagaccaccaacccaccagaaggaagaaactyggaacacatccaaacatcagaaggaacaaactccggacacgccgcctttaggaactgtgacactcaccacgagggtgcgcggctttattcttcaagtcagtgagaccaagaacccaccaattctggacacaacactgtgagacacgagtggattttcatgcatcgtaacagattcaccataaataccatagtccccaggcatcaaatatcatgccagaagcatgtgatacactggcgtggggaactggttaactgatctcttaagtgcacaggattctagagccaatccctctagtggagtttgaatataacagtcctcctgtggactatttcatcttcctccaaacttcaccaatagcagaaatagtgctcttgcagaagtaaaagtatactttttatgaatacagggagtgatgtggtatattcagacaatgttcagtccttaaaaaagga

SEQ ID NO: 555959 - DNA, 592 bp, Homo sapiens
atttactcttttatttttagagtttatgaatccagaagttaaagattaataataaaattagcatagataacatagatcaccattatgacagtgtttctcaagggatctatcatagattgccaacctagagtcacttgggacatctgcttaaaagtagattctacctgagaaaatatagatcaaaatctttagtggggaaagcttagtaatctacatttttctatgtcccacgtttttgtggtatacactacagcatgacagcctgargaccattatagtagaagatgtaaaaactgataaatcttgcaaaaacccttcataacctgaaggaaatgaagaaagatacagatgatgtagctaaatcttgatgtcagaaatagagataaagatgactggaaagctaatttagagcataaattcagatgacaaaattaaggccaagcttctctgtgtagagcatatatcaactcatctatgaaaagaataagattttcagattgaatctagcaaccaatccaacaaaatgctttataatagagatatttctaaagtaaaggtattagaaaatgttctaaataaagtcatgggaaaa

SEQ ID NO: 555960 - DNA, 507 bp, Homo sapiens
atggtcaccctaccctctgtcactttttcttcctggtttccattcttttaatctgcttttctttttaaacacacagcattctctccccgagcaccactgtctttgaaaatgcccttgcaatcgcgatattttcgacgaggcaacatctgctttcacatattgagtcggaacaggccctctgaacccaccccaaaggctagttttagcttctagtcagaagactctgttccttggctcgccatccccatgactcaagaattacaaatgtcagacgtggaacagtggcccttatgtcaactttggtgcctctttgctaaatttattcctgtaaatttttttttttttttttttttttgagatggggtctcgctctgtcgcccaggctggagtgcagtggcgctatgtcggctctaccgcaacctccgcctcccaggttcaagtgattctcctgccycagcctcccaagtagctggtactataggcacccaccaccgcgcctggctaatt

SEQ ID NO: 555961 - DNA, 587 bp, Homo sapiens
cactgcactccagcttgggcaactgagatctgtcttaaaaaaaaaaagagtcaattacatgctaattactcaaaaagtattgttagatgaatttagactgtttccaaaatttcaatacttagaatkgtttatgtgtacatgatttcatgatttgggagcctaaggtaccaaggactgttgtacttccacaattatgtaaaacacatcaaaattatcagaagaataagaataatataaattgtttttaatgcatcttttttaagacatagaaataaatgtaactaatttgccttattcttcccatagtttgtgactctttttcaaagatacttcacattttacacctacatcattgtcattgctcctgcagaggcaaggaaagaaaaaaatgagagattagaacagaaagttttgagcatgcttttaattataaaagcctgtgataaccctattgaggaattgtttattttataaagtgaacaacattcaaagctaactcaatatactaatgttaaaaattattcacatggcaattagttcatttctgaggttttctattttgcttatttcaatatgaattcactgat

SEQ ID NO: 555962 - DNA, 512 bp, Homo sapiens
aaatgccctatgatttagaaaggttttgttagttttttttaatattagttggagaataaaatgcttcaaatgatatgagcaaacatttttatattaacttatcatcagcagttttctagatctggcataaagaaactaaaaaatttgacatcttaacatttttgtatgggtccacatatctataaatctattataagacatgaacgaggaaatggaaactaacagaaaaaatacatatgtatattatatatagatatataggtatgcatacatatacatatataatggcatattatacatgcctttatattccatgaaaaacataggtgatttttttcaagtgataatacaatatgggataatagaaaggactttgttctgaaaattaaggaacctaaagtctgttttttttttctttctttctttacaaatggcagactgccacatgcagcacctcatttggatgtgtctggagtcttggaagcttractactctatgttctcttagaatt

SEQ ID NO: 555963 - DNA, 599 bp, Homo sapiens
tttttttttgttttgtcaacatcatagaatttataaacttttttataaagagtatgacttagttttttttttcctgcaatcatattttccagttgaaaaagctttkggccattacattcagctataaattagtaactgtgtgcatatgatttctgattatttttcctcttgagccagaactagaaactggtcctgtaatatctgtggatcttgttctaattatatatccctttttatttgaaatacttagtattttcattgcctatatggtgaattctgagttttttaacctaacacacaatattgaaatctctgccctgaaaaattcctaaacatccttgaagtctagttctgttactactttctctctgaaatctttttgattacctagctggaaacgatctaatctcccattctttaacagtacattcccttgtattaaaacttcttctgtaaatgtcttagtcctcttctagattataaattctcttactcattattgtatcatctacattcatacattgaacaaaaagcaccaagcactgttatagatgcgagggaaagagcagtgcaggagaatcttggttcttgtcttcatg

SEQ ID NO: 555964 - DNA, 550 bp, Homo sapiens
aaataattttgagtgctctttacataatctcttgtwtgcaaaaattaacattatctatctatttatttatttattttagagacagggtctcattctgtcaccgaggctgaagtacagtggtgtaatcacagcttactgcagccttggagtcctgggctcaagtgatcctccacctcagcctcctgagtagctgggactacaggtccatgccaccatgctcagctaatttaatatttttttttagagacagagaattgctgtggtgcccaggctgctctggaactcttggcctcaagcaatcctcctgcctcagcttcccaaagtttagggattacaggtgtgagccacctcgcttggcctgcagatttaacattttgagtgccatggatctagatattcctgtaatctatatttgaaataagttcattgctttcagatggagttatgaccttttaaagcaacattctgtgttgagtgcaatttacctagtattatctgatctcagcataaaagtctttactgcagtaaactgacatgggccacccagtcc

SEQ ID NO: 555965 - DNA, 518 bp, Homo sapiens
aagttgatctctcaaaatgcaagtctatcacctgatgggaaataaatagggtggaggaggatagactcaagaccacaacagtaggtgagaaacttctcctgttatataggattattattttgggaaaagtatacttgataatggtaattattttccaaatcaacaggtcttttattgcatcatttaaatatcacagttagttctttggaatcatctggcatcttgtttatgtaaccagacaactgttatatcttactcagcttgctgaactgtccctttttcagagacatagatgccatccaaaatttttctgatactcttgtttttagctgttgtggcttgctgaatcaaagcagctgaatttgaaacaagttcaatgtcatttccttccaggattaagtcatctttctgggyttgagatatactgaacaagcaacacctggcctcatctgaaccctgtggaaatatatatatatatttgagatggagttttactcttgttgcccaggctggagtgt

SEQ ID NO: 555966 - DNA, 546 bp, Homo sapiens
gtggtgatttcaaatctttaaactgtggtatcaacaattctgtttctatggttagttttgagaactggtaaagagcttgagattagataaaaagtagtaattggtaccatgatatataaatatatatataaggagtaacaaactcargttctgttaacaaacatgattaattatagttaactatttctagctgagagattagccaaaaagaagcctatctcttcttttaacaattaaataaattgaatcaattctttaaaagctacccatggccaagcacagtggctcctgcctgtaatcccagctctttgggaggctgaggcaggcagattgcttcaggccaggagttcgaaacaagcctggacaacatggtgaatctctatccctactaaaaatacaaacaaattagctgggcatggtgacacgcacctgtaatcccagctacttgggaggctgaggcaggatgatcgcttgaacccaaaggcagaggttgcagtgagccgagatggtggcactgcactccagccttggcaacagagtgaggcc

SEQ ID NO: 555967 - DNA, 548 bp, Homo sapiens
gaattacatgcagaaagataacttgacaaaattcggcagtcatttatgatcaaaactgtcaacaaactaggaatagacataactatctctatctgttaatggacatttacaaaaaacccatggttaacatcattcttaattttgaaaagccacttacttccccctattatgagaaataagacaaggatgtccattctaaccacttctattcaacattgcaatgaagattctagccacaacaataagcaaaataaataaataaataaataaataaatacagtaaaataaattaaaaatcagaagcaggaggataagaaaagaagtaaaattgtgcttatttgcagacaacatgatcatgtacatagaaaatattaagtaatctaaaatagcaactagagctaacaagtttagcaaggtcacaggatgcaatgccggttcatcagaaataaccactgagtgtgcatgcacatgcatttatcacagtccttctctcctttatttctggcatcctcttacccccwtcctgtcaggttcacatactatttcag

SEQ ID NO: 555968 - DNA, 585 bp, Homo sapiens
cttacatactgttttataatccatattttcccttaaaagtctgtttcaaacaattgcttatttttgtatacttttcttggaaatgtagcctaatatggttttattttccaagtaatgcatattctcatggcaaaagtttaagtataacttttaaatatattgtcatattataagcatattcttatggtaaaagtaaaagaaacaccttagtgtttacatagtaaattaacttttaccaacttctactctgctctccaaccctaaggtaatcaatgttaagagttggtgtgtatgtaaagaacattgtttcatgctatacacagttttctctrtttgtttgctttttcactttacgattatgtctggcaagtatttttatgttatttattgtgggaggcagaataatgtccctcctccccaaatattcacgttctaatctccagaaccagtgaatatgccatcttacatggcaaggggactttgcaaatgtgattaaggatcttgagatgggcagattatcctggcatatttgagtggttcagtgtaatcacaagagtcctaaaataaggaagagggaggcagaag

SEQ ID NO: 555969 - DNA, 582 bp, Homo sapiens
cccttttattccacaattccattctatacttcatcagttcctaggaacttttccaatgtagtcaaacaaatcactccttaagagtaatgtttytataccctttctttgataattttacttaattcaattgctaaaataccactggcataattttattcttaaactatttttataatgcacagctattgttagtatctggtgttgtccttttttacttaagctgattataaaactagaagtcactgttttttaacatgggaggaaatataacttgcactcactaaagtaattaaatatttgtattgggacatggcagatgtaattaacctcaactcgaaatagatttaaacctaaaatatttgtgtaatgactaattaccttaaaaaataaaattgcaattatctgactccattactcaatatgagtacttttcccgcttaattgcaaataatgaactaacctgtcaataattgtacataataaaagatgtcagatctggaagagagtagaatttgatactgaagtttttaactttttagaagtatctctgttttcttgctccaacttaggaagaacataatc

SEQ ID NO: 555970 - DNA, 577 bp, Homo sapiens
tttattccacaattccattctatacttcatcagttcctaggaacttttccaatgtagtcaaacaaatcactccttaagagtaatgtttctataccctttctttgataattttacttaattcaattgctaaaataccactggcataattttattcttaaactatttttataatgcacagctattgttagtatctggtgttgtccttttttacttaagctgattataaaactagaagtcactgttttttaacatgggaggaaatataacttgcactcactaaagtaattaaatatttgtattgggacatggcagatgtaattaacctcaactckaaatagatttaaacctaaaatatttgtgtaatgactaattaccttaaaaaataaaattgcaattatctgactccattactcaatatgagtacttttcccgcttaattgcaaataatgaactaacctgtcaataattgtacataataaaagatgtcagatctggaagagagtagaatttgatactgaagtttttaactttttagaagtatctctgttttcttgctccaacttaggaagaacataat

SEQ ID NO: 555971 - DNA, 577 bp, Homo sapiens
tttattccacaattccattctatacttcatcagttcctaggaacttttccaatgtagtcaaacaaatcactccttaagagtaatgtttctataccctttctttgataattttacttaattcaattgctaaaataccactggcataattttattcttaaactatttttataatgcacagctattgttagtatctggtgttgtccttttttacttaagctgattataaaactagaagtcactgttttttaacatgggaggaaatataacttgcactcactaaagtaattaaatatttgtattgggacatggcagatgtaattaacctcaactcgaaatagatttaaacctaaaatatttgtgtaatgactaattaccttaaaaaataaaattgcaattatctgactccattactcaatatgagtacttttcccgcttaattgcaaataatgaactaacctgtcaataattgtacawaataaaagatgtcagatctggaagagagtagaatttgatactgaagtttttaactttttagaagtatctctgttttcttgctccaacttaggaagaacataat

SEQ ID NO: 555972 - DNA, 569 bp, Homo sapiens
gatatattaaaatgatctaagaaaaaagtaaaggaaatttggaaatatacgccagtacacagaaaggcaaacaakgtatgatctcagttaaaaacagagagtagaacgttagttatcagagtctgctggaaaaagcaaggcaaggggaaaagggaagatgttgatcaaagagcacaaagtttcagctagacaggaggaatatgttttagtgatctattgcactgcgcagcttaaaataatgtattgtgtatttcaaaatgctaaaaaaatagatttttaacattctcttcaccacaaagtgataagttggtgagttgatggatatgttaattaacttgattgaacctttttataatgtatacctagatcaaatcatcacattataccccataaacacacacagttattatttgttaattaaaaataaaagaggccaagtgcagtggctcatgcctgtaattccagtactttgggaggctgaggcaggtggatcacctgaggtcaggaattcaagaccagactggccaacatggtgaaactccatctctactaaaaaaaaaaaaacaaaa

SEQ ID NO: 555973 - DNA, 456 bp, Homo sapiens
ggacgagccacagacaaaacctctcagacactgagttgtagaaggaagggcttcattcagctgggagcatcggcaagctactgtctcaaaatccgagctccctgaatgcacaatttctgtcccttttaagggctcacaacactaaagatttcacatgaaaaggtcatgattgatttgagcaagcaggtggtaygtgacaggggctgtatgcactggtggtcatagagaaacagaacagggcagggagtttcacaatgctcttctatacgatgtctggaatctatgaataacatcggtttctaagttatgagttgatttttaactactgggtttaggccaggcaggcccaggcctggtttcaggcctggcaccgggctgcctgtctttggttttacttccttgatgttttttcttaaaacaggtactgagtataaaacaatataaaacaatatgaga

SEQ ID NO: 555974 - DNA, 575 bp, Homo sapiens
tattaaatttactattaactgctttcctttacctagattttttgaaggaaaaatctttaaaaatcattaaaaaatcaggttctcattaaaagatgctaaaaatgactgaactctggtttcactaaaagaagattattatatattcattatttttcctgccttggagattgaaacagtctctctaagcctstagcaccatcttccttacagatttgttgactggactggcttcacctttcctgtctttgcagactacttcttttgaaataaaaatcagtaactttccatttcaaataaaacaaagtaggctatgaaaactgccatcatttagatttggattgtaggcctccataacagctagtacaaccttatagttcagagaaaagcaaaagagcttcaaaaatacttcaggagtgtgcatatggcgagatgggagcaatggttaaaaatccttaaaattctccaaaattaaaaatgccattaagctttactataaaatacctcaaattaatgtgttcctaattttagcattaaatgaagctggtctattgagtaggactatttgcataatgatg

SEQ ID NO: 555975 - DNA, 575 bp, Homo sapiens
tattaaatttactattaactgctttcctttacctagattttttgaaggaaaaatctttaaaaatcattaaaaaatcaggttctcattaaaagatgctaaaaatgactgaactctggtttcactaaaagaagattattatatattcattatttttcctgccttggagattgaaacagtctctctaagcctctagcaccatcttccttacagatttgttgactggactggcttcacctttcctgtctttgcagactacttcttttgaaataaaaatcagtaactttccatttcaaataaaacaaagtaggctatgaaaactgccatcatttagatttggattgtaggcctccataacagctagtacaaccttatagttcagagaaaagcaaaagagcttcaaaaatacttcaggagtgtgcatatggcgagatgggagcaatggttaaaaatccttaaaattctycaaaattaaaaatgccattaagctttactataaaatacctcaaattaatgtgttcctaattttagcattaaatgaagctggtctattgagtaggactatttgcataatgatg

SEQ ID NO: 555976 - DNA, 504 bp, Homo sapiens
ctccattctttctattactttgtttttgtccaggggctagatccacgtgaagaaaatattrcattcttctctatcagcctcatctgagccctgtcagctgccattttttgaggaggacatctgaattctcctttcccagcaaaggtaatacttctaaaaatgtgcttgaggctacaaacttggtatataattttggcattaaactcatacctcctccctccacaaaacacatgaataaatgatgcttctactttaaagtggaataacttttataccatgctgactaaggaaaaaatcccacgaaatgtgaataatgttggtcttggccaaataaaaacagtaacaatctaggataaaagcagacaggcaaattctaatagggcatatgtccattcatttagaaaaacatagcttctctttcacagagctactgaaggagaacccatattgaaagatgtgattattgttttagctgagattcataaagagactgaacagctgcac

SEQ ID NO: 555977 - DNA, 504 bp, Homo sapiens
ctccattctttctattactttgtttttgtccaggggctagatccacgtgaagaaaatattacattcttctctatcagcctcatctgagccctgtcagctgccattttttgaggaggacatctgaattctcctttcccagcaaaggtaatacttctaaaaatgtgcttgaggctacaaacttggtatataattttggcattaaactcatacctcctccctccacaaaacacatgaataaatgatgcttctamtttaaagtggaataacttttataccatgctgactaaggaaaaaatcccacgaaatgtgaataatgttggtcttggccaaataaaaacagtaacaatctaggataaaagcagacaggcaaattctaatagggcatatgtccattcatttagaaaaacatagcttctctttcacagagctactgaaggagaacccatattgaaagatgtgattattgttttagctgagattcataaagagactgaacagctgcac

SEQ ID NO: 555978 - DNA, 515 bp, Homo sapiens
ttcttctatttttctttataaaagttttatggttttaggttttaagtttatgtctaggaacgattttgagttatttgcatgtaagatgcaaggtgtgagtcaggctttttttttttctcttagcacatagatatcctattattctagcaccatattttgaaaagatacttatttctccattgatctttagcayctttgtctaaaattaattggctatatagataggactgttttggtactccttgatatacttttttaaaaaatgagacaaagaaaatgatagaactcactagtacttaaaatctatgaagcaagctacctaaaatgtacatggagaacaagaagcccaaatagatactggaggagacagacagaaagacatttgacagaacactgaggtctctgaaattatcagatgcccgagatgataacacagagccatttttctttgcgaagctggtatttccaagcatctgggccactcctctttattagaaatatcaggttagattctt

SEQ ID NO: 555979 - DNA, 515 bp, Homo sapiens
ttcttctatttttctttataaaagttttatggttttaggttttaagtttatgtctaggaacgattttgagttatttgcatgtaagatgcaaggtgtgagtcaggctttttttttttctcttagcacatagatatcctattattctagcaccatattttgaaaagatacttatttctccattgatctttagcatctttgtctaaaattaattggctatatagataggactgttttggtactccttgatatacttttttaaaaaatgagacaaagaaaatgatagaactcactagtacttaaaatctatgaagcaagctacctaaaatgtacatggagaacaagaagcccaaatagatactggaggagayagacagaaagacatttgacagaacactgaggtctctgaaattatcagatgcccgagatgataacacagagccatttttctttgcgaagctggtatttccaagcatctgggccactcctctttattagaaatatcaggttagattctt

SEQ ID NO: 555980 - DNA, 533 bp, Homo sapiens
  misc_feature 463: n = A,T,C or G
agttctggagtttgcttgtttttctaattattccatagaaaaaaactacagaacatatcattagttctacagacttagaggttcttatattgtttgagataggaaggaaaagtccatttattttttaaaaacttagcactgaaatatttatgtagactatactttttatggtaaargcaatgtaggctgataacagtgtttcagataacaaaatctggataatatgcttatactttaaaagactgaaggttagaattgtctttatggtggacccaggtgttttaattttgttcctaataatttttttatatctaatgtttgtgagattgcatgaagacagcaaccttgcttatcttgatcatccacagatcttcagcatttaaaataatgcccagcacatagtaggaatttaataaatagttgttaaatggaaaaaccaaatgatacaggcactgtttcatantagagagcattagaagcctgtactttctggagaagtagttttggtgtttaaatacaaaaatagctataaa

SEQ ID NO: 555981 - DNA, 607 bp, Homo sapiens
gtggggcatgcctatattcccagccacttgggaggatgaggtggtagggtcgtttgcacccaggtggtggaggctgcattgagtcatggtagtgccactgtactccagcctgggtgatagagtgagactttgtctcgaaaaataatcaaaatgggcaaaggacttgaatatttttcctaagaagatctacamatggccagctcactgttactttacagtaagttttgaaatagggaagtgtgagttctgtaactttattctttttctgaattgtttttggatgtttagggcccctcgcacttccaaaggaaattgagaatagccttttttatttctgtacaaaagagagtgttggattttttttcttttttgaaatagtgaaacttagtgaaaggttctcttatcccctttgcagggcatgtgatgggggtgtgccttgcttctttggcaccccactgctcaaatctctagggagagcatgcagacagggcaggctgtgggactccgaccccacggcagcacctaggggtgaatgtttacagctcctgaagccccagtgggcatgtgttacagggtgcccttttagtctagccatccataggcggct

SEQ ID NO: 555982 - DNA, 597 bp, Homo sapiens
gagggacaaaaatctcataattccttaaagatttaaagctaatgcttttttagagatttctttctgtagggctactatctagctgcatagagtcagaccagttctttcttagagcagataacgttggctttttccattttttctttttgaggccggcctttttttttttttgcatatagggataatcataagccaaagtcacaatgagaacacctacaatgttctgtgtgtgtatgtgcatttgcatgcttgtgtgtgtgtgcctgacttgtgtgagaagtctctataggatttcrtgtgtctggcagacaagtggctttatctcttaacacaatacatttgttctttcagctctgtaagtccaactttattaatgccacattttacaaattatatctttatccctctaaagttatagaagactttaattttaagaataaatagaaggttcttaaataaaaacattaactagtcctaaaattatgtggtcgattattaaataatattaccacagctgaatgctttggaagattaacaatgaaggatataaaatgtcatatggccgtgatatttatgtattcatcttaagttgtttta

SEQ ID NO: 555983 - DNA, 524 bp, Homo sapiens
tgcctagggctgcacagctcatgatcaatggagccaggattagttctgactccaaaactcaggcacttgactgtctccttgacctggcctctcaagctggcctctctcccattcccaaggctgaagagtgaagctaatgaacgaggcttggggcctcctccttatgtggctggttctgacattgcccacagctctgtgactatctgtcagcatcagcaagagcatcacagagttctctgggtcccctctgctggcctctactcaccatatggctcttgccagaatatgacttggttcctccagcctctgcatcccattaatccttccaagytttgctccccctgaccccagccctggccctaatgcctccatcagagcatctcacacttgtttatgaaacactttcctttgctcacatttatgtagttggaatcccaagactacccttgaaggaggcagggaaatgggctccatttgatagatgcagacactgaggcttggggtgaggaacgctctgggcccag

SEQ ID NO: 555984 - DNA, 617 bp, Homo sapiens
atgagaattttgacaacatgaattcttctgtcctaggacataattaatacttagaggcatactatttcatgtggaagctaccattaaatcaatgttaagtgttaattacctcacataatcttctaatctgacttgactgaagacgtacctgacagttgatttatcaagttgtaaatcttcacctgttgaattcataagttcatgtctgaaaggtgagaataaatacttaatattcattaggcaatattcagcaaagtaatatccactagtacatatttaatatttcatcatgaactgcggktgtgaagagaaaagacaggctgggcacagtggctcacacctgtaatcccagcagtttgggaggccgaggcaggcagatcatgaggtcaggagttcgagaccagcctggccaacatggtaaaaccccgtctgtactaaaagtacaataattagctgggcatggtggcaggcacctgtaatcccagctactcgggaggctgaggcaggagaattgcctgaacccaggaggtggaggttgcagaaaccattatcacgccactgcattccagcctgggcaagagagcaagattctgtctccatcaatcaatcaataaaaa

SEQ ID NO: 555985 - DNA, 534 bp, Homo sapiens
atactaaagctcagacaggagaagagacgtggccagcctgtgtccccagggcctatggtcttaccactaggttacagtgtttccagatatcacatgttgtgagatttttgctttaaaatgaaccaaaaaaaaaccaaaggtgaaaaaggcataagctattaaaaagtgggagaaacactaagagaaccttaagcatgtaactaaaaatattatggaaatgttattgaattcattagcaaatttagtgctaggttttcattgaggagtaggttatattactcatgatgaagaaaaatgttcattttaagtatattaacataaataccatcaatattgtttatcatgtttaaatgttcacttaaagcaattcagttaaaattctgcatatcatacaattttatagtttgctagtaggttacaagtaaatagtcacccaaataaaaacatcaygttttccactggttgttgctcttttttaggtgagtatttgatgtataccaacagagagaggataataacaaatcgctaatttct

SEQ ID NO: 555986 - DNA, 359 bp, Homo sapiens
gggcaacatagccaaaagccccctccctagccccacccccaccccgtccctaccaaaaatacaaaacagcagggcatggtggcgggcgcctgtagtcccagctactcaggaggctgaggcaggagaatcacctgaacccaggaggcagacattgcagtgagccaagatcacgccactgccagcctggatgacagagcaagactccacctcaaaaaaaaacaaaaacaaaaacacaaggttaagagggacccccgaccttacagatacaagtttaagagggacctctaagcaaaaaatgccaaccctttttctcccaatcaytgaaacaccaggagggtgtaacagttttgcagcctagc

SEQ ID NO: 555987 - DNA, 526 bp, Homo sapiens
ggatgggcctgtccccaggaccctgtgagagggaagcccaatgtcccaccaggttggcagggctggggaagggaaagtgttatggcagccccaagaaaaaaaagaggcagcagagggagcaggacagcgctcacatggaactcatgccactgcctgaatgaggggagggaggagtgcacgccagtgacgtcagggggcagagaggcgcagttccagggcggctttccccctcacttcctgccatgttactctgatcgcctccaggtgagcctgcccactttgtgcccagtggcctgtagaaaacacagctccccatggttatggccccaggagtggggcagagcagggaggagtcctggacagaggagaggcagggcaggagggagtgggcctcaaactccaggagggggcccttctcatgggtcctgctttctggcttctccttccttacmcctgggctgatcacttggggaagaactgagacaaagtttctcaccctcaggcccaaagggtttaattactgggc

SEQ ID NO: 555988 - DNA, 541 bp, Homo sapiens
tggctaatttttgtatttttagtagtgacggggtttcaccatgttggccaggctggtctcaaactcctgacctcaagtgatccacccgcctcagcctccaaaattgctgggattacagacatgagccaccgcacccagccaattttctttttttttttttttgtggagatggggtctcatgacgttgcccaggctggtctcaaacasctggctcaaacaatcctcccatcttggcctcttaaagcactgggattacatgagtgaggcaccacacctggccaagaatttccttaaagcctatgaagtggtgagcctttcatttcatgtggaaggttctggtggctgcaggatggcctgaaatgagagagcaagtgatcctttagagaaatggtttccttttatccagtctgaagctgatgggggtgaaatctggagtggcagaagtaaggctggaaaggaggagctagatcggaggagaaacatcagcaggacttggctgaaatgtgttgggtttgttcattcgtttatttactcagcagat

SEQ ID NO: 555989 - DNA, 552 bp, Homo sapiens
agtgatcagggtagagtgaagtgcatttggaggatgaagttcaccatggacttgagcagtagcttagaggaggaggtagagccaaagctggatagggatttgatgtgtagataaaggagagagggctttttttttttttttttttttttgatggagtctcactctgtcacccaggctggagtacagtggcacaatctcggctcactgcaacctccatctcctggattcaagtgattctcctgcctcagcctcccaagtagctgggattacacgcatgtgccaccatgcccaactaatttttgtatttttaatagagacagagtttcaccatgttggccagctggtctcgaactcctgacctcaggtgatccacccrcctcagcctctcaaagtgttgggattacaggcatgagccaccgtgcccagcaggagagagggctcctttctaggatatgaacagtagagagtgttgtaaataagaagtatttgaattttcctattgaaactttgataaagcagtgattgtcaaataaatttttaaaagttcagttg

SEQ ID NO: 555990 - DNA, 485 bp, Homo sapiens
ggcagccttgatctcccaggctcaaagggtcgtatggcctcaatttcatgagtagatagagctacaggtgccaaccaccatgcccagccaatttatttatttayttatttatttatatttttattttttgtagagatgaggtttcatcatgttgtccagcctggtctccaactcccgggcttaagtgatcagcccacctcggcctcccaatgctgggattacagatgtgagccactgtacctggctaaaactgtgacctttttgagaatgaaatattttaattgtcttcttaataactatacccagacaacagatataaactgagattgacccaggaaaactagacatatggtcatcctatctaaaatttatcattgtcctcaccaagaagcctgccctctgagttctacattgttcctaattacaacacagtactcctagtatctgtgatatttaattttctaggtacaatattttgtcttttg

SEQ ID NO: 555991 - DNA, 485 bp, Homo sapiens
ggcagccttgatctcccaggctcaaagggtcgtatggcctcaatttcatgagtagatagagctacaggtgccaaccaccatgcccagccaatttatttatttacttatttatttatatttttattttttgtagagatgaggtttcatcatgttgtccagcctggtctccaactcccgggcttaagtgatcagcccacctcggcctcccaatgctgggattacagatgtgagccactgtacctggctaaaactgtgacctttttgagaatgaaatattttaattgtcttcttaataactatacccagacaacagatataaactgagattgacccaggaaaactagacatatggtcatcctatctaaaatttatcattgtcctcaccaagaagcctgccctctgagttctacattgttcctaattacaacacagtactcctagtatcygtgatatttaattttctaggtacaatattttgtcttttg

SEQ ID NO: 555992 - DNA, 622 bp, Homo sapiens
gctttgggatctttatttatattggcatatatatttacttaaggatcacaatgggttaggctcttggttctattgactacttagaactacagcattgcattttttttaatttccacattttatcaaggaaagtgctgagtaagtgctaggttttctgatgcctatgccagcctagtaggaattatacagttggctgtatttgaagaaaaatattctattttatttctaaatgtaagctcttagtattaaatgtcaatgttttcttaattcagtttagaatgctttcttatccatttcccagtttctacaatttcctgaaaggtgttacctactgaatttaggaagaacataattcattgaaatggtaatttaccaaatgttyagttattctatttacttatcaatattccttttaggatggccctagagatgcagtgtctaattttctagtcctaagggacagcaggcaatttatgcataataactatctgttacattttcctaacacattcactttgtttataaataatcattgtgttttagatgtgagaatgtttaccaggagactaacaatttgtaaaaaccctgacatggctgatgtaaaataatataattcaatttt

SEQ ID NO: 555993 - DNA, 593 bp, Homo sapiens
tggggaccggcaaagagccagaaaaatctccaaaagcaagttaccaaatttttgaacctctcacaaaaacagaagagggaacgctgtgaagtaagaaggctaaactaatttataccctctaaaacctcaagaagactaattttaattaaaaatgagcttctgaaaagtatcgaggtcacactcaatgtggaataattacaaagaagaaagagaatgttgagtagaaaagcatccatctaggacatgtaataaccagaaaaaaatgcccataacatagattacaactcaaacctacttcacaatgagctaaagccttgaaaaactgttatraagtattaaataactacataagtaataactaggaaacctcagatatgttatggcaggattccagagagaattccagacacaagaaaaagctcaattcagaaataaaacaaaaccagaggacagaaacaaactgaaaaaaaaaaaaagacataaaatatcttcaaagaagtagaaattgaaaaggagaaaaagtgtaaaaattaaaatgtaattaataaacagataaaaattatttgagaaaaatgacaaatgttaaaaataga

SEQ ID NO: 555994 - DNA, 404 bp, Homo sapiens
attgtttcggaaaacttatttrtttataactaagtgttatttaatgggctccttacatcaccttttgatagtagagggcagagtatataagaagaaaggccaagaagtacaaaaagactttgaaaaaatatacaattaacctgtttctaaaataaatgggtattttcttccacccagtaaaccagagtaagtctttaaacaagtttggtctcctaagagcagtcagtatccacattcataaatgcatttaccttacaaaagaaaagggtagggattggggaagtcatttcatagagaaatgcagatgaccaataaaataataatgatagtaataataatctgtcttgcctatcatattggcaaagtgttttcttcgtttctgttttaaactggtaataaagtgt

SEQ ID NO: 555995 - DNA, 576 bp, Homo sapiens
gaacatatgggcacagggtggggaacatcacacaccaggtcctgtttgggggtgggggttagggagggatagcattaggagaaatacctaatataaatgacaagttgatgggtgcaggaaaccaacatggcacatgtatacctatgtaataaacttgcacattgtgcacatgtaccctagaacttaaagtacaaaataaataaatacataaaaataatgactagctggtagaagaaaaaatagtccacccattttgtgtaaatgtagagtcagcctmgtatatgagcatcagatctagattgagtcttgttgccagaaatgacgacaatcctgccatttcacttcagattcttaaagatttctcctcactctcccacatttattgaaatttcagggctgagcagtggaaaggattccttcttaactgttggaaaaccaacaataaaactcgagcatccattccaagacagacatgtctgctaagagattaatgaagaactgctgtgcaaatgcatctgttttcatcggctagtcattttggtgcatgtcaaccttaaacagagacttggtggagta

SEQ ID NO: 555996 - DNA, 516 bp, Homo sapiens
aacatccagggaaacagaagctttcaccagtgacagctgaccatttgctgtattttctacatgcattctctctttctcccttagtgtctggagccagattttatgtaaggctgaaattcacccagaggagaatatgtttttcaaaatcattggcagctagtggtgaccacgtcattaagctctggccaatgagacacaaacctaagtgtttcatgggctttgggaaaggctgcttaaagaatgctaactcaggccaggtgcaatggctcacacctgtaataccagcactttgggaggccgaggtgggtggatcatgaggtcaggagatagagaccgtcctggccaacatggtgaaaccccgtctctactaaaaatacaaaaactagccaggtgtggtggtgggygcctgtaatcccagctactcaggaggctgaggcagaagaatcccttgaaccagggaagcagaggttgcagtgagccgagattgcgccactgcactccagcccgggcaacaga

SEQ ID NO: 555997 - DNA, 589 bp, Homo sapiens
ctatttcccgtcattctttgtttcctttttccttttgttctgacttttttggattaattttcattttattttttaaaattgacaaataataattgtatatattcatggaaagcatagtgatgtttcaatacatataatgtatagtgatcagatcagggtaattagcatattcatcatctcaaacattttattgtttctttgttttgggaacattcagtatcctcmtggattaatttttttaatgattctattttatttattattattgtttttgagacagagccttgctctgttgcccaggctggagtgcagtggtgcaatctcagcttactacaacctcttcctcctgggttcaagtgattctcgtgcctgagcctcctgagtagctgagattatgggtatgcaccaccacgcccagctaatttttttgtatttttagtagagatggggtttcgctatatttggccaggctggtctccaactcctggcctcaagtaatctgcctgtcttggcctcccaatgtgctgggattacaggtgtgaaccaccatgcctggcctgtgattccattttatatggtgcactattag

SEQ ID NO: 555998 - DNA, 589 bp, Homo sapiens
ctatttcccgtcattctttgtttcctttttccttttgttctgacttttttggattaattttcattttattttttaaaattgacaaataataattgtatatattcatggaaagcatagtgatgtttcaatacatataatgtatagtgatcagatcagggtaattagcatattcatcatctcaaacattttattgtttctttgttttgggaacattcagtatcctcatggattaatttttttaatgattctattttatttattattattgtttttgagacagagccttgctctgttgcccaggctggagtgcagtggtgcaatctcagcttactacaacctcttcctcctgggttcaagtgattctcgtgcctgagcctccygagtagctgagattatgggtatgcaccaccacgcccagctaatttttttgtatttttagtagagatggggtttcgctatatttggccaggctggtctccaactcctggcctcaagtaatctgcctgtcttggcctcccaatgtgctgggattacaggtgtgaaccaccatgcctggcctgtgattccattttatatggtgcactattag

SEQ ID NO: 555999 - DNA, 397 bp, Homo sapiens
cttcaaatatttttctgtgtattcttttcttcaggaacttcagttgcatgtatrttaggttgtttgaagttgttccatggtttactggcattcctttcattttttaagccatttttcctttgtgtgatttattttggatagtttctattgctgtgtctttaagttcactaatattttctcctgcaatgactaatctgctgttaatcccatatagtatattttccatttcaaacattgcagttttcatctctaaaaattcaatttcggtctataaaaatataccttccatgtgtctggttaactttttaaaaatatggaatattttcaaaatattataatataatacaatatgctaaaatatagtaacataatgtccttctttgctcgttctgatatt

SEQ ID NO: 556000 - DNA, 377 bp, Homo sapiens
atttttctgtgtattcttttcttcaggaacttcagttgcatgtatgttaggttgtttgaagttgttccatggtttactggcattcctttcrttttttaagccatttttcctttgtgtgatttattttggatagtttctattgctgtgtctttaagttcactaatattttctcctgcaatgactaatctgctgttaatcccatatagtatattttccatttcaaacattgcagttttcatctctaaaaattcaatttcggtctataaaaatataccttccatgtgtctggttaactttttaaaaatatggaatattttcaaaatattataatataatacaatatgctaaaatatagtaacataatgtccttctttgct

SEQ ID NO: 556001 - DNA, 578 bp, Homo sapiens
cgcctccgggttcaagtgattctcctgcctcaccctcccaagcagctgggattatacacacacaccaccaagcccagctaatattttgtatttgtagtagagacaaggtttcatcatgtttcccaggcttgtcttgaactcctcctgacctcaagtgatccacccaccatggcctcccaaagtgctgggattacaggcgtgagccaccgcacccagccagatgtagaaaattctaaataaaatagggacaagtcattttgggagtgtgttaaagatgttaaagcataaccaaggaacttccctatcctgttagtagatcataaactctgaagagttatttgaaaacagctagaggaatgtaaagtactcatttttttggcacaattctaagtacatacctcagaaacactyttgcacacatatatgtggagacatgtacaggaatgttacatcgttcttaatagccaaaagggggcctaaatattcatcgatcagaaaaataagttgcggcctgttcataccatgtaatagttaaaatgaacctactagagctatgtctttcaacatagataaaattt

SEQ ID NO: 556002 - DNA, 545 bp, Homo sapiens
aagaacaatagaatgactatagttaacattagccgattgtgtatttcaaaatagctagaagagaatcatttgaatattcctagaataaagaaaatatttaaagtcatggatgtcatgattaccctaattatatatgaatataccaaattatcacatgtaccctgaaaatatatacatctagtatcaatttttaaaattaaataaaaataaaagacaaggatgggaaaagaaaagcacaaaacaggcaggacaaaatacratcaaaaaacagaatactgcgctgctttgaaaatgaataaactactgccatgtggaaaaaatgggctcatcacacaaacataatattgagggaaaaaaaacaaaaagtcatacgaaacatgattctatttatccatttaaaaacaggctatgttggaaaacctagataggtggtaaacctacaaaggatagcatagaaattatcaccaaaagcaggggtgagacagaatagggtcttctggggtatgtgtgttcaattctacatggcagcaatctggtgtttgctt

SEQ ID NO: 556003 - DNA, 551 bp, Homo sapiens
gccttgccttggagctcactcttgacataggctctcccatctagcctctcattttgtttttgccatgagctaagtgttgggcagagctatggttctagtaccccactcatgggacagctgaagtaccaagagggaccagaatgtgttcacaggcctaccacagatcatagtcagagctaggttctcccaactcaaaggccagtgttctattcygcagcccactctctctagtcagagcagtgaacttgatgatgatgttcccataggaaagacttagcctctctccatctcaccacgctgaacatcacaatcaagccattttatcattttaagcgatagcaaatagacaattatacaaaactttttatcccaaaattagagacctatcaacaggccttacttcctttaataagtttggtggtttgcttaacctagtttctcttgtccctaggttctcttgcccctaggttctcttctaactttatgttctctccataaaaagcaatcactatcatggatttaaaaatttttagcagacgactcttcaccat

SEQ ID NO: 556004 - DNA, 551 bp, Homo sapiens
gccttgccttggagctcactcttgacataggctctcccatctagcctctcattttgtttttgccatgagctaagtgttgggcagagctatggttctagtaccccactcatgggacagctgaagtaccaagagggaccagaatgtgttcacaggcctaccacagatcatagtcagagctaggttctcccaactcaaaggccagtgttctattctgcagcccactctctctagtcagagcagtgaacttgatgatgatgttcccataggaaagacttagcctctctccatctcaccacgctgaacatcrcaatcaagccattttatcattttaagcgatagcaaatagacaattatacaaaactttttatcccaaaattagagacctatcaacaggccttacttcctttaataagtttggtggtttgcttaacctagtttctcttgtccctaggttctcttgcccctaggttctcttctaactttatgttctctccataaaaagcaatcactatcatggatttaaaaatttttagcagacgactcttcaccat

SEQ ID NO: 556005 - DNA, 429 bp, Homo sapiens
aactgaaattcccatatgttgctggcaggaatgtaaaagggtactacctytttgcaaaacagtttggtagtttcttaaaaagttaaatatatgcttaccatacaacccagccattttactcctgggtaactactctcaaaaactgaaatcatatgttcccatgaagacttgcacgcaatgttcactgcagcattattcataatgcccccaactggaaacaatccaaaggctcataaattggtgagtggataagcaaaagctggtttatctatgcaatggaatactactcaacaataaaaaggaactattgacatatgaaacaatggatgaatctcaaaatcatcacactgagagaaagaagccagacacaatattattaaaggaaccagacacacagtaaatatcaaatgattttctttataagaaatt

SEQ ID NO: 556006 - DNA, 536 bp, Homo sapiens
ggggagggggagagatagcattaggagatatacctaagtaaatgatgagttaatgggtgcagcacagcaacatggcacatgtatacacatgtaacaaacctgcacgttgtgcacatgtaccctagaatttaagtataataaaaaattaattaattaattaaaaaaagagagagaagagattaaawggtatatgggttgtttggttacaacaggatgctaataatggtaagtatgacagagccctcattttaggccaagtagattagttttatgttaagaaaatttctgctataaatgggtatactattgagtgcagttagacatatcaatgatccatctgcttcatcaggaagtgagaaaactgaatgtagcctcatcactgtgagtgaagtttcaaagtgaagggctcacatttccatggatgcagaactggtgaatatcaaaccagttatttatttgtaaatgtctcagaaattaaagatgatgctatgttcaatttcatgttaacccagcacctttctcttcctggggccaaa

SEQ ID NO: 556007 - DNA, 536 bp, Homo sapiens
ggggagggggagagatagcattaggagatatacctaagtaaatgatgagttaatgggtgcagcacagcaacatggcacatgtatacacatgtaacaaacctgcacgttgtgcacatgtaccctagaatttaagtataataaaaaattaattaattaattaaaaaaagagagagaagagattaaatggtatatgggttgtttggttacaacaggatgctaataatggtaagtatgacagagccctcattttaggccaagtagattagttttatgttaagaaaatttctgctataaatgggtatactattgagtgcagttagacatatcaatgatccatctgcttcatcaggaagtgagaaaactgaatgtagcctcatcactgtgagtgaagtttcaaagtgaagggctcacatttccatggatgcagaactggtgaatatcaaaccagttatttatttgtaaatgtctcagaaattaaagatsatgctatgttcaatttcatgttaacccagcacctttctcttcctggggccaaa

SEQ ID NO: 556008 - DNA, 611 bp, Homo sapiens
ctgtgatattgttaaagctaaaataataatttwaaaaaagctgtcaagtgagaataatagcatcaccacaattttactaccaaatagaaagaagcacttccaaaataaccaaatcctgagaatgtatattgccactgcatatgcctgacatatcaaagatggttgagtttcctccactgaaaataatatagtgaaagaaaacaacccataatcatatgaaaatatgtaactttctgggaaagatatgcacatacacaaaaatggaatttcttaacattatcataatggtgcagaaaacatttttaattgttctctaaaatttaaaagataaaaactatagaaattattataaacatgttaatgaatatacaaacataaaaaatataattggcaaactcaataacaaaatagaaggcagatgtaatgatgaaaaatttttgtatgaaactgaagttgattttttaccacatttaaatatattgttggatcttttagaggttttatgtaatcccagaaggtaccacttagaaaatgtctgtacagatacacaaaagaaaataagaaagaaactgaaagcatgtcaatacaaagatttaaaaaaaagaaagaga

SEQ ID NO: 556009 - DNA, 611 bp, Homo sapiens
ctgtgatattgttaaagctaaaataataattttaaaaaagctktcaagtgagaataatagcatcaccacaattttactaccaaatagaaagaagcacttccaaaataaccaaatcctgagaatgtatattgccactgcatatgcctgacatatcaaagatggttgagtttcctccactgaaaataatatagtgaaagaaaacaacccataatcatatgaaaatatgtaactttctgggaaagatatgcacatacacaaaaatggaatttcttaacattatcataatggtgcagaaaacatttttaattgttctctaaaatttaaaagataaaaactatagaaattattataaacatgttaatgaatatacaaacataaaaaatataattggcaaactcaataacaaaatagaaggcagatgtaatgatgaaaaatttttgtatgaaactgaagttgattttttaccacatttaaatatattgttggatcttttagaggttttatgtaatcccagaaggtaccacttagaaaatgtctgtacagatacacaaaagaaaataagaaagaaactgaaagcatgtcaatacaaagatttaaaaaaaagaaagaga

SEQ ID NO: 556010 - DNA, 611 bp, Homo sapiens
ctgtgatattgttaaagctaaaataataattttaaaaaagctgtcaagtgagaataatagcatcaccacaattttactaccaaatagaaagaagcacttccaaaataaccaaatcctgagaatgtatattgccactgcatatgcctgacatatcaaagatggttgagtttcctccactgaaaataayatagtgaaagaaaacaacccataatcatatgaaaatatgtaactttctgggaaagatatgcacatacacaaaaatggaatttcttaacattatcataatggtgcagaaaacatttttaattgttctctaaaatttaaaagataaaaactatagaaattattataaacatgttaatgaatatacaaacataaaaaatataattggcaaactcaataacaaaatagaaggcagatgtaatgatgaaaaatttttgtatgaaactgaagttgattttttaccacatttaaatatattgttggatcttttagaggttttatgtaatcccagaaggtaccacttagaaaatgtctgtacagatacacaaaagaaaataagaaagaaactgaaagcatgtcaatacaaagatttaaaaaaaagaaagaga

SEQ ID NO: 556011 - DNA, 611 bp, Homo sapiens
ctgtgatattgttaaagctaaaataataattttaaaaaagctgtcaagtgagaataatagcatcaccacaattttactaccaaatagaaagaagcacttccaaaataaccaaatcctgagaatgtatattgccactgcatatgcctgacatatcaaagatggttgagtttcctccactgaaaataatatrgtgaaagaaaacaacccataatcatatgaaaatatgtaactttctgggaaagatatgcacatacacaaaaatggaatttcttaacattatcataatggtgcagaaaacatttttaattgttctctaaaatttaaaagataaaaactatagaaattattataaacatgttaatgaatatacaaacataaaaaatataattggcaaactcaataacaaaatagaaggcagatgtaatgatgaaaaatttttgtatgaaactgaagttgattttttaccacatttaaatatattgttggatcttttagaggttttatgtaatcccagaaggtaccacttagaaaatgtctgtacagatacacaaaagaaaataagaaagaaactgaaagcatgtcaatacaaagatttaaaaaaaagaaagaga

SEQ ID NO: 556012 - DNA, 562 bp, Homo sapiens
tatttttagtactgtattggaagttctacttagttcaatggtataaagaaaaaaaaactatttaagtcttacaattatacatgataacacttcctcttataatatccaaacaaactaactgaaaaactctctgaacaaatgtatattctataatgtgataggtgcratctaaatgttcaaaaatcaatagctttctctatgccaatgataatcaatttaggaaagttaaatttgatgttaaatttaggtaccctcctatcttctagagtataaagtgaggattaaattatagagatatatggctagtgaccaacctaataatccattattgtcttctttagaactaatagtacttctatattattgggggacagcaatgtgcccagcaaaacattaatattttccagcatccctgaaggtagatatggctatgttctgaccaatcccatagaagtgaatattttagagaaagatttcatagacagctctttaaagtagatcgaacaggtaaaggaaggtctctttctccattaacctcttctgtttcctgctgtctggagtg

SEQ ID NO: 556013 - DNA, 393 bp, Homo sapiens
tccttagggaatttaccttctggaaggggaagataagcataataatactaactaactctagtagtgttaataataaacaatgggctgggtatggtggtttatgcctgtaatcccaacactttgggaggctgaggggggcggatcacctgaggtcaggatttcgcgaccagcctggccaatatggcaaaaccccatttctattaaaaatgcaaaaaaaaaaaaaaaaaatarccatgcatgacggcacatgcctgtaatcccaattactcaggaagctgaggcaggagaatcacttgagcctggaaggcagaggttgcagcaagccgagattaagccactgcactccagcctcagtgacagagcaagactccatctcaaataataataataagt

SEQ ID NO: 556014 - DNA, 604 bp, Homo sapiens
cagccattatggaaaacagtatggaggtttctccaaatattaaaacaagaactactctatgaagtagcaatcccactgctgggtatatatctaaagggaataaaatcagtatgtcaaagaaatatctgcactcccatgtttattgcaacatgattcacaatagccaagatatagacccaacctaagtgcccatcgatggatgaaaggataaagaaaatatggtatatawacaagatagaatactattccacctttaaaaagaaaaaaatcctttaatttgcaacaatatgaatgaaactagaagacaaactaaaattatccaggcacagaaagacaaatatcacatgatctcacatgtggattctaaaaacattgaactcatctatgtagaagaataaagtggtggtcatcagaggctggggacagggagagagttcgggagtgttggtcaaaggatagtttcaaaagaaaagtaagttaaagagatctattgtacagcatggtgactacagttaatagcaatgcattctttaaaaatcaatcagagtagattttaagtgttctcaccacaaaaacaataaataatgtgaggtaatacatatgt

SEQ ID NO: 556015 - DNA, 604 bp, Homo sapiens
cagccattatggaaaacagtatggaggtttctccaaatattaaaacaagaactactctatgaagtagcaatcccactgctgggtatatatctaaagggaataaaatcagtatgtcaaagaaatatctgcactcccatgtttattgcaacatgattcacaatagccaagatatagacccaacctaagtgcccatcgatggatgaaaggataaagaaaatatggtatatatacaagatagaatactattccrcctttaaaaagaaaaaaatcctttaatttgcaacaatatgaatgaaactagaagacaaactaaaattatccaggcacagaaagacaaatatcacatgatctcacatgtggattctaaaaacattgaactcatctatgtagaagaataaagtggtggtcatcagaggctggggacagggagagagttcgggagtgttggtcaaaggatagtttcaaaagaaaagtaagttaaagagatctattgtacagcatggtgactacagttaatagcaatgcattctttaaaaatcaatcagagtagattttaagtgttctcaccacaaaaacaataaataatgtgaggtaatacatatgt

SEQ ID NO: 556016 - DNA, 657 bp, Homo sapiens
tattccactctctccatctagtttccaatgccattaatcttctagacttcttgtgttttttgtgagggagggataacacctcaaatagtgttttcaaattactgcatgggggaaggggtagacttcacaagtgctttcatgttaaaacatgcacaccttcccatccagctcatatacacacactcttgattgatactttggccgggcataaaactctaggactaaattcatttttcctcaggactctaaagacagtcttgtaaagacacatctaacattggtgctgaaaactgacctaacagtctgactcttttttcttaagatccaagagactcacttgacagcagagtttcttaagcttagcattattgacattttgggcccaatggttctttgttgtgggagtctgtcccacacattgtgggatgtttaccaccaccctgtcctcagcccattagaggccaagagcacctcttccactgtgacaaccaaaatgtctccagacgttgtcagatcatccctggggggtaaaattgccctcagttgagaaccactgctgtatagcaaagggaaaccagctggggctatggtaggctcaataatggtcccccaaacatggccacaccctaatcccyggggcctgtaatatgttacctt

SEQ ID NO: 556017 - DNA, 376 bp, Homo sapiens
aggcgcccaccaccatgcccggctaatttttgtatttttagtagaaatggggtttcaccatgttggccagcctggtctcgaactcctgacctcaggcaatccgcctgcctcggcctcccaaagtgytgggattagaagcatgagccactgcgcaggccttgataaccctattgttttacaaaatgaaagagtgcctgacagtacatgaatggtggtatgttttaggtacatgcgtgaaatggaggaagtctgtatagacgcagacacaccgcagtgcagtggtgccagccaaatccacgctcccagaagtgagacccaaggtgacagtaactggacccaagtatccccaagtctcaccgtctctgtgtgcctgtgt

SEQ ID NO: 556018 - DNA, 376 bp, Homo sapiens
aggcgcccaccaccatgcccggctaatttttgtatttttagtagaaatggggtttcaccatgttggccagcctggtctcgaactcctgacctcaggcaatccgcctgcctcggcctcccaaagtgctgggattagaagcatgagccactgcgcaggccttgataaccctattgttttacaaaatgaaagagtgcctgacagtacatgaatggtggtatgttttaggtacatgcgtgaaatggaggaagtctgtatagacgcagacacacygcagtgcagtggtgccagccaaatccacgctcccagaagtgagacccaaggtgacagtaactggacccaagtatccccaagtctcaccgtctctgtgtgcctgtgt

SEQ ID NO: 556019 - DNA, 435 bp, Homo sapiens
gatcacctgaggtcaggagttcgagaccagcctggtcaatatggtgaaaccccgtctctactaaaaatacaaaaaaaatttagctgggtatggtggcacacaccagtaatcccagctattcgggaggccgaggcaggagaatcgcttgaacccgggagatggaggctgcagtgagccaagatcgcgccactgcactccagcctgggcaacagarcagactctgtctcaaaaaaatataaaaatttaaaaaaacaaaaaaacagcatctgacaagcttcacagagtgctgggatcctgccttcagaaagttacacaaacatccttcagagaaacaaaagtcaaacttaaagcctgtattttttttttctaaggatatcaagaagccctttttaacttccctcatcccacctccattgttccaaatatcctctcagg

SEQ ID NO: 556020 - DNA, 536 bp, Homo sapiens
gttgccattttctctaacaaccaaaaaaaaaaaaaaacrgtttaccttacatataaagcattttgtacttttaaaataacaccttaggtttgtttttagccatacttaatgctcccacaagtagacttaattttatttttaaagtaaattgaaaaagttatcaaggattagaatagagtgttttaaatagcccttaaagttatattggtatttatacacttttgttcaagttgatatataatatttgcttaggtttacttaaaattgttctgctcaacagattttttggagcttaaatttaatactagggaaaaactagaatttggaagacataggtgggtgttggtatagctaatcttttggtccattattgaacccttggcagccaataaatattatttcatagagtcctgacttctcttgtatggaatgtggtcacctgcatatcatttatagtaaatgtacattcgtctactagatgcctagagctgtgcatgtgatcctttcgtgtgtgtgtgtgtgtgtgtgtgtgtgtg

SEQ ID NO: 556021 - DNA, 607 bp, Homo sapiens
tatttggcaatcttggctctaccccaggttttaatgttaaaggcagtctctttctagggcatgggaatgcaatggaagtaaatctcttcctacacaaatcctcttactaaatgtaaaactaacttttagatctgttgaatcatccttttgaatcacaggttctatttgaaaaatataatagaatgtctcacaaataagtgcattatcatctaaaagatagcaaaatgtctgaaattgtagaaaacaaagttccagaaatgtgtttactcactaagtacattctacagccctacctgtatctggtattaaagacagtcacagggaayatagcagtaatgatccaaagcatttgaaataggaacttcttgctttcgtggaactattaatttactgggaaagacaagagatgcagaacaaccatgacatgaagatataaatgttcagaactaagagagtggtatggtgtgatacaaatttaggtcatgaaaaaggctattcctattagctttgaaatgcccacgtatgttcaagcatccatcattaattctatgcatattcatattttggtgtataagccaaatattttgtaacttgtggtgtgttaatt

SEQ ID NO: 556022 - DNA, 577 bp, Homo sapiens
  misc_feature 1, 2, 3, 4, 5, 6, 7, 8, 9, 10, 11, 12, 13: n = A,T,C or G
nnnnnnnnnnnnnatggagggccccttgacatgcgctctaaagagtattcgagtgtgggataactgagcctaatcaagcaggtagccagagtgggcacagaatttcaggaccaggcaccagctactagacagaygctccatcatgacctaaccttggcattattgcaagattttacaagcttcttatttatgggaagagccacactctgaatttggctatcttgaaggttacaagtcaaagtgaatggcagtaacctgctttatggaaaccctgagtaggtgtagagcaagacaagtttatccctggaatcccttccatgatcttatttgaagaagtattcttaggtaacaataccccaatggttcccaacccatgggagcttctgaatagttagtacacctgggacccatccaagaccaactgagttgggtttctaggtgtggggccctggcatctgtgctctctgaagttctccagacctgatgagcagccagggttgaaaccacagccttgggttaaatgagctttctgtaatatatgttatttctctgagaggtaggacagagttacaatgct

SEQ ID NO: 556023 - DNA, 549 bp, Homo sapiens
tatacagtgataagtataaaacactattgaaagaaattaaagaagaaaattggggacttacacttctcaaaackaatctatggtaatctagactgtgtggtactggcatacaataggttaattcaacagaattgaaaaatcataaataaacgctcacatttatggtcaactgacttcttttttgttgttattgttctgtttttgagacagtcttgctctttcatccaggctggagtgcagtggcatgatctcagctcactgcaacctctgcttcctgggctcaagtgatcctcccgcctcagcctcctgagtagctgggactacagtagtgtgccaccacacccagctaatttttgtcttttatgcagagacagggttttatcatattgcccaggatggtcttgaactcctgggctcaagtgattcgcctggtttagcctcccaaagtgctgggattacaggcatgagccagcacgcacagctcaactaacttttgacatagaggtcaaggtcattcaatgggaaaagaataatcttttaaacaaatga

SEQ ID NO: 556024 - DNA, 549 bp, Homo sapiens
tatacagtgataagtataaaacactattgaaagaaattaaagaagaaaattggggacttacacttctcaaaacgaatctatggtaatctagactgtgtggtactggcatacaataggttaattcaacagaattgaaaaatcataaataaacgctcacatttatggtcaactgacttcttttttgttgttattgttctgtttttgagacagtcttgctctttcatccaggctggagtgcagtggcatgatctcagctcactgcaacctctgcttcctgggctcaagtgatcctcccgcctcagcctcctgagtagctgggactacagtagtgtgccaccacacccagctaatttttgtcttttatgcagagacagggttttaycatattgcccaggatggtcttgaactcctgggctcaagtgattcgcctggtttagcctcccaaagtgctgggattacaggcatgagccagcacgcacagctcaactaacttttgacatagaggtcaaggtcattcaatgggaaaagaataatcttttaaacaaatga

SEQ ID NO: 556025 - DNA, 671 bp, Homo sapiens
gcgattctcctgcctcagcctcccaagtagctgggattacaggcacctaccaccacacccagctaatttttgtatttttagtagagacaaggtttcactgtgttggccaggctggtcttgaacccctgacctcaagtgatctgcctgcctcggcctcccaaagtgctggggttacaggtgtgagccactgtgcccagcccatgagagagttttgaagacgtatcagttctttcagagcaaaccacaccatactgccttacaagggcttctgtcactcaaaaatgaagccctcatccaaagttgaactggccatgtgatattaccagatggctggatcaggccaaggggagaagaatcaagccatttttaagggaagattggaggaagcagccaacaagtgggagaaggtcggtggacagaatgaacaagatgaaaaaaggaaaaggagaactagaccatcgtgttacattgaattctcctgyacagctggaagaaagcctttagcttcccaagcccccagagaaagtagtcctaggtcagctctttgacaacaaggcaaacatgaaggaaacagagaccgcagggtcagtgagctcttcgggctacccacctatcaccagcactcccttcaaagcaggcacagggctggggcaggcccttaggccttggga

SEQ ID NO: 556026 - DNA, 617 bp, Homo sapiens
atccattaaaatgtccatatggtttttgttcctgattttgttaaggtgatctttcacacttactaattggtgtatgttgaaatatccttgtatctccataatgaatcccacttgataagggttaatgatctttttaataygttgtcgaattcagtttgccaggatattgttgaagatttttgcatctatgttcatcaagtatattggcctgtagttttcttttttgtccatgtctttgtcttgttttggtattgaggtaatgctggcctcatgaaatgagtttggaaatattctctcctctaatttttttaagacattgaatggaattggtattagttcttcttcaaatgtttggtagaatttagcagtaaaggcttcaggtcctcgaattttctttaatgggagactttttaacagggcttcaatttcattactcattactggtttgttgatgtttctatttcttcatggttaaatcttagtaggttctatgcatctgggaatgtatcagtttcttctaggttttccagtttgttggcatatagttgttcataatactccctaatgattcttgtatttctgtggtctcagttgttatatcattttcatttctcatt

SEQ ID NO: 556027 - DNA, 559 bp, Homo sapiens
aattgcgtatatatgcatggtgcagcttgcacacagctgctccaggataggagcagggatggacaaaagggaccctgtcctccaaatactggggaagtgtgatccgattgctgattctgtccacagaggtgcaaagatgtgctgtccattgttgctgtatctcccccattgtcacacaagccccaaaagcccagtgtatttagagtgccaatacgtctttccctcttagatttttatctttttctccttttggaaackgtacattaaagactagggcattccaaatcttccacatatttgtggggaattaaataattactgcacattcccagggaaaaacacaggctcagaaaacaactgagaagatattaaatatacacttcaacttgattttcacaaatactcaggctatgacaattttttaaaaatcaaaaaatatacctggggaagtgtgagaatctgatttccagaacctgcatattattatattcaactatccagttttcaacaaaaaattacaaggcatgcaagaggtaaattgggcctatttaaggcaaaa

SEQ ID NO: 556028 - DNA, 574 bp, Homo sapiens
ttctatttctactactttttcacatttacttttagaaagttatatttctatgaaattacatatgtcatctgttttttgtatttaatgcattatgttcatgttttttcttatcacttaaaatatctgaagtagttatagtataactgtttgtattcctagtcttctttaatgttcctttcctcctcgctcaatgttttctaagaactacttttggtggtattgaacctctatttatgcctgttttccatttcatcaattttgttgtgaaattttctatgtcctttctatattctgtgggattttctgttgattttttaaacataaattgaacaatttgaattttaattgtaatcrtccttcattataagaacttaagcatgtacatttcccacagtaccagttttactgcctttcaaaaaatgtgatatgaagaatttttatgattaaatgctatgtattttataatacacattataattttttctttgacccaggagttcttcacgtatttttaaatttccaattgtagacttttcatttattttttttcattttgactaaaaatcaaattgct

SEQ ID NO: 556029 - DNA, 323 bp, Homo sapiens
atcctctttaagaaaatgaatacaaaatcaaggctaaaaaaagtaacattatttagaaggagaaaagaaattataaattatacagttataagtctgaccattaccaccacsattacattaaaaaatcaaaaattaacattttatattttgtacctgtaatattcttcctagatacatgtttttactaaaactgcttgagtgcctctttgtataacacaaattttataattgtttttctataggagtgtaagtaatttttttcatctaatggagataattgattcttttttcttactgagttaaaaagtttattttagcaacac

SEQ ID NO: 556030 - DNA, 463 bp, Homo sapiens
tgtcttggttctctgcttaaggctgacatcaaggaaatagccaggctgagttctcatttgtagtctctggggaaaaatcttccaggctaatacttgttgttggtaggcgttatttacttgtggttctgtaactgagattccaatatctttgcattttaatctggtggttgttcttagttcatagtggctgtttccaggtcttttccattgtgaacctctaatattaggaacagtgtgtcagttcctctcttgattcaaatttctaactacttattctgctactagccagaaaaaagttttgtgtttttaaaagtgctcataggattagattatattcacctttttgatggactcaaagcaactgattagtgacctyaattacatcttcaaaatccacttttttgtgtaacctaatcataggcatggtatctcatcatatttatagtcccaggaactaaagcag

SEQ ID NO: 556031 - DNA, 509 bp, Homo sapiens
  misc_feature 1, 2, 3, 4, 5, 6, 7, 8, 9: n = A,T,C or G
nnnnnnnnngcctttgttaaaaacgagttgactgtaaagatgtgaattgatatttgagttctctaatttgtgtatctgtgtatctgtatatctgttttcattacagtaccatgctgtgtgtctgttttcattacagtaccatgctgtgtatctgttatcattacagtaccatgctagttcggttactatagcgttgttgtattttttgaagttaggtagtgtgattcctgaagttttgttcttttttctcagtgttgcttttgctcttggggtcttttgggtggtttcatgtaaattttcaaattttttttttctatttctgtgaagaatattattggtgttttgttatggattacattaaatctgcartttggggtataattttcattttcactaacgatgttatcccaattcataagcatgatatacccttctacttttgtgtgtcctcttcattttatttcatcagtgttttatcatttttcttgtataaattttttacttattta

SEQ ID NO: 556032 - DNA, 599 bp, Homo sapiens
agctcatgtagtggcttgaagaattcagttcctcgtggttgtagaactaacacccttattttcttgctggccctcagccagtggccagtccccagaaggctctcatagtctttttcacagmacagttgcttagttcttcaggaccaagcaggataatttctcagacctctagatcctttgtaagggcttaactgattatgtcaggcccacctaggatactttcccttttgattcattcagtgtcaactaatcaggaaccataattatagctgctaaatctctttgctgtgtaaggagaatttccatcctaatcgtgggtcctgtccacactcaagggggcagggattatgatagagcataggccattgggatcatcttagaattttgcctaccatacctgtttattttctcactgtgtttctctcagggtcaggaggtgggggcaaagatcctctttgctctgcatagctgctttcagactattattttccttcctctcatgaaaaataacaacaaaaaaacactgagtctgagacttgtgctttttttcattaccattgtctctttcattttattgccatcccatcccatcccatccc

SEQ ID NO: 556033 - DNA, 429 bp, Homo sapiens
aaataaaatttaaatttaaaagatgagattttaaaataaccactaaacacaagtcttcaatatttgttaaaacagagaatataaagctataagaaacattttacttatgaaaaaaagtaagacttggaacaagattaaggaacttgtttaaaattacatggttaacagcagatttggaactaaagtccgggactgctaactccctgcccaggacccaatcacctgagactgatttttaactctcttaaagacagtatattgcttatgaattgaggctccatcaaccctaagctacaaacaagttttcacaaataasataaacaagttagaagctgatatacagatactacaactagtcagcttaagaattttaaggaagtagtttacagtcccaccaacagtgtaaaggtgttcctatttactagttca

SEQ ID NO: 556034 - DNA, 603 bp, Homo sapiens
agcatcatgcttatcttttagtcatgcacatttcagattccactcacctattctctagacattgaacaaatgatcaacaggtcatttcttacmtgttataaatatcctgagactgcataatttacataaagaaaggagacttaattgtttcatgattctgcaaaccattcaggaagcgtggagccggcatctgctcagcctttgcgaggaggcctcaggaagtttttactcctggcagaaggcaaagcaagagcagacatcttccatgacagagcaggaccaagtaagaggtggggaggtgccacatgctttgaaacaaccagatctcatgagaactcactcactattgtgaggacagcaccaacacatgaggggcccgctccataacccaatcgcctcccaccacattggggatcacatttcaatgtgagattgggcaacaaacatccaaaccatgtaacttagcaattagtagggagatgaaatatctacttgactagccaactcattccacctcttgacagctggttagaaaatccttattttgagccatgcctgccttgctgttaatatacatagactctagtcctgacatggtgacta

SEQ ID NO: 556035 - DNA, 578 bp, Homo sapiens
aattcaatagaactggatcacatgcctaaatcctaatgctagccctcctccaaagaaaaatcagtttctgctattaatgaagagagaataacactacaaagcaaaagccaaagttgcccaccacagcatagaaagaggtgtataaataagcagaatgagatagaaattataaaatatgagtgaggggagatcaggtcaaaatgttaggttaggaggtgcagaaagcatgtaagaggaaaaaggaaaaattgcagtattgtataaagggtgttcttgccatgacagatgttaaaaagtcatagtgaggtttaagagaaatgttatgacttttatcctgaattgggctttgcactgattcctggctctatggaaagtaaaacactacattctattggcttctgcattaaataagctaatagaatktagcctgcactcccaaattcaacccaaagcaactaccaaaccatctgtgaaatatactgttaggcagtaactgattcacgaaaaagacagattcataaccaactataattcaaaatagaacatgagccaggcacagtggtcaacacatgtaatcc

SEQ ID NO: 556036 - DNA, 526 bp, Homo sapiens
aactttctttaatattatatacattttttctcatcagttttcattttgtttttattttgcattgctgttttttgatagtgcagaaaagagttggacacattttgaacggttgatgttggagaatatataagtgcaccttttgtggcgttttatccagatttggcattaagatgtcccattttatcagatgagcatgctttaatcttcatctggcctcttattctggtgttaggacagcctttgcttgatgttgaggaaggtatctgactctgctgttttgcttccttatgtacctggcttgccagtttaaaagtttcaccattttaagtttcctaacagagtggcacatagagcatatttaagaagcctattgtaggaattcacccasatttagtgaatagaaattgaatacttgacctttatctagaaaagttgctgttttgttgtcaaccagaagaactttcttagtacagcccctatattccaaatagctagattcttaattgctgtactttcattaaattgc

SEQ ID NO: 556037 - DNA, 531 bp, Homo sapiens
tgctggtctcaaactcctggcctcaagtgatccttctgccttggcctccctggtagttgagattacaggcatgagctaccatatccagcctaatttattctttataaattttgaaagtatgttatatggtacatacaagtttaaaattgttacatgttcattaggtagtatctttctttaatcctaaaaatgctttgtttcctgtcaaaagtctattttgctagacagcaatataactatatcaactttgttttaggttgtattttcctggtatatgttttccaggcattattactttacgttttaaacatgactctgagaacagtatatgtgagatggaattccgagaatgacctcctatggctcytgctcttgtgtaatcctctttcctttagttctgggtggaacctgtgactatgatgagcagcaaaagaaagattattgggtggtactaatttactcatatgagtcctttaaaaagcagtagaagtcagcgatattggaagctagagagggattcaatgcagggat

SEQ ID NO: 556038 - DNA, 548 bp, Homo sapiens
ttttgggagtacatgttttctatgtatccattaggttatgtttattaactgtgttcaattcatctatatttttaccatttttatgtgtctacttcttttagttactgagagctacatgtaagtgtattaaaaccctcaaatagtaatggagtccattttttcttattatgctaataatttttcttagtattttgaggacatcttaagtggtgcatagaatttgtaagccatcatttttkgtcattttgaagtgattctcttcgtactctctctagatatatttttttgactttaaagtctgttttgtctgatattaatatagaaacaccctttttcttttgttgtcatgggtatcattttgcctactcttttactttcaatcatttaggatatttacgttttaaatgtttcctgttaaatgcacagttagatttttagaaacaatctgaaaatcttttttttttttggactgggacatttggcccatgtgcatttaatgtaaacactgatatacttggatttaaatctatcatctaaatttgtatttt

SEQ ID NO: 556039 - DNA, 605 bp, Homo sapiens
attagaatctcactagggtacatgaaactcatttgttttttttcagtttaaaagaagttgtattgttcttagccattgccataaagactcttccagctcaccctccatgatcctctttctgtccccagtaaatatttgcttcagctgcttctgcttggatgtgagctggggaatgragtgttaggcaaatagaactcagccctgtagaagagaaaagaagctcttccctaccctccctccatgtatatgagtgacaatttgattttgcatgacattaatgtattactgttttgctgtaagcattctgagaccagctcctcatcatattctggcattgattttatcataactttaggtttggttcagatgtaaatttagttgctatgtctctcaagtcttttaaaatctactctctactcttcttttttccccctccaattgacctgttgaagaaactgaattacttctcttgcagaatttctcacaatcaggtttttcttactgcattcttatggcatatgttcctctgtacccagcacactaaaaattagatagcacaagcctgatatggtttggctgtgtccccacccaaatctcatcttgaa

SEQ ID NO: 556040 - DNA, 540 bp, Homo sapiens
ttgacatgtattttttgaaagaaagatattactattttactttgcattatataaataaatatggcaaaagttttttgggaaagcttcagtatttcaatagcccagttcaccgctttatgatctrtctgtatacacagtggttcagttattcctccatcgaagctgattccaatgaatgccctatagaaagaagaaagaagaaagaatagaaaggagaagtagatatttcaaattttgcttaactctgctggcagttttccatgatgtcagccgtattttctttttgctccaatgcaggagttcatggggcttatttctatgtctctttaaacctgttctcaagccatgatgctgaagatccccccaaatacatggcggacctcattcgagttgtaaagcaaatttttcaaaacaggattttatatctttatttttctttgcagttgatgtggctctgagttgcgttctgactgagctcctgaaaaacagtactgagaagctgtctataaataagtagttttgtttacaggaacttactgg

SEQ ID NO: 556041 - DNA, 599 bp, Homo sapiens
gtggctggtattttcatcctttaaaaataatttttgcaaacttaatttttctcaaaccattggtagtaataagcttattttatgtggcacacagattttttaaaattgtattaattatgcatttatgttactgtcagttggggaaatagagctagtgcacaaactgcatgatttcataaatgtaatattaacattattttcttgacaatatttaaataaatgtaaaataaaacagcaaaaaaaaaatatatttgaaatgtgtgtccktgtgtgtagacagatggaaaaaagcaatccaagtacaaaagcacaaatggcactttgataatgcaaaatttacaaggtggttatgcttatctaggctaagaatgaacaaacctgccaacagtcttcataccccttgctgagttgggaatttgccagattagaaaaattcatgactgtggaccctttgacttttttttttttttttaagacagaatcttgctctgttgccaggctggaatgcagtggcccaatctcggctcactgcaacctctacctccctggttcaagtgattctcctgtctcagcctcccgagtagctgggactgcaggca

SEQ ID NO: 556042 - DNA, 410 bp, Homo sapiens
agttctcacttatttgttttatttttctcttagtaaatatttaaattagtaatgtttataattgaaaatttaatatttgaaagactgawaccaaagtgactggcaaatattattattattactaatgtttatttacactcaatctagaatcttttatattcttagtaattcatttacgttggtagttggattataaactttcctaaatgtatcaatgtttattttgttgtcataattaaaatgtaatgacccacaaaagaccgataaattagaggcttacccctgtaataaatagaaaatcagaaggcactaggagctagacaccataaaagacaacaaagatggtctctacgttttcaatggttctgtttacttattagaaaatttttacatttgtataaatgctgggg

SEQ ID NO: 556043 - DNA, 549 bp, Homo sapiens
tctcactctgtcacccaggctggagtgcagtggcccgatctcggctcactgcaacctccacctcccaggttcaagcgatactcgtgccttagcctcccaagtagctgggactacaagcacgcgccaccatgccagactaattttcatatttttagtagagatggggtttcaccatgttggccaggctggtctcgaactcttgacctcatgattcacccaccttggcctcccaaagtgctgggaatacaggcgtgagccaccatgccaggctaggcctctgtactcttaataaatattattagctttkcttttgctatgactagaattaaaagagatcctggtatctcaactcacaggcattgggttccaaagtctgtgcaaaaaagaaaggaatatatgatgcaattccattttattttgagaaaaacactttcagttgaattggtttcactttggaagtaatgttctttatattatgtctacctgcatgctatgacttgaatgcatacctcaaaagccatctgttggaaacttaatccccaatgcaat

SEQ ID NO: 556044 - DNA, 654 bp, Homo sapiens
atgaggcaggaggattgcttgagcccaggaggcagaggttgcagtgagctgagatgactctactgcactgcagcctgggtgacagagtaccctgtctcaaacaaacaaacaaaaaatgatagggtgggggactaaacccagattataatayactgaggagtttcactttgtttagtctttcaaagtgggagaaacttaaacgtgtttaggggctgagccaaaggagataagagagagatgtaagtgagaggaaggagaaattcatggaagaagttcaggaagaattcagaaggcatgcaaattgcacactgaatcactagtaagtaagtagttaagaataaggtaatatcagaaggaattaacctgaaggaggcggggagtagatgccttctagctctaagaaagaagatggatggtgattaaacatttccaagagtttgtggagtgttagaagctgagagaatgcaggcttgagatcctctcattattctttgaagccaatcaaattgtgagataaaaacctgagccagagaagcaattgggtagggcccttgggacaggagctaaaatttggaagagctgctattagaagtggcagagggagctgacgagcagaatgtagaattgctgagtggttttgagagcttggaaact

SEQ ID NO: 556045 - DNA, 561 bp, Homo sapiens
atgcattccatttccccagaagcagaggcaagctcaaataatttttaagtccttaaagcttactatattattaaggctatgtgaatctattccttgacaaaattaaagatttaaaaaaaaatcagaagtgtcaatggtagttatgactcaagaggatcaactaaaaatttattagaactaagagttcatcctggtgactagttataaaatgaatataaaattgataacttttctacatgtcaagaataaacaacacaatagaataaagatgttattcacaatagcagaaaaatatacatgagtaaacttaaatataaaggaataaaattataatggtacagtttggaacagattaataaatggaaaaagattaatgcctgaactgtaaagtttattattataaagatgccaattgccctcaaaaaaaaaccttaaacttcaatgcaatcatttaaaaacacaggaatgagtmtagaattctatcaaatgcttttgcagtaactattgaaaagagcacatgggtttttctcccttaagctcttatggtgataaagaattata

SEQ ID NO: 556046 - DNA, 561 bp, Homo sapiens
atgcattccatttccccagaagcagaggcaagcycaaataatttttaagtccttaaagcttactatattattaaggctatgtgaatctattccttgacaaaattaaagatttaaaaaaaaatcagaagtgtcaatggtagttatgactcaagaggatcaactaaaaatttattagaactaagagttcatcctggtgactagttataaaatgaatataaaattgataacttttctacatgtcaagaataaacaacacaatagaataaagatgttattcacaatagcagaaaaatatacatgagtaaacttaaatataaaggaataaaattataatggtacagtttggaacagattaataaatggaaaaagattaatgcctgaactgtaaagtttattattataaagatgccaattgccctcaaaaaaaaaccttaaacttcaatgcaatcatttaaaaacacaggaatgagtatagaattctatcaaatgcttttgcagtaactattgaaaagagcacatgggtttttctcccttaagctcttatggtgataaagaattata

SEQ ID NO: 556047 - DNA, 560 bp, Homo sapiens
gtataaattttgtccctgtctattcatctttctatggccattttcaaktacagaattaacatagtttttgtttaagaattaaagagatatctttccaggtggatctgactgccatctaaagattttattctagatggtccaaacccaggtcattaatccaagggtctgttgggaaagagaatgattaagcaccttatctattatctattgctgcctaagaagccaattcaaaatttaggggcttaaaacactaaatttactgttatgattatcatctattacgattttggacagttcatttgctgattttgtctgctggtttctcaagcaattgtattccactagagcagcagtccccaaattttttggcactaggaaccagtttcatagaagacaatttttccaaggccatggggtgggggtgggagatggttttgagatgaaactgtttcatttcagatcatcaggcattagttagattctcataaggagcgcacaacctagatccctcacatgcgcagttcacagtagggttcctgcttctatgagaatctaatgcc

SEQ ID NO: 556048 - DNA, 560 bp, Homo sapiens
gtataaattttgtccctgtctattcatctttctatggccattttcaagtacagaattaacatagtttttgtttaagaattaaagagatatctttccaggtggatctgactgccatctaaagattttattctagatggtccaaacccaggtcattaatccaagggtctgttgggaaagagaatgattaagcaccttatctattatctattgctgcctaagaagccaattcaaaatttaggggcttaaaacactaaatttactgttatgattatcatctattacgattttggacagttcatttgctgattttgtctgctggtttctcaagcaattgtattccactagagcagcagtccccaaattttttggcactaggaaccagtttcatagaagacaatttttccaaggccatggggtgggggtgggagatggttttgagatgaaactgtttcatttcagatcatcaggcattagttagattctcataaggagcrcacaacctagatccctcacatgcgcagttcacagtagggttcctgcttctatgagaatctaatgcc

SEQ ID NO: 556049 - DNA, 600 bp, Homo sapiens
caagactaagacattcactgaaaaccacacacctacatgaaaattgaataacttgctcctgaattactttagggtaaataatgaatttaagccagaaatcaagaagttctttgaaatgaatgtgaacaaagrtaaaatgtaccagaatccctgggacacagctcaggcagtgttaacagggaaatttaaagaactaaatgcccacattacaaaattataaaaatgtctatttaacaacctaacatcacaactgaaagaactagtgaaccaagagcaaagaaatcccagtgctagcagaagacaagaaataaccaaaatcagagctgaatgaaaggagatagagacgtgaaaaaccattcaaaagatcaacaatccaggagccgttttttttttcttgaaaaagttaataaaatagactgctagctaggctaataaggaataaaatagagaagattcaaataaacacaatcagaaatgataaggggaatattaccactgaatccccccaaaatacaaataaccatcagaaaatattatgaacacctctatgcacataaagtagaaaatctagaagaaatagataaattcctggacacatac

SEQ ID NO: 556050 - DNA, 600 bp, Homo sapiens
caagactaagacattcactgaaaaccacacacctacatgaaaattgaataacttgctcctgaattactttagggtaaataatgaatttaagccagaaatcaagaagttctttgaaatgaatgtgaacaaagataaaatgtaccagaatccctgggacacagctcaggcagtgttaacagggaaatttaaagaactaaatgcccacattacaaaattataaaaatgtctatttaacaacctaacatcacaactgaaagaactagtgaaccaagagcaaagaaatcccagtgctagcagaagacaagaaataaccaaaatcagagctgaatgaaaggagatagagacrtgaaaaaccattcaaaagatcaacaatccaggagccgttttttttttcttgaaaaagttaataaaatagactgctagctaggctaataaggaataaaatagagaagattcaaataaacacaatcagaaatgataaggggaatattaccactgaatccccccaaaatacaaataaccatcagaaaatattatgaacacctctatgcacataaagtagaaaatctagaagaaatagataaattcctggacacatac

SEQ ID NO: 556051 - DNA, 619 bp, Homo sapiens
catttttttacagtttctcaaaaagttaaacatagagttaccatataacccaacaattccactcccaactatacatccaagataactgaatacatacatttacacaaaaatttgtacataatagaataaaagtggaaagaacccaaatttgcatcatttggtaagtggataaacagatatartatatatatacaatggaatattatttagccacacaaaagaattacgtacaagttccaacgtgaactttaaaaacattatgctaagtgaaagaaaacagacacaaaggtcacatcttgtgtaatttcttttatataaaatgtccagaacaggcaaatccagagacaaagtagattagcggttgtcaggggctaaaggaagggattgctggagagtggctgctaatggtctgaagattttcttcagggtgataaaatttttctggagataaatagtggtgatggttgtatgactttgttaatatattaaaaaccactaaattgtactctactttttattttttaattgacagataaaattgtattaaattgtacactttaaaagtgtactttgtggtgcagtcaaactgcacagatgcaaatagacatagcgcaaatag

SEQ ID NO: 556052 - DNA, 619 bp, Homo sapiens
catttttttacagtttctcaaaaagttaaacatagagttaccatataacccaacaattccactcccaactatacatccaagataactgaatacatacatttacacaaaaatttgtacataatagaataaaagtggaaagaacccaaatttgcatcatttggtaagtggataaacagatatagtatatatatacaatggaatattatttagccacacaaaagaattacgtacaagttccaacgtgaactttaaaaacattatgctaagtgaaagaaaacagacacaaaggtcacatcttgtgtaatttcttttatataaaatgtccagaacaggcaaatccagagacaaagtagattagcrgttgtcaggggctaaaggaagggattgctggagagtggctgctaatggtctgaagattttcttcagggtgataaaatttttctggagataaatagtggtgatggttgtatgactttgttaatatattaaaaaccactaaattgtactctactttttattttttaattgacagataaaattgtattaaattgtacactttaaaagtgtactttgtggtgcagtcaaactgcacagatgcaaatagacatagcgcaaatag

SEQ ID NO: 556053 - DNA, 609 bp, Homo sapiens
gctatgtgtattacaacaaaattaatatgcatattttttaaataattttaaactttaggttaaaaagtaattttataaactttttaaagcataaggaaatttgtggtctctattgtwttcaaagaaatgactgttcatcctcatgcataaaatttaggatgagacactgtcttacaatttcctgctttctgactgtcctgatcgatgttttcagtcatgccactttttcacagtctgcgtggcacttctccaacaggaaatttacctcagatctgttcatgtcaccaatcctcctgtagctctagcttctctgctccaagttaaactgaaaactgccctgtcatttcttttaacctttgagtttgaggcagttctgagaacttctctcacagcaattgcttgttcctcctgggcaccatactataactaggcttaatcatagaattctagggttgaggaaccttgaaaagcactgtgacctctccaacactggccgcaaccactcacaaaccatcctcacacactgtagaggttgtgttgccttttaaagctccctctcagaattctatgctttaggattttctcctaaaaacaccaactgcaaatcta

SEQ ID NO: 556054 - DNA, 549 bp, Homo sapiens
attcctttcatctttcttgtcattctattgtttcccaaaggtaattttgtgtgtttttcctctatctcttttttcttcatcagtttcataatcaaaacttttagttgatttctttaattgatcattttataaaaaccatctgttttgattaattctatcactactaccttttttatttattcagcaattttaaattcatctattttctctctttctacatctttttggtgaaatttttattcttctgtcaatttcttaggataaatactggttactttattgttgatgtttattattgtcatttaaaaatggaatatgataaagggtatacattttcttctaatttcataggcagtgatgtgaagttctatactccctgctttctggagttagtaatgtcwatttgtatatcctctttgacataagaataatccaggagtgtatttcttaatttccaagtagtttaattgggtttttgcatttactgtttcatttatttcatttaaaaatatgatcctcaaatactctagtttgttttcatttgttgag

SEQ ID NO: 556055 - DNA, 549 bp, Homo sapiens
attcctttcatctttcttgtcattctattgtttcccaaaggtaattttgtgtgtttttcctctatctcttttttcttcatcagtttcataatcaaaacttttagttgatttctttaattgatcattttataaaaaccatctgttttgattaattctatcactactaccttttttatttattcagcaattttaaattcatctattttctctctttctacatctttttggtgaaatttttattcttctgtcaatttcttaggataaatactggttactttattgttgatgtttattattgtcatttaaaaatggaatatgataaagggtatacattttcttctaatttcataggcagtgatgtgaagttctatactccctgctttctggagttagtaatgtctatttgtatatcctctttgacataagaataatccaggagtgtatttcttaatttccaagtagtttaattgggkttttgcatttactgtttcatttatttcatttaaaaatatgatcctcaaatactctagtttgttttcatttgttgag

SEQ ID NO: 556056 - DNA, 469 bp, Homo sapiens
atctggtaataaatctttccttctaatcttctctccttggtaaaattctttcaagacaaattcacctgcctccctcttcatttctcccgaaatttgtcatcactcctttctcagtataaccatgaaatccagggaatttctcaatttttgtagtatgtcttgtgtkatcataatgaagtatgtacatatctgcctttgaggaagaggaaagtgtcattcatccctaaatccaaagtagttactgcagcacgtatggtaaatgtacacacacacacacacacaatcattgaattagttatatttgctgtgaaagattcagtccttaatatctagttttgaaaaatactgttttgaaaagtttaaactttagctttcaaaaatattatctactgtgctaggaaatcacatttaaggtggaaagcacattttccatgaagaaacaaaccagccaaatcaagaagaagaatat

SEQ ID NO: 556057 - DNA, 608 bp, Homo sapiens
gtgagtgagttctcatgagatctgatggttttagaaggggctttttccccttttgcttagcacttctccttgctgccgtcatgtgaataaggttgtgtttgtttccccttctgccatgattgtaagtttcctgagatctcaccagccatgctgaactgtgtatcaattgaacctctttcctttataaattacctagtctcatttatgtttttatgagcagtgtgagaacagactaatacatggtctgaccgtctcccattctattcactgtagataatgcctagtacataaaagatgcttcaacaaatatgacagagtcaaaacctatggtaaataaaaatatgtgtcttatgcttttccaagcttcctttgtcctgggcttacactaaggcagcccaatgactacccctttcaaattatattatagcaatatctacctataaagatctacaccagtcatacagagggatgctccccaggaaggagcctaaaagtgtctaagcaaatagctttctctcattcctcaccatttgtgataatctgaatygtttgtcagtgttaaacaaattacttcatgaactctcttctctagactgcctccacattct

SEQ ID NO: 556058 - DNA, 600 bp, Homo sapiens
aaggtcttctcaagctctgatagtctctaagtttaataattccttattacattagaaaacaactaaaaacaaatatgcacattttcctctatatattttcctttctttttttttttctttttttttttttttaagagacagcgtctcactgtgtcatccaagctggtctcaaactcctggcttcaagtgatcctctggccctggcctcccaaagctctgggattataggtatgagccactgcacccggcctatgttgaatttgctaatgacactcatttttcccagctaattagcatacctgtatctcaaggtcacaatagttaaggaaggctgctgaaaaaggaatctacttatactgttttgtttttcaagacagggtcttgctctgtagctcaggctggagtgcagtggtgcgatcacagttcactgyagcctcaacctcctgggctcaagccatctcctgcttcagcctcccaagtagctagcactacaggcacatgccaccacaaccagctaatttgttttatattttgtaaagacggggtctacttatgttgcccaggctggtctcaaactccaagactcaagcaatccccctg

SEQ ID NO: 556059 - DNA, 414 bp, Homo sapiens
ggatcttttgtatttctgtggggtagcttgtaatgtcacctttgtcatgaaaacataaaaatrttttcttacgtaattctaaagcttgcttttttttttttttttttttttttttttttgcccctgttgttcaaactgtggtagcccggactgagtcagggacctagaatgtcataatttacctccttcatccttttgaaattttttaaaatggtgttttataggagtatctctgaccaattgaaaagatgaccaattattgatagattagcccagaccagtgtgtctgtgaatgttttatatttgtcatttcatggtgccacatattactccatgctattgattgctgttgaccttggatattgtgtaaattgttaatgaacttggtgactgactcttctggtctctgacttt

SEQ ID NO: 556060 - DNA, 414 bp, Homo sapiens
ggatcttttgtatttctgtggggtagcttgtaatgtcacctttgtcatgaaaacataaaaatgttttcttacgtaattctaaagcttgcttttttttttttttttttttttttttttttgcccctgttgttcaaactgtggtagcccggactgagtcagggacctagaatgtcataatytacctccttcatccttttgaaattttttaaaatggtgttttataggagtatctctgaccaattgaaaagatgaccaattattgatagattagcccagaccagtgtgtctgtgaatgttttatatttgtcatttcatggtgccacatattactccatgctattgattgctgttgaccttggatattgtgtaaattgttaatgaacttggtgactgactcttctggtctctgacttt

SEQ ID NO: 556061 - DNA, 567 bp, Homo sapiens
tgaaaaccacgagacagcacacaacaactcccacattcaggaagggctttgaactcttagcgtggctggaatcctgaggggagacttgccagaggaaaacttggcttattttcacctttcctcctaacaaaagggcaggctggtcacagcagcactgtttctatctaacactaacttagktacaagtgagactgaccttgtaaagtaaaggttcagagtgtgagctctggaggcaaacaatttaggctttataacaactccacttctatggtaattgtatggccttgggtaaatcatttctcttttagtttctgtttagtttctgcatctgtgaaatgaagttaaaggctacataatgatgttgaaaaaaagaccccccaaaataaagaaaaatatgtgtaaagtacctgaaatgactctagaaccactttaaaactataaacaaacaaacaaaagctacatgaggagagctccttagagaaatggctggcacaagaaatcctcaacaggaggctgcagcatcttttaatgccagaaaggaagtgtttaaaaaacaaaaaaaccaaa

SEQ ID NO: 556062 - DNA, 567 bp, Homo sapiens
tgaaaaccacgagacagcacacaacaactcccacattcaggaagggctttgaactcttagcgtggctggaatcctgaggggagacttgccagaggaaaacttggcttattttcacctttcctcctaacaaaagggcaggctggtcacagcagcactgtttctatctaacactaacttaggwacaagtgagactgaccttgtaaagtaaaggttcagagtgtgagctctggaggcaaacaatttaggctttataacaactccacttctatggtaattgtatggccttgggtaaatcatttctcttttagtttctgtttagtttctgcatctgtgaaatgaagttaaaggctacataatgatgttgaaaaaaagaccccccaaaataaagaaaaatatgtgtaaagtacctgaaatgactctagaaccactttaaaactataaacaaacaaacaaaagctacatgaggagagctccttagagaaatggctggcacaagaaatcctcaacaggaggctgcagcatcttttaatgccagaaaggaagtgtttaaaaaacaaaaaaaccaaa

SEQ ID NO: 556063 - DNA, 478 bp, Homo sapiens
gaattcaggtaaaatatttttgctaaaaatttgaaattactattattactcaccaataaatgaaaaacaggtgaagctacaataagaaaacctaatatacaaatatcagaacttacagaaaagataacgcaggagactgtgagttatgaattaacttttggaggactgactaaacaaaagaatgaaagaaaactgctttgttatttgtcatcaagcaaaatctaatgacaatagcactggctgtgttttttttattttctaaactctatcaacttgaagaaaaaaatagtcaaatccccccaaacttttaccctcactgaaataatatttagaaaaacatggagcaatagccaaataattgctctagagaacaggtttgagtacacattgatattaaaataaacagccacataaaaaattagatgtacaattgcrtcaacattatacatttgtaattaagagcagccagagattttta

SEQ ID NO: 556064 - DNA, 199 bp, Homo sapiens
cgggttctttaccaaaaaaagaatttttcagaatattgcagaactgcmatataaaaatcattaggacataaaagtggtttaaaagaggtagcaacttatcctagatcacaaagaaaagaacagaaacaaagaaacaaatgaaaaaaaaaaccctctgcactttaactccatcctcccacattctgactttgtgttatta

SEQ ID NO: 556065 - DNA, 651 bp, Homo sapiens
gggagtggggaggagggggagggatagcattaggagaaatacctaatgtaaatgacgtgttaatgggtgcagcaaaccaacatggcacatgtgtacctatgtaacaaacccgcatgttgtgcacatgtacctagaacttaaagtataataaagaaaagaaaaacctgaactataattgcattgctggakgctcagtgtggaccagtcagagagaaaaattccagggggtgccagtcttggggagccccttcatactttttacattttaccttcaggagccctagcaggtcctccagtgaagatcagagaaaaatgtctcatttttccagcaggggaaagggggaagtagcctttgaaatgtaccagaaggttctgttcctttaaaagggggatgctaatggttgaactagttacaccttctagggatagtgcaaagattaggtgtgataatacatgtaaagcacatagagcatgtaagacccgtgctgctgttattatttagccatattcctatacataagctgagggttattcacctctactaaagaagctacacatgagttggacatccagagaaaggctgaaaggagaaaggtgaaatttagctggaggaatgcctttatacctttaaaatgtatagtggtttgcatc

SEQ ID NO: 556066 - DNA, 493 bp, Homo sapiens
gtttgctgtcaatgaataatataaacaagcttgagaaagagctacttttgttatgttgataatattattattacattaataacgccagcattatacaggagaactacggaatactaaagtgagataggaattcmgtattttatcttcaaatttagctctcttttcacttaatgtggctgcacaaataaatcacagtcattatcttaatatactaacaagttattcttattccttaatgatgtagaaatcttaagtaaattttttttggcttaatttgagttgccataaatctacttgaaagcaaaattattttcataaatgcatacagctccccaatataaaattagccccaaactagtgaggtcagtaaggttttactggccttacttaatttaagtttaatttgaaaactaaaccaaatcatacttcacatacctcctttgaacttgacattgagacccaaatgactaacactgaataccaaaactttgta

SEQ ID NO: 556067 - DNA, 586 bp, Homo sapiens
gggttagaacatgctcctttagctcggagttgtttgttattacccaccttctgaagcgtacttctgtcaatttgtcaaactcattcttcatccagttttgttcccttgctggagaggagttgttatcctttggaggagaaaaggcattctggtttttggaattttcatcctttctgcgctggtttctccccatttttgtggttttatctacctttggtctttgatgttggtgacctacagatggggttttgttgcggacgtcctttctgttgatgttgatgctattcctttctgttggttagttttccttctaacagtcagacctctctgctgcagttctgttggagtttgctggaggtcccctccagactctgtttgcctaggtatcactagcagaggctgcagaacaacaaatattgctgcctgatccttcctctggaagctttgtcccagaggggcacccacyagatgccagccagagctctcctgtatgaggtgtctgttggcccctactgggaggtatctcccagtcaggctacacgggggtcagggacccacttgagtaggcagtctgttcattatccga

SEQ ID NO: 556068 - DNA, 546 bp, Homo sapiens
agcatttcgttttagaaaaaactaggggaaatagagagtctcaagaaggaggaagttgtcatgagtgtgaaaatttatgacagtaacaagttaaataagaatgcaaaggatcccttggattcaggagtctcagtgaaatccaaaatgtgtggcttgcaaagggattgggtgatttaaaaaaatagaaacactttgagatattttrttgtgtaaaaaaaaaggatagcgacgtgctatgaagttaatgttcgtgtcttcccaaaatttatatgttgaagccctcatccccaaaatgacggtgtttggaggtggacatttaggaggtaattggatcatgaggttgaaaccctcatgaatgggagtaatgccattgtaagaagagacatgagagacaggatccctctctctgccatgtgaggttgcagcagtaaatcctccataggcaaactaggaagagagctctcaccaagaactgaattagccagcaccttgatcttggacttttcagcctcaaaaattgggagaaatagatttctgttgtttaag

SEQ ID NO: 556069 - DNA, 464 bp, Homo sapiens
atagaaattcaagataacatagagaaggaattcatcagataaatttaacagatattgaaatcatgaaaaagaatcagaaattctggagctgaaaaattcaattgccatactgaagaatgcatcagagtcttttaacaatagaatcaatcaaccagaagaattagttagcttaaagataggctgtttgaaaatagtcagagaccaccaaaaaaaaaagggataaaaaataatgaagcacacctacaggatctagaaaatagcctcaaaaaggtaaatctaagttattggccttaaaagaggaagtagagaaagagataggggtagaaatgtcattcaaaaggataayagagaacttcctaaacctagagaaagttatcaatatccaagtacaagaagtttatagaacaccacgcagatttaacctaaacaagactaccttaaggcatttaataatcaaactctca

SEQ ID NO: 556070 - DNA, 511 bp, Homo sapiens
ggttattgtgaagcttttaaatctttggcgttccgataagtgaaaaatgctatcctatatttctaatttgcttgtctttaattatatatgaagataatcgtatacatacttgctgttctctttctatgagctgcatattcagtttgtttagccattgttctttggattattcatctttttcttgtcaatttgtaagagcctattatgtttgggagaattttgccttgtgtctgttatgccttacagatattatccttcacattttttaacttgtttaacctatttttgctatatggtttatgttattttaaaaatgaaaaaatactaaacaagtattggctttgttttccttgsctaaaattatttcctttatacctttaaaatattacatagtatttaacctcatttagaaaatatcagtgatattttatttcaactaactagttaatagaaaatttaaactttcctcaattctgattctaacttttaaaagtcactaattaaacttcat

SEQ ID NO: 556071 - DNA, 451 bp, Homo sapiens
ttgtaaatattatagaaaaaaattaaagtagtattaaagtaatattttttctggcagagttacactttttaaaaactattgagatatagaataatttatttcagctttacaatatgtaactgggatgacatttgatgttaagattgttgtagaatttagggaaatctgtatcactttctttygtatatcagatatgaggtcctaggatatttaacattttcttgtgtaataactagttctaaatacattttcaataaataatgtttattaacccaattttaatctcaatatcctatttaagggccctattattaagtttaatattataaaaaatctgcctcttattgaatgtttattaataataaaattattgctcctcttaacaagacattatgaaagttttgagaactaaaagaaatcaaataactcattagaacaatgctgctctcat

SEQ ID NO: 556072 - DNA, 554 bp, Homo sapiens
tgtctgaaagggatcttatttctccttcatttatgcagcttaacttgtctagatatgaaatacttgtctgaaatttcttctctttaaaaatgctgaatataggccctcaatctcaactggcttgtagggttcctacagaaaggtccgctgtcgtcctgatggggttccctttgtaagtgacctgccccttctctctagctgcttttaacactttttctttcattttgaacttggagaatctgatggctatgtgtcttggatatgatcatcttgtatagtgtcttgcagggattctctgcatttctgaatttgaatgttggcctctatagcaaggttggggaaatttttatggatgatatcctcaaatatattttccaagttacttgctttctcttcctatctttcagagatgccaataagttgtagatttgctctctttacacaataccatatttcttggaggctaygtttattctgctctattcttttttctgtatatttttcctaactcagtgattttggagaaccacacttcaggttctgagattctttcc

SEQ ID NO: 556073 - DNA, 644 bp, Homo sapiens
agaaagagttctggtagcagctcccagcgagaccaatgcagaaggcaggtgatttctgcatttccaactgaggtacctgggtcatctcattgggactggttagacagtgggtgaagcccacagagggtgagcagaagcaggctggggcgtcacctcactcgggaacttcaaggggctggggacctccctcccctagccagggaagccataagggactatgttatctagcccagatactacgcttttcccatggtttttgcaacccgaagaccaggagattccctcgtgtgcatacaccaccagggccctggagtgtttcaagaacaaaactgagcagctgtttgggcagacactgagccagctgcaggttttttctttcacaccccagtggcacctggaacctcaggaagacagaaccgttcactcccctggaaagggggctaaagccagggagtcaagtgatcttgctcagtgggtaccacccccatggaacccagcaagctaagatccactggcttgaaattctcactgctagcacagcagtctgaagcttggttgggtgrggggtgtctgccattactgaggcttgtgtaggctgttttcccctcacagtgtaaacaaagctgccaggaagttcagcagct

SEQ ID NO: 556074 - DNA, 577 bp, Homo sapiens
cttactcatttgttggagctaaaaatgttagtctcatggaggtagacagtagaatcatagttacttgagcctgagaagagtatgtgtgtgggttggagggataaagagaatgttagttactgcgtacaattatttagttagaaggaataagttttaatgtttgatagcaaagtatggagactatagttaacaacatcatattgtatattttaatgtagctaaaaggcaggtgtattagttcattttcatgctgctgwtaacgacatacctgaaactgggcaatttacaaaagaaagagatttaacagacttacagttccacatggctggagaggtctcacagtcatggcagaggcaaagaggagcaagtcacatgttacatggatagcagcaggcaaagggagagcttgtgcagggaaactcctgcttcgaaatccaccaggtttcatgagacttattcactatcatgagaatagcatgggaaagacctgcccccatgattcaattacctcccacagggtacttcccacaacacgtgggaattcaagataagatttgagtgaggacacaaccaaacc

SEQ ID NO: 556075 - DNA, 577 bp, Homo sapiens
cttactcatttgttggagctaaaaatgttagtctcatggaggtagacagtagaatcatagttacttgagcctgagaagagtatgtgtgtgggttggagggataaagagaatgttagttactgcgtacaattatttagttagaaggaataagttttaatgtttgatagcaaagtatggagactatagttaacaacatcatattgtatattttaatgtagctaaaaggcaggtgtattagttcattttcatgctgctgttaacgacatacctgaaactgggcaatttacaaaagaaagagatttaacagacttacagttccacatggctggagaggtctcacagtcatggcagaggcaaagaggagcaagtcacatgttacatggatagcagcaggcaaagggagagcttgtgcagggaaactcctgcttcgaaatccaccaggtttcatgagacttattcactatcatgagaatagcatgggaaagacctgcccccatgattcaattacctcccacagggtacytcccacaacacgtgggaattcaagataagatttgagtgaggacacaaccaaacc

SEQ ID NO: 556076 - DNA, 577 bp, Homo sapiens
cttactcatttgttggagctaaaaatgttagtctcatggaggtagacagtagaatcatagttacttgagcctgagaagagtatgtgtgtgggttggagggataaagagaatgttagttactgcgtacaattatttagttagaaggaataagttttaatgtttgatagcaaagtatggagactatagttaacaacatcatattgtatattttaatgtagctaaaaggcaggtgtattagttcattttcatgctgctgttaacgacatacctgaaactgggcaatttacaaaagaaagagatttaacagacttacagttccacatggctggagaggtctcacagtcatggcagaggcaaagaggagcaagtcacatgttacatggatagcagcaggcaaagggagagcttgtgcagggaaactcctgcttcgaaatccaccaggtttcatgagacttattcactatcatgagaatagcatgggaaagacctgcccccatgattcaattacctcccacagggtacttcccacaacacgtgggaattcaagatragatttgagtgaggacacaaccaaacc

SEQ ID NO: 556077 - DNA, 622 bp, Homo sapiens
atattttcaaaattaactaaaacatcactttcattattgtagacagtgtttccattacttttcaaagggatagtgtgaatgttttcagtatgtgtttattgaactatatattctcccattgtctctttgattattttattccctaggttattttttggaactattttataaaaattccagttaaactttcaattgtattttccccgatcaaacttccagctcaaaaatttattctcaaattgttcattattccatttagttcttctattgaaatttattgagttgttttatgttttactcacaagcaaattttaaaattttcaatatgtaatttttcctcttcttaacagtagcctattcttgtttgtattgtgtatttttatatttataaatttataaattatgctcattgtaagcatttttatctctattaaattrtttctcctaagataaatacttttttgtttgtttgtttgagacagggtctcgctctgataaatactttttcctgatgtttctctttcataatttggtctttctcagatttatttgataattaaagattccctttatttcctaaatattgtctcaatatttacattcgagagcacttgttattgtt

SEQ ID NO: 556078 - DNA, 394 bp, Homo sapiens
atagaagtgaaatgaacccagatcatagagctttgatggtcaaattgaagcaattgttattataagcattacatatatatatatatttatatcataagcattatatatatatcataagcattatatataagcatacatatttatatcataagcattacatatacrggggacagagcgagactcctccgtctcaaaaaaaaaatgtaggcagaaaaacatggaaaggcaagactggcctagcctcccagcctacatctttctcctgtggtgggtgcttcctgccctcaaacatcggactccattcttcacttttgaggctcagaataactctccttgctcctcaaacttgcagacagcctattgtgggaccttgtgataatgtaagttaatattt

SEQ ID NO: 556079 - DNA, 394 bp, Homo sapiens
atagaagtgaaatgaacccagatcatagagctttgatggtcaaattgaagcaattgttattataagcattacatatatatatatatttatatcataagcattatatatatatcataagcattatatataagcatacatatttatatcataagcattacatatacgggggacagagcgagactcctccrtctcaaaaaaaaaatgtaggcagaaaaacatggaaaggcaagactggcctagcctcccagcctacatctttctcctgtggtgggtgcttcctgccctcaaacatcggactccattcttcacttttgaggctcagaataactctccttgctcctcaaacttgcagacagcctattgtgggaccttgtgataatgtaagttaatattt

SEQ ID NO: 556080 - DNA, 516 bp, Homo sapiens
cttgctaagtttggcacaattgattgcctgagaggttttctataatttttaattcttttcatatattgaacatacccaaccagtcttccaacaatagcaacaacagcaaaaggggacagaataattgtttttaaaaaggggagaatggaggctttttaaaattagatttattagtttcatcacgacagtgggtatacaaaagaaaatagaaagtatttatttcctaatttagagaactctgggaactgaggtttaagggaatgctatggtatcagctctgakaaaatgttcttgccgttgcttgagctactgctttttcaagggaaaccacaaagacaggactaattcagaagtaactaaaatttatacattgatatcattgtgtgtgttaatcctcaataaccatgaagtaagtttccttattatcccagttctaccgatgaagaattaaagtctcagaaaaggtaaaagaaatgtttttaagtcacacaccattgaaacagtctttgtaaaaat

SEQ ID NO: 556081 - DNA, 630 bp, Homo sapiens
tgacagctgagctcaggtagaakaagacacctggaatgcaggggatttaaaaagatgtgctgagaagaacttaagtgaccggcatgaaggaagaagcataaatatttacaaaggcctagaatccctgtgattgcctcttttataagtgataatacatacaagcatctaattgagaatacaaaatgctctgaatagatcttccacctgtgcacttagccatcaaacacaaagattaaagagtcttggagtaagttaggctgacatgggatctctctgagatgttcagcaactttctttgatcactacttgtttaattaaagaacatgtttctataacatgactgaaagatgcttaaatatcagagggaagagaaacgtttctatctcattggaattttacttaaatctataatttgggattgcaagtagtggaagaaggtaaatcagccaaggcttagttcctgctgagactccttataatgctaagatacggcttcaaagaaatattccctagcgtgctgttcctacctacccttttcccttgatggttcctccaccttttgaagaattgtattttaccatttatttcctctaccaattaaccttcacattgtcattttcctgtttggaa

SEQ ID NO: 556082 - DNA, 507 bp, Homo sapiens
tcccataatccccatgtgtcatgggaggtgccagatagagataattgaatcatggtggtgagtccccccatcctgttctggtgagtgagttctcaggagatctgatggttttataaggggcttttcccacttttgccccgtacttctccttgctgctgccatgtgaagaagggcatgtttgcttcccctttagccacgattgtaagtttcctgaggcctccccagtcctgtggaatcatgagttaattaaacctctttcctttaaaaattacctagtctctggccaggcgtggtggctcacacctaaaatcctagcactttgggaggccaaagcaggcaggttgctgagctcaggagttcsagaccagcctgggcaacatgatgaaaccctgtctctactaaaaatacaaaaaattagctgggtgtggtggtgcgcatctgtagacccagctacctggaaggctggggcatgagaattgcttgaacccgggaggcagaggttgcagt

SEQ ID NO: 556083 - DNA, 507 bp, Homo sapiens
tcccataatccccatgtgtcatgggaggtgccagatagagataattgaatcatggtggtgagtccccccatcctgttctggtgagtgagttctcaggagatctgatggttttataaggggcttttcccacttttgccccgtacttctccttgctgctgccatgtgaagaagggcatgtttgcttcccctttagccacgattgtaagtttcctgaggcctccccagtcctgtggaatcatgagttaattaaacctctttcctttaaaaattacctagtctctggccaggcgtggtggctcacacctaaaatcctagcactttgggaggccaaagcaggcaggttgctgagctcaggagttcgagaccagcctgggcaacatgatgaaaccctgtctctactaaaaatacaaaaaattagctgggtgtggtggtgcgcatctgtagacccagctacytggaaggctggggcatgagaattgcttgaacccgggaggcagaggttgcagt

SEQ ID NO: 556084 - DNA, 627 bp, Homo sapiens
aaaattttcctgttctttccaacatttacaaatcttacttcattttcttatgtaaatgcattggctcactcatgtagacacttttaagtagccatttccttatttgacatctagtctccctaatgatatgtcttgttcttgacacgcacaagattgcttctcttattgctttgctatgaaggatattactggctttggggtcttatacatatattatcatatcatgttaaggaattatccatctctatctacraagattttaaattttaaattaggaaataatgttgaatctgttccatgtcttctgagtattactggatataatttgagcaattaataggggatattattttaataaatttcctaatgtcgaactattttgccaccgtggagatgaatctcaatgtgttctggtgtattattttttattgtaccaataatttctcatttgcaaatttatgtatttattaataccagtgggctattaaaatgtaaatatcaatttgtagcttgctttttttggctcaacaatgttttagtaaacatttttatataaaaatatcaaaccatccctttctttttgactgctacatagaattttgtaaataaatcccaatttgttacatt

SEQ ID NO: 556085 - DNA, 568 bp, Homo sapiens
aaaggaaataatcaagatcagagcagaactaaattaaactgaaacaaacaaacaaacaaacaaaaaatacaaaagataaatgaaacaaaaagctggttctttgaaaagataaataaaattgatagaccattagcaagcctaaccaagaaaagaagagagaaaatccaaataagttcaattagaaatgaaatgggagatattacaactgacaccacagaaatacaaaagattattcaaggctactatgaacacctttacgtacataaactagaaaacctagaggaggggcataaatttccggaaaaatacaatcctcctagcttaaatcaggaagaattaawtaccctggatagaccaataacaagcaatgagattgaaatggcaattaaaaaattttcaacaaaaaaagtccagggccagatggattcacagcagaattctacaagacattgaaagaagaattggtaccaatcctattgacaccattccacaagatagagaaggagggaatcctccctaaatcttctatgaagccagtatcacccaaatactaaaaccaggaaagaac

SEQ ID NO: 556086 - DNA, 568 bp, Homo sapiens
aaaggaaataatcaagatcagagcagaactaaattaaactgaaacaaacaaacaaacaaacaaaaaatacaaaagataaatgaaacaaaaagctggttctttgaaaagataaataaaattgatagaccattagcaagcctaaccaagaaaagaagagagaaaatccaaataagttcaattagaaatgaaatgggagatattacaactgacaccacagaaatacaaaagattattcaaggctactatgaacacctttacgtacataaactagaaaacctagaggaggggcataaatttccggaaaaatacaatcctcctagcttaaatcaggaagaattaattaccctggatagaccaataacaagcaatgagattgaaatggcaattaaaaaattttcaacaaaaaaagtccagggccagatggattcacagcagaattctacmagacattgaaagaagaattggtaccaatcctattgacaccattccacaagatagagaaggagggaatcctccctaaatcttctatgaagccagtatcacccaaatactaaaaccaggaaagaac

SEQ ID NO: 556087 - DNA, 573 bp, Homo sapiens
taattttcagcattttagacattggagatttgaaactttaaaaattttgatttttgaagatattgatttttagggatttcaacatctggagtaatggcattcargattgtgtctttcaggactataatcagcaccactgccatatcgcactactaacaagaaaaatacattttattaaattcacaaaggaaggataagaacttgacagcagcttagaactagctgaaggaagcttcctttgctactgaagtccttgtgacttactttctctataatacattaaatatctatgatatggagattttaagactaatgataaactcttcttatttatcttctcaataaatatgatccacttatggaattcaaaaatctggttatgtctgttatagatataaaataaattcctaaagaaagtttaagcatgatgcattttaagaacaaaatggtgaggagataattactaaatatgagtgtttgattgaggaaaattacaaagaaatggtcttttccactaaaagaaatggaatttaagccaccactgtgtgggactagggaaattgctaagcatga

SEQ ID NO: 556088 - DNA, 573 bp, Homo sapiens
taattttcagcattttagacattggagatttgaaactttaaaaattttgatttttgaagatattgatttttagggatttcaacatctggagtaatggcattcaggattgtgtstttcaggactataatcagcaccactgccatatcgcactactaacaagaaaaatacattttattaaattcacaaaggaaggataagaacttgacagcagcttagaactagctgaaggaagcttcctttgctactgaagtccttgtgacttactttctctataatacattaaatatctatgatatggagattttaagactaatgataaactcttcttatttatcttctcaataaatatgatccacttatggaattcaaaaatctggttatgtctgttatagatataaaataaattcctaaagaaagtttaagcatgatgcattttaagaacaaaatggtgaggagataattactaaatatgagtgtttgattgaggaaaattacaaagaaatggtcttttccactaaaagaaatggaatttaagccaccactgtgtgggactagggaaattgctaagcatga

SEQ ID NO: 556089 - DNA, 573 bp, Homo sapiens
taattttcagcattttagacattggagatttgaaactttaaaaattttgatttttgaagatattgatttttagggatttcaacatctggagtaatggcattcaggattgtgtctttcargactataatcagcaccactgccatatcgcactactaacaagaaaaatacattttattaaattcacaaaggaaggataagaacttgacagcagcttagaactagctgaaggaagcttcctttgctactgaagtccttgtgacttactttctctataatacattaaatatctatgatatggagattttaagactaatgataaactcttcttatttatcttctcaataaatatgatccacttatggaattcaaaaatctggttatgtctgttatagatataaaataaattcctaaagaaagtttaagcatgatgcattttaagaacaaaatggtgaggagataattactaaatatgagtgtttgattgaggaaaattacaaagaaatggtcttttccactaaaagaaatggaatttaagccaccactgtgtgggactagggaaattgctaagcatga

SEQ ID NO: 556090 - DNA, 557 bp, Homo sapiens
tattagcagaagggccttgtaggttgtaattcatcctttctgaagacagcccctaccctccttttttttcacccccattctctctctgacccacatcctttctgcttcttttattctaatgcatctttccttttccacaattgcatttttttttcttttctacactgccctaggctgtaactcagtttggtctctgtaagcagaattcaggaagtaaaataagaacccatagctggtggcatacygccaaccacacctataagatgctttatctcagtacaccctttcactacttcttcacactcctgagatgaagcccactacactagaaagctttcccttgctctgtactacaacaaaaggccctcagataaagcaagggatcttttaggaagagatgaagaaagaataacgatttagcaactagcattttaaattaaatctacagtttatccagaccatttgtttttattattgtactggtcaccatgacaaccctgagaggaaagcatgttttgtatcatctccatttcatggattaagaaaactgaggctgg

SEQ ID NO: 556091 - DNA, 579 bp, Homo sapiens
aggcacactctgtttttaccatgtcttttttttaagtctaataaattattccaagggtcttaaacgggtacctctgatctttctggtttattaggccaaggacgacctatgaatttcttctctgcatcacagtgtatacatgtgcatgctcccaatgtccagaggtggtgatgcctcagtatttatttctaattaggttgttagccctctccttggctcagtttcatcatttagacccattcttaatgggacaaggaaatttacgttatttacacaaggtgaccaatgaggcagctgacacactttcctttattcatccaaccaacatttgctgagcatctactatatgttgggcactgagggggtgagagatgaayagagagacagatgcttggcttagtagagctcacaatggcctgcattgaatttttccactacagtagactgtggccatcaggatttgtacctgtaggaggcaaagataacccaggaagaagctcagtttgttttggtgggctctcaccctctcttaccttctcagtccgtattttcttctcacccagaaacctgagatctcaa

SEQ ID NO: 556092 - DNA, 579 bp, Homo sapiens
aggcacactctgtttttaccatgtcttttttttaagtctaataaattattccaagggtcttaaacgggtacctctgatctttctggtttattaggccaaggacgacctatgaatttcttctctgcatcacagtgtatacatgtgcatgctcccaatgtccagaggtggtgatgcctcagtatttatttctaattaggttgttagccctctccttggctcagtttcatcatttagacccattcttaatgggacaaggaaatttacgttatttacacaaggtgaccaatgaggcagctgacacactttcctttattcatccaaccaacatttgctgagcatctactatatgttgggcactgagggggtgagagatgaacagagagacagatgcttggcttagtagagctcacaatggcctgcattgaatttttccactacagtagactgtggccatcaggatttgtacctgtaggaggcaaagataacccaggaagaagctcagtttgttttggtgggctctcaccctctcttaccttctcagtcygtattttcttctcacccagaaacctgagatctcaa

SEQ ID NO: 556093 - DNA, 559 bp, Homo sapiens
atcaaatatgttttttggaaaaggtaagagaaagaccaaatctaaaagtagtagtaatgagctttcttctctcatttggtatacaacttaatattatcttgaaaatgaccatcattgccacaagtgacagggactactaatgattgggtactaatggtaatamcctagaggaaatggcatttgctgttctccagccattaatattcataatgggggctgtaaatatggtgccaacttctgaaagtcctagaattcacgagaatttttaatttttttatgactatgctgataaccagaagtaatgcagttatcaaaagccccagtcagttagataatgattactgcagtcagaaacatagaaaggtcaagaacaaattcatgtatttaagtcattttgctattacatctcttcctttgacatatcattaagggggcatctaggtgtgtaagaaaaaatccacttaaaaagatgctaatagctactgtgctagctaaaatgaatgttctgcagaaaattttgatgaagaaatagatgtcacaggcctcactgattttaatt

SEQ ID NO: 556094 - DNA, 649 bp, Homo sapiens
tcctcgcccacctcctctgctaccttttctttctcccccttcctttcttctctgtcttccttcttttttcctccttcttccttcctttttcttttcatcctttacttaatactattttaagaaatatccatcttgctatatgtacaatacacctaactcaatttttcattttttacttgagtttttaggtatttttttgagcttttccaaagaaaaattctacaggttaattgctaaaaagaaaagtagaattattaaataagtggaagcagagaaaagattaatggtgaaacaattctgggatgtttttcctttaaagagagactatttctataggattagggaaaatacatgtctaacatgtggttattcmcttcttagagacgggacaggtctctgatattaaagccagatcagcatgataggtctcacaggcaagagtttccaaggttgcattatcatctctccacttcatttaagattagaatgtcccagcatgttcctcaggagacaattttatgttgagtcagagaacttgatgatgtggtcaaattgcacatctatgttcattcattgtcaactctggtttttcttttttatgtccatgacatgggcctttaatttggataataaatctgtatggttttct

SEQ ID NO: 556095 - DNA, 538 bp, Homo sapiens
atttttttattttttatttttttgagatggagttttgctcttgttgcccaggctggagtgcaatggcgtgatctcagcttaccataacctctgcctcctgggttcaagtgattctcctgcctcagcctcctgagtagctaggattacaggcatgtgccaccacgcctggcyaatttagtctttttagcagagatggcgtttctccatgttggtcaggctggactcaaactcctgacctcagatgatccatccaccttggcttcccaaagtgctgggattacaggcataagccactgtgcccggtcagtttctagtattttttgaatatttttacatctatgttcatcaggggtattggcctgtagttgtgtgtgtgtgtgtgtgtgtgtgtgtgtgtgtgtctgtctttgtctagttttggtatcagagtgacactggccttgtagaatgagtttggaagtatcacctcctccttgactttttcaaatagtttcaatcggattgatactagttcttctttaaatgtttggtagaattc

SEQ ID NO: 556096 - DNA, 534 bp, Homo sapiens
tttttattttttatttttttgagatggagttttgctcttgttgcccaggctggagtgcaatggcgtgatctcagcttaccataacctctgcctcctgggttcaagtgattctcctgcctcagcctcctgagtagctaggattacaggcatgtgccaccacgcctggctaatttagtctttttagcagagatggcgtttctccatgttggtcaggctggactcaaactcctgacctcagatgatccatccaccttggcttcccaaagtgctgggattacaggcataagccactgtgcccggtcagtttctagtattttttgaatatttttacatctatgttcatcaggggtattggcctgtagttgtgtgtgtgtgtgtgtgtgtgtgtgtgtgtgtgtstgtctttgtctagttttggtatcagagtgacactggccttgtagaatgagtttggaagtatcacctcctccttgactttttcaaatagtttcaatcggattgatactagttcttctttaaatgtttggtagaatt

SEQ ID NO: 556097 - DNA, 587 bp, Homo sapiens
tccatgtattcttattgttcagctcccaattataagttagatcatgcggtgtttggttttctgttcctgcattagtttgctgaggataatggcttccagctccatccatgaccctgtaaaggacatgatcttgctcctttccatggctgcatagtattccatgttgtatatgaaccacatttcctttatccagtctatcattgacgggcatttaggttgattgcatgtctttgctgttgcaaacagtgctgcaatgaacatatgcatgcaggtatctttataatagtatggtttatattcctttcagtatgtacccagtaatgggattgccaagtcaaatgrtatttttgcctctaggttttgaggaatcaccacagtgtcttctataatagttgaactaatttacattcctgccaacagtgtagaagcattctttttcttctgcaacctcaccagcatcagttttcttgactttttaataaacaccattctgactggcatgagacagtttctcattgtggttttgatttgcatttctctaatgatcagtgatattgagctttttttcatatgtttgttgggtgcaa

SEQ ID NO: 556098 - DNA, 560 bp, Homo sapiens
ggcggttgcagtgagccaagattgcgccactgcactccagcctcagtgacggagtgagactccatctcaaaaaaacaaaaaatttagctgggcatagtggtgggaaactcaagtgggaggatggcttgagcccaggaagcggaggttgcagtgagccgagattgtgccactgcactccagcctgggtgacagagtgagactctgtcaaaaaaaaaaaaaaaaatccaggctgcagagtagcaggtgtaacagaaccgtgccacacccctgggaatatggaagactccagtggcatatgcagatcttgcctctgagtgtttagtgaagttctagattaatttaaaaggtaatcaggagtacttctgttattctgactgagcacttactctcagtcagtaaaagtcaatgcccatgctccgctccaccacctcagaggagaaactaatttccagtcagcaagttaacaagtaacawggttgcctccaaggtggggcaaggttcgcctgtgtgcttgctgtcagtgagtgtccagattgggcaggggaatgactggaggaggt

SEQ ID NO: 556099 - DNA, 576 bp, Homo sapiens
ttcagagaattctgtaatatctgaatgaaatgtttgataagagacgggaccttgaaattttagaggtcattaaaaatgatggaaatatttttaagaatgcaaagcagaggcwtctctaaacatggaaatgtatacatatataaagcattcaaattgtatttcatattaaaatgacttgaatttgagctacaccttgcatgtagtttaattataattatttgaacgtagattatttttagcctcttttctactaacaaaaaccacacttgttcaacccacttccacatttactggatagtccaaagactaaatataacttaacagctagacattgatatgtgttagtctctttgtttatatgtgtatatctacaaactattaataatgtgtgcatgcttgcactacattttactacaaatgtaggagagttatcttattctcatttcttgaactgtccataaatatttttctcccaggataaaatgcttcctactgtcagtaacaaacataaaataaatattcaataaatttttattcatcacctactatgtagaatatttgctagacactaataat

SEQ ID NO: 556100 - DNA, 569 bp, Homo sapiens
gttagccatttgtatatcttcttttgagaattgcctattcatgtccttagctcacttcttgatgggatttttggggttttttgttaatttgaggtccttgtagattctggatattagtcctttctcgacgtatagattttgaagatttttttacaactttgtgggttgtctgttaactctgctcgttatttcttttgcagatgctttttaccttaattcgatcccatctatttacttttttgttgcatttgctttggggttcttggtcatgaagtctttgcctaaaccaatgtctagaagggattttcagaagttatcttttgaatttttayggtttcaggtcttagatttaagtctttgatcccccttgagttgattttgtatatggtgagaaatgaggatccagtttcattcttctacatgtggcttgccaattatcccagcaccatttgttgagtagggtgtcccttccctactttatgtttttgtttgctttgttgaagattagtgggatataagtatttggctttatttctgggttctctgttctgttccattggtctatatgc

SEQ ID NO: 556101 - DNA, 614 bp, Homo sapiens
tctgtgtgggcatactcgatctactctatatatagtgatacctktctacttttaattcttagggaattaagaatacctccagagaagtccctatatctcaaaaattagataatcatactttaactggatacagtaagatggctatgatttattgatgaatttttagaccacactactccatgctcagtggttttgagcaaactgtgtgaaaatgcaatgactattttatttaatgcagtgattgcaacatcaactgttaaactgaagattattttatagcatattcactgagcatatgatatatgaaagcctgtaaattattagaaattacccatctcactagcatttcaaatgaagatattgcgtctatcatttcaaaataaaggtttgtgaataaccttgtgtattactccattctttcatggctacaaaaaaatacctaaaactgtaatttacaaaaaggaaaagagatttaattgccttacagttccacaggctatacaggaaaaatggctgtggaggccttaggaaacttacaatcctggtggaagacaaaggggaagcaggcatgtcttatatgcctgaagaaggaggaagagagcagaggggcaggt

SEQ ID NO: 556102 - DNA, 421 bp, Homo sapiens
ccctaatctcaagtacccagggacacaaacactgyggaaggccgcagggtcctctgcctaggaaaaccagagacctttgttcacttgtttatctgctgaccttccctccactattgtcctatgaccctgccaaatccccctctgcgagaaacacccaagaatgatcaataaaaaaaaaaaaaaaaaaaaaaaaaaaatcaaattaacattgacatagtatttgaaatggtgcttatgggcttatcgatgcatattttttatttgtaatccgatgctgtcccagaataagtgtattgtaatatgaatgttaaaattgaacaagagaaagcaggaaaataagtggtatttgggaaattaaaggaaaattgaaccagagtctttatattcctgaatttaattggattaatgggaaatttatcat

SEQ ID NO: 556103 - DNA, 565 bp, Homo sapiens
tggttcagtgggtttttgcattacatgtggttttatagccaaagtaatttaaccttccctttttctcttcacagtggtaaactattttcacagtgtctcaggatttctttatacactatgcatgtcttattcaagtcctaagatacctttatgtataactcaaagtaaagattgtcatgccccactgatttctatcatccaaacatgttgctgaaattccaattatgatggctttttctgatttagccatataaattcaaccctatggtttggatttttaaatctcactattagcatagagagagttattaatatattttacattaagctatatctaacacttggtactgagcttgttgttttgctaggaatagagcatatgcctcattatccttgctcctgggaatacaaacttttctttaaaaaggatacacaaatgcgtgcacacgtgcacgtgcacacacacatgtaaactctgatacaagtacatatgtaattttagcatcctgcacatttaactgactctcaaaatggcttttgkgaaaatggctttttttctgaaggt

SEQ ID NO: 556104 - DNA, 643 bp, Homo sapiens
  misc_feature 170: n = A,T,C or G
gcatgattccatttatataaaattctagaaaaaactgaactgtagtgacagaaggcccatcagtagatgcctggggctggagtttggggaactggctcgactgcaaaggggcacaagcaatgttttttgtgtgaggtattctatttacatcttattttgctggtggtacnatggcctgtatactactacccaaattcaccaaactgtgcatttaaattggtgagttttattgtgtccaaattttaccacgaaayaggccaaataatacttgtatgtagttaattctgcaattttgtttcaattattcttagttaacattttttctacatttaaaaattgcacgttctgaagttcttagtgcttctttaagatgtatttaattcacttgaccctaattgttcagataagatcacagagtaagggaaattactggagattctcaatcacttttaaattataaacgtccctgaaattgtcaaaagaggaaaacaaaaaaacatataaagctttcttaagcaaatggcaagattcaaaaatactccaaagtttagtacacattttggcatatcttgcctctcttcccattgaaggaaaaaatattagaaaagagcagtaaaatctaatttgaacttcaaaaacgaca

SEQ ID NO: 556105 - DNA, 574 bp, Homo sapiens
ttatcatttatcatgtgattcartttagaatcaatgaggttaagttacttacccatagctagcaatagtgatatcaagatgtaaactccaagctctgcaggccatgaacttcttatactctattcctcagttttattacactttcagaatagaaatggccaatatattgacttcccataagtttttttctaataagtattttaataactcaaagaagcattgagattttgaaattctttttagttcctgagttacaaaggtgtatcagtcagatcacttagttgcaaacaatagaatctgtgctggctacttttatcagaacagtgatgtattcaagaatatctggtgattaatagattcactgggatggcattgaaaaaaaaaagaatagtctcaaaaccaagcttctagcagcaatatgcgaaatcatgacacagaacaggactattcaggatactgtgcccacagcctctgttagatgttaaatgccagaagtccaaaccgattggcactgctgccagcagagattgcacttctgtgttagaaacacagacttgcacccactgggaagcag

SEQ ID NO: 556106 - DNA, 564 bp, Homo sapiens
tcatacatgctggaatgtggaatgagtggcacaatctctgctcactgcaaactccgtctcccaggttcaagcaatgctcctgcctcagcctcccaagtagctgggattactggcgtgcaycgccatgcccagctaatgtttttgtatttttagtagagatgatgtttcaccatgttggccaggctggtctcaaattcctgatctcaagggatccaccctccttggcctcccaaagtgctgggattacaggcgtgagccaccgcactcagtccaaaatctcttttatttgacttctacagttaaaattctcattacttgaaatgccactgtattgaatttatgttttcagagggcccaattaaaacataaatgtatttattagaatgagggacacttcaatcacttatcattaaaagagtagaagggaagttccagaggggttagaacccagtacaggtagattttgatatctagagtatatttgagatggaaatggaatatcttgcatagtggaaggggttatctggtgtgtagatgactgcacaagatgcaataaatatattt

SEQ ID NO: 556107 - DNA, 563 bp, Homo sapiens
tgagttccatgttaatgaatcaataatgtatatattaaataagatgtctttaaacagaaacacaaatatgacaaagtgatgtatggactggttgatgaaaatgttgggaccagaggctcataggaacctacccttataagtccccctaggaacaatggttcagtatttgctaattcagtgttcacagtgactttatagaacttaaccatcaccaatatagaactctacttttattgtactttatctgaaataaacttggttcattcatttacttacctattgtctgactgccccaattaagcttcaggagagcagggaccttatctccttgggttcagtattacatcttccatgyttgacatgacagatgttcaatacattttgctaagtgagtgaacgaatgggtggatgaataataaatatgtgagccaatatttaacatttcctttgagttctaagctaggtgataaaaggaaatcttaatttaaaaatatttgaaatattttattattattttttgagatgaagtctctctctgtcacccaggctggagttcagttgtg

SEQ ID NO: 556108 - DNA, 415 bp, Homo sapiens
atgaataataaatatgtgagccaatatttaacatttcctttgagttctaagctaggtgataaaaggaaatcttaatttaaaaatatttgaaatattttattattattttttgagatgaagtctctctctgtcacccaggctggagttcagttgtgtgatctcggctcactgcaacctctacttctcaggttcaagcagttctcatgcctcagcctctgagtagctgggattacaggtgtgcaccaccacacatggctaatttttttgtatttttagtacagatgaggttttgccatgttgaccacactggtcttgaactcctggcctcaactgatccacccacctcagcctcccaaattsttgagattataggtgtgagccaccatgcccagctgaaatatttttaaaatgttta

SEQ ID NO: 556109 - DNA, 640 bp, Homo sapiens
taataaaatgtacaaactcaataggatgactgaatactctaagatgtaacaaaatacccatggctgattaaaggcaaatttgctctaatcatgtgtctgcacttatcagaatgaagtctaaacaatatgcagtatatcttgaccagaaaacaaatatgaaaagctccactacacattgtggcagatgagattttctgagtggtaattctgatatttgatgtatgctctttattctttccaaataactttgattctgtgccagccaagatatagccctggaaaaaaaaaatacttcaaagcactaaaatgctgaaagaatcttcagtgtcaagtagaaaacaaaattgtgtccatatgccttacaaatagtttttatttcaaatccatacaaaacaaagtctcaatcttgttaaacctatgagatgtgcaggtatttattggtgttctttacatgtaatgctaattgatcacrtttgattaactttcaatacaatttttatgttgaaatggaatttaaataagtcatagaaagatcaccgatcaggatttgtccttttcttccttcacaattaattcagatttttaaaaacccaattatcacatattgccagggaaatgaagaagatattcaggaaagaat

SEQ ID NO: 556110 - DNA, 640 bp, Homo sapiens
taataaaatgtacaaactcaataggatgactgaatactctaagatgtaacaaaatacccatggctgattaaaggcaaatttgctctaatcatgtgtctgcacttatcagaatgaagtctaaacaatatgcagtatatcttgaccagaaaacaaatatgaaaagctccactacacattgtggcagatgagattttctgagtggtaattctgatatttgatgtatgctctttattctttccaaataactttgattctgtgccagccaagatatagccctggaaaaaaaaaatacttcaaagcactaaaatgctgaaagaatcttcagtgtcaagtagaaaacaaaattgtgtccatatgccttacaaatagtttttatttcaaatccatacaaaacaaagtctcaatcttgttaaacctatgagatgtgcaggtatttattggtgttctttacatgtaatgctaattgatcacgtttgattaactttyaatacaatttttatgttgaaatggaatttaaataagtcatagaaagatcaccgatcaggatttgtccttttcttccttcacaattaattcagatttttaaaaacccaattatcacatattgccagggaaatgaagaagatattcaggaaagaat

SEQ ID NO: 556111 - DNA, 627 bp, Homo sapiens
gcaggcattacataaatagttgttgaatgaatgaattaaaaagcaaatgattaagagaataaaatagaaaatatcaacttaatgaaagtttttattgtctcatacacatcattaaaaatgccaaactactgtcactttgtccaatttttcaagaacaatrttctttcctttctaggtttacatgaagtaatttcaagtaggaaaattttattctattaatacagaaggaaaccagtagtcacataagtgagccttctaaacaaatgatgtttgatagaactttgagaaatgtacgtattatatcaaaataatttttacctgtgtcatttgtcatattattaaacatagattccttgcctttcctctgttgatactatgtttataaacatactctactgataataaaattctcatcaaaatatagccctaagatttacctacagctttgatgttttatattctgatgataattaagtagaaacatttaaattcttgcatatttcaaaatggactcccgaaaacagtcacacagaaatttttagcacatacttaagcttctttcatgaaggctgtttttaaaaattacaatatatgttctagagatcagcaaaaacagcagagaatcct

SEQ ID NO: 556112 - DNA, 586 bp, Homo sapiens
tatgctcaaaactctgtctggatgcttatttccctcagagcaaaggccaccattttaaataatctgtgacaccctctatgacctgacttcaccttcatttctctgttctggtttcctgctattctgcccaatttgcattctgctgcaatcacattaacttccttaaatacagcaggagtgtgcctgcattaaaatctttatactagctcttccacctgactgaaatgccacacccctgaaatctgtatagtcaattccctttcacagctagtttctctgttccttgaggttttcattcaaatgtcagcattttaataaagttttccttggccctccgactcccgtttactactgcaaaactctcacaatcacaaactcctatctatttctaytgtcttctttttcccataccatttatcactacatagcatagttttttctttatttccttcatccctcccttctatttatctctccctctcttctattttctctcttttttctttatttcaagttcattttttattgcctaataaaaattaactttttttttccttttttttcccccgagatggagtcttgctct

SEQ ID NO: 556113 - DNA, 566 bp, Homo sapiens
atttaactccctttccttgaagaacaaaatgaaagcaaaaatgaaatcaccttctagaattcctttttgatatacgaggcagaactcccgcttgtgacaggttcccagaaaaagaggacagtcactttaagtgaaaattatctaatccccatcgcctttaatgtcggatcgatkcaagagcagggatttacatatctgcccaaggacctgacagccaagggttatgaaggagacacagaaatcacatttaatcatttgcatgtgataaatctataagctttcaaagcagtctacattgactaaatatggcaaaaattattttaaaaacagtaacaccaaaaataatcggtactatgcatgaattgtttactacgtgccaggcacttcgctaagagcttaatatactagcccatctcatttaataatcataacaggaataagggaaagggggctgggtgctggtgtaatcctagcacctcacgcctgtaatcccagcactttgggaggccgaggcaggtggataacttgaggtcaggagttcgagaccagcctggccaacagggtga

SEQ ID NO: 556114 - DNA, 558 bp, Homo sapiens
tactggaccctctgcttagaagccatcccatctccaaatcttttgaaatgattattccttcacttcttctgacctcacctttatcggtaaatcctcggggaggttttttctgaacatgctgtctctaaggcatgttaatccctgtttttcttctataaacaacaatttattcaactggtatttactgggtgtctatgcgccagatactgtcttaagtgctattctttcctgctttttgcatttattccaatttgtgactatatttcatatttaattcctgcctccccaattgaactacaaactcattaagagcaagagccaggcatgttttgttcaccattgtatcctttctgatatgtgccaggcaatcaaaacatatttgtagaataaaagtttaatgtcagcaaactatygcaaggacaaaaaaccaaacaccgcatgttctcactcataggtgggaactgaacaatgagaacacatggacacaggaaggggaacatcacacaccggggcctgttgtgggatgcggggagcggggagggatagcattaggagata

SEQ ID NO: 556115 - DNA, 558 bp, Homo sapiens
tactggaccctctgcttagaagccatcccatctccaaatcttttgaaatgattattccttcacttcttctgacctcacctttatcggtaaatcctcggggaggttttttctgaacatgctgtctctaaggcatgttaatccctgtttttcttctataaacaacaatttattcaactggtatttactgggtgtctatgcgccagatactgtcttaagtgctattctttcctgctttttgcatttattccaatttgtgactatatttcatatttaattcctgcctccccaattgaactacaaactcattaagagcaagagccaggcatgttttgttcaccattgtatcctttctgatatgtgccaggcaatcaaaacatatttgtagaataaaagtttaatgtcagcaaactatcgcaaggacaaaaaaccaaacaccgcatgttctcactcataggtgggaactgaacaatgagaacacatggacacaggaaggggaacatcacacaycggggcctgttgtgggatgcggggagcggggagggatagcattaggagata

SEQ ID NO: 556116 - DNA, 203 bp, Homo sapiens
atgacatttaacaaaattcaaaatgcagaacagaggcacattgtttatttagtaaaatcctacaaggaawgaaaactttatcactagatgcaatgaaatctggcaatgaccaaattgtgtgtttggattctttctagtttgatcttctaggaagacggttaattttttgtcacaagaaagaaaagagcaacagaaacaacaaa

SEQ ID NO: 556117 - DNA, 203 bp, Homo sapiens
atgacatttaacaaaattcaaaatgcagaacagaggcacattgtttatttagtaaaatcctacaaggaatgaaaactttatcactagatgcaatgaaatctggcaatgaccaaattgtgtgtttggattctttcwagtttgatcttctaggaagacggttaattttttgtcacaagaaagaaaagagcaacagaaacaacaaa

SEQ ID NO: 556118 - DNA, 203 bp, Homo sapiens
atgacatttaacaaaattcaaaatgcagaacagaggcacattgtttatttagtaaaatcctacaaggaatgaaaactttatcactagatgcaatgaaatctggcaatgaccaaattgtgtgtttggattctttctagtttgatcttctasgaagacggttaattttttgtcacaagaaagaaaagagcaacagaaacaacaaa

SEQ ID NO: 556119 - DNA, 660 bp, Homo sapiens
tccatatttttgataggtatagaggacaagggaaaaatatctttctaaattgaaagcaaacaagacaaggtataactatgtaagaagtttttactgtaatcataacatacccttcatcagcaggcaagaaaaagatcaaaatgtgmtgcttcttcctgggcagactatttcacctctttttgggcagtctgaatccttcctcttttggtccaatccaacacttctccatatgctattatatattagagattttggttaaaatgtggtccaaaatataactaattatttaaaagaaaagacttacaaatttgtttgttcatcttaactcattatttcacacttcacacactgcaatgcattttctgttatggggttttagcttgtgtttttttgtttcctttattaaaaattgtattttacatacatgactcagttccctttctgtatctatagggaaacagtttgaactctctgcaggacctcagatacagtgattttccctcaatttactcctctgttaataaaataaatttgaattgtcattaggtggatttcaaattttcttttagtcaagagaactttattcaaaaaatatttccaggaagactaatattcaatagaaaaaacacataggttgtcttactgaacgtgtgtcacctg

SEQ ID NO: 556120 - DNA, 660 bp, Homo sapiens
tccatatttttgataggtatagaggacaagggaaaaatatctttctaaattgaaagcaaacaagacaaggtataactatgtaagaagtttttactgtaatcataacatacccttcatcagcaggcaagaaaaagatcaaaatgtgctgcttcttcctgggcagactatttcacctctttttgggcagtctgaatccttcctcttttggtccaatccaacacttctccrtatgctattatatattagagattttggttaaaatgtggtccaaaatataactaattatttaaaagaaaagacttacaaatttgtttgttcatcttaactcattatttcacacttcacacactgcaatgcattttctgttatggggttttagcttgtgtttttttgtttcctttattaaaaattgtattttacatacatgactcagttccctttctgtatctatagggaaacagtttgaactctctgcaggacctcagatacagtgattttccctcaatttactcctctgttaataaaataaatttgaattgtcattaggtggatttcaaattttcttttagtcaagagaactttattcaaaaaatatttccaggaagactaatattcaatagaaaaaacacataggttgtcttactgaacgtgtgtcacctg

SEQ ID NO: 556121 - DNA, 660 bp, Homo sapiens
tccatatttttgataggtatagaggacaagggaaaaatatctttctaaattgaaagcaaacaagacaaggtataactatgtaagaagtttttactgtaatcataacatacccttcatcagcaggcaagaaaaagatcaaaatgtgctgcttcttcctgggcagactatttcacctctttttgggcagtctgaatccttcctcttttggtccaatccaacacttctccatatgctattatatattagagattttggttaaaatgtggtccaaaatataactaattatttaaaagraaagacttacaaatttgtttgttcatcttaactcattatttcacacttcacacactgcaatgcattttctgttatggggttttagcttgtgtttttttgtttcctttattaaaaattgtattttacatacatgactcagttccctttctgtatctatagggaaacagtttgaactctctgcaggacctcagatacagtgattttccctcaatttactcctctgttaataaaataaatttgaattgtcattaggtggatttcaaattttcttttagtcaagagaactttattcaaaaaatatttccaggaagactaatattcaatagaaaaaacacataggttgtcttactgaacgtgtgtcacctg

SEQ ID NO: 556122 - DNA, 638 bp, Homo sapiens
tcaatatcgcttagaagcaccttccttttttattaacatcattgttttggaagtttttagttcatttaaattaaaaattattgttttaattatttaaaaaattatgtcccagatatattagctttttgatgttttttcctattttgccaggatgtagaaattatatctttacagttgttgaaatttgattaactcttacatgttatctttaacaaatattatcatgaagactattctctgacaaaaagtatattttgtccatttaattctcctagcttgcaaaatgtacagtattctaatagttatctccctagtaaaggctatgtcaggagagagggcaccttgatattgataacacattttgttttggaaagaagatataaagtcagtgacatacagtgtgagaggcctgtgaatatgaaagtaaaaaggaaataattacttgattgcagacatactgttagttatctctgtcataatctccttttccatttaaaagaaagtattcttactattataggtaatgcattttgccaagcaaaggggatagaagcaggaatcttatataaatccttcctatgcaaacacgtatgtttttcctacaactgaaagamataactacctttgatagtactagt

SEQ ID NO: 556123 - DNA, 468 bp, Homo sapiens
taatggatggttgtgaggatgaagtgagataatatatggtgcatccttcaractgtccctgacatgaggtaagcaccagatatgtgtttgctgtcatttcacaatatacccatttctaagttacttgcacatatgtgtggacagtgggatgtggaagagtaaactggaacatgaaattgggagttgagaattccaagacctgaatctgattctgctgtgagtcagtgtgcaaggtgactgcaaatcactatggtgtcttgggatcatcaaattttaggatttaaaaattttcatattaccctggcattttacttatggatgagcaagtcaggaagtccttagagcttaaaattactcaccctctagcacacattgctagggcagagccggccttggaagccagtgcagtgtcttgcttcttaagccagtgtttcccaaagtgtggtatgttgttgtgtttaaaaccat

SEQ ID NO: 556124 - DNA, 468 bp, Homo sapiens
taatggatggttgtgaggatgaagtgagataatatatggtgcatccttcaaactgtccctgacatgaggtaagcascagatatgtgtttgctgtcatttcacaatatacccatttctaagttacttgcacatatgtgtggacagtgggatgtggaagagtaaactggaacatgaaattgggagttgagaattccaagacctgaatctgattctgctgtgagtcagtgtgcaaggtgactgcaaatcactatggtgtcttgggatcatcaaattttaggatttaaaaattttcatattaccctggcattttacttatggatgagcaagtcaggaagtccttagagcttaaaattactcaccctctagcacacattgctagggcagagccggccttggaagccagtgcagtgtcttgcttcttaagccagtgtttcccaaagtgtggtatgttgttgtgtttaaaaccat

SEQ ID NO: 556125 - DNA, 468 bp, Homo sapiens
taatggatggttgtgaggatgaagtgagataatatatggtgcatccttcaaactgtccctgacatgaggtaagcaccagatatgtgtttgctgtcatttcacaatatacccatttctaagttacttgcacatatgtgtggacagtgggatgtggaagagtaaactggaacatgaaattgggagttgagaattccaagacctgaatctgattctgctgtgagtcagtgtgcaaggtgactgcaaatcactatggtgtcttgggatcatcaaattttaggatttaaaaattttcatattaccctggcattttacttatggatgagcaagtcaggaagtccttagagcttaaaattactcaccctctagcacacattgctagggcagagccggccttggaagccagtgcagtgtcttgcttcttaagccagtgtttcccaaagtgtggtawgttgttgtgtttaaaaccat

SEQ ID NO: 556126 - DNA, 549 bp, Homo sapiens
ggattccccggacactcagccagttcttctcagtgcacctgctggtgaagcatttccacttagtgctaaggaaggctggagtggagatragagggcaaaaacaaatcaaataggaaaaaagccccaccactaagccttcttctctcaaaatccctcgaaaacgtgtgctatataaatatatgacctcagttataaacagccgtgttctctttagaatcagaagcaactgtttagctttattaggcaccacagacacatcaaagcagagggctctgtgctcagcaacttggagtcctgcctatggctatttattttcctttccttttttttttttttttgaacgaagcttaagttttttctttttaactttcttccccttgttggttaaaggctgcacaaatttggcttgctctctgaggtcttcaattaaaaaaaatgtgggcagtatgtgactcaccgccttggttttcagtgcagttttatttcattaaataacagtttaaatgaagtagcacaagacagtatttcattacactgctgtatgtgggc

SEQ ID NO: 556127 - DNA, 549 bp, Homo sapiens
ggattccccggacactcagccagttcttctcagtgcacctgctggtgaagcatttccacttagtgctaaggaaggctggagtggagataagagggcaaaaacaaatcaaataggaaaaaagccccaccactaagccttcttctctcaaaatccctcgaaaacgtgtgctatataaatatatgacctcagttataaacagccgtgttctctttagaatcagaagcaactgtttagctttattaggcaccacagacacatcaaagcagagggctctgtgctcagcaacttggagtcctgcctatggctatttattttcctttccttttttttttttttttraacgaagcttaagttttttctttttaactttcttccccttgttggttaaaggctgcacaaatttggcttgctctctgaggtcttcaattaaaaaaaatgtgggcagtatgtgactcaccgccttggttttcagtgcagttttatttcattaaataacagtttaaatgaagtagcacaagacagtatttcattacactgctgtatgtgggc

SEQ ID NO: 556128 - DNA, 572 bp, Homo sapiens
tcctttccttttttttttttttttgaacgaagcttaagttttttctttttaactttcttccccttgttggttaaaggctgcacaaatttggcttgctctctgaggtcttcaattaaaaaaaatgtgggcagtatgtgactcaccgccttggttttcagtgcagttttatttcattaaataacagtttaaatgaagtagcacaagacagtatttcattacactgctgtatgtgggctttattcacctttattacagctgcatttctgttgtgaggttttttataaaactctgagctagaaaattagtgaagattgtacttgtccacttagtaagagatagtttggttctgtaatgggtacccagggagctatwgaggcaaattctgaatttgggaaaacaagaaccccctaagaggaaggtgggcacgggtaagtcattgcctatctgtcaatattaagtgggttttttacaactccccctttcatgacggcgcttacactatgagctctctctgccgatctgttttcgattacttcagatctttacaaaatgaaatacaaaagcccaatttt

SEQ ID NO: 556129 - DNA, 506 bp, Homo sapiens
agaatctcttcgagacagcagattgggcaagagacgggctttttttcgcaatacaaggataaacacatcctgaaactccagatagaaacctcaggaatgggcgagagggtcagaaggaacgagagacagtagggaagagagagagagagacagagacagagggagagatgcagagagactgaaacgggaggaagaagcctggaactgtcggttccgtggagagcggacatgctatctgcgcccagatccgaaggctttttggggagcctagagtcctggcccggtaccaggcagatctgggtgcggcgaattccaagggagcggcgcgggttctcttctcctcctcctctgagttgcttcggtgcccccaaggcatcaccttcctcgaaggtggcttacccaggcgggcggtgatgctgttgtctcgggagtttactcaaagatgggccgstcggggcggccggattaacccgctcccttcccttcctccttcttgtctcccgcag

SEQ ID NO: 556130 - DNA, 574 bp, Homo sapiens
agaaagggggacacaggagagaaagtcagaaggtaaaacaggttagagtttcaaacaagtccaaatttgaaacaggcccttgaatctgaggtccaaatgattttttattcaatggactgaatatttggccatgaaaccccrgatatttcaacctccatccaagagactttgtgtctgtattcatgagctttttcatgtgagataccatcaaaagtctatgccttgatataaaggaaagaaatccgtagatcctcagggatcccagcctcaccatttattttgttttatttattttttttaaccactgtgttattcacatttaacacagaaaaaaaaaatctgtctgacctggcaaagtagaaatcagcactaaagacaaaaaacacacccatgagggtccaggaaccatggaattattattacttgattttgttctgttaagcaaaatcaaaaatctcttcctcctttttcccaggctactgactttttcttttcctgaataaattcgaagagaagcagctgttggaatctaaatcaaccaacattttgttcaggaactttataaacatttggg

SEQ ID NO: 556131 - DNA, 565 bp, Homo sapiens
atggagtcctaaaatttctgtctctctgtgattaaaatgaatgatcaatgtatgatctaatttagagcaaggaggcctcctcattgttaaattatctcaataataaaagtgaattctgaatgttttcctgggatttaatgttaatcttttattttttaaatttccatgcttctttttactgttcaagatgaatgaagaggaagattataaatttcgtgtaatactaaaatggttttatttcatatcttgtgtttttttttttcctgtgggagaaagagggggagtagattgtgactttatgatgaaacgaacagttggccyccttaaaaaatcatttttccctccaaactttcaactactttggaatttccaattcaatttttaaaatgtgaaaaatgctttaggtaatttcgtttgagtcaacaaaactctggcattttctttctttctttttttttttttttgagatggagtttcactcttgtggcccaggatggagtgcaatggtgtcatctcggctcactgcagtccccgcctcccaggttcaagagattctcttgcctca

SEQ ID NO: 556132 - DNA, 603 bp, Homo sapiens
atctcatgggcgtggtcccttctgaagcagcctgactccaatgataggctgttataggtgtgaaaaggtcgggccccctgacctcaattcaggaactctgaaggacccaccyactctagagcactctgtaggaaccagtccaggcctctgttggatctgtattgctgcccagcaactcctcctgcccgatcttgtttctctcgctctacccactggtgtggatcccaagagcacatccccataaatttcctgcctgccattcttcttctcagagtctgcttctaggaaactaacctactacagcagggctttttaaatctgggaagaaatcttgaacatggatgggaagaatcaatactcaaatactcagagcccagtctgagcagataaagctccttggatcaatgtaaacttttgaattatgtagcttaaagaaaaatccagttgtacaaatataagatgtaggctgggagtggtggctcatgcctgtaatcccagcactttgggaggctgatgtaggaggatcacttgagttcaggagtttgagaccagactgggaaacatagagagaccccatctctacaaagaatgtaaaaagtgtgg

SEQ ID NO: 556133 - DNA, 603 bp, Homo sapiens
atctcatgggcgtggtcccttctgaagcagcctgactccaatgataggctgttataggtgtgaaaaggtcgggccccctgacctcaattcaggaactctgaaggacccacccactctagagcactctgtaggaaccagtccaggcctctgttggatctgtattgctgcccagcaactcctcctgcccgatcttgtttctctcgctctacccactggtgtggatcccaagagcacatccccataaatttcctgcctgccattcttcttctcagagtctgcttctaggaaactaacctactacagcagggctttttaaatctgggaagaaatcttgaacatggatgggaagaatcaatactcaaatactcagagcccagtctgagcagataaagctccttggatcratgtaaacttttgaattatgtagcttaaagaaaaatccagttgtacaaatataagatgtaggctgggagtggtggctcatgcctgtaatcccagcactttgggaggctgatgtaggaggatcacttgagttcaggagtttgagaccagactgggaaacatagagagaccccatctctacaaagaatgtaaaaagtgtgg

SEQ ID NO: 556134 - DNA, 543 bp, Homo sapiens
tgttgtataattttgatgttcttaaatttgttgagacttgttktgtagcctaacatttagagaatattccatgtgcagttgagaagaaagtacattttatagctgttggaaggaatgttttgtaaatgttcattaggtccatttggtctacagtacagtagactaaatgctgtatttttaatctgggtgatctttgctgatatttaatctgggtgatctgtttattgctaaaactagggtgaggaagacccctactattattgtattgtggtctgtctctccctttagatctattaatatttgcttacatatttaggtgctccaatgttgggtacatatatatttacaggtgttatctgcccttgcagaattgaccttctaattatataatgacctttatttttacagtttttgatttaacatctgttttatttaagtatagctactcctgcttccttttggtttctgtttgcttgaaatatcttttccagtttttcactcagtctatgtctgttcttataagtgaagtaagtctcttgaagg

SEQ ID NO: 556135 - DNA, 662 bp, Homo sapiens
agcaatagtgagaatctgaaattaccacaagtgctccttatgtcagaagccccagactgtaaggcagcaggggatggggtgggcatgtcggcaaaatgacggtatacctactatgtacccattaaaattaaaagtttgaaaaaaaaagtacagtacaaaaagcaggagcctgtagctgattctgcaaaaatttcactttgggcccttgaataatgattttacctcttttgattttctttttcccacttgtaaaacaataggattaagacagagtgagatttttaaaacactttttttatttttatagctttagaggtgcagtggcttttggttatgtggatgaattatataaaagcaaatcttgagattttagygcactcctcacctgagtagtatatattgtacctaatatgtaattgtttatcccacaaccctctagagtagtttcttaaggtgtttatttactcactgcaatgaggaaaacatttctgcacatgaacaccaaaaatatatattttttacttacccataaattatatacataagctacgctaacatatatagtataaaacataccacaagtaaaacttttaaaataatttgaattttggccaggcgcagtggctcacacctgtaatcccagcactttaggaggctgaggc

SEQ ID NO: 556136 - DNA, 662 bp, Homo sapiens
agcaatagtgagaatctgaaattaccacaagtgctccttatgtcagaagccccagactgtaaggcagcaggggatggggtgggcatgtcggcaaaatgacggtatacctactatgtacccattaaaattaaaagtttgaaaaaaaaagtacagtacaaaaagcaggagcctgtagctgattctgcaaaaatttcactttgggcccttgaataatgattttacctcttttgattttctttttcccacttgtaaaacaataggattaagacagagtgagatttttaaaacactttttttatttttatagctttagaggtgcagtggcttttggttatgtggatgaattatataaaagcaaatcttgagattttagcgcactcctcacctgagtagtatatattgtacctaatatgtaattgtttatcccacaaccctctagagtagtttcttaaggtgtttatttactcaytgcaatgaggaaaacatttctgcacatgaacaccaaaaatatatattttttacttacccataaattatatacataagctacgctaacatatatagtataaaacataccacaagtaaaacttttaaaataatttgaattttggccaggcgcagtggctcacacctgtaatcccagcactttaggaggctgaggc

SEQ ID NO: 556137 - DNA, 592 bp, Homo sapiens
cagcttaaaataatgggttataagatagtatgttctggcctcatggtaacctcaaaccaaaatacatacaatggatacacgaaagataaaaagcaagaaactaaatcatgtcttcagagaaaatcatcttcactaaaaggaagacagaaaggaaagaaataaggaagagaagatcacaaaacaactggaaaagaaataacaaaacggcaggagtaaatccttatttatgaacaataatatggaatgtaaatcaactaaatctccaatcaaaacamagactggctgaatgaatttaaaaaaaaaaacataatctgttgcctccaagaaacacacttaacctataaagacacacacagactgaaaataaagggatgaaaaaaaaagatattccatgccagtggaaaccaaaaaagagcgagaatagctatacttctacccgataaaataaatttcagtgttcatgtaagtgtaaattaatacagccactatggaaaatgttatggagatttctcaagaaaccaaacatagaactactatataatctgccaatcccactattggatacttataccaaggaaaagaaatcagtata

SEQ ID NO: 556138 - DNA, 622 bp, Homo sapiens
aagaaagatgttcccagacaaacaaaagctgagggatttcatcaacaccagacctgtcctacaagaaatgcttaagggagtttttcaatctgaaagaaaatggtgataatgagcaaaagaaatcatctgaaggtgcaaaactcattggtaaaaattagcacacaggaaaacacagaatattataacactgtaattgtggtatgttaactactattatcttaagtagaaagactaaatgatgaaccaattaaaataataacctcaacaacttttaaagacatagttcaataagacataaagcgaaacaacaaaaaaaatttaaaagtgggaggatgaagttaaagtgtagatttgttgttttctttttcatgttgatttttttgcttatgcaatcattgtgaagttgtcatcagtttaaagtaatgggttataagatagtatttaaaagcctcattgtttttcaaatcaaaaaacatacaacagatacacaaaaggtaaacagcaagaarctaaatcgtaccatcagagaaaataaccttcattgaagggaagacagggaggagggaaaaaagagacgacaaccaaacaattagaaaacaaatcacaatgtggcaggagtcag

SEQ ID NO: 556139 - DNA, 446 bp, Homo sapiens
gaaaacaaatcacaaagtggcaggagtcagtccatatatatcaataataacatcgaatgtcaatgaactacactgcacaatcataagacatagagtagttaagtggataaaacaagaaaacacattaatctgttgcctaaaagaaacacactttacctataaaggcacatatagactaaaaataataggatggaaaaagatattttatgccaatagaaaccaaagaaagatcaggagcagctatacttacatcagactaaggagatttcaagataaaaactgtaagaagaaccaaaggtggtcatgatataatgataaagggktcaattctgcaagaggatatatcaattgtggatatatattgacccaacatataggtgaagtgtgtttcttgtaggcaacagatcaatgtgtctccttttttatccactcatctactctatgtc

SEQ ID NO: 556140 - DNA, 569 bp, Homo sapiens
ggaccactactgccactgttggcatctgagaaagccacctggaggcctaagaattggctcacctcaagctgctaacagtagtgcccacctgggggcccaaagacaaacaggcttggcctgccgctgccactatggggccagaggactagtccacctcatgtctccatccccacctcaggcttggaaaagcctcaaatctgccaagaaccctatgcccagtaatatggtttgactgtgttcccacccaaatctcatcttgaattcccatgtgtcatgggagggagccagtgggaggtaattgaatcatggagatcatgggggtgggtctttctcatgctgttctcgtgatagtgaataagtatcacgagatctgatggttttataaagaggagttcctccctacaagttcactctctttgcctgcctccatccatgtaaggcctgacttgttcttccttgccttctaccatgattgttgggcctccccagccacgtggaactgtaagtccattaaatctcactttcttcccagtcytgggtacatctttatcagcagcatgtaaacagac

SEQ ID NO: 556141 - DNA, 545 bp, Homo sapiens
taaacaataactccccattggattctcccctcagccccaggaaaccacaatttttctttctctatctatgaatttgactactctacgtacctggtataaatgaaatcatatattatttttcttcttgtgactggcttatttcacttccataatgtcctcaatgtttcttcatgttgtagcgtgtgtaagaatctgatttttagtgttggataatattccactgtatgtatatagcacattttattcatccattcatctgtttatggacgattgggttgcttctacctttttgccaaatttatttatgcaccttcygtaaggttgctgctgctttctgtcacagcttcagctgattcctgctgcacatatttttttatgattaaaaattataggttaaataacaaatatttaattcccacaaacagagaatgaagtgatggatttcactcatcacacatgggattattttgtgtgttccagataactgattttggaggagtcagttgaaatgtcctagagaaaggaaattagggccttggatttca

SEQ ID NO: 556142 - DNA, 511 bp, Homo sapiens
aacagtaagcaggtaaccatgatctccccacatggacaaagtgaggaacaagtgactgatcctgatgagatggtgatgtgtgagctctctaatcaagaattcaaaactgcagttttaaggaaactcaatgatcttcaagaaaacatggaaaagcagttcagaaatttatcagagaaatttaacgaagggattgaaataatttaaagaaaacaaacaggaatcttggaattgagaaatatatttgctgaacaggaaaatttattagagtctctcaacagcagaatggatcagaggaaagaatcaacccaaataagactcccccaaggcataaaataatcgaattctcaaaagtcaagggcaaagagaagattttaaaacagaaagagaaaagaagcaaatggcataaagaagctccaattctgtggcaacagattttcagtggaaatcatacagaccaggagggagtgacatgacattytcaaaatgctgaaaaaatattgacatttgagaa

SEQ ID NO: 556143 - DNA, 571 bp, Homo sapiens
agatctcatggttttataaagggcagttcccctgaacaygctctcttgcctgctgccatgtaagacgtgcttttgctgtgccttcaccctccaccatgattgtgaggcctccccagccatgtggaactatcaattcatttaacttattctttgtaaattaccctgtcttgggtatttcttcatagcagtatgaacatggactaacacaccttataagaggagggaagatttgagatgcacagacacaaagatacaggggcagggttgggggaggggaatggcatactgaagacaaagatacagattggaatgaatgatatgttcacaagtcaaggaacaccaaggattgcccatcgctatgggaaactaggagaatggcttggaacaccttctccttcagagcttccagaaggtatcaaccttggcaataccttacttgcagacttcttgactctccagctctgagagaaaaaatttctgttgtttcaagccatcacatttgtagtaatttgtgacgggatcctcaggaaactaatgcaatatgtaatgggtttattgtttattttaaatg

SEQ ID NO: 556144 - DNA, 575 bp, Homo sapiens
aatgtcccttccaggcagctgtgcttctagttaaaatgtgggcttaaatgtgcctttttttttctttttttttttttttttgctgcctttgttcagctcacatgcaaaggagaaagtgttaaaatcgtatcaagaagccaactttcctacttcactgtattgctatgatggttaattttatttgtcaacttagctgggccatggagtgcccacatatttggtcagacattattatgggtgtttctgttctaagttggggtgtttcrggaagagataaacatttaaattggtaaattttaacatgagagtgacatttgaattgctggagtaaagaaaattgccttccataatataggtgggcctcattcagtcagttgaaggcctgaatagaacaaaaagaccaacttgcccctgagtaggagagaattttccagtagacctgcccttgaacttcatctgtaccattgactctcctgggtcttgagcctgctaacctgcactgcaggtgtagacttcccagcctctacaatcctgtgagccaattccttatcataaattatatatataattatgga

SEQ ID NO: 556145 - DNA, 569 bp, Homo sapiens
caccccctcccatagggcgtggctcctatggatggttgggggtaaaatgcactaagtggctttcatgctttctttagtgacctcagcaaatggaaccatctactattggttttcaaactgtgctttactcctctttctatagccaggagataaactagagaggttaagtcacttacccaasatcagaagaaaatcagtcatcaagcaggggcgtgtttttccataaacatttatttgagcacctcctacaaaccaggcccactggtagaagttgggggttgaacagaaaatgagacagacaaggctcctggccccacaaagctggtgataaggtgatgtcatatggcagtttgcagtatatatatatatatatatatatatatatatatatattgatcccatacacaacccataaccaaagaaaaattgagtatttaccatgataaacagaaatatacctttaaaatatgacattaaaagtacatttaataaggagtccaatagtttcttcctgtacccccaaaagatcatcttcagtgcgtcctggggtatatccatcccacttagaa

SEQ ID NO: 556146 - DNA, 539 bp, Homo sapiens
gtgactcaaatacaactttagaacactttatggaaacagtaggattttttaaagtaacaggctgatttagtgggtggactgaccaatgacaccaagcagaggcaacaactcaaaacatactgagggatgaacacatagaacgacatgtgtcccacacaccacaactgaagatattgcaggtgggttgcactgtctctacttatgaaaagtgattcatctagcatggcacattcacatttcatgaacyggcgtgacttttatctgtattatcatccatttatttacctgggtgtctgaaaccttttattcaaatgaatgaaatgttgcaattgctgcaacacacgaggtacttgatatttgctatctctttaaacggcacagcaaccattttatttagatatacctatccccattttacagataaggaatcaaataaagaaacttttcttaagattacataaaagcattaaaaacaagattacataaaagtagcagagcctagatttggatcaaaatatcaggctttaaatccagatttc

SEQ ID NO: 556147 - DNA, 593 bp, Homo sapiens
atttcatgaaccggcgtgacttttatctgtattatcatccatttatttacctgggtgtctgaaaccttttattcaaatgaatgaaatgttgcaattgctgcaacacacgaggyacttgatatttgctatctctttaaacggcacagcaaccattttatttagatatacctatccccattttacagataaggaatcaaataaagaaacttttcttaagattacataaaagcattaaaaacaagattacataaaagtagcagagcctagatttggatcaaaatatcaggctttaaatccagatttcaccgatacatgttatctccttgtgttttccttccatgtgttctcctatttttttaagcagcatattaatttcctaccatttaaaacagaactcagattttaagaatttaaaaagcactctatgtacagcttccttattagccaaattttggaaagttaaattttatctccagtaagaagatacttcaaaaatagatgaataaatttccaactcttaatcaaggtaaaatttcatgacctctctttctgtgttcacccccttcttcttataccccagtgttttttatgtg

SEQ ID NO: 556148 - DNA, 587 bp, Homo sapiens
ctttatggaaacagtaggattttttaaagtaacaggctgatttagtgggtggactgaccaatgacaccaagcagaggcaacaactcaaaacatactgagggatgaacacatagaacgacatgtgtcccacacaccacaactgaagatattgcaggtgggttgcactgtctctacttatgaaaagtgattcatctagcatggcacattcacatttcatgaaccggcgtgacttttatctgtattatcatccatttatttacctgggtgtctgaaaccttttattcaaatgaatgaaatgttgcaattgctgcaacacacgaggtacttgatatttgctatctctttaaacggcacagcaaccattttatttagatatacctatcccyattttacagataaggaatcaaataaagaaacttttcttaagattacataaaagcattaaaaacaagattacataaaagtagcagagcctagatttggatcaaaatatcaggctttaaatccagatttcaccgatacatgttatctccttgtgttttccttccatgtgttctcctatttttttaagcagcatattaatttcc

SEQ ID NO: 556149 - DNA, 593 bp, Homo sapiens
atttcatgaaccggcgtgacttttatctgtattatcatccatttatttacctgggtgtctgaaaccttttattcaaatgaatgaaatgttgcaattgctgcaacacacgaggtacttgatatttgctatctctttaaacggcacagcaaccattttatttagatatacctatccccattttacagataaggaatcaaataaagaaacttttcttaagattacataaaagcattaaaaacaagattacataaaagtagcagagcctagatttggatcaaaatatcaggctttaaatccagatttcaccgatacatgttatctccttgtgttttccttccatgtgttctcctatttttttaagcagcatattaatttcctaccatttaaaacagaactcagattttaagaatttaaaaagcactctatgtacagcttccttattagccaaattttggaaagttaaattttatctccagtaagaagatacttcaaaaatagatgaataaayttccaactcttaatcaaggtaaaatttcatgacctctctttctgtgttcacccccttcttcttataccccagtgttttttatgtg

SEQ ID NO: 556150 - DNA, 605 bp, Homo sapiens
aacctccacctatatttcagaggatgtatggaaacacctagatgtctagggagaacttgcctgcaaggatggagcactcatggagaaccttttctagggcagtgcagaagggaaatatagggtcagagcccccacacagagtccccactggggcactgcctagtggagctgtgagaagatggccacggtcctccagtccccagaatgatcgattcaccaacagcttgcactgtgcacctggaaaagctgaaaacactaaacgccagcctgtgaaagtaacaagcaactgtgagtccattaaacctcttttctttcttttttttttttyccaagacagagtctcactctgtcacctaggctagagtgcagtggtgtgatcttggctcactgcaacctctgcctcccaggttcaagcaattctcctgcctcagcctcccgtgtagctgggattacaggcccctgccactgctgctagctaatttttgtatttttagtagagacagggtttccccatgttgtccaggcttgtctcaaactcctgaccttgtgatctgcctgcctcagcctcccacagtgctgggattacaggcatgagccaccacgcc

SEQ ID NO: 556151 - DNA, 569 bp, Homo sapiens
gaaagaaattcagagctagaagacaaggtcttcgaattaacccaatgcaacaaagacaaagaaaaaagaataagaaaatgtgaacaaagcctccaagaagtctgggattatgttaaaygatgaaacataagaataattggtgttcctgaggaagaagagaattctgaaagttaggaaaacttatttggggcaataattgaggaaaacttccctggccttgctagagccctagacatccaaatacaagaagcacaaagaacacctgggaaattcatcacaaaaagatcattgcctaggcacatagtcatcaggttatccaaagttaagatgaaggaaagaatcttaagagctgtgaggcaaaagcaccaggtaacctataaaggaaaacgtatcagaataacagcagatttctcagcagaaaccctacaagctagaagggattggggccctatcttcagcctcctcaaacaaaacaattatcagccaagaattttgtatccagtgaaaataagcatcatatatgaaggaaagaaacagtcattttcagacaaatgctgacagaattcacc

SEQ ID NO: 556152 - DNA, 631 bp, Homo sapiens
tcatgaagggcttatgcgatgatccaggagataattgagaaatttgggacgcttgttcttctctaccaaatctggcttacgttatttcagagccaagttgttgaccttttcttacttcttttgttaagctgtggtaccaaaaggcttatatattcaaacaattttagagaacctttttaccaagagaaaagtagggtgcttaaatttattgaatactgctgcatttaacctatttaattggaacacgttaattagatctaattgcaaagttgttttaattggaaaatcaagcattgcactgatattggtgtgcatgattaaacaaagtaactgaggtcaccagtagattgtataagattcaagcctgtgattgattaagtatgaaagytaatcaatttaatttatgtgattgatgttgattctttcattttgaaattgcctgtttgtatcttatttttatcaagatactgtgtgtggaatgtcaaataaactacagtaacacttcaatctgtttattttcgtataatgatgtgtttatttctgatctaagtaattttaacatggcttttgtgtcactaattaagattttcaagttactcaagataaaattaggttttctattaagaaaatt

SEQ ID NO: 556153 - DNA, 631 bp, Homo sapiens
tcatgaagggcttatgcgatgatccaggagataattgagaaatttgggacgcttgttcttctctaccaaatctggcttacgttatttcagagccaagttgttgaccttttcttacttcttttgttaagctgtggtaccaaaaggcttatatattcaaacaattttagagaacctttttaccaagagaaaagtagggtgcttaaatttattgaatactgctgcatttaacctatttaattggaacacgttaattagatctaattgcaaagttgttttaattggaaaatcaagcattgcactgatattggtgtgcatgattaaacaaagtaactgaggtcaccagtagattgtataagattcaagcctgtgattgattaagtatgaaagctaatcaatttaatttatgtgattgatgttgattctttcattttgaaattgcctgtttgtatcttatttttatcaagatactgtgtgtggaatgtcaaataaactacagtaacacttcaatytgtttattttcgtataatgatgtgtttatttctgatctaagtaattttaacatggcttttgtgtcactaattaagattttcaagttactcaagataaaattaggttttctattaagaaaatt

SEQ ID NO: 556154 - DNA, 562 bp, Homo sapiens
atttagattgtttccactttttggccattacatgcaatgactgctatgaacattgtgtacaaatatttgtgtgaacatatgctttcatttctcttgagtagataccaaggagtgaaatttgtgtattgtacagaaagcatgtctttaactttttgagaaactactaaattttgctccaaagtggctgtaccattttgtgttcctatcagtgatatatgagagttctagttgttccatatcactttgtcaacacttgctattatcagattttaacaatgttaaagaattttagccattttaatatatgcataggcatatctcattgtggttttaatgaccaatgatattgaatactgtctcctgtacttctttgtgtatcttcttttgtgaaggttatgttcaaatcatttgcycattatttatgcatatgcccatttacgtttttactggattgctttctcgttttgaattgtgagttctttacatgaaaggtcttcaaaaagttcatggaaaatggaattaaaagataaaaataaaaaataaaattcatttcttaatttaa

SEQ ID NO: 556155 - DNA, 556 bp, Homo sapiens
atataatttcaattttattaaatttattgaggctcgttttgtggcctataatgtggtctgccttgcagaagttccatgcgctgttgaatagaatgtgtattctctggttgttggatgaaatgtcctgtatrcatctgttaagtccatttgttccaatgtatagcttaaatccattgtttctttgttgactttccatcttgatgatcggtttagcagtatcagtggagtactgaagtccctcactattattgtgttgctgtctatctcatttcttaggtcattagtaactgttttataaatttgggagctccagtgttaggtgcatgtatgtttagaattgtgatattttcctgttggacaaggtcttttaccattatatggtgaccctttttgtcgcttttaactgttgctgcattaaagtttgttttgtctgctataagaatagctacccctgcttgcttttggtgtccatttgcatgaaatgcctttttccacccctttactttatgtgggtttttatatccttatgtcagtccttctcctgaaggcagcagag

SEQ ID NO: 556156 - DNA, 580 bp, Homo sapiens
aacactgtgaaaccccatctctaactaaaaaaacaaaaaaaaaaaattagctgggcttggtggcaggcacctgtagtccccactactcaggaggctgaggcaggagaatggcatgaacccgggggtggagcttccagtgagcggagatcgcgccactgcacgacagcctgggcgacagagcgagactccgtctcaaaaaaaataaaaataaattaaaaaaaaaaagaatatgcatttgccaaccagattggttttctccaaagacctatccaggccttagatacacgggtcaggagacaacaaattgttaccctagagacactcataatcagctgcctacttctttcccaagtcccatgcgggagtcaacatgatagtgatttagtaaaaatatagctgacaacaaccttttattttttacccctggaaaaatatctaaaaacttttatatgaaaaacatattttttaaagtttaagtataaaacatggtttcagattttattagcacttaatttggtctaggtawatgtattttttctctcttttggaggcatttattccttcagggttaagtaccttc

SEQ ID NO: 556157 - DNA, 532 bp, Homo sapiens
gagttcatttccttgccttttccagcttctaaagacttcccacatttcttgatttatggctctcatcctccagtttcaaagtcagcagtgtcacttatatctatctgatgccagctaggaaagattctccacttttgagaactcatgtaactagattgagcccatttggataatctggaataatttccctatctagaagtctgtacccttaattacatctgcaaagtttcctttgccatgtaaggtaatatattcacagattccagggataatggcatggataactttgggggccactattctgcccaccacagtccccaatggtggcccatagtcaatgactgacaggtacagaggtgtgaaaactacctctcctgtcagactgctctgagaggtaatttaccctccagaaacccctgaagggtcacactgcctcccctggagtttgtctgaatctcacccttgcttgatttcttctgctttctcattctgctttccctgattmtttacaagtttctcctgggaaaactct

SEQ ID NO: 556158 - DNA, 567 bp, Homo sapiens
catgtgtgtatatatatacatttatgtatatatacacacatatgtgtgtgtatatataatatatataatcacattattccatggtgtgtggaatatacacacatacacacacacaaacacacacatggaatagtgtggttataataatatattattaataatattattataaattatatctattatatatacacacacatatcatggaataatgtgattatatatattacatatagacacacacagacattccatggaatactatgcagccataaaaaagaatgaaatcctgtcttttgcaacaacatggatggaactgaaggtcattatactaagygaaatgactcacaaacagaaaaaagccacatgttctcacttataagtgggagctaaacaatgggtacacacagacatacagagtagaataaaagacattggagactccaaaaggagggagggtggaagtgggatgagggatgaaataccatctactgggtacaatgtacactattcagataatgggtacactaaaagcttagatttcgccactaagcaacatatgcatgt

SEQ ID NO: 556159 - DNA, 591 bp, Homo sapiens
aattaaatggaaaacataccatgcaacagaagaatcaacaaagtcaaaagttgtttccttgcaaagactatgaagttggtaagcctcttaggtgagacccattctcacatacacacacacacacacacacacacacacacacacacacaatgaaaagagggtcctcacacagattctacagacattgaaaacaagaaaccaaaacctaaactaaatattataaagaaggcatgagattctttttatwtttttaatccaccgggcgagtgcttttttttttgagacagagtctcacgctgttgctcaggctgaaagtcatactatctaggctcactgcaacctccacctcctgaactcaagcaattctcccacctcagcctcccaagaaaatggaactaaaagtctgcatcaccatgcccagctaatttttctattttttgtagagacagggtttcaccatgttgcctaggctgatcttgaatgcctagtgtcaagcgatctgcctgccttggcctcccaaaatgctggaattacaggcgtgagccagcacaccaagccagagagtgcttttaaaagactgaagataattga

SEQ ID NO: 556160 - DNA, 506 bp, Homo sapiens
gaacaagtagtagatgatagggtggaatggtgacaattatcattttcctccttcaatttggagggcaatatgaatgacaacttgccaattaagatcaccaacacatgaggattcagaaactaaactatgagtcaaaaataggctttctttagagttcatttaagtcaagagttttggtaaacaacaatgtcaattattggcttttatctatcataataatgatgagcctgccaatacaatacctatttgtgaaataaataacaagaaatcaacaaggacttgatgcaagcataacattcttagacasaagttagtaatgtagacaaatttctgaattctcagccaaccaacaaaagaaacgtttaattcacctattcaatccaaagagtctgaaaaaagcaaacacaacaataaaactaagaaataatgacactcttgtcctctcagtacaaatgaaaaggattctcaaaatacgatccatttaatttctttccctaacacaacaa

SEQ ID NO: 556161 - DNA, 506 bp, Homo sapiens
gaacaagtagtagatgatagggtggaatggtgacaattatcattttcctccttcaatttggagggcaatatgaatgacaacttgccaattaagatcaccaacacatgaggattcagaaactaaactatgagtcaaaaataggctttctttagagttcatttaagtcaagagttttggtaaacaacaatgtcaattattggcttttatctatcataataatgatgagcctgccaatacaatacctatttgtgaaataaataacaagaaatcaacaaggacttgatgcaagcataacattcttagacagaagttagtaatgtagacaaatttctgaattctcagccaaccaacaaaagaaaygtttaattcacctattcaatccaaagagtctgaaaaaagcaaacacaacaataaaactaagaaataatgacactcttgtcctctcagtacaaatgaaaaggattctcaaaatacgatccatttaatttctttccctaacacaacaa

SEQ ID NO: 556162 - DNA, 595 bp, Homo sapiens
agttctgtcccagggaagcaccatgactttacaagacaaatccactgaaaaccctcagtttcccatgaagtctatkgttctactcgggacccatactattattttccagaggccaccccagcagagctgagaggatcatctctgtgtatcccatttgccagagaagcgactaatttttagaaagaatacaggaagagaaataaagacctggctcagagctgttccccaacattataacattatacatcccacagaattgaccataatcccttgattatgattatgattgggagacccgagttgcagttcattcaagtctgatcacgtgaaattctccaaagacaatgggaggaattcacattttcttcaaaggataagaatttctttacacagtttcacctcctgtgtgagctaaaagctgtttcaggtgttaagattatcccgaggcctttgccatcttcacccttacggcatggagattttatatggtcatactttatttcatcagcaaaatttttgcatttttgtagcaataaagctgaggaaagcaatcatttgctagacactcatttaggcaaaaaatattaaacccaca

SEQ ID NO: 556163 - DNA, 616 bp, Homo sapiens
atacatgagggctatgattcctgcttctctgttaccctccactccaaattcccagatgtttataatcatttattgatattgcctgtataatgtattctttaatttcagtacccttgctgttattttaattgacttcacttccatcattcagttggattactctgaaaacctcttaactggcattctttttttttttttttttttttttgagacggagtcttgctgtgtggcccaggcgggagtgcagtggcgsgatctcggctcactgcaagctccgcctcccgggttcacgccattctcctgcctcagcctcccgagtagctgggactacaggcgcccgccatcacgcccggctaatttttttgtatttttagtagagacagggtttcaccgtgttagccaggatggtctcgatctcctgacctcgtgatccacccgcctcggcctcccaaagtgctgggattacaagcgtgagccaccgcgcccggccaactggcattctttactcctgccatgcctgcttctccccatcatccacactgtcaccacagtgattgttctaaatgcaaattgcccccttgcttgaagctggcccctgctccacattgcctttaat

SEQ ID NO: 556164 - DNA, 616 bp, Homo sapiens
atacatgagggctatgattcctgcttctctgttaccctccactccaaattcccagatgtttataatcatttattgatattgcctgtataatgtattctttaatttcagtacccttgctgttattttaattgacttcacttccatcattcagttggattactctgaaaacctcttaactggcattctttttttttttttttttttttttgagacggagtcttgctgtgtggcccaggcgggagtgcagtggcggratctcggctcactgcaagctccgcctcccgggttcacgccattctcctgcctcagcctcccgagtagctgggactacaggcgcccgccatcacgcccggctaatttttttgtatttttagtagagacagggtttcaccgtgttagccaggatggtctcgatctcctgacctcgtgatccacccgcctcggcctcccaaagtgctgggattacaagcgtgagccaccgcgcccggccaactggcattctttactcctgccatgcctgcttctccccatcatccacactgtcaccacagtgattgttctaaatgcaaattgcccccttgcttgaagctggcccctgctccacattgcctttaat

SEQ ID NO: 556165 - DNA, 464 bp, Homo sapiens
tgttctactccaaatggacaattcctcagtgtttccttgtcttttataaccttaacatttttgaagaatgttcatcaattattgtgtagaatgtccttcaatttgggtttctagcactttctcaygattagaataagattatgctttattctttgtaaaaataccacagaaataatgttttgtactttttagtgaaacacatcagggaattcataacattaaatcttattattttttatttaactttgatcatttcactaagtatgctgtatgttctttaccatttggacagaaatgttttctaatattctttgtcatttattttttaagtgattgattatttacaagtgtgctttgttttatttaacgaatacctgggatttctaaacatcaatttattaatttctaaattaattcaatttcatcagacagtgtactttgtaagattttacttttgttggaat

SEQ ID NO: 556166 - DNA, 628 bp, Homo sapiens
ttctttttgctgatcacaatctgctctagagaaaatctaggatatagatcattttcaaatagtttaaattttagttcctgtatttcccacccaaaggggatttttatgtcttgagattttgacgttatagcttattgaacaacttcaagcaccaaaaagcagatggagaagattttcttagatagaaggatctttttacttcccactatatttaaacaaaagttagagactatttacctagatctagttttgttgaaataatgaaagaattttcatattgctgtgtaaaacaacacattaccttatagtgacaaggtattttcttctcatttaatacatagctttaaccctaacaaaatggcttttcaatggccttgtaaatacagcttttattcctgaaccactttggcaaatttctttattcagagttcagggggattgagyggctgaaagggacttactgtgatattagaatacatcaattccaccaaccacaactcattttggtgatacttacaaaatggatatccacaaagtcttgtgttagaaaaaatgaggttgatcatttcattttgataatttttatcatcttcaataatcatgaatgcatccacagacagaaatttat

SEQ ID NO: 556167 - DNA, 582 bp, Homo sapiens
ttttttttccccaatcatgctgtattcttagygtaattttaaaatacttaaaacaagatcatgagaaaataaatgcccagattctagcaccaaaattcagaagggggggctatgagaatgaggggcggggagaagccttcctgagagtttctaagaggcatggaggcagtggggatagtgattagctctgggggaagaagaggctactggctggaaaagggcatgaggtagggttggtaatcacctactgttttatctgagtgctggtcacacagatgtgttcactttaggaaaatgtattgagattacacttgtgatttctgcatttttacatacgcacattaactcagtcatatgctgataaatgtttaacaatgggtttgctggagaaaaaagggtcccccggatttgtaatgtctgcccatttccgtggtgtaaatactcccttcacaactgatttcaagcttcccatgcactgtaactgaagacagagttgggaagatacgtgcagtagcacaacattaaatcatatttccaccatatacacacaataggtgtaaataacacccagagcatagaaaa

SEQ ID NO: 556168 - DNA, 582 bp, Homo sapiens
ttttttttccccaatcatgctgtattcttagcgtaattttaaaatacttaaaacaagatcatgagaaaataaatrcccagattctagcaccaaaattcagaagggggggctatgagaatgaggggcggggagaagccttcctgagagtttctaagaggcatggaggcagtggggatagtgattagctctgggggaagaagaggctactggctggaaaagggcatgaggtagggttggtaatcacctactgttttatctgagtgctggtcacacagatgtgttcactttaggaaaatgtattgagattacacttgtgatttctgcatttttacatacgcacattaactcagtcatatgctgataaatgtttaacaatgggtttgctggagaaaaaagggtcccccggatttgtaatgtctgcccatttccgtggtgtaaatactcccttcacaactgatttcaagcttcccatgcactgtaactgaagacagagttgggaagatacgtgcagtagcacaacattaaatcatatttccaccatatacacacaataggtgtaaataacacccagagcatagaaaa

SEQ ID NO: 556169 - DNA, 582 bp, Homo sapiens
ttttttttccccaatcatgctgtattcttagcgtaattttaaaatacttaaaacaagatcatgagaaaataaatgcccagattctagcaccaaaattcagaagggggggctatgagaatgaggggcggggagaagccttcctgagagtttctaagaggcatggaggcagtggggatagtgattagctctgggggaagaagaggctactggctggaaaagggcatgaggtagggttggtaatcacctaytgttttatctgagtgctggtcacacagatgtgttcactttaggaaaatgtattgagattacacttgtgatttctgcatttttacatacgcacattaactcagtcatatgctgataaatgtttaacaatgggtttgctggagaaaaaagggtcccccggatttgtaatgtctgcccatttccgtggtgtaaatactcccttcacaactgatttcaagcttcccatgcactgtaactgaagacagagttgggaagatacgtgcagtagcacaacattaaatcatatttccaccatatacacacaataggtgtaaataacacccagagcatagaaaa

SEQ ID NO: 556170 - DNA, 582 bp, Homo sapiens
ttttttttccccaatcatgctgtattcttagcgtaattttaaaatacttaaaacaagatcatgagaaaataaatgcccagattctagcaccaaaattcagaagggggggctatgagaatgaggggcggggagaagccttcctgagagtttctaagaggcatggaggcagtggggatagtgattagctctgggggaagaagaggctactggctggaaaagggcatgaggtagggttggtaatcacctactgttttatctgagtgctggtcacacagatgtgttcactttaggaaaatgtattgagattacacttgtgatttctgcatttttacatacgcacattaactcagtcatatgctgataaatgtttaacaatgggtttgctggagaaaaaagggtcccccggatttgtaatgtctgcccatttccgtggtgtaaatactcccttcacaactgatttcaagcttcccatgcactgtaactgaagacagagttgggaagataygtgcagtagcacaacattaaatcatatttccaccatatacacacaataggtgtaaataacacccagagcatagaaaa

SEQ ID NO: 556171 - DNA, 550 bp, Homo sapiens
  misc_feature 478: n = A,T,C or G
gtggtagaatatgactcagttgtctgcctctatactccttgggtggagacggggtggcagagctgaaaaatggatttagaaggaccctaataagagatggaggctggggcgtagggtggtggtatggctgaagcaggcaggaggctattggttttatttccgtttatataaagtcgagagagccactaaacccctctatgctttagttttcccacctgtacaatgtggataacttacatgtgctgcagagtctgtaggaggattaaatgaagtaatttgtaagtagaaagtataagtcaatgtaggttttattctgttccctcwtgcctctttttatgcccagctctccaagggctgtgccatagagttggccatcacaaatatggctgccttcggttcagatgtcttcccctgaatgagctcctacaccatggcaaaactgcagcaatatgcatgcatgcatatcacacgtgtccgnttctacattctgagctgatctttatggggacagtgctttctggtccacacccaacctatgcacctattaaag

SEQ ID NO: 556172 - DNA, 653 bp, Homo sapiens
ttgcagcattattcacaacagccaacatatgaaaacaacctaagtgtacatcaacaggcaaatggataaactgtgatgtgtacataaaatgraatattatccagccatagaacagaatgagatcttgctattggccacaatgtggatgagtctgaaggacattatgctaagtgaaataagcctgacacagaaagaggaatattgcatgatctcacttatatgccgactcttaaaaaataattcaattatacaaagatagagaacaaaacagtggttaccagtttgggtggggaggaaatgaaagatgtgggtcatagaatacaaagtgtcagatatatagaatgaacaagtctagagatctaacgtacaatatggggactataggtaataaaattgcactgtatttgagactcatgctaaaagggtagattttagcttctcttgccacaagaaagatgggtaactatgtgagctgatgcatatgttcattcgcttcactatagtaacctttatactatatatccaccataatatcatttgtacaccttaaatatacacaataaaatttatttttaaaagataaagcagtttggtcaaattatgacaccaggacacaagtcaaaattttcaaatataaaaccagtgttcttact

SEQ ID NO: 556173 - DNA, 653 bp, Homo sapiens
ttgcagcattattcacaacagccaacatatgaaaacaacctaagtgtacatcaacaggcaaatggataaactgtgatgtgtacataaaatgaaatattatccagccatagaacagaatgagatcttgctattggccacaatgtggatgagtctgaaggacattatgctaagtgaaataagcctgacacagaaagaggaatattgcatgatctcacttatatgccgactcttaaaaaataattcaattatacaaagatagagaacaaaacagtggttaccagtttgggtggggaggaaatgaaagatgtgggtcatagaatacaaagtgtcagatatatagaatgaacaagtctagagatctaacgtacaatatggggactataggtaataaaattgcactgtatttgagactcatgctaaaagggtagattttagcttctcttgccacaagaaagatgggtaactatgtgagctgatgcatatgttcattcgcttcactatagtaacctttatactatatatcyaccataatatcatttgtacaccttaaatatacacaataaaatttatttttaaaagataaagcagtttggtcaaattatgacaccaggacacaagtcaaaattttcaaatataaaaccagtgttcttact

SEQ ID NO: 556174 - DNA, 319 bp, Homo sapiens
gcaatctacaaattcagtgcagttcccatcaaaataccaccatcattcttcacagaactagaaaaaccaatcctaaaatccatatgaaaccaaaaagagcctgcatagccaaagcaagactaagcaaaaataaaaaataaaaaacaaaaaaaaaaacccarccaaccaaacaaacaaaacaaatctgggggtatcacattacctgatttcaaactaaactacaaggctatagtcaccaatgcagcatggcactggtataacaataggcacatagaccaatggaaaagaatagagaacccagaaataaaccaatttgtca

SEQ ID NO: 556175 - DNA, 589 bp, Homo sapiens
atggcttactgcagcctcaatctctggggctcaagcaatcctcccacctcagcctccagagtagatgggactacaggtatgtactaccacatctgactaatttttaaatttttttagatggggtttttccatgttgcctaggctggtctcaaacttctgggctcaaggaatcctcctgcctcagcctcccaaagttctgggattacaagtgtgagccactgcacctggcctgtacttctaacatcatacttaatggtgaaagaatgaaaactttacccctaagaccaagcacaagaatagtgtatactattaaaactattaaatgagttcaggaaggttgcagcatatgcatatttctatacactggtaatgaacaatccaaaatgaaatttaaaacattccatttgcagtagcatcaagaataataaaatacctagaaaaaatctcaacaaagaagacaagatgtatacagtgataagtataaaacactattgaaagaaattaaagaagaaaattggggacttacacttctcaaaackaatctatggtaatctagactgtgtggtactggcatacaataggttaattc

SEQ ID NO: 556176 - DNA, 546 bp, Homo sapiens
ttttttcaattctttctttttttttttttttttttttttttagttttcatacgggcatgcaatgtgtaataatcagatcatgtaaagtgagatagtcatccccttaagtatttatcctttgtgttacaaacaatccaattatactcttttagttatttttcaaagtacaattaaattactaytgactatagtcaccttgttgtgctatcaaaaactaggtcttattcattgtttctacaattttttgtacccattaaccatccccacctccaaccccttactactctttccagcctctggtaaccatccttctgccctctgtcttcatgagttcaattgctttgatttttagatcccacaaataagtaagaacatgcaatgtttgtctttctgtgcctggcttatttcacgtagcataatgacttccagttccatccatgttgttgcaaattacaggatctcattcttttttatggctgaatagtattccattgtgtataagtaccatattttctgtgtccattcatctgttgttgaacacttagg

SEQ ID NO: 556177 - DNA, 546 bp, Homo sapiens
ttttttcaattctttctttttttttttttttttttttttttagttttcatacgggcatgcaatgtgtaataatcagatcatgtaaagtgagatagtcatccccttaagtatttatcctttgtgttacaaacaatccaattatactcttttagttatttttcaaagtacaattaaattactactgactatagtcaccttgttgtgctatcaaaaactaggtcttattcattgtttctacaattttttgtacccattaaccatccccacctccaaccccttactactytttccagcctctggtaaccatccttctgccctctgtcttcatgagttcaattgctttgatttttagatcccacaaataagtaagaacatgcaatgtttgtctttctgtgcctggcttatttcacgtagcataatgacttccagttccatccatgttgttgcaaattacaggatctcattcttttttatggctgaatagtattccattgtgtataagtaccatattttctgtgtccattcatctgttgttgaacacttagg

SEQ ID NO: 556178 - DNA, 546 bp, Homo sapiens
ttttttcaattctttctttttttttttttttttttttttttagttttcatacgggcatgcaatgtgtaataatcagatcatgtaaagtgagatagtcatccccttaagtatttatcctttgtgttacaaacaatccaattatactcttttagttatttttcaaagtacaattaaattactactgactatagtcaccttgttgtgctatcaaaaactaggtcttattcattgtttctacaattttttgtacccattaaccatccccacctccaaccccttactactctttccagcctctggtaaccatccttctgccctctgtcttcatgagttcaattgytttgatttttagatcccacaaataagtaagaacatgcaatgtttgtctttctgtgcctggcttatttcacgtagcataatgacttccagttccatccatgttgttgcaaattacaggatctcattcttttttatggctgaatagtattccattgtgtataagtaccatattttctgtgtccattcatctgttgttgaacacttagg

SEQ ID NO: 556179 - DNA, 578 bp, Homo sapiens
tctaacaccacactgaatgggaaaaacctgaaaaccttttctctgaaaactgaaacaagtcaagaatgttcactttcaccactcttaataaacatagcactggaagtcctagccagagcaatcaggtaagaaaaataaataaaagacataggccaggtgcagtggctcatgcctgtaatcccagcattttgggaggccaaagtgggaggataacctgaggttaggagttcgagaccagcctggccaacatggtgaaaccgtctctactaaaaaaatacaaaaatttgacaggtgtagtggcgggtrcctgtaatcccagctatcccagggggctgaggcaggagaattgcttgaacctgggaggtagaggttgcagtgagccgagattgtaccactgcactccagcctgggtgacagggtaagaccctgtctaaaaaaataaaaataaaaatgtggaaagaggaagtcaaattgttcctctgcagataacatgatcttttatctagaaaaaatcttaaaactttatgaaaaaacttatattcataagtaaatttagcaaaataggatataaaatcaac

SEQ ID NO: 556180 - DNA, 566 bp, Homo sapiens
ttggttcttctttgtggaagaggagagtactagatgcctctagtcagcaatcttgaaggcccttcttgtttttttcttttaaaaaaaagaatgaaaaaatcttgctgttttttttttctttttaccactttgaaatayaagcctcctcccttctggcctccgtagtttgagaatctcataatcttactgagaatcctttgtatttgatgagtcacttctcccttgctgctttcaagattctcttcatctttgtctttcaatgatttgattagaatgtctttctttataggtctcctcaaattcatcctacttgtagtgagcttcttgggtatttataaccatatctttcatcaaagttgggaattttttggctattacatcttcaaaaaatatctctgccctttgtctctcttctgagactcccacaatgggtatattggttcacttaatgatgtcccatgggtcccttaggctctgttaatgtccctgcaatcttttttctgttcatcaaacttgttaatttcaattgtcctatcttcaagttcaagaattctttcttctgcctg

SEQ ID NO: 556181 - DNA, 539 bp, Homo sapiens
gcagatagtattaataattagacttgaaacgtggtctctcttatcccaaagcctaagagatctcttcattagtcaattggagaacagcaaatcctagaatctttactctacaaaaaaccttagagattatccaaagcaacsttacatattactcaagaatgtccctcagattctgtttatgctcttcttttgataatgaactcactgccctcaaggcagtcagtctactcctggactattgagccagaagtatcttcattagccagagttaaaatcatcttccttgttaacttctaccacatggatgttattcttgctctttggaataacatagaacaattctttctctctctcatacatcttatcagacatttgaacctactttctccattgggttgacagtaggataaataccattagttctctgtaattgtcctcatgttcaccaagcaccgctaaagcttgctgtctgaaaaattgccttaattatttatttaattttcctattatttgtctgccttctctgggcttgaagtcca

SEQ ID NO: 556182 - DNA, 425 bp, Homo sapiens
atgacattcagatgataattgacattttgagyatggatgagagttcataaaaatctgatctacactgcaggttggtatgacagccccatgaatttgttcatgaacagactcttctactttcctctctaccatcctaagattgtggcccttgtcacatggttcaagatggctactagagctccagctgttaagtctggtcaggcaggaagcacactagtgtttcctctctgccattagcttgcttttaggccttagcaaactcatttccccccttggaccagtttgtccattcaatttgtcaagttccttgttgttttatcacatcctgactctgtgtcagaatgggagttgactggcttccaaccaaagccagtcaactatttaactatttcatttcttattggtgctttggatgggagttttcc

SEQ ID NO: 556183 - DNA, 425 bp, Homo sapiens
atgacattcagatgataattgacattttgagcatggatgagagttcataaaaatctgatctacactgcaggttggtatgacagccccatgaatttgttcatgaacagactcttctactttcctctctaccatcctaagattgtggcccttgtcacatggttcaagatggctactagagctccagctgttaagtctggtcaggcaggaagcacactagtgtttcctctctgccattagcttgcttttaggccttagcaaactcatttccccccttggaccagtttgtccattcaatttgtcaagttccttgttgttttatcacatcctgactctrtgtcagaatgggagttgactggcttccaaccaaagccagtcaactatttaactatttcatttcttattggtgctttggatgggagttttcc

SEQ ID NO: 556184 - DNA, 425 bp, Homo sapiens
atgacattcagatgataattgacattttgagcatggatgagagttcataaaaatctgatctacactgcaggttggtatgacagccccatgaatttgttcatgaacagactcttctactttcctctctaccatcctaagattgtggcccttgtcacatggttcaagatggctactagagctccagctgttaagtctggtcaggcaggaagcacactagtgtttcctctctgccattagcttgcttttaggccttagcaaactcatttccccccttggaccagtttgtccattcaatttgtcaagttccttgttgttttatcacatcctgactctgtgtcagaatgsgagttgactggcttccaaccaaagccagtcaactatttaactatttcatttcttattggtgctttggatgggagttttcc

SEQ ID NO: 556185 - DNA, 601 bp, Homo sapiens
tgaactttcatttgtctataaccttcatctgacagttggtagaaaaataaactaaaggaccaatctagtttaaatccagtctgttcttattatctgcatggtcattttaggcgatgtcagtctcgtttgaataaaaatggcttaatctctcatataacctctctccgcttctccatgaagataaattctgggtacaaaggtgatgagagggatatatggcttacaagcatttgtggtggtatatagggtagtgggatggcctcctgcccactctggtccagggagcacctcccttggccacctggttgctgcttgcccctctggccttcatggtaaaatggaagctggcctgacatacattgtcatttgttctcctgcctcaactagtatacagarctggggttacctgagcttcatcttgcctactgctagcaccacagacttctctaaggtttggctggaattccactcaccctacctggtgggtctgacctgcagtctttactgcagtgccagtttgtcccagccactgaaacccactctggcaagatccccaagcacactctcaggttgcttccaagtccagcctccaccacactgg

SEQ ID NO: 556186 - DNA, 566 bp, Homo sapiens
tttctccaaagaacacaaaaatgaccaacacatatgtgaaaatgtgttcaacatcactaattatcaggaaaatgaaactcaaaaccacaaagagatatcacctcatacttattaggatggtcattatttttaaaattaatcaattaaaaacaacaacaamaaaaaaagtggtagcaagaatgtatagaaattgaaacccctgtgccctgttggtagaaatgtaaaatagtacagtctactgaaaatagtatagatgtttctttaaaaattaaaaatggagctatcatatgatccagcaattctatttctacatacttatccaaaacaaattgaaaacaggattttgaaagataattgtactcccacattcaatgtagtgttatttacaataatgaataggtgaagacaacttaaatgtcaatcgataaatgaatggataaagaaaatgtgagctatatctatatattacatattatatatgtgtataatatataatatatgttatatattgtatatataatacatatatacaatgaaatattattcagccataaaaaaggaactcc

SEQ ID NO: 556187 - DNA, 554 bp, Homo sapiens
atgacacagtgatagtgaccagagtattcatttgtttttctaaaatcaaagaactggtgaacctcagggaatcaaagaggaatagttggctggacccatgaagtaaagtgtctgattcctcccttgcttttgtccacagtgtaatatgttatctgctgctcactcttatttgatctgtttgaaatccttgccaatggccayccatgggaaatcttccagtccatccccatcctgtcccctctttacttcagtggttttaggcacgttggggtcatgcatcccattaagaatccaatgcaaggtatggaccttctctcctgaaaacttatgtatgtacaaaattttgcacataatctcagtggacacctgatggctgatgtgacaatcatttgtttatttatgaactcatttatctattcactggctcattcacttattcactcatttgttattaaatgctgaggtccaggtttgttagatgttggagactcatgaacaatggttcctgccctcagtagctttagtttactggggtaaataggtaaacaaaccag

SEQ ID NO: 556188 - DNA, 568 bp, Homo sapiens
tcttctaatgcctccagaatcactcattgcsaaacccttccgatgctttcctatggtctcaccaatgctgatgctaaaaccaactcgagccagtcctaaatcttctcttcagggagtttaatgccttgaaaaggtttcaagcttattttaattgaattatttcattcagtgtcaggcttaaagagcaccctacagggctccagctctgaatgaatgcattaaaaaatcaaataatacagattatggcataatccttgagggagatataaatagaatcccctctgttgcctttttatttgtctatgttggttaataaacacacttctatagcatttgcttttcccttttctcccctaatgctctttagttgccttcgtaaggaagagaataaaactcagaatataacaaaatgttggggaagaatttaccatatgaatattcagggctggaagggattttagacattatctggtctaatttctacataatttacctggtgtgggcagaggtgtagagaaggagatgggttggccaaggtcattgaacttctcttccagctcaacatcac

SEQ ID NO: 556189 - DNA, 555 bp, Homo sapiens
aaaaacgggaagtctatgggataatcaggagtgagaccaaatgtaaaggattttttttaataatgtaatggttaacattgagctcaggtctttcctaccagagtctgttctgagcatttcctgtgattaattagctcatttggcctttgtgaccatgccaggagataggcaatattatcgttagcattttacacaggaggaaattgtaaaccaaaaacaaaatttgaagcaccccccaccccaaccatctgaatggacttcctcctcagctaaggctcttttaaaatgtaacctgagagattatttcgggccatgatgggaagtggggttcgaacatgcctcattatacctctccggcattaacatcaacactgactataagtctgataagaaatatcttatgggccagacaccatggctcatgcctgtaatcccagcacttttggaggctgaggtgggcagatcatctaaggtcaggakttcgagaccagcctgggcaacatggtgaaactctgtctctactaaaaatacaataatgagccatgcatggtggtg

SEQ ID NO: 556190 - DNA, 611 bp, Homo sapiens
tatagaagaatatgtacttctggccaagatggagtaatagtagatttaccctctcacctgaatcaactgaaaaaccaaacaaaatatatgaaacaaaggttttcatgacactaaacagtgatacccgagaaatagaaacaaagcaggcaagccctcgattgcccccactttactgcattatgagaccttccaggcctgggcacagggaggggcaacccacgcagaatccagcaaactctttgagttgagaatgcagagtgaagagtcgttgaaatccacaggggctagaattcataagagagactaccaaagagaagaagatacagaaaaagaaccccagagccctgtgaaagtctcccttgagtattcaggagagtaatgaatgcattcattgcatgtatgtaaaaaaaaaaaaaaaaactacycaacactggtgttagtctgtttgtattgctataaaggaatacctgaaactgggtaatttataaagaaaagagggttatttttgctcatagttctgcatgctgtacaagcacgtcaccaacatctgcttagtttctggttaggcttcaggaagcttacaatcatggtggatggtaaagggggacctg

SEQ ID NO: 556191 - DNA, 566 bp, Homo sapiens
gtaccaagaagtccacaaggacaatctgagtctcctccactactctgcttgctaacctctatttcccttctactcagagagaagaaagctacgtaggatgatgccaatagtcattttaagagtcaaaagtgcttaagtgtttaaacagtgtctttatagccaacacttacctttttggcagaaaagcttggctgtttttgtttgaggggtcccttggtctttacagacttttctgtagctctgttgacagttcccaaagcctttctagtagctttaggtaaggctggtggggcatcgaacgttttgccaaaacgtggtgttgaaacttgagatctcccatctaaggctttgattgctgaagaaaaagtcttaccataagaatattccagcagcaaaatacctgtacaacttaaatactgtgtatataaacttgacctctcacccccaaacccaccccccacttttggtagtggcatggctatgayaggcctaatagcagagattcagtaacttccttaaatcatctcattaagatattaaaaatgaaaaaggaccaataacaaacg

SEQ ID NO: 556192 - DNA, 596 bp, Homo sapiens
ctcacagcacctggtattcttttcatagcaacttttcacagctgctaaatctgaatagttgtttcggtgtctttcgcactctgatgtaaatctgagggaagacactgttcaccaaatccccagcatgttacacagcctggctactaattagtgccaagtttaactgctttttttttttttttaagctgatacgtcaccaacttccccaktcatttcatagtcccctggtgaggcttaagctcttgtctgttctggtcttttttttttttttttaacttcctaaaattctccgattctaaaagaaagctcctaaatagaagccaaaaagtagccgcccaacttgaaactccccacaagccgggtaaatagcgcgatacgcagcagctagagttctcgcgtttcccacggcgcaggagcactggagggcccccctccgcccccggccccgccaggaaattagtgcgcatgtgccggtcatccggaagttaccgcagtggccgccggaattaggcgaaaagccggaagtaaacattacgagattggcttggattctgtcggatggacttggggctagctgcggcggggctgggtaagaa

SEQ ID NO: 556193 - DNA, 646 bp, Homo sapiens
tgcttctcttcgcagtatatttaggccatcagtttatatgttacacaaatatatgtggaggttttctataggtcagacatagaagagaacacctttgagaagcatcgtagacccccaggcattgagcactttacactgggaaagagcttgtgtaaaggcccagtgtctacagggagcacggtktgttagaggaactagaggaactacaagaaggtctatgtagttagtagagaaggaagcggggatagttgtaatggtgaggctggaaggtaggcaggtgccagaccatggtggaccgtgtaggtgtgttaaaaagatgtcagtttttagagtacgaatgataaaatcctttggagcgtcattttttttttttttttttttttgagacgtagtctagctctgtcgcccaggctggagtgcagtgacgcaatatcagctcactgcaatatcggcctcctgggttcaggtgattctcctgtctcagcctcccgagtagctaggattacaggtgcacgccaccacgcctggctgatttttttgtatatgcttagtagcgacggggtttcgccaggttggccaggctggtctcaaactccttacctcaggtgatccgcccgcctcggcctcccaaagtgctgggattaca

SEQ ID NO: 556194 - DNA, 613 bp, Homo sapiens
tgaaataaattaatttaaagttattcattttaaatatataaaaatttaggtggtgacttgaatgttgtaagtaaaatttaaatgtttactttttctttctttcttttttttttttttttttttttttaaaggcaaaacgaacattgaaagcccagaaactccaagaggaattagcctcaggaaaattagtggaacaggctgtaagtaatgaaaatgatcaataaaaaggttttatttcttttaaacaaagaaatgaaaattgaaacaagaattcattttatagctcttcagttaggaagagagaaatgctattgggggaaaaataaaactgatactttgtrtacagttcatagtaatataaattgatgcagtcagtttgggaacaatattgccactatttatatttagacacacacaaacatttactttttcaagttaaattattagagctatccatcctaaagaattttctagagtttagaaaaatcatgatgcataaagatagtacagcatttttcacaatagtaaagaaattgaaatagcttaaatgtccaggaacagggaattggttaagtgcatctgcatggtgtaatgctgtgtagttcttaaaatg

SEQ ID NO: 556195 - DNA, 608 bp, Homo sapiens
ttttaaattactgagagtgtggtattctgttagagcagcacaaaagtggaccaaggccaggcagggtgagcttctccaagctaccgttgtctctgcctggacaactgcaatagccttgttgttggtcttccactttcagtctcatccttccccaaaccacccaccagacttcagccagagagaacttctaaaatgcaaataaggccatctcacattgcttccacccaaccttcaatgttccctccaggttcccatgcagagaccctgagacttcacgttataccaggaagccctagttaaatatatcactagccatcaatgcacaatgaaataacacatttttaggccaaaatataattattgtatagtagaaatrgatgacatcagaaataaaagtttccttaaacaaggtggatacccaaagtgcagttcgcagaccttctgaatcagaatctgcattttaacaagactatttgtgtgaacaatggtttgagaggcactatcttagtgacaatttttactgtacgaatcaccaatgaggctaaagggttagggattaaatgcataggctttagagttaggcctggctttgagtttaaggtgtgttg

SEQ ID NO: 556196 - DNA, 621 bp, Homo sapiens
ccaaggcaggcatgagatggtaagaatcctttacatttaacttctcagaagtttayacttatattacctaatttgatcctctcagcagtcctgtaaggcagcaggatggggagtcttattcttagctatgtaaactgagtcagaggggagctatgtaggttatattgcatcaaagccatttatgcatttatccattcattcatacagcagatatttattgagtaactagtatgtgctgagcctgctttaggcatgggaaatatactaaacactgcccctggcctcaaagaacatatattagtggggaagactagtagaggcacataaataggcaattataattagtatggttagtacaataaaataaatatgccaggaaattaaaggaaggggaagaggaacagaaaaaaaaatgcttagcctgaggggaactcataatgagaaaaggccttctggaggaggtgacacctgagatttgaaggctaacgaggagtaattgagatggaagaattggaaagacaggataagaaaaggcatggcctagagaaataggttaagaataaaaaaaaaaacaacaagaatgaaaagtcaagaagattatagaatttgttcttgaagtat

SEQ ID NO: 556197 - DNA, 621 bp, Homo sapiens
ccaaggcaggcatgagatggtaagaatcctttacatttaacttctcagaagtttatacttatattacctaatttgatcctctcagcagtcctgtaaggcagcaggatggggagtcttattcttagctatgtaaactgagtcagaggggagctatgtaggttatattgcatcaaagccatttatgcatttatccattcattcatacagcagatatttattgagtaactagtatgtgctgagcctgctttaggcatgggaaatatactaaacactgcccctggcctcaargaacatatattagtggggaagactagtagaggcacataaataggcaattataattagtatggttagtacaataaaataaatatgccaggaaattaaaggaaggggaagaggaacagaaaaaaaaatgcttagcctgaggggaactcataatgagaaaaggccttctggaggaggtgacacctgagatttgaaggctaacgaggagtaattgagatggaagaattggaaagacaggataagaaaaggcatggcctagagaaataggttaagaataaaaaaaaaaacaacaagaatgaaaagtcaagaagattatagaatttgttcttgaagtat

SEQ ID NO: 556198 - DNA, 528 bp, Homo sapiens
tgctgggcagccatttattttgagtattagagacttttaaacccagtttaattgtatttagratcgtctctgaaattacatgcactactctggaaagaaatcagttcctgggcaccagaggtattcaatctaagacaggctggccacacggcagggatgttaaacataggattaagtcatgagaccaaggttagactggatgtgctcaaaggaccattcagtggtttgatttcagcttaccaataacaataataaatgatgataaagatgctaatgatgctgatgacgaagattctgcagttgttcctctgctgtagctgaagataactgcaacgatggctaacatttattgagctctatccatgctcaattataggcatttttaaatactttacatccattatctcaatcctcaaaacaagcctaaaaaaatgagtattattacctttatttagcaaatgaggaaatggaggtatagagaacttcaaaaacttatccaatttcacatagctagttaggaagcagcag

SEQ ID NO: 556199 - DNA, 528 bp, Homo sapiens
tgctgggcagccatttattttgagtattagagacttttaaacccagtttaattgtatttagaatcrtctctgaaattacatgcactactctggaaagaaatcagttcctgggcaccagaggtattcaatctaagacaggctggccacacggcagggatgttaaacataggattaagtcatgagaccaaggttagactggatgtgctcaaaggaccattcagtggtttgatttcagcttaccaataacaataataaatgatgataaagatgctaatgatgctgatgacgaagattctgcagttgttcctctgctgtagctgaagataactgcaacgatggctaacatttattgagctctatccatgctcaattataggcatttttaaatactttacatccattatctcaatcctcaaaacaagcctaaaaaaatgagtattattacctttatttagcaaatgaggaaatggaggtatagagaacttcaaaaacttatccaatttcacatagctagttaggaagcagcag

SEQ ID NO: 556200 - DNA, 528 bp, Homo sapiens
tgctgggcagccatttattttgagtattagagacttttaaacccagtttaattgtatttagaatcgtctctgaaattacatgcactactctggaaagaaatcagttcctgggcaccagaggtattcaatctaagacaggctggccacayggcagggatgttaaacataggattaagtcatgagaccaaggttagactggatgtgctcaaaggaccattcagtggtttgatttcagcttaccaataacaataataaatgatgataaagatgctaatgatgctgatgacgaagattctgcagttgttcctctgctgtagctgaagataactgcaacgatggctaacatttattgagctctatccatgctcaattataggcatttttaaatactttacatccattatctcaatcctcaaaacaagcctaaaaaaatgagtattattacctttatttagcaaatgaggaaatggaggtatagagaacttcaaaaacttatccaatttcacatagctagttaggaagcagcag

SEQ ID NO: 556201 - DNA, 528 bp, Homo sapiens
tgctgggcagccatttattttgagtattagagacttttaaacccagtttaattgtatttagaatcgtctctgaaattacatgcactactctggaaagaaatcagttcctgggcaccagaggtattcaatctaagacaggctggccacacggcagggatgttaaacataggattaagtcatgagaccaaggttagactggatgtgctcaaaggaccattcagtggtttgatttcagcttaccaataacaataataaatgatgataaagatgctaatgatgctgatgacgaagattctgcagttgttcctctgctgtagctgawgataactgcaacgatggctaacatttattgagctctatccatgctcaattataggcatttttaaatactttacatccattatctcaatcctcaaaacaagcctaaaaaaatgagtattattacctttatttagcaaatgaggaaatggaggtatagagaacttcaaaaacttatccaatttcacatagctagttaggaagcagcag

SEQ ID NO: 556202 - DNA, 452 bp, Homo sapiens
tctaactcttacaacaatattaagaggtaggttttattatctttttttagggatgagacaactgagacataaggggtttaatcactttccaagataacacagctastatgtgggagtatgaatcccagccccaatctgcctgaccccaaatcccatgtcccatccactgtgcaacatagctgctccctgagcatgttctctgaatgacactgagacttgctgaaaataactgagggcagagattgagggctcatgaacatatttacccaaggatcacagtgtttgtttgtttgttttgagacagagtctcattctgttgcccaggctggagtgcagtagcgtgaccacagcttactacagaccccacctccagggctcatgtttcccaagtagctgggactataggcttgccctaccatgcccagttaattttttttttttaattttttgta

SEQ ID NO: 556203 - DNA, 571 bp, Homo sapiens
agtagtgatggcaatttaaatatgccagggaagcctaaagtgcttcttttatgtgaaaaggtgaaagttctcaataagcaatgaaatcgtttgctgatgctgctaatatctacagtatgaatgaatcktctatccgtgaaattgtgaggaaggaaaaagaaattcatgctagttttactgtcacacctcagactgcaaaagttacagacacagtgtgtgataagtgcttagttaagatggaaaaggcgttacatgtgtggaaggaagatgttaacagaaacgtgttctgactgatggcagtcagtttcagtactattctcggtttcacacatccagtgggagtcttggaatgtccctcccgtgggtaagggggaaccactgtgctagacacagtcccagaagactcctcatagcctactggtcagaactgcatcacatgtcctgcgaatgcaagcattggtggagactgagggcaccaaacctggatgggacaaacaatttgatctctggggctgcgaagctcagcttcctttgaggcacatggcttgcctactctctgaacaatattggg

SEQ ID NO: 556204 - DNA, 545 bp, Homo sapiens
aaatttccttaaggtaaaaacttgaatctttagcagaagagtacactatatggggtagaataattatcagaaaaatatatcctggtaaaattatgaaacaaaaagaaccaaaaggagattttgaggtagcaaaagcaaaggatgagcaaaatgtaacacagatgagggtgggaaacatctcaggcattctcaaaataaaacactcaaggctagaaaaaaaggaaagaattggcttcacttaagaatttttgttctggctaagttgcttctcaagtatcaagtcaacaaagaggttttctcaaagttttaagaaatcagaaactataatacctgcatatttataggaatgcaatatttctttgtaaaattcactgaatgaaaaatcatggccaacttgaagataaaccataacttagaaatgaaagaatcaccttcagttaaaatgcctgatggtgaacattrgatcaattcacacgtagaagattgaacaactctgaattgtttatacatggaataaaacctgacaatgtaaaaataattataac

SEQ ID NO: 556205 - DNA, 339 bp, Homo sapiens
atacatcacactcatttcctatgtggcactgctctttctgaaattcttctgtgattctatatacatggccatgaaccttccctattaaatgttcccatcttttttttaacttttattttaggtttaagggtacctgtgcaggtttgttatataggtaaattttgtgtcacargggtctggtgtgcacattatttcatcacccaggtaacaaacgtaatacctgatagatacatttttttatcctcttgctcctccctcaggcaggccccagtatttagtgttcccttctttgtgtccatgtgttctcagtgtttagctcccacttataagtgagaacat

SEQ ID NO: 556206 - DNA, 622 bp, Homo sapiens
gctcacagggtctttcttatacttgagcttaagctatgacgcatcacatctttagtcagctcttttctgaccacccagtctaaaatgtcttgtgtgtgttaagtcaggaaatgtgaagggttggagaagcaaggagacctctgggtcagagacagacagtttattattcacaacaaaattagcagactcctatctctctagagacataatttttattaccctggaatgtaagcaaatattttcagtgagagatgtttgatatctctaaatcttttcggaaagaaatgctgtttttttattttagttatccaggaatgcttctttctttctagtgttgcatgcttgtgcaagcattcttaaaaatgtaggcctggagaatatggataattaattataaatgtatagggatgtgataaattcataaggaaatatctcccgataatgtaatactccaattagaatgcaagccccggctgggcacagtggctcacgcctgtaatcccagcactttgggaggccgaggcaggtggatcacaaggtcaggagatcgagaccatcctggctaatacggtgaaaycctgtctctactaaaaatacaaaaaattagccaggcttggtggtg

SEQ ID NO: 556207 - DNA, 330 bp, Homo sapiens
cttctagcctgtagggtttctgctgagaaatcttctgttaatctgataggttttcctttacagtttacctggtgcttttgtcacagctcttaagattctttttttcrtcttaactgtagataacctgatgacaatgtgcctaggcgatatctttttgcgatgaatttcccaggtgttctttgtgcttcttctatttggaggtctgggtctctagcaaggccagagaagttttcctcaattattcccacaaatatattttccagacttttatattgcttttcttcctcaggaacaccaattattcttaggtttggtcatttaacataatcc

SEQ ID NO: 556208 - DNA, 574 bp, Homo sapiens
tgacctaagaacatgaatagacaattcccaaaagaagacacacaagtggccagcaaacatatgaaaaaatgcttaacatcattaattatcaggtaaatgcaaattaagatcacaatgagataccaccttactcctgcaagaatggcaataatttaaaaatcaaaaaataatagatgttgatatggatgtggtgagaaaagaacacttttacactgctggtgggaatgtaaactagtacaaccactatggaaaacagtatagagagttcttaaagaactaaaagtagaactaccatttgacccagcaatcccactactgggtatctacccagaagaaaagaagtcattatatgaaaaagacacttgcacacatgtttatagcagcacaattcacaattgcaaaaatgtggaaccagcctaagtgcccatcagccaatgagtggataaagaaaatatggwaaatatacctcatggaatactactcagccataaaaaggaatgaaataatggcattctcggcaacttggatggagttggaaaccattattctaaatgaagtaattcaggaatggaaa

SEQ ID NO: 556209 - DNA, 411 bp, Homo sapiens
ctagttgctgagactacatacatttcccagtttataaagtcatctcttaaaatgtgccagtttatgaggtaatttctgtggccctcaactaattatgcaaaatcatttagttttaagtaaagtctcatacctgctggcagcttccatgatcaacatccaccctgtgatttgtgtcacaagaaagatttcacaaggttgatttaaggcacattcatygagtaaaacaagagttttgttcacataccaatgctattcttttgaagttccccaatattatattattaccaatgatgacatcgacattaaaatgaattaaagaataaaaagtaaaaaaaaaaactaagcaaaaatgccaagtgcttaccataaacaggcaattactgaggccactgaaaacacagcaaaattgct

SEQ ID NO: 556210 - DNA, 443 bp, Homo sapiens
tggcaataagaaaggaggcaggcaggactcatctctggcccagattaaaggcaccaaaagcacctcttcgttgcccatcaccataagacacccccaccagcaccatgagagtttaccattgccatagcaacgccccaaactaccaccccttgccatggcaacacccaaagttaccgcccattttctagctatttctgaataatctggcttttaactaacatgtattgaaagtgggtataggtcaggcgcggtggctcacgcctgtaatcccaacactttgggaggctgatgcgggtgaatcatgaggtcagaagatcgagaccgtcctggctaacacggtgaaaccccgtctctactaaaaatacaaaaaattagcygggcgtggttgcaggcgcctgtagtcccagctactcgggagattgaggcaggagaatggcatgaac

SEQ ID NO: 556211 - DNA, 637 bp, Homo sapiens
attatattttatatactacctaaatatctaatgtatctattacatataaggtatatataaggtgcattagagagatgataggtagatagattgattgattcttactaattaaacaatttggacactgaagtacaaatgttaaaattaaaacttaagccaaattaaattaatcagaacgtaactgatcaaagaacaattaacaaattaagcaccatcccccgctacactattccaaccagaataggttcagaataactccattggtgccacatagagaggatttatggacagaaagagaaaaggattcatggacagaaagaggaaagtgaggtacagaaaacaaaataggtcagcatttgtcttatttgaacacagtttgcagttggctgcctgtgagtggttgaactatggctgctgtgattggctgagacttagctacttgttataagtgtaggttacagtccgtttacacatcckattggactatgattcactatgtacagagaaacctttaggctgaacctaaaatatggaaggaggcagctgtagattaaacttaattttaacataagtaaacttaaaatggcaggcacttctattgctttaagatttttctttctttcataaatggatgcct

SEQ ID NO: 556212 - DNA, 637 bp, Homo sapiens
attatattttatatactacctaaatatctaatgtatctattacatataaggtatatataaggtgcattagagagatgataggtagatagattgattgattcttactaattaaacaatttggacactgaagtacaaatgttaaaattaaaacttaagccaaattaaattaatcagaacgtaactgatcaaagaacaattaacaaattaagcaccatcccccgctacactattccaaccagaataggttcagaataactccattggtgccacatagagaggatttatggacagaaagagaaaaggattcatggacagaaagaggaaagtgaggtacagaaaacaaaataggtcagcatttgtcttatttgaacacagtttgcagttggctgcctgtgagtggttgaactatggctgctgtgattggctgagacttagctacttgttataagtgtaggttacagtccgtttacacatcctattrgactatgattcactatgtacagagaaacctttaggctgaacctaaaatatggaaggaggcagctgtagattaaacttaattttaacataagtaaacttaaaatggcaggcacttctattgctttaagatttttctttctttcataaatggatgcct

SEQ ID NO: 556213 - DNA, 629 bp, Homo sapiens
atctgttgaaatcctttatccattttttaaactgggttgtttgtcatattattgaattataagagctatttataaattctaaatgcaagtcttctgtcagatatatgtattgtcagtatcttctagggaggaggtagaatagaataacgcaggccagaacagaattaagggagcataagctaattgtcataaactaaagatatatgatcttgaagcccttcactgagtattgagttttaaaatccaatattttatttctttgtcaaaaagcactgtttgtgtgttcagccactttgattcctctacagtaatccagttaataactgcatgagtgcaagcctggcagagcttctaaggaagagcagagctccatatccttcaagtcagtccaccccaataccctgtcctacaaggctcttctttacagaatgtgttggctcacagataaacaacatgtctcctcaggggctggaatattgttctccttttactttcacaagattgaaaaatgtgagagactactttaaggaattcaaaccattatacacaaatggctcccatgtttccttcctttcagaggctccgtcaatatcagcacsatacgaaggccccaagtcactgacagtgcc

SEQ ID NO: 556214 - DNA, 523 bp, Homo sapiens
atcaaggctgatgcttccccaaataattattaataagaacccattccatgagttttttgttctaggaagggagttgtcttcaacatatatatatttgtttgtttgtttgttttgagacggagtctcactctgttgccggactggagtgcagtggcacaatctcggctcactacaacctctgcctcccaggttgaagcgattctcctgcctcagtctcccgagtacctgggactacaggtgcgcaccaccaagcctagctaatttttatgttagtggagayggggtttcacttcagccaacattttaaaagattgtttttgcttggtttgaggaatggtttttttgaatttctttcttttaaattgagaggaagaataaaatagacccgagggtaaaaagataaagatgggaggtagggttggggaaagactagtattttagcagtccgcagtgcgggatgggagatggtcagccttccagctggggagaaaccaaagtcaggaagccaagggtgagaatcccg

SEQ ID NO: 556215 - DNA, 630 bp, Homo sapiens
aagcacagtgggtttaatgatgcagttctacacccaggcgttgtgttcttgactattcctgagcagtggttggggaggagaggaagatccacccactcagaccacaagagcagatgtgagcaagggctgacttatttgcctaattctcacttcaacttaccactcaaccagctgcaggaactcgactttctgagtgtgtgcagccattaacctaaaactaggcagtcgagacctacaggtcttcgagctgttctctggctaagtggagccagctgaaattaagtgctttattgattgccattttaaacaataatttcaactttcattttagattcaggggtacatgtgcaggtttgttacatgggtatattgcatgatgctgaggtttgggatgtgaatgatcccattacccgggtagtaagcatggtatccaatagcttttttttcaacccttgccccmccgcttccccctctagtagtccccgttgtctattgtttccatatttatgtccatatgcactcaatgtttagctcccacttataagtgagaacatgcaatatttggttttctgttcctgtgttaattcacttaggataatggcctccagctgcatccatgttgctgcaaag

SEQ ID NO: 556216 - DNA, 630 bp, Homo sapiens
aagcacagtgggtttaatgatgcagttctacacccaggcgttgtgttcttgactattcctgagcagtggttggggaggagaggaagatccacccactcagaccacaagagcagatgtgagcaagggctgacttatttgcctaattctcacttcaacttaccactcaaccagctgcaggaactcgactttctgagtgtgtgcagccattaacctaaaactaggcagtcgagacctacaggtcttcgagctgttctctggctaagtggagccagctgaaattaagtgctttattgattgccattttaaacaataatttcaactttcattttagattcaggggtacatgtgcaggtttgttacatgggtatattgcatgatgctgaggtttgggatgtgaatgatcccattacccgggtagtaagcatggtatccaatagcttttttttcaacccttgccccacckcttccccctctagtagtccccgttgtctattgtttccatatttatgtccatatgcactcaatgtttagctcccacttataagtgagaacatgcaatatttggttttctgttcctgtgttaattcacttaggataatggcctccagctgcatccatgttgctgcaaag

SEQ ID NO: 556217 - DNA, 630 bp, Homo sapiens
aagcacagtgggtttaatgatgcagttctacacccaggcgttgtgttcttgactattcctgagcagtggttggggaggagaggaagatccacccactcagaccacaagagcagatgtgagcaagggctgacttatttgcctaattctcacttcaacttaccactcaaccagctgcaggaactcgactttctgagtgtgtgcagccattaacctaaaactaggcagtcgagacctacaggtcttcgagctgttctctggctaagtggagccagctgaaattaagtgctttattgattgccattttaaacaataatttcaactttcattttagattcaggggtacatgtgcaggtttgttacatgggtatattgcatgatgctgaggtttgggatgtgaatgatcccattacccgggtagtaagcatggtatccaatagcttttttttcaacccttgccccaccgcttccccctctagtagtccccgttgtctattgtttccatatttatgtccatatgcactcaatgtttagctcccacttataagtgagaacatgcartatttggttttctgttcctgtgttaattcacttaggataatggcctccagctgcatccatgttgctgcaaag

SEQ ID NO: 556218 - DNA, 619 bp, Homo sapiens
attaagcctgggttgaaatacaagattaaagaagtcactaccaaacagtgaagactgagagtgcctgcctgtgctaggacagaacagggctataggatcagctttctgcatctctctcttgagtctagacatctggaatgtagcttgttgctatcaattgctaaaatgatacattaaaaaacaacaacaacaacaacactgaaaatgcctaagattctaagaagtcagtttccaaggtatctaaaactctcagctcatatgggtggctttattaccagaaggatttaaagaggttaaaaaaaaatagaaaaagcaggtttacgcagtcttagtaggtttaagaaagtgggccagatatggtggttcacacttataatcctggcactttgagaggtcaaggtgggtggatcatttgagcccaggattcgacaccagcctgggcaacatggcaaaaccccatctctaaaaaaatacaaaaattagcyaggcatggtggtgtgcacctatagtcccagctactagggagcctgaggtgggagaatcacttgagcccaggagggcaaggctgcagtgacctgtgatgctgccactgcactccagcctgggcaacagagtgaga

SEQ ID NO: 556219 - DNA, 555 bp, Homo sapiens
ttctgttggtttgcaggagttctttaaatatcctggctacaagcctttggtcagtcatatatatgaaaatatattcttccactttacagggtacgtccttactctcctttgatacaaagcaattcttaacattaatatcttagaattcatcatttttatgagcactactttttgtatcctatttaagaaattgttggccaggtgctgtggctcatgcctgtaataccagcactttagaggccaaagcagacagacctcttgagcccgggagcttgagaccagcctgggcaacatggcaaaactccgtctctacaaaaaaatacaaaaattagttggtcatggtggcccaggaggatcacttgagcccgagaggcagaggttgtagtgagccaagatcacgccactgcactccagcctagatgacagagcgagaccttgtctcaaaaraaaagaaaagaaaagaaaagaaattgtttcccaccccaggagcagaaaaatattctcctatgtttttctcaaaaaactttactacattcattttacatttagatctat

SEQ ID NO: 556220 - DNA, 523 bp, Homo sapiens
gggcagatcacttgagcccaggagtttgaggccagcctgggcaatatggtgaaaccccgtttctattaaaagtgcaaaacattagctgcgcatgatggcacgtgcctgtaatcctagcaacctgggaggctgaggtgggaggattgcttgaactcaggaggttgaggctacagcaagctgtgatcatgccactgccctccagcytgagcaaaagagtgagaccctgtctcaaaaaaaaaaaaaaagaaaaaaaaaggaaattaaaaaaaggggatacaaagatgatgagagagaatggaagacatacctggtggtagtacagcccctggctactttccccaaaaacattggcgactctgccctatccatccttgattatgtaaacccaacttctctatcttgctcgaactagttcaagttcagtttatgttacctgcaactgagaggatcttaatagatcctattttacaaatgagaaagcagagtctggaggaagtgtaattcacacagggtcacacaaagc

SEQ ID NO: 556221 - DNA, 550 bp, Homo sapiens
aaaaaaaaaaaaaaaaaaaagaagacgcataacactttattcaacctgaacctattttcaaaaactgtcttttatctctgtctttaaaaacaagcaacaaataaagatcctgtgtaagctgtgtaatgagagaacactcaatactataggttcataactaaaaacaagaaaaatgtttttgtttgttccaacttttctaagtgcaagtaaaccgtcaaaaaaaaaagacctcttcttctgagcacattacatagtggtaatattcttagtatattgtggtgttaggtagttgaaatttgcagtgtagaataatragtaagagtagagaatggactttgaggtggaaccagggtgttaatcatagctctgcctcctgctagctattagcactttttaaaaaatcattgagccttggtttccttatctgtgcatgggaggtataccttttccacaggttattttgaagattaaaaaaaggatacagcccatatcacggttatcctattcctgtcacaaaataagcaggtaatgatatggacaggagacaggg

SEQ ID NO: 556222 - DNA, 275 bp, Homo sapiens
ctgttatcttcgtaaactgagaatgtatgtcacctcaggaccactagtgtacaaatggattgcagaacatgtgtgtttgaacaatattaaatgtgattgtaaaacatgggtgtttgaacaatatgaaatcagtgcaccttgcaaaaaaaaaaaaaacagaataacagcawtttgcagggaacaaggaaagataaccataaggtttgactacctgtggggtcgagcagaatacagccatatttttcttcttgcagaaagcctatagacagatgtgc

SEQ ID NO: 556223 - DNA, 573 bp, Homo sapiens
taaatcttcaataagattattgtcaactgaaacagtttacagaatgggctccagaattatattatagaaaaacatcattgaatacaaattctaatgcctgaaaaatatgttttttctatgagctactattaattattaacgaattaaggcatttgctcattttattcaatgtttattacaaatatatgatttatcaggcactgtgttctgccttatgtgttatattgtgtcaattattttcctgattgtttttctcattcctctgtgcgcttttggggacagaatactcctgcccaacaccacataaaaaggagaatttataaataaaaatagaagcaagatctatgcatgtgaaaggtgtttcattcttttttaaaattgcaagtctcatactctttgagaaggaacaattaataaatttttwtttttttaagatggagttttttcttttcactcttgttgcccaggctggagtgcagtggcgcaatctcggctcactgtaacctccacctccggggttcaggcgattctcctgcctcagcctcccaagtagctaggattataggtgcatgc

SEQ ID NO: 556224 - DNA, 463 bp, Homo sapiens
tgacagcttgcactgtgtgcctggaaaagctgcagacactcartgtcagcccatgaaagcagctggtaggggggttgtactcacaaagccacaaaggcagagttgcccaagggtgtgggagctcaattgttgcatcagtgtgtcttggatataaaacatagagtcaaagaaaattattatggaactttaaggtttaatgacagatattgtttgactgtgtccccacccaaatctcatcttgaattcccgcatgttgtgggaggtgcccagtgggaggtaattgaatcatgggggcatgtctttcctgtgctgttctcatgatagtgaatatatctcatgagatctgatggctttatgaggcagtttccctgcacaagctctctctttgcctgctgtcatccacgtaagatgtgacttgctcctccttgccttctgtcatgattgtcaggcttccccagccacg

SEQ ID NO: 556225 - DNA, 568 bp, Homo sapiens
agttgttccctgagggatcccagggagtagaagrtgggcagtacagactgagttgaagtactgccaggtgacactgtttgaagctggttgaagcttgcctgattctggtccctgccatggctagagaaaagatgaggccatggggatttaagtaatgcacaagaggtatgcaaagttcatttcaaactctagcccctttgagaagtaattgacccattaaattatttcaccagccatcgcctcacaccattgcattcttgctcatctgaagggatcaggcatgatgtatccttcagtttcattccctaatatattcccgccacaactacatttggtggttctcagacatccttgctgctttggctcccatagggcatggaaactcagttttcgcttctctgaccattttaaccaatggcaggcacaattcataactttggacctactatttcttggcatctggcaccagaatccaggctcatgatttcctaaaggctttcacaaaagtgcaggtgggtgtcttcttgtctctctcttttcctatcttctctcccagggtccctgcaga

SEQ ID NO: 556226 - DNA, 571 bp, Homo sapiens
atagatgctgcacctaactggtttctgcagtcatttaaattctttctcctacctccaccactgtagctcagcccaacacaatatcatgcaaaggcacgtgaactagtctccttacctctgctcttgctatttcttctccaaacccttacttcaaatgttaacgtatttttttaaaacatataaatcggatcattttctttttattttccagaaactaattcatggcttcctattttattccctctaaaatcgctaatatttagtgtaacttctttcatttgtatgttagtccttgctcttctcttaacttaatcttccccactattccctttcttgcctcagatcttggcccatttggttaattctcattggaattatcttgcccctcttacttactcyattttattttattttattttattttattttatttattttattttatgtattttattttattttattttattttatattttattttattttattttataatttttgagatggagtttcccttctatcaccaggctggagtgcgatggcgatatctcggctcactgcaacctcc

SEQ ID NO: 556227 - DNA, 421 bp, Homo sapiens
tgacccaaacacttcacaccaggctcaccttcagcattggagattacatgtcaacatgagatttggagggcacaaacatccaaagcatatcacaccctrgaaagtaactgaatcatgggggcaagtctttcccatgctattctcatgatagtgaataagtttcaggagatctgatgggtttgtcaggggtttctcttttgcttcttcctcattttctcttgccaccaccatatagaaagtgcctttcccctcccaccatgattctgacgtttccacagccctgtggaactgtaaatcaaatttaacctctttttcttctcagtcttgggtatgtctttatctgcagcatgaaaacgaactaatacaatatattggtacaggtagagtggggcattgctgaaaagatacctgaaaatgtgga

SEQ ID NO: 556228 - DNA, 632 bp, Homo sapiens
tttcaaatacagaaatctggcctgataacaacaaaagcctgaaggagaaactgaaggtaacaacagattatgcccatgaattaatctcaggcctgtgataagcggtcatccccctgaaatctatacaaagagactcagaacccttttatgttagatcattgtttcctcattccattcacccacacctcccaagtgtgcgtacaattactatgttttaatagctcagtttttaaatgacataggtgttatggttatagaaaagtatgctagaaatttggtaaaccaccatgaagagacatgggtaacctcaagtggttcactattttaataaaaattgttaattgacctccctgacatgtgacagacacatgcaatgataaacatgaacacagatgcccagtcctctctctcacaaagcctatagtmatagggagacaagtagatatggaattaatagctatgagtattctaaaaatttgaatgaatactgtgttttctgaagttgagaattctatgagatttagcccagtgttgggcggacaagagaggcttgccagaggcaagcacattagctgagcaacacattgaagtgaatcaagggcataaataatggccttctaagtatgattagg

SEQ ID NO: 556229 - DNA, 583 bp, Homo sapiens
ctacattattactacactaatttctgaaaggaatatagctacagaaacttcctttaggttagtgttttaggaaatacattctttaccctttttctttcaaccattctgtaccctcatgtgtgccaccaagtaaaaacattttagtatatttacatraatttaatcatcactatatctgggtttatatcataaagctatttgttttctatttgacccactgcttttatgtgggttttttttttaagatttacttatcttcccttgatttttttcagttttcattattctcctttgcccatccactcacttgctaattatacattcttaattgctttcatattatttttagtgaaaaccccaatgattacaacattgtagactgttctagaagtgaacacttttggccagacatggtggctcacacctgtaatcccaccactttgggaggccaaagtgggtggatcacctgtgctcgggagttccagaccagcctgaccaacatggtgaaaccccttctctactaaaaatacaaaaaaaaaaaaaaaaaaaaaatagccaagcatggtggcaagcacctgtaatc

SEQ ID NO: 556230 - DNA, 591 bp, Homo sapiens
attcaaaataaatctagaaaaccaactgattgcatcaggagctgggagctgggagatatgtttatgtgtttcgtgtgttcttatcactaagggaagactcattgccaagagcagacactctggtggatctggtcctgtaaatgtaacaactagggcaataaacctagatttgtggttgttcacccatcagacattccaccaccttattttgggtgtaggaacttccagtgtttcatccaacatggctcatagtttactatctttctgaagctttagacttcctgcaggttactttgtccctctatccctagattctgcatctttaaatggccataataaaagtcccttcctacttcataggattgttttcaggcttgagtgagataatgcacgtaaagcattaatgttcagcatatataaactaaacaataacaactgattgataatggtcatggtggtcctcttctttttctacaatagctattacatctcctcttccctttctttccttcctttcttcttcttcatctagtccattytaagtagcatttatatccagaaactatttttcaaataatagtctgttaacgt

SEQ ID NO: 556231 - DNA, 548 bp, Homo sapiens
acagtgcttgagctctgctaagggaaagactgcctcctcaagtaggtccctaacccccgtgcctcctgactgggagacacctaccagcatgggttgacagacacctcatacaggagagctccagctggcatctggtgggtagccctctgggcgaagcttccagaggaaggaacaggcagcagyctttgctgtctgcagcctccgctggtgatacccaggcaaatagggtgtggagtggacctccagcaaacttcagcagacctgcagctgaggggcctgactggaaactaacaaacagaaaggaatagcatcaccatcaacaaaaaggacgtccactcagaaaacccatctgaaggtcaccaacatcaaagaccaaaggtagataaatccacacagatgaggaaaaaatagcgcaaaaaggctgaaaattccaaaaaccagaacacctcttctcatccaaaggatcacaagtcctcaccagcaagggaacaaaactcaatgaagaatgagtttgatgaattgacaaaagtaggtttcagaaggtggga

SEQ ID NO: 556232 - DNA, 609 bp, Homo sapiens
gatgttctgagtttctccccgcagggagataggtgaaagagtcctagtatttagaagtactgtctacaagctgattactctcgatgagtgatataagtgtctttaaagcactatttagtctaagctagtaaatattcctaagacagacagtaactttacaattcatttgttttgttgtcttaaatggcaccaacaatgttgtttttctgtcactatacgctttttatatgttttctaagatgatgaatcatacagaatcaccmaactcatatttctgttcaggtctgaccatttttacattttcatttgcctatgtaaatattacccacatattatagttcataatttgtgatatgtcagcagatttcattgaacttgagtcttaggtcacaatagaactaactacatattggcttcattctagtccaattttgttttcttttatgcctacacaccaagggtgttcgcttgaaaacaagtcttccttcacctcctgctttttctcctcacctgctctttaaaaaataattgtacctgactcaaattgatagtcttctaggattttcattcgctaactcaaattgctagtcttctagagttttcatttgc

SEQ ID NO: 556233 - DNA, 529 bp, Homo sapiens
cccacaatagtatcactcatgttcctctttgtgatcacacccaattccaccccaccatagcaccaccatacctaatccctggcaacgactaatttgttctctacctctataatttggtcattttgaaagtgttatataagcagaatcacaccttttgagattggcttttttcactaacatatggcccttgagtccatccaagttatttcatgtaccaatcattttttgctttttattactgagtagcagccatggtatggatgtaagacaggatcatttttgtgagatatccagttgaattctgtgatcrattagtctatatcaaaatacatacagctatatatatgtgtgtgtgtatgcattctaaatataaggaaactgaccttggggaaatgtttttaatctttacatcattagccttaaaaacagttaatttccaataacactattgattcaacccattactcacatatccaaaaatacactgggagaagttggcattttaagcggtataaaacagtggtgagca

SEQ ID NO: 556234 - DNA, 473 bp, Homo sapiens
caagtttttagacaaaacattgcttccttaaccaactgtaaatcaaagaatcttagaacccacctgtttgtaagcctctactttaagatactcccaccttttggggccaaaccaatgcataacctccatatattgatttatgattttgcctgttacttctgctttcctgaaatgtacccttacctttcatagtgtacccgtgctcataagccatcggggagtttgggtcttaagcgtgagttgcctgattctccttgtttgtcaccctgcaataaacgcctcactttctctcactacaagtcctggtgttagtgtktttgtttgtttgtttgtttgtttgtttgtttgttttgcacactgggtgagctgactcaagtttggtttagtaacaattggaggcagatattagaatgatgacctacaagtcaaggaatgccacagatttctggctgtcaccagaagctaggagagag

SEQ ID NO: 556235 - DNA, 565 bp, Homo sapiens
tttatgtggttgagcttaatagattacataaataattcaagttttctgaacccttttgttttttttcctcaggagcagaccccttggctgaattctctaagaaaacattttccccacatcacttttcctctataaacagattcttaggcttcattcwtttcctttagacaaggaagtttcagtctccgtgacctatatggaatgaaacgctagaggcaactggtctttgaggttttgtctgctatttctctcgtttacacatctctgtgcatgatttatcctaggagacaatactggggattctatctaattcacattcaaagctgaggtttttccagggcattttctctcattccatttggcacagtagtaactgtgtttgacaacatctgccttacagcaccattctgcagctccatctgacacttcattctcgttcacatgctcttcctgcctgtcttctgagggagatgttttcacaacagcgagaagacagtaaggacgaaccagagcggcacttgcccaacgaatatacgtcatgaacccaccaaatggcttcactgac

SEQ ID NO: 556236 - DNA, 492 bp, Homo sapiens
gaattcagcagcacattgaaaggctcattcatcatggtcaagtgttatttacccttgggatgaaaaagtaaacatattcaaatcagtaattgtgacataccacactaacaaaatgaaagacaaatcacatgatcatctcaatagatgcagaaaaagcatttgacaaaatttaacatctattcatgacaaaaactctcaacaaattacgtatagaaagaatgtacctcaacacaataaaggccatatatgacaattccacagctaatatactcaatggtaaaaagttgaaagctgttcctctaaaatcaggaacaagacatagattctcaatctcaccacttctattcaatacagtagtagaaaccctagccagaacaattaggcaaggcaaagaaataaaaggaatctgaatcaaaaaggagtaagtkaaactgtcgctattttcaggtgatatgattatatacacaaaaacccttgaagacttcaccaaaa

SEQ ID NO: 556237 - DNA, 602 bp, Homo sapiens
gattatatacacaaaaacccttgaagacttcaccaaaatacagttagaaataataaatgaattcagtaaagttgcaggatacaaaatcaacattaaaaaatcagttgggtttctctatactgataacaagctgtccaaaaaagaaatgaagaaaataattcaatttacaatagataaagatataaaatacttagaaataaatgtaaacaaagaagtgaaagatctgtatactgaaaactataaacatgcataaaagaaattgaagaaaccacaaaaaaatgaaaagatatcctgtgttcatggattgaaagaattaatattgttaaaatgtccatattacccaaagcaatctacagattcaatataatccctatcaaaattccaataacattgttcacacaagtaaaaaaaaattccgaaattcctgtggaatcacaaaagacyccaaatagtcaaagtaatcttgagcaaaaagaacaaagctagaaacatcacactacctgatttcaaaatctactacaaagctatagtagtcaaaatggcatgatactggcataaaaataaacacatagagcaatggaacaaatagagatccctgaaat

SEQ ID NO: 556238 - DNA, 570 bp, Homo sapiens
tgccaaacttatggatggaggggaaggctccagatataatatttattttcctgaatatgtttcaagtataaagcccactgctaccacatttaggactacgtagtgtagaaaggggctcttcatctgtcagttggccttaacatgctcctcacgcctaattcatatggaataacttttctttctttttctcccataatctcaccatttttttcttcctgtcttctttcttgctttaaaaaaagataaatggtttaattttatyttttcctccaaaaaacaatgcaggagtgttgacataactattcacccactagctgagagacagatacccatatggattcaaagggccaaatacagatcaaatctgattcaaaatggaattaggaagtctgggttcatattaatatttttgggaatgaagatgagattgcacaatgttcagacaatttagcatcaagggcattctcctattaagggaggttataaatcagaaattgtctcttctaggagaggacatagtgggatgtttgtgattatttgagggaagcattaaagtttgacttcccttgc

SEQ ID NO: 556239 - DNA, 575 bp, Homo sapiens
atcaacaaacaactggaggaaagctacttaattgatttaattagtgatttgacattttcagtctacaacgtgaagaatggctaacctttagaatttagaagttgccgttagatctggaggtttcccaagtcagttaaatattacactcctaaaataaatctcaaatatatcatgtcaaggaatgatactaatgatrctaaactccagatgttaagaaaagtccaagcccaaggttttggcatcagtctgtccacaactgcactctttcttatcaggttcatttacttgctgaatcctgcagaaagcaagcgtaagcacctcacttcagtcttctcatgtcctcctacttggtgccttacgtcaactttttggtctgtctcccagatagagtcctcatttgttgtttcagcctcatgtcagcttattctacagccactgtcttacaggtatcattcctgacctacaaaccctttttcaagaccttatattggcaactaactattaactcttcaactctgatcaactcaaactatgaattattatattctctactttgtggctccagtttctcaaaa

SEQ ID NO: 556240 - DNA, 609 bp, Homo sapiens
tacagttcattgttttttatttcttgatgtaattataataatattgtagaattttcttttatgggtgtttgcttctaatatatataaatacaacttatttttgtatggtgacatttatcttamaaccttgccaaattaacttactagtcttctagagttttttatttgtttgtttttttgtaggggggggggagtagaattctgaggatttctaccaaaaaaaatatgttttatctgaataaatagttttacttcaaactttacctttttctcttccaattgcactagcttggacctcaaatataatattctattgaagtagtgggagcagatatccttgccttattcctgatcttaaagtgaaagcattcagtttttcatcaataaaaatgacatcagctgtagttttttcatagatgtggttgtcaaattaagaaaattccctttctttcttacttgctgagagatttatttttctttttttaattatgaatggacagtgaatgttgtcaaatacttaatctacctttattgagatgactgtatgattttttctcattaatatctaaatgtggctacttccactaatcaagcagctaatgttaagct

SEQ ID NO: 556241 - DNA, 399 bp, Homo sapiens
tcatgacacactgttgccattggtccatgcacaaccctatttaatattaattacataataatttattaagtagataatccagtccaatgactcaaaaagtatctataagaaatacctaccaatgtactccttccctgtattgtgcaactgcttagcctcgtccttatctgcaaatggcaacattcacagaatgtttctttgtactctttttttttatttatagctttacacacacacasagagacacgcaaagcatatattttctagtttgcctgttaccgaagttaataaaaaatttccttctatttaaaaaaaaaaggtggaagatttttttttaattttctgcaaaagattgtgtaatactggcattatttactttttaaggcttttgtagaattc

SEQ ID NO: 556242 - DNA, 521 bp, Homo sapiens
tctttgcatttaccatgtttgctgttcagtaagcctcttgaacctgtaatgttctttaccagctttggaaaatgccttcctcttacatctgtaaatattttttctgcccatttatcactctccactccctctgagacatatattccatttatgatagccttcttgatattttcccacaagttgttaagactgttcctttttaccagttgcttttctctctattcttcagattggacaatttctattgatttstcttcaagttcactatttcttttgcagcctttaatccattcttaagcttattcattttaaatttcatataatgtacttttcaattctaaaattcccattaggctcttttacatagtttccatttctgtgctgaaacattctctatgtttattatgcccatattttgcttcatgttcttgaatatattaataatttgttttacagtctttatcttctaattccaacatctgtattatctccaagtctattttattgactctccctacacc

SEQ ID NO: 556243 - DNA, 381 bp, Homo sapiens
tgaaaaaaagtaggttgcaaaaatatgcatacagtgtgatcttatttatataggaagaacttaagtaagaatggtaacctgtattctggtggctacatatactagcaagtcaaaatataaaaaataaactgaaagaaaacacacaaagctaattacagaaattaatttgatccaggaggaggtaaaaaattcggaattaagggtcatagaaaaatgtgatttaactgattcacgcaaaaagttctacttttraaatgagaaatatatccttacagtactgatattttttcaagcaatgtatactagaaaaattggccaagagcaatatatacaaatattacccagtagttaattaccagtagttaatgggactgtcagtcc

SEQ ID NO: 556244 - DNA, 659 bp, Homo sapiens
ggaagcattcttcactttctaatttcctaagagattttaaatttataaccaagaatgaatattaaatttttgttaatttttcttaatgtcctttttggtatctatggaaaggctataatataaaaatatattatatatattttatatatttattttatatatatataaagtttttcaccctttcaactcatctatatggaaaatrttacccttataatttgaaatagcactctgtggttatgaggtagtttgctttctgtattttcctgatttcagttgaaaaatcaatttcaaaaaaattttccccactaatgttcaccagttaagtgggtccattgtttctttcacatgcttttgttttttgaaatatagtgttggtaccttatttacgttatgtgaccatctaaatcatttggaagtttttccttctctttgttattatttacaagagtttaaataccactagaggtatttgaattttcatgtctgatagaattcattgttgaaatcttatgggctagatgctctttttgagtgggagttatatttttctgtcaattttgttaagttcatctttagttaattggtcgtttttcttttctatttcatctaggctaattttttttctaattcatattttctaaggacatgatgaatta

SEQ ID NO: 556245 - DNA, 397 bp, Homo sapiens
tccagctttttaaaatatttcaattccgttttatttggaaaccttaactcctggacatgtatagctttagttctacgtgttatctttagttctaaatgccagyacactggtctttcctgttccaaagttcctaactttgacgacattttaccagaggctagattgttatattacaatattatttcccacaaataaggactcacagaagctattccttaataccttgcaaattgaggataaagtatctttcatttgtcattatgtatcaatagtaataacttaggttatactttctccgtctcagaaacttataagaacttttccattgtctaacgatatttaatatgctgtggagtatactgaaacctaacttttttttctcccttgtaggtcattc

SEQ ID NO: 556246 - DNA, 448 bp, Homo sapiens
cttgatcttcacagggtagctgtgaagatcatttgagaaaggatccaggtctttttgaaactttaagatgcagtagaagtagaagaataatattcctttacatttgattgcacaaaaacaaacaagtggcccaggtatcctcctgaggacacgagagtacgtggtcaccctgctagaaactcatggagtcgtgatgtgactcagggatgtctaaatctrttatgggttgattgtgccccccacaaaagatgtgctccagccttcatctctcagttcctcaaaatgtgactttatttggaggtagggtcttgacagacatactcaagttcaaataaggccactgggagggctctgatccactctgacgggtgttcttatgaaacggggaaattgggtgcagagacaaagacacagggtagatgccccatgaagacagaggtttggggtg

SEQ ID NO: 556247 - DNA, 592 bp, Homo sapiens
tttgggaatgtattacatttccacaatggcctaccatatgaactatttctgttaaaattctctggacataaaggaagaagccatattatttataaatacagatttatatgcataactactacatcatgtctgttagttatgccatttaaatcttctctgccctcatttatttttttacttgcttgatctgtcaagaaatgagagaggggtgtttctatcttacatgattgttaygaaatttctccttgcattaaagctatgatatgtcacacactgtttcaggatgtcacatcttcttgtgaattttacttttataagtgtaaatgagctattagtcctatttagcatttcatgatttgaattcttctttatctaaaatacaattgcaagcccttctttctatggtttctatttgttcttcccagctttttatagttggacttgtttcttcactaggtcattgtacattataggtaaccttttcaatataaggatttaaccccttaaaattaactcttagccaggcatggtagcactgtctatagtcccagctactcaggatgctgaggcaggaggacagcttgagcccagg

SEQ ID NO: 556248 - DNA, 614 bp, Homo sapiens
tcttatgagacactggtatctagaatatatataaaaaattacagttcaataataaatctgattaaaaatgagcaaaggatttgaatggacatttctccaaagaaatgcaaaaggtcaataagcacatgaaaagaccgctaacaccattagttattagggacatgaaaatcaacatcagttatcactccccatccattaggatggttaagataaaaaagacaggtgacgtgttggtgaataggtagagaaattggaaccattatacatcgctggtataaatgtaaatgaaaatgtaaaatggtgaagctgctttgaaaaatagtttggtagctcctcaaaaagttaaacatagaattactagcaattccactcttaggtatttattcaagattattgaaaacatgtccacacaaaacttgtacatgaatgtacatagcagccttatttataaaaccccaaattggaaacaacccaactatccatcaatttatgaatgattgratgtcatatatccatgcaatggaatatatttcagctgtataaaggaatgaaatactgatacatgccacaacatggattaaccttgaaaacttaatgctaagtaaaagaagcca

SEQ ID NO: 556249 - DNA, 469 bp, Homo sapiens
ggtgagtcccatagtacagagacacaattacctaactgaagaaaggactgaggagaagaaaggaaaaagaaggtgcttttcaaaggaatcccaggggttcaggatgcattckaaaggggtacagactgaagatgaatggctacctatctagaaagaggggagcaggtgtccctggttcctttcttttcctagcagacacccaggatacatgagggagagagggaagagcatcttctttccatcttccatccttgcatctccaagtcccggcgaccttggcaggcagcaccatgagtgccaaaggggcttgcatccatgaaacgtgaaggccctagagaacaggaattatctgctctcacctatgtctctttcccatctactttcagtagcgttggagttccctagacctcatttatgccaatggatactaatgtgtcctttatccatgaaacaggaagcttgggtttag

SEQ ID NO: 556250 - DNA, 205 bp, Homo sapiens
tacaggcaactatgccccttttctagttttatgagtcacacgtcaatgcttgtgactcagtgatactcattgagtatgtatctcrtggtgaaaattttatggtatttcttcctcagtcttcttgaataatgaaataagaaaattgtgtcccaagaaagagtgtccaacactcaagcagagatgtgaaggtttggtttggtataga

SEQ ID NO: 556251 - DNA, 563 bp, Homo sapiens
tattcatggacacaaagatggcaagaatagacactggagactactagaggggaaagggagggaaagggcaagggttgaaaaactgtttggtactatgctcattacttgggtgatggaatcagttttacccaaatctcagcatcatgccatatacccatgaaataaacctacacacaccccctgaatcaaaaatagaagttgaaattatacatacatacattcttacatatatacatgagagacagctttagacatcatgaacatattagtcrtagactaaactctgagactgggtgaaatttccctgtctcccaccatcctcttaagtgtagattttcatatttattgttttaaaacatttattttctagatctctattatatccctgcctttgaaataagcaaaagagaaaaagatcctaaatgacctagcccatatcttttaaactggctaattcttggataagccatttaatatttctgaatcgcagtatacttgtctgtaaaacagagctaattatcaagaaccctctcacaaggtgctgggagaattggcttaacagg

SEQ ID NO: 556252 - DNA, 563 bp, Homo sapiens
tattcatggacacaaagatggcaagaatagacactggagactactagaggggaaagggagggaaagggcaagggttgaaaaactgtttggtactatgctcattacttgggtgatggaatcagttttacccaaatctcagcatcatgccatatacccatgaaataaacctacacacaccccctgaatcaaaaatagaagttgaaattatacatacatacattcttacatatatacatgagagacagctttagacatcatgaacatattagtcatagactaaactctgagactgggtgaaatttccctgtctcccaccatcctcttaagtgtagattttcatatttattgttttaaaacatttattttctagatctctattatatccctgcctttgaaataagcaaaagagaaaaagatcctaaatgacctagcccatatcttttaaactggctaattcttggataagccatttaatmtttctgaatcgcagtatacttgtctgtaaaacagagctaattatcaagaaccctctcacaaggtgctgggagaattggcttaacagg

SEQ ID NO: 556253 - DNA, 618 bp, Homo sapiens
aaccaacaaaaagaggacttgaagccargtctaactttcatttgaatgttcttttattgctatagtaggtgaatttagctactttgagggtataccaagtgcaaagttattgatattcaatatgacttaagtacttactctgtgctggtagcatgctttctatgcattatcttatttaattctaggaggtagaacactattgctgtcccctttttgcagttgagcaaactgagtcttaagagaggttaagggatctgaccaaagttacacagctattaaatgtcagaactggatattagcctggtactctctgacttaaaagactcttctcttaattactagatcgttaggggccctcaataaacaaatagtttgtgtcttgttactcctgaaaagtcaattgaagcttaggatttcaatagttttgacatagtaccttgatgctctaagaaagccagagcttcaacactgtgcctttgcctttctgacactccagatgatgcaggcacctctttttagccatgtctcacattttactcatttttaatggaatgctaattttgtatgcattctccatatccagatttagacaaggcacatagttgagcagacttagtt

SEQ ID NO: 556254 - DNA, 571 bp, Homo sapiens
attaatgagctttgtaaacatcctcctagtatattttgtaatagataaaaattttccaaaaaaaacagacattcttaggtgtgtggtctctttttctaactcctcacttgtgaaactccattctatttcaaacccatatactttgcagaaaaacttgggagctgtattagtttattctcatgctgctatgaagaaatacccaagactgggtagtttagaaagtagagaggtttaattgactcatggttctgcatggctggggaggcctcaggaaacttataatcatggtgcaaggcacctctctagagggtgacaggagacagaatgaatgcctaacgaagagggaagccccttataaaaccaccagctctcatgagaactygctcactatcacgagaacagcatggggggaaactgcccccatgattcgattatctcctaccaggtccctcccatgacatgtgaggattatgggaattacaattcaagatgagatctggatgaggacacagccaaaccatatcaggagcactctacagttcttttatctttacaaactgactttcttcaa

SEQ ID NO: 556255 - DNA, 660 bp, Homo sapiens
ttaggaccagaagggaaatatatgaacagacccaaaaagtgcatcaagacagtacacaaagggatgtaggagctgagggaatgagtcacatggatactttaaaacagaataattgtttgttcaaaattgtgagcaaaatgttcttactgccaggagaartgttgggcagacttatttctacttattgtgtaataggggcagaaatcccatagttgaaatcgtcatgggagagagtctagggctttagagtgacaactccaggttcatatcctagctctgtctttgtatgactctgagccttttacttaagctctcaccatatcagttttatcatcaacaaagtagggataatattatttaaagtatctcataggacttgttatcagaaaaaaatattagcacagtatctggcttttagtactaaccattcaataatatgtagctagctccaagatggaaatcaggaatgctcagaacagagagataactgggagactccagttgctacttttggatggaagaatacatttataaaaggacagataagagggaagagacttctaacttggtcgtatggtcagagtttatttgcctaagacatactgacctcaacatgtaagacttcttagtgaatatttctatcccttgctggaagaaaat

SEQ ID NO: 556256 - DNA, 604 bp, Homo sapiens
acttattgtgtaataggggcagaaatcccatagttgaaatcgtcatgggagagagtctagggctttagagtgacaactccaggttcatatcctagctctgtctttgtatgactctgagccttttacttaagctctcaccatatcagttttatcatcaacmaagtagggataatattatttaaagtatctcataggacttgttatcagaaaaaaatattagcacagtatctggcttttagtactaaccattcaataatatgtagctagctccaagatggaaatcaggaatgctcagaacagagagataactgggagactccagttgctacttttggatggaagaatacatttataaaaggacagataagagggaagagacttctaacttggtcgtatggtcagagtttatttgcctaagacatactgacctcaacatgtaagacttcttagtgaatatttctatcccttgctggaagaaaattcccctgagaatgggaaactgcaagtgcagataagatgatgatgaaaaaaatcctcagtttgagattctgtggataaagggaggtaagtgagttcaacctctaatgcctgtttttgaaagctc

SEQ ID NO: 556257 - DNA, 604 bp, Homo sapiens
acttattgtgtaataggggcagaaatcccatagttgaaatcgtcatgggagagagtctagggctttagagtgacaactccaggttcatatcctagctctgtctttgtatgactctgagccttttacttaagctctcaccatatcagttttatcatcaacaaagtagggataatattatttaaagtatctcataggacttgttatcagaaaaaaatattagcacagtatctggcttttagtactaaccattcaataatatgtagctagctccaagatggaaatcaggaatgctcagaacagagagataactgggagactccagttgctacttttggatggaagaatacatttataaaaggacagataagagggaagagacttctaacttggtcgtatggtcagagtttatttgcctaagacatactgacctcaacatgtaagacttcttagtgaatatttctatcccttgctggaagaaaattcccctgagaatgggaaactgcaagtgcagataagatgatgatgaaaaaaatcstcagtttgagattctgtggataaagggaggtaagtgagttcaacctctaatgcctgtttttgaaagctc

SEQ ID NO: 556258 - DNA, 609 bp, Homo sapiens
tgaaaacatggatcgccctttagagttgtgcaggggaaaatgcctgggtttctagaggatacagatgttgaatatcctctcccatcatccccataagtcacttaatttttagcaactagacttctctcaaatgtttctagaactcaccaaatcctccagcaggtaaaaatccaaataatcccttatcaggcttgtgtcccaaattctgcttcaaaaaaaaaaaaaaaaaaaaaaaaaatcttagagcacataaaaattctgrttctggaaaatgcagtcaccaaagtggtaggtaaattaagagagcacaagcctaaagccagaagagatggggctgccctctcagattagctgggggtcttttcaaaggaaccaaaattgtcacattttggccagctttgtgaggccattcctcaagggaggcagagtggcatggtgagaaagaacccgggctctggagtcagacaagcttgggttcaaatcccagctctgcccactgtgtcacataaccttgagtaatttatctgagttccctcggctgtaaaatggacctgttaataatcctgccctcataaggctgagatgaggggcaagggggacaacacatgg

SEQ ID NO: 556259 - DNA, 345 bp, Homo sapiens
ctgaattcaaaagccgcgcgggctcatcaggctgcagttggggtaaaatttgcgttttaggcaatttttttttttttttttttggcgtgtgtcagtgggggaggggccgggcggcgggtaggaaacttgtgtcgcagcaaagaaggaggaggaggggagggactcccctcctcggtcagaccggagccggccgcaccgaaaaaggttggactcgggactccgcaggcccccccagccactccgcggggcgcctcggaggctgtgacctccagggaggtccsgctgggtgcagcgtgacacgccggggcggttgccaaggacctgcccaatctgcgggtccagttg

SEQ ID NO: 556260 - DNA, 414 bp, Homo sapiens
ttaggtcattaacaaaaactgcatatttcacactgtscttgagcacattgatgccttcgggcaactgtctctgacaaggtacagtcccatggactctgcagatgaaataccgcccaaggtgacatctctctccccatcaaaatgtgctgtgaaatctaaattattggggctgtggtatggggtttgcagcaagtcttaacctcactacactcttctcattaagggttctttgatgatttagtgaggactcatttagttgtttatgtggaaaaaattgtttaaggataaaaaggctcttttttttttttttctgggcgtggtggctcacgcctataatcacagcactttgggaggctgaggcaggagggttgtttgacatcaggagttggagaccagcctgggcaacatagtgag

SEQ ID NO: 556261 - DNA, 544 bp, Homo sapiens
tcctcttttactgtcattaagtaaacataaggctggggtgcggtggctcatgcctgtaatcccagcacttcgggaagctgagatgggaggatcacttgaggccaggagtttgagaccagcctgggcaatatagtgagatcccgtctcttaaaaaaatgaaaaaattagcagggcgtgatggctcatgcctgtaatctcagttactagagaggctgaggtgggaggattgccagagcccaggagttttgatggtgcagtgagctatgaccatgccactgcacttccagccttggtgacagagcaagaccctgtctcacaaaaaaaaaaaaaaaaaaaaaarggaaaagaaaaaattagcagggcgtgatggctcatgcctgtaatcccagctgctagggaggctgaggcaggaggattgcttcagcccaggagtttaaggctgcagtgagctatgaccatgccactgcactcccacctgggtgacagaacaagagcctgtctttaaaaaaaaaaaaaaaaaaaaaaagtaaaaataagcattaat

SEQ ID NO: 556262 - DNA, 281 bp, Homo sapiens
ggattgggggtgggttggaggggttttgccatttcctctgaccctgagaactctcgttcttaattccagggcttgcttttcgggccacagtgccttgactcttccagtggtagggacctccacccaggcccccagatgcccctaagacaagccccaaggcctctttctacccaggrtttcccgcctattctgcagggagcctggggaggctcactcccaaataagggagctgaggacattctggaatgcaccaggattctcaacctctatccctgctgtgt

SEQ ID NO: 556263 - DNA, 588 bp, Homo sapiens
gcctggggtgaggagtgaagtcacagaaaaagaggaggaagggatactctgcggtaatgtggaagaaacagaaggtgaggtcgtgacaggtaaggacaacagagaagatgaagagctagttttttccacaaagagagagctcttccatgatggattttcaggactcctactcataagagttgtcatctctgagtgtaaaaatctaggaggaacagttgagtgggtccttgccaagggggctgttgttgtggccaaggtaagagttactctgtgctgtagccccaggagaacttttttgggtggtgatggtcatttgtgttgattctgacatcatggatgaggaagagagcctggtgatcacttcagtgatgatgtctggagacatcgtggactgatcagagtcagggatgtgtrttctattagaggacatgatttctgtcatggagacttcagtagtagcactagtgggcactccataaaggactgcacttgtttctgtgattgaggtggtctcttcagaggtgctagtctccctgaatccaggagtcaatgagaatgttggctctgtcggaatcctcctagtctcag

SEQ ID NO: 556264 - DNA, 449 bp, Homo sapiens
cctgcctcagcctcccgagtagctgggattaaaggcgtgcaccaccacgtctggctaatttttgtatttttggtagagatggggtttcaccatgttggccaagctggtcttgaactcctgacctcaggtgatctgcccgcctcggcctcccaaagtgctaggattataggcatgagccactgtgcctggtcaagatgcaattttaaagaaggaaaaatasaactaagaatatcatgccaaccagtgacattcttgactggagctgctgccaggattctgtgaacccctccaaaagctgtgactctatggggtcctggcagagagaaagagggaaccccgatttctacaaaagttcttcatcctcatccccatatctcaacccccacatcagccctggagggtgagccaatgaccctgatttgcagatggggaagtcaaggccaggaaag

SEQ ID NO: 556265 - DNA, 399 bp, Homo sapiens
gtttaaaatttttacctccgctggtcatcccagctagtcaggaggcagaggcaggagaatcgcttgaacctggaaggcggaggttgcagtgasccgagatggcgccactgcactccaggtgggcaacagagcgagactccgtctcagaaaaaaaaaaaaaatttttacctccagagagcaggaaaggaggggaaacaagacattgttgcttttattacaaggtttttggtgccgcttaatttttttttttttttttttttttttagttagcatagaatttagtgtcagaaaaaaattttactgagcatttgcaccatgctaggtattttctacacattcatttaaatctcacaaccacaacaacaaaaacacttccctagtgcttactatgtgccaagt

SEQ ID NO: 556266 - DNA, 399 bp, Homo sapiens
gtttaaaatttttacctccgctggtcatcccagctagtcaggaggcagaggcaggagaatcgcttgaacctggaaggcggaggttgcagtgacccgagatggcgccactgcactccaggtgggcaacagagcgagactccgtctcagaaaaaaaaaaaaaatttttacctccagagagcaggaaaggaggggaaacaaracattgttgcttttattacaaggtttttggtgccgcttaatttttttttttttttttttttttttagttagcatagaatttagtgtcagaaaaaaattttactgagcatttgcaccatgctaggtattttctacacattcatttaaatctcacaaccacaacaacaaaaacacttccctagtgcttactatgtgccaagt

SEQ ID NO: 556267 - DNA, 399 bp, Homo sapiens
gtttaaaatttttacctccgctggtcatcccagctagtcaggaggcagaggcaggagaatcgcttgaacctggaaggcggaggttgcagtgacccgagatggcgccactgcactccaggtgggcaacagagcgagactccgtctcagaaaaaaaaaaaaaatttttacctccagagagcaggaaaggaggggaaacaagacattgttgcttttattacaaggtttttggtgcygcttaatttttttttttttttttttttttttagttagcatagaatttagtgtcagaaaaaaattttactgagcatttgcaccatgctaggtattttctacacattcatttaaatctcacaaccacaacaacaaaaacacttccctagtgcttactatgtgccaagt

SEQ ID NO: 556268 - DNA, 529 bp, Homo sapiens
gttttaggtcttacatgtaagtctttaacccatcttgagttaatttttgtatgtggtgatagaggtccagttttattcttctgcatatggctagccagttatcccaacaccatttattgaataaagggtcctttctcgattgcttatttttgtcaacgatcagttggttgtaaacgtgtggctttatttctgggttctatattctgttccattggtccatgtttctattttcataccacttccatgctgtttttgttaccgtagccttagagtatagttttaggtcaggtactatgatgcctccagctttgttctgttttgctraggattgctttggctattggggcttttttttttttttttttggttccatatgagctgtagaatagtttcttctagttctgtgaagaatggctttgatagtttgatagaaataacattgaatccatagactgttttgggcagtatggccattttaacaatattgattcttctagtccataagcatggaatatttttccatttgtgt

SEQ ID NO: 556269 - DNA, 529 bp, Homo sapiens
gttttaggtcttacatgtaagtctttaacccatcttgagttaatttttgtatgtggtgatagaggtccagttttattcttctgcatatggctagccagttatcccaacaccatttattgaataaagggtcctttctcgattgcttatttttgtcaacgatcagttggttgtaaacgtgtggctttatttctgggttctatattctgttccattggtccatgtttctattttcataccacttccatgctgtttttgttaccgtagccttagagtatagttttaggtcaggtactatgatgcctccagctttgttctgttttgctgaggattgctttggctattggggcttttttttttttttttttggttccatatgagctgtagaatagtttcttctarttctgtgaagaatggctttgatagtttgatagaaataacattgaatccatagactgttttgggcagtatggccattttaacaatattgattcttctagtccataagcatggaatatttttccatttgtgt

SEQ ID NO: 556270 - DNA, 529 bp, Homo sapiens
gttttaggtcttacatgtaagtctttaacccatcttgagttaatttttgtatgtggtgatagaggtccagttttattcttctgcatatggctagccagttatcccaacaccatttattgaataaagggtcctttctcgattgcttatttttgtcaacgatcagttggttgtaaacgtgtggctttatttctgggttctatattctgttccattggtccatgtttctattttcataccacttccatgctgtttttgttaccgtagccttagagtatagttttaggtcaggtactatgatgcctccagctttgttctgttttgctgaggattgctttggctattggggcttttttttttttttttttggttccatatgagctgtagaatagtttcttctagttctgtgaagaatggctttgatrgtttgatagaaataacattgaatccatagactgttttgggcagtatggccattttaacaatattgattcttctagtccataagcatggaatatttttccatttgtgt

SEQ ID NO: 556271 - DNA, 430 bp, Homo sapiens
agagggtgtggtgctgaggcgggggttggggagctaatgagtgagtgaattgggggggcaggggagtgggctagtggggtacccaaggcccctgcagatgctcccgcttcacctctctggggacccccaggaatgtgagcagcttgagggagtaggtgggaggtgggagtacccggtgctggggtgaggcttggggaagggtgtcctctggtccaaggcgtcctaaaacagtcaggctcaaacaatgttagctgagaccacagctggtgtccttgtctcctccagggtccgcctggagcttctggggagcccggcgcccccgggccccccggcaagagggtaagtgataagccacctcctsggtcctcagcttatctacagcccccactcaccttacagacctcactcatcccacagcctcaatcacccc

SEQ ID NO: 556272 - DNA, 531 bp, Homo sapiens
cacaagaagaaagaaacaaaaaggcaaagccagttcagccatcaaatgaaatggcaaatagcttctcactttttaggctctaagagagtcctggtgaatcccaggaagaatacatgatgagcacatggtgagccgggttctttttaaattttattttgtttttttttttttaagacgcagggtcttgctctgttgaccaggctagagtggagtggtgtgaccacagcccactgtagcctcaacctccttggcccaagtgatcctcctaccttagcctctcaaatagttaggactacaggtgtgtaccactacatccagctaatttttctmtttctttttcttttttttggtagagatgggggtctcactatgttgcccaggctggtcttgaactcttggccttaagtgatcctcttgcctcagcctcccaaggtgctgggattacaggcatgagccacagggcccagctaatttttgtatttttagtagagacagggtttcacaatattgttcaggctggtctcgaactcc

SEQ ID NO: 556273 - DNA, 556 bp, Homo sapiens
ctgctgcagttcgttggatccattactctgattggatgcttggtgagtcaaggcttgtatataattggatgcctggaamtatggatcttccctacctttcgcatatctctctcttagcgggatttcttccgcaagcactggggatgtggacgtggaaagtgactggcgtctccgtgggggagtgaggggtgttgcacacggtgcaggtacccggcgcgagttagaggtccctattggctgctctctctcagatacaggtcactttcctcctgccaagatgcgccatggaacgcagggccctcgctggccctggggactgggtgatgtcacgggtgagcctgtcgtgattggctatatcgctgtgcctaagaccaaaggaaagaaaggagagcccggacagctggatccgccgtggttcagggtacacgttataggccaacctggtcaacaatgatttaaaaaaaaaattttattgttccctatatcataacaacaaaatataaagggaggaagacttcagaggaagaaattgcgtcttcctagccgtttttaaatt

SEQ ID NO: 556274 - DNA, 556 bp, Homo sapiens
ctgctgcagttcgttggatccattactctgattggatgcttggtgagtcaaggcttgtatataattggatgcctggaactatggatcttccctacctttcgcatatctctctcttagcgggatttcttccgcaagcactggggatgtggacgtggaaagtgactggcgtctccgtgggggagtgaggggtgttgcacacggtgcaggtacccggcscgagttagaggtccctattggctgctctctctcagatacaggtcactttcctcctgccaagatgcgccatggaacgcagggccctcgctggccctggggactgggtgatgtcacgggtgagcctgtcgtgattggctatatcgctgtgcctaagaccaaaggaaagaaaggagagcccggacagctggatccgccgtggttcagggtacacgttataggccaacctggtcaacaatgatttaaaaaaaaaattttattgttccctatatcataacaacaaaatataaagggaggaagacttcagaggaagaaattgcgtcttcctagccgtttttaaatt

SEQ ID NO: 556275 - DNA, 237 bp, Homo sapiens
ccagtcttgtgaccacaatgctttgccacctgtgttagcttcctggggctgtcctaacaaagtcctgcaatctgcgtggcttaacaccacaaaatcaattcacttataatcctgggaagtagaagtttgcaagtaaggtgtcaaggaggccatgcycactctgtaggttctaggaaagaatccttccacatcccccccaccttttttttttttgagacagagtcttgctctgtcacc

SEQ ID NO: 556276 - DNA, 517 bp, Homo sapiens
tggctgtaagaatgccaggagagatttccaactgcttggtcctgtgcctagcacatagtaggttctcaataaatcaggaccatgtgtgctgtgctaacagctgtgcttcaatgatgtatctgttccccacacacgtattgagtgcctactatgtcccaggcactgctgcatgttctggagaaatgggcataagcaaaaaagacaaagtctccagttggcacaactaaaaccgctggagtacagaaggtagaaaattgaggaatgaacaggtgagctgagtctatactatcaggtaagaggaagcaacacatagatgtgagtggatgtggtggggatgaggtggtcactacttttttttttttgagacagagtcttgctctgttgcccaggctggagtgcagtgrcgtgatcttggttcactgcaacctccacctccccggttcaagcaattatctgcctcagcctcccaagtagctgggattacaggtgcctgccatcacactcagctaattttttg

SEQ ID NO: 556277 - DNA, 476 bp, Homo sapiens
taaaaatacaaaaattatccaggtgagattgtgcacacctgtaattccagctacttgggaagctgaccaagatcacgycactgcactctaccctgagcgacagagcaagatcctgtctcaaaaaaaaaaaaaaaaaaaaagacgattacatgatgttatacgtagaaaaccctaaagacttaatatgcacacataaaattataaactaataaactaataattataattgctaataataaactaataataactaattactattcgttattatttatttataatagttatatattatagttatatatataatagctatatattatatatagttataatattataatagttatattatatattatataatagttatatattattagtaataattactaataataaactaacaaataataactaataaataataactaataataaataactaaaataaactaataaataataactaaaat

SEQ ID NO: 556278 - DNA, 596 bp, Homo sapiens
ctattaatttaatcacattaatgtaatcaaatcctttcccacctgacctccagtctcccacttttacattcttatccatgaactctgatcacctataatatatttaatacatgaggaacccgtttttgaacatttttaaagaggaaatgaatctcattttacttatgttgtgatgtaagggaaatagattgtaacagtaacttttaactttcattttagatgctgcaactamaaagaaaaacggactttcactggctgactgattgtctggaaaccgttttgggatttctttcctaagcttcttaattagaatctttacattatagagaaaatgattttgagagttgagtgtggtctgtggagtgtcctattagtaacgacttctgagtaggtttaactcacctcttttattgaaatgtgaaaaggtgtgacatttataatagaaaactctttgaaagtcgcaccgttcattttagaggaattttaaatgtcaccccaaattttacgattttaattaattttaattaatttccaaattttaaccaataggcataatattcaagatcttatctaaaaattattacatggcaatattt

SEQ ID NO: 556279 - DNA, 498 bp, Homo sapiens
agaagcagctggaggccaggggagaaactccagaaggagaggtgagttcaatcttatggaattcatttttacaaaaggcgtatgagaatctaggggaatgcaataatgtcttgattccacaagtgttgtctgaggccaactccatgacagacacactgtatttctggaggatattgggacctctgccctggtaacggttaggcaactcttagattttcaataccaaggcaagagacttgacaatctccatttgcttgaatttcatcagaatttggtagactttctgaaatgatggacagaggttcggtggctgcgttactcaacgtcaggttttcctatggtttggtattgttttcctattctccccttcccacaacccctggcaaccatcattcttctcttattttctgattttttttttgttcagttttttgttccttttaattcagaaggagaaagggaaggaaatgaaaagcaamgtttgtttaaattactatt

SEQ ID NO: 556280 - DNA, 373 bp, Homo sapiens
acctcgtgatccacctgcctcggcctcccaaagtgctaggattacagtgtgagccactgtcctggctgatgagggctatttttttttttttgagtyggagtttccctcttgttgcccaggctggagtgcaatggtacgatctcagctcactgcaacctctgcctcctgggttcaagcgattctcctgcctcagcctcccgagtagctgggattacagacatgcaccaccacgcctagctaactttgtattttttaaatagagacagggtttcttcatgttggtcaggcttgtcttgaactctcaatctcaggcaatccgcctgcctcagcctcccaaagtgctgggattacagcgtgagccaccgcgcccagc

SEQ ID NO: 556281 - DNA, 587 bp, Homo sapiens
catctcggctcactgcaacctccacctcccgggttcaggagattcttgcgcctcagcatcctgagtagctgggattacagccgcctgccaccacacccggctaatttttgtatttttagtagagatggggtttcaccatgttggccaggctggtctcgaactcctgacctcaggtgatccacccacctcggcctcccaaagtgctgggattacaggtttgagccactgcacctggccaacagattctattaaagtggcttttaatgaattcacatataagcatgtctctgaaccgaggaaaatgtaactcagaatagaaaatcgaaaccagggattaacacagaatgcataagcagcccatgagggctaatgaatgtgctctactagtgttcaactctgaacttccggatcatcatgttgacttgacaaaatacactgtcatcatccacctatttctgccgctaaaaccttagcataaattatctagatcaaggactttcaaaattcttatgttgtcacccataatacactcactcccgcmccacctacagttatgcctgtatgtatatgtttatattgttacatat

SEQ ID NO: 556282 - DNA, 578 bp, Homo sapiens
agatgatcaaatctttttttttttttgaggtatcatctcattctgtcatccaagctggagtgcagtgggatgatcttggcttactgcagcctccgcctcccgsattcaagcgattctcctgtctcaacctcctgagtagctgaaattacaggcatgtgccaccatgcagggctaatttttgtatttttagtagagacgggatttcaccatgttgaccaggctggtctcaaactcctgacctcatgtaatccacctgcctcggcctcccaaagtgctgggattacaggcatgagccactgtgtctggccaacctaacctttttgagcctcatttgtaaaatggaggtaataaaagctctgcttttatagaattgttgtgaagtttaaatgagatattgaaattaaagggcttagcatagtatttggcacatataatcatctgataaatatcagttagcaggtatgtagtaagaggctgcttttcttggaaatctggttcattttattgtttaaacactacagttatcatcttcatattagtagcagcagcagtaggtgttctgttttaatacactttca

SEQ ID NO: 556283 - DNA, 557 bp, Homo sapiens
ttgatttttgaacatggaaccagtcttgcatacctgggttaaatgctacttggctgtgctgtgtaatagtttttttttaatacattgtcagattcaatttggtaatattctattgaggatttctgcatctatgatcacgagagatgttagtctattgtttttctgtcttgtatttttctggttttgtattarggtatgagataagaagtgttgcttctgctatttttctttaaatagattgtggagaattgctatcatttcttccttaagtgactggtcgaattaaacagtgaaactatctgggctgggtgtttcctctatggaagaattattgattattgattaaattttcttaatagatacaggcctattgagattatctatttctccttgtgtgagttttagtatttgcgtcttccaaagaattagtccattttatattagcctttaaatttgtgggcccagagttgttcatagtactcctttataatctccttcttatttctgttaggtccagtaataatgtctccctcttttggttcttggttttagtatat

SEQ ID NO: 556284 - DNA, 557 bp, Homo sapiens
ttgatttttgaacatggaaccagtcttgcatacctgggttaaatgctacttggctgtgctgtgtaatagtttttttttaatacattgtcagattcaatttggtaatattctattgaggatttctgcatctatgatcacgagagatgttagtctattgtttttctgtcttgtatttttctggttttgtattaaggtatgagataagaagtgttgcttctgctatttttctttaaatagattgtggagaattgctatcatttcttccttaagtgactggtcgaattaaacagtgaaactatctgggctgggtgtttcctctatggaagaattattgattattgattaaattttcttaatagatacaggcctattgagattatctatttctccttgtgtgagttttagtatttgcgtcttccaaagaattagtccattttatatwagcctttaaatttgtgggcccagagttgttcatagtactcctttataatctccttcttatttctgttaggtccagtaataatgtctccctcttttggttcttggttttagtatat

SEQ ID NO: 556285 - DNA, 545 bp, Homo sapiens
aaagtagatctatttctttgtaattgtgctgtggtttagagtcagtactggatcagactgcctccatttaaattctgacttctccacatattagctgtgatttggggcaagctaaaatgggtttaataatatctaccttgtaaatttggggggaaattaattgagctgatatgtgtaatacatggtgctcagaatagagttaaacattaaatggatttgtattctaccaaattattaaatatatctcaatgaccatgatatgtcattgcataggcacgacrtaatttaatcagtctcccattgttagagatttatgctgtctccaattctttcactactatagaatatagaatatgcagagcaaacactctcatttccatttttcaaaggaggaaatagagtgaaactgaaaaaggctaagcaacttgctcacggttagaagacagtggagctgtggctgtaaatcctgtattctcattcctagggcagtgcttgctggcacacccagcttgagcatttagcaatctacctgcatgcaggttttg

SEQ ID NO: 556286 - DNA, 615 bp, Homo sapiens
tattttttatcttcctggtctggataaagtacagcccctgggaactgaaaaacctttggattggaaatctgaacttcttttggtgctctctgaggtgtcaggaracatgaaaataaaagtaaaaattatttctacaaatgggaatgcttaaggaagatagtttatgccaaatcatcagcaggtataaaatgttgacttctaacacacctacctgtttgtcataaattccctctcactgatgcccactcaatttttacatatggcactcaatgtcataatcatccccaactaggcagagtcggtaaaggaagcaggaggtcatgtccatgatggtcacttctgtggccccagaataatttctgcttcatggctcttggactctcttctctgataacgctcttcatcttcttcagaagatgtcattgtgtcaatcaatgtccaaccactgctataagtaatttcatttttgtgggacttagacagtcttgaagatggcaaagtagtctaatttcaatctttcgggaatgaattcaggttgatagatggtcattttggtaacttttcattttatttcttcctttctgtattttccccgacagttttgtcagcatggag

SEQ ID NO: 556287 - DNA, 615 bp, Homo sapiens
tattttttatcttcctggtctggataaagtacagcccctgggaactgaaaaacctttggattggaaatctgaacttcttttggtgctctctgaggtgtcaggagacatgaaaataaaagtaaaaattatttctacaaatgggaatgcttaaggaagatagtttatgccaaatcatcagcaggtataaaatgttgacttctaacacacctacctgtttgtcataaattccctctcactgatgcccactcaatttttacatatggcactcaatgtcataatcatccccaactaggcagagtcrgtaaaggaagcaggaggtcatgtccatgatggtcacttctgtggccccagaataatttctgcttcatggctcttggactctcttctctgataacgctcttcatcttcttcagaagatgtcattgtgtcaatcaatgtccaaccactgctataagtaatttcatttttgtgggacttagacagtcttgaagatggcaaagtagtctaatttcaatctttcgggaatgaattcaggttgatagatggtcattttggtaacttttcattttatttcttcctttctgtattttccccgacagttttgtcagcatggag

SEQ ID NO: 556288 - DNA, 536 bp, Homo sapiens
ttttgatctatagggcttaatagtaatatttttattttattctattctattctattctattcttttttttttttttttttttgagatggtgtctcgctctgtcacccagtctgaagtgcagtggtgcgatcttggctcactgcaagctctgcctcccgggttcacgccgttctcctgcctcagtctcttgagtagctgggactacaggcgcccaccaccatgccaggctaattttctgtatttttagtagagacggggtttcactgtgttagccaggatggtctcgatctcctgacctcatgatccacccgcttctgcctccsaaagtgctgggattataggcgtgagccaccgcacccagctttcttttcttttcttttctttttgaggagtttcactcttgttgcccaggctggagtgcagtgatgtgatctcagctcactgcaacctctacctcctaggttcaactgattctcctgccttagcctcctgagtagctgggactacaggcacaggaaaactcctgtttttaaaac

SEQ ID NO: 556289 - DNA, 557 bp, Homo sapiens
ccgtctctacaaaaaaaaaaaagaaaagaaaagaaaagagaaagaaaaggtagatcctcatactcaagtagttgcaaaaatacttaaacgttttccactcaatcatcatttttaaaaaattaagatttaattcacttactatatgtcacccttttaaaatgtacaactcaggtcgggcacggtggctcacacctgtaatcccagcactttgggaggcccaggcaggcagatcacctgaggtcaggaggtggagaacagcctggccaacatggtgaaaccctgtctctactaaaaatacaaaaaattagcaggacatgsgggtgggtgcctgtaatcccagctactcaggaggctgaggcaggagaattgcttgaacccaggatatagaggttgtagtgagccaagatcacgccactgcactccagcctgggtgacagagcgagaccccatctcaaaaaataaataaataaaaaataataaaatatataattcagtggtgtttcatatatttaaaatgagcatcagttgtttgttttgtttcattgggtttggtttta

SEQ ID NO: 556290 - DNA, 534 bp, Homo sapiens
tggccataatcagaatcaaaataatagacgttgrtctggatgtggtgaaaagggaacacttttataccattggtgggaatgtaaactagtacaatcactatggaaaaaatgtggagatttcttaaagaactaatagtagaactactatttgatccagcaatcccactcctgggtatctacccagagaaaaagaagtttctctactcctgtgtaaagttaatcaagctatacccaccacctgagataccaaataccaccttctctactgtaattctgcagccattagggaaaagcatcctgcccagcttcacacttgttagctcttagggtcaactgcatatatggctctcattacttaccagtttcattataaataattccatttcatttcctgtagtacaacagctttttgagggcaaggacatcacattttctacaatattaaatcccacaaactctccaacacaatgcttttcatatgaaaggtgctaaacacattttgaataattgttcacacatttaattaatttttca

SEQ ID NO: 556291 - DNA, 396 bp, Homo sapiens
agagggatgttatgagcccctctgcccaatcccagcacactacatatctgcaagtactttagaagagcccgagtctgctggcatgggggctgccttctacacacccatgctgtttcagatccctgtttccatcacaggctcccatttccacaaaaacgtggcagatgtagtgggtatgtggttgggctctggagtagcattgcatagggtcgcattgttactggccaggtttcagttttcttatctgtgaagtgggcatttttaaaagtacctaccccayacaatgtttgtgagcattattgtgtgataatgcatctgaagtgcgtggcacatggctgacataataacggattagccattattattgctatcattactctatcagggcacaatggt

SEQ ID NO: 556292 - DNA, 619 bp, Homo sapiens
gtatttatttattaaaattattcctaagtattttattttttaatactattataaatggaattatttccttaatatcattttcagattgttcaacgctagtatatagatacataattaattttagtaattaattttgtatcttgtagctttgctgttatgtttggattgtatcccccatcaaaaagatatgttggagtaytaactcccactacctcagaatgtgaccttagaagtagggtcattacagatgtaattagttaaggtgaggtcatactagagtagggtaggcccttaatctaatatgattggtgcaattacaagaagagaagagagacacgaaggatgaagacagtcatatgatgatggaggcagaccctggagtgatgcatctacaaaccaagaaataccaggaaaagccaacaaataccagacactagaaaaggaaaggaaggattctactcagtgtctcaaagggactcccaacaccttgagtttggacttctagcccctgtaactgtaagaaaataaatttctgttgttttaagttacccagtttttggtactttgttatggcagccccaggaatctaatgtacttgctggacttgtttattagtttt

SEQ ID NO: 556293 - DNA, 499 bp, Homo sapiens
ctggagacagagcaagagtctgtctcaaaaaaaaaaaaaaaagatattaaatcaacagataaagggactgagaagctgaccacctgtcacctacataatctgccttcatttgagtgtgcatgtttatggctaaagtgatcrtgcagcaggactttcttttgtccttgtgagcagtttgattaactctttcgattttccatcagttctttgacacagttgtaccttaaatatttctgatctaactagattctgctgagtaaactaagctactctcaataaaaccatttaatttcatgcagctaggagggaagaaaatggaaggagtcacattataactctatcaccatgactctggcactgagaaactatttccataaagccaagtcacactgtgccctgcacatctggagtccattctgggatttgaagctgtaaatgtgattagggacagatgtccccccactgtgtataagaaagaaagaccagcataaataagcca

SEQ ID NO: 556294 - DNA, 565 bp, Homo sapiens
tacttacatacatatagaattttgttactaagaggacaatttgcaggccagacactttcagtcttctattgtctgacctgagcaaatgggagaagggtggaccgatggtgctagatgttggcatgataaaaattactatggggccaaaaggacttccctacataaagtaattataagtattatcctaagagaattaagcagggggcaaatgaaaagctgtcacaacctgcttcttccagttctacagcaggaattttaggactttgtgttgcagcaatgctccaatagagtttgcctggtggcacgctgagcttyaagaacagtgggtgtctcctcctatcaagcagaatggatatggatataaaggatgctatgatgaagagtacatctgttagcgaagtgcacattattttcaactcctatcctaatcagattccccccaaactaatctgtggtgcttttattaatttacatagtgggtactatttggcatattatgaaacagtttgttgtactttttaaacagtcaataacatgacatctgattctttttaacaaaaatttc

SEQ ID NO: 556295 - DNA, 580 bp, Homo sapiens
aataatcttcatggtcccttccaatctgacattctaaagcctttctatttagtctaatggccagtgcctctgaatgaactaatcactgccattgctcctcttttatttctgagatggtcatgaagattttaacatagtccttgcagcattggtctgtatcttcccccgaaattattctttcaagtaaaccatcaggaccttcaaagggccattcaaagtgcacattaggccagacaaggtgatgcatgcctataatcccaacaccttaggaggctgaggcaggaggattgcttgagctcaggagtttgggaccagcctgggcaacatagggagaccttatctctacaaaagtaaaaataaaaaacattagccaggtgtggtggtgtgcatctgtggtcccagctacttgcaaggctgaggcaggaggatggcttgagcccaggaggttgaggctkcagtgatccataatcacaccactacatttcagcctgggtgacacagcaagaccttgtctccaaaaaacaaacaaacagaaaacaaaccagtgcatatttattagggaactcggccataatagtga

SEQ ID NO: 556296 - DNA, 632 bp, Homo sapiens
gtggcacctatacaccatggaatactatgcaggcattaaaaaggatgagttcatgtcctttgctgggacatggatgaagctagaaaccatcattcccagcaaactaacataggaacagaaaaccaaacaccacatgttgtcactcataagtgggagctgaacaatgggaacatatggacacaggaaggggaacatcacacactggggcctatcaggggtgagggggtaggggagacatagcattagagaaatacctaatatagatgatgggttgatgggtgcagcaaaccattatggcatgtatatacctgtgtaacaaacctgcacattctgcacatgtatcccagaactttaattaaaaaaaagaaagaaagaaagaaattggacaaggggcctaatttctcactgcacaagtgttcatcccctgactttatttagtcatttttcccctcagtgtatgctatgttgactttggactttatctggtaggcaggtaacaaggagctatttagcacttttttttttttttttgagacggagtcttgctctgttgccaggctggagtgcagtggcrtgatctcagctcactacaatctccacctcctgggttcaagtgattcctctgccccagc

SEQ ID NO: 556297 - DNA, 665 bp, Homo sapiens
catggaatgatgccacccccactgcctaagatgcactgtatagactgagatgctgctggaactgtggtgggggtgggcaagaggggtgggtggggaggcagtgggcacactctcccttcagagtcctgtagcacagagttctgccacagaacaccactgttctgctttaaacaccattgcaaatggttagcattcaccttagctgaatttgtagagagggagaggaaagagggaacagaggagaaacagaaagaatgtgtttgtccaactcaatgcatatggatgagttggttctggtgctcacctccgatttaaatcaaacgatycatatttgtgggtgggtgggtgggatgccccttgggcagcaggagcagagtaggctgtgggctgagcaaatacttagaagcatgtctgttacaatcatgctttgcttctggtcagtggcacaatatatatttaacacattctcttgggaatattaaaatccaatataatataagccagtggcaagtagtctttcttttattatatccattgggcaacgggttggtcagtagagggaagagagatcagaaagcagaaagctggatggaggaatgacctcatctcactaactccaaagtgttgcatctaccttggccagaatccatggcttctaaaagaat

SEQ ID NO: 556298 - DNA, 648 bp, Homo sapiens
tgtctacagcaactacatcacctgaacaacatctgaaaagatatttgtttctagttttcaaatatatccatatgaaaaataatatacayttaatgcatagcattcacagagaaggaagaaattaacatggaatccagatttccgggtcctcagtgggttatgaagtttataggaacacctgttttagaagaatttcatgccttcttcgtaataagtgctgagtagatggaagttgatgataatgattattatagaattggaatagttgggattccctgtgggatcgcaaatggaaccagctaaaggtatgctcattagaacagtatttattaagttccagtcatagaaagtattgacagaattgtgacatggaaagagcactgattcggaatcagaacttgattctttaaaacctccacttactcgtgtggccttgaacaagtactttactttcctcggcatcaatttctctatttataaaacaaagataataatgacctcaagcagttactgtggtgattacataaaataaagtgttggttcattacacatttgacatatagtaagagcttaataactggtagtagtagctgttgctaatatttgtagagaaagcttgcacccaggtgagtagagtggacaatcacc

SEQ ID NO: 556299 - DNA, 648 bp, Homo sapiens
tgtctacagcaactacatcacctgaacaacatctgaaaagatatttgtttctagttttcaaatatatccatatgaaaaataatatacacttaatgcatagcattcacagagaaggaagaaattaacatggaatccmgatttccgggtcctcagtgggttatgaagtttataggaacacctgttttagaagaatttcatgccttcttcgtaataagtgctgagtagatggaagttgatgataatgattattatagaattggaatagttgggattccctgtgggatcgcaaatggaaccagctaaaggtatgctcattagaacagtatttattaagttccagtcatagaaagtattgacagaattgtgacatggaaagagcactgattcggaatcagaacttgattctttaaaacctccacttactcgtgtggccttgaacaagtactttactttcctcggcatcaatttctctatttataaaacaaagataataatgacctcaagcagttactgtggtgattacataaaataaagtgttggttcattacacatttgacatatagtaagagcttaataactggtagtagtagctgttgctaatatttgtagagaaagcttgcacccaggtgagtagagtggacaatcacc

SEQ ID NO: 556300 - DNA, 437 bp, Homo sapiens
actgaagcaaagtctcaatcaatcaaggtttattaagctagctttaggccgagtccaggaaagacactagccacagacacatctgtggctgtttttctgaaaaggttttcaggaggtttagtatttatacatttccttaaagaggggaagatatgtaggaagagggataggtrgccagtaaggcaaacagttacattcttgtgagactagttattgcccagaatttacataaaataaggtgaatgtttgaagagaaaaaagggagtaaaggaagaatcaattatgccaacatctctgggtaggggaaggaatgactgatctcatcttgtttttgttctgcacctggggaaataagcttgtaatgcacactatcagtgtggaaacaaatggactttagttttaggagctagacttagatttaaacctaaagttacaat

SEQ ID NO: 556301 - DNA, 526 bp, Homo sapiens
tcaataggactgatgtccttatataataaaaaagggaaatttagactcagagacagacacacacagaaggaagaccatgcgaagagatacagggaggagatggtgatgtgactggagtgacgcatctaaaagccactggctgtcaaggattgcccgcaaacatgggaagctgggagaggccagaaaggattctccccgacagtcctctgagtgggtgtgccctgccactccttgagcttggacttctaacctccagaattgtaagacaatagatttctgttgttttaagacaactcgtttttagtgtgttgttatagcagccctagaaaataatactgtgttgcattttttttttctcatcatatgaatggagagaactagtgagagtatgcaggtttttttttacttgcctcattattttgagagaagagtcacagtgagtctgatagcttttgaatcttggttttgagtcctttctgagacctaaatgcatgactgtcstttctgtgtattggtttttcaatct

SEQ ID NO: 556302 - DNA, 575 bp, Homo sapiens
tcttaataaaaatgcaaatgggatttttctttgttactaagtagattattctgaaagcaagtttctggttcatttaagggctatggccttaaatgccacacaaacattttggagggaggaggttaacagtgaatatcaatgtgaggtaaggttttgtagagaatgtttgacttaaatatacattataagatatgtgcaaagatttggacaattgaggggtaagaggacaataccaaaaaagtctggttgtaagaaagaatgggatgtaggttgagtgtggtggctcatgcctgtaatcccagcactttgagaggctaaggcagaggtccagaagttcaagaccatcctggacaagatggtgagacctcatctctacaaaaaaatttaaaagttaaccaggtgtggtggcatgtgcctgtggtcctagtttctcaggaggctgaggcaggaggatcacttgagcccaggaggttgaggctacagtgagccatgttcgcatctytgcactccagcctgggtgacagagggagaccctgtctcaaaaaaaaggaaaagaaaaagaaagaaaaggaaag

SEQ ID NO: 556303 - DNA, 520 bp, Homo sapiens
gcttcttcattactatgtttttaccttaaaggactgtgacatttacttaaaattgaaaacatatggaggatactatattactcacaattttactgtttctacatgtagtaccatgctgatttatgtgtgtaatatttgggagattttttgtgtacaggtgtgtgagggctgcaagtaatcctgacctattgctcaaattccgggtatgatgatgaggtgttaggaatagcaagaacacaaactatctcatatcttayttgatatgacctttaagtgggaaagttcttatgaaaaatctttgtttctagacatgctagaataactggtattgagcataaccctcccaccataagcaatcctaaaactgggcaaaatatgggtgacaactgttttcagacagtacagagctatgatccttgagacaagagcaacatacaaggtgagctccatattttctctagctttctgcctaaacacagttttcaaaccagagttcaggaaggtagaagccaattgcaga

SEQ ID NO: 556304 - DNA, 378 bp, Homo sapiens
aggctagagtgcagtggcatgatgacagctcactgcagcctcgacttcctgggctcaagtgatcctcccacttcagcctcctgagtagctgggactacaggtgtgccccacaatgcctggctattttttgtatttttagtagagatggggtattgccatgttgcccggctagtcttgaaatcctggccttaagygatctgtccgccttggcctcctaaagagctgggcttacaggtgtgagccaccacacctgaccaagtagtaagtgttactcattctttgtaactatttttcttgtacccattaaccatccctacattccccagcccactacccttcccaggctctggtaatcaccatcctttcactaagagacca

SEQ ID NO: 556305 - DNA, 378 bp, Homo sapiens
aggctagagtgcagtggcatgatgacagctcactgcagcctcgacttcctgggctcaagtgatcctcccacttcagcctcctgagtagctgggactacaggtgtgccccacaatgcctggctattttttgtatttttagtagagatggggtattgccatgttgcccggctagtcttgaaatcctggccttaagcgatctgtccgccttkgcctcctaaagagctgggcttacaggtgtgagccaccacacctgaccaagtagtaagtgttactcattctttgtaactatttttcttgtacccattaaccatccctacattccccagcccactacccttcccaggctctggtaatcaccatcctttcactaagagacca

SEQ ID NO: 556306 - DNA, 378 bp, Homo sapiens
aggctagagtgcagtggcatgatgacagctcactgcagcctcgacttcctgggctcaagtgatcctcccacttcagcctcctgagtagctgggactacaggtgtgccccacaatgcctggctattttttgtatttttagtagagatggggtattgccatgttgcccggctagtcttgaaatcctggccttaagcgatctgtccgccttggcctcctaaasagctgggcttacaggtgtgagccaccacacctgaccaagtagtaagtgttactcattctttgtaactatttttcttgtacccattaaccatccctacattccccagcccactacccttcccaggctctggtaatcaccatcctttcactaagagacca

SEQ ID NO: 556307 - DNA, 378 bp, Homo sapiens
aggctagagtgcagtggcatgatgacagctcactgcagcctcgacttcctgggctcaagtgatcctcccacttcagcctcctgagtagctgggactacaggtgtgccccacaatgcctggctattttttgtatttttagtagagatggggtattgccatgttgcccggctagtcttgaaatcctggccttaagcgatctgtccgccttggcctcctaaagwgctgggcttacaggtgtgagccaccacacctgaccaagtagtaagtgttactcattctttgtaactatttttcttgtacccattaaccatccctacattccccagcccactacccttcccaggctctggtaatcaccatcctttcactaagagacca

SEQ ID NO: 556308 - DNA, 559 bp, Homo sapiens
gcagaatgtttggtaactatttagatttaaagcagaagcactttggattgagcaatttcatatgtracaactgtctttgccacaagcaacagcagagacctgcagatgagaacacctttatgaagagcaagaccatgctttgaagttgggcagagatcttggttcaaatcctggctctgccgcttgttagctaagtcacttcaggtaagcgatttaacttctttgggccttgctttcttgatctgtcaagtggaggttcataatagtatcaccccttgagggcagataaactgatgtatgtttatgcatacataaactgatgtatgtgatgtaatttagcacggtgctggtccacaggtgaatggagatgatttttgactttctgtctcgcagaaagtctgtacctccccaaggacatctcatgcccacagcagcccagcagtgagtcctcaccaacccagactgactttccagcctcatattctcaaaggatctgacattttccagccaccgaccctggtttgcactatgcccttcatcaaaatgtcttgcttctctt

SEQ ID NO: 556309 - DNA, 559 bp, Homo sapiens
gcagaatgtttggtaactatttagatttaaagcagaagcactttggattgagcaatttcatatgtgacaactgtctttgccacaagcaacagcagagacctgcagatgagaacacctttatgaagagcaagaccatgctttgaagttgggcagagatcttggttcaaatcctggctctgccgcttgttagctaagtcacttcaggyaagcgatttaacttctttgggccttgctttcttgatctgtcaagtggaggttcataatagtatcaccccttgagggcagataaactgatgtatgtttatgcatacataaactgatgtatgtgatgtaatttagcacggtgctggtccacaggtgaatggagatgatttttgactttctgtctcgcagaaagtctgtacctccccaaggacatctcatgcccacagcagcccagcagtgagtcctcaccaacccagactgactttccagcctcatattctcaaaggatctgacattttccagccaccgaccctggtttgcactatgcccttcatcaaaatgtcttgcttctctt

SEQ ID NO: 556310 - DNA, 459 bp, Homo sapiens
agtaattagtttggggagaagtttcaactccatggggtacaagcatgaactagttttgttttttttcttaaatattattatcagttgtatgttcagtctttctaccccagtgggtgctaggtcccttaactttctggccactttcagctattaaaaaacytagttcagtctgacttaaatctccaatttcagatccaatgaaaagttctcttctggccagatgcggtggctcatgcttgtaattccagcattttgggaggctgaggcaggcggatcatctgaggtcaggagttcaagaccagcctggccaacatagtgaaaccccgtctctactaaaaatacaaaattagctgggcgtggtggcgggcacctgtaatcccagctacttgggaggctgaggcaggagaatcacttgaacctaggaggcagaggttgcagtgagccaagatcgggccactg

SEQ ID NO: 556311 - DNA, 459 bp, Homo sapiens
agtaattagtttggggagaagtttcaactccatggggtacaagcatgaactagttttgttttttttcttaaatattattatcagttgtatgttcagtctttctaccccagtgggtgctaggtcccttaactttctggccactttcagctattaaaaaacctagttcagtctgacttaaatctccaatttcagatccaatgaaaagttctcttctggccagatgcggtggctcatgcttgtaattccagcattttgggaggctgaggcaggcrgatcatctgaggtcaggagttcaagaccagcctggccaacatagtgaaaccccgtctctactaaaaatacaaaattagctgggcgtggtggcgggcacctgtaatcccagctacttgggaggctgaggcaggagaatcacttgaacctaggaggcagaggttgcagtgagccaagatcgggccactg

SEQ ID NO: 556312 - DNA, 475 bp, Homo sapiens
tgagacagtttcatgatgttgctcaggcaggattcaaactcctgggctcaggcaatcctcctgccttagcctccagagtagctgggactacaagtgcatgccactgctcctggttcaatacttttgtaaatagtctttttaaattaccacaacaagtcttttcttattccagagatgaggaaacaaatagagattaagtgaattgccttcaggtcacatagatgataaatgacagagccagtttaggaactgtgcctttctgaatcccaaacccattgtgtgtgtgtgtgtgtgtgtgtgtgtgtgtgtgtgtgtgtgtttgtttgtgagagagaragagaaagagagatctgtgcttcatttaccccatccaaaaaacaagagagcaaaaataatacttcttcctggggtggttaaaaggattaaatgagctatgcctataaaatgtttagtcatatttagcacttaaaatagt

SEQ ID NO: 556313 - DNA, 446 bp, Homo sapiens
catggtgcctgctgattcggttcttggggaggggctcttcctggattgcagatgatagttttctcctgtgtcctcacttggtcaagagagagtgagcaagctgtctagtgccttcttacaagggtactaatcccgtcataaggatcatcctgatggcctaatcttaaacctgtgtacctcccaaaagccccgtctccaaataccatcacattctccaatgtgttagtgcttcaacatatgaatttttagagatacagtttagcccatggcatcaagctttggacagtttgagtttccagtatcttggccaccaaagtggagatgagctggatatgcagtgcccagctctgtgtrcagagcacagtaattggtgatcaatagatgattaatacgtatttattgagggaatgattcgatggctaaaaccatgatgtggatgagatttt

SEQ ID NO: 556314 - DNA, 511 bp, Homo sapiens
tacttaggatgtgtcattgagttcagagagaggcagtagaggaaagggcccagactttaaaatcagagagatgaaattccaactctccactcactagctgtgtgaccttgggtaagttccttaacctctctgagcctcactctgcattctcactagtgaaattacaactgtaattgctactccatgaaattgctttgactactaaaataggaaaccctgtcaagggtataacatagtaggtgttgatgwatgttggctattacttttgctattatgtagcaaagcatagattactttggctattttgaaaaaacctgttgctatcaattaaggatagagtggctaaattaagtaaattctgtaagcaaacaaggatgggtctttaattctcctccacttttgatttatggctgaagatttgacagttatctgaagtctgactagcttgaaaaccaagacatctgtgattagacttaccttttgttcttcccattagtgtaatacattgttt

SEQ ID NO: 556315 - DNA, 511 bp, Homo sapiens
tacttaggatgtgtcattgagttcagagagaggcagtagaggaaagggcccagactttaaaatcagagagatgaaattccaactctccactcactagctgtgtgaccttgggtaagttccttaacctctctgagcctcactctgcattctcactagtgaaattacaactgtaattgctactccatgaaattgctttgactactaaaataggaaaccctgtcaagggtataacatagtaggtgttgatgtatgttggmtattacttttgctattatgtagcaaagcatagattactttggctattttgaaaaaacctgttgctatcaattaaggatagagtggctaaattaagtaaattctgtaagcaaacaaggatgggtctttaattctcctccacttttgatttatggctgaagatttgacagttatctgaagtctgactagcttgaaaaccaagacatctgtgattagacttaccttttgttcttcccattagtgtaatacattgttt

SEQ ID NO: 556316 - DNA, 511 bp, Homo sapiens
tacttaggatgtgtcattgagttcagagagaggcagtagaggaaagggcccagactttaaaatcagagagatgaaattccaactctccactcactagctgtgtgaccttgggtaagttccttaacctctctgagcctcactctgcattctcactagtgaaattacaactgtaattgctactccatgaaattgctttgactactaaaataggaaaccctgtcaagggtataacatagtaggtgttgatgtatgttggctattacttttgctattatgtagcaaagcatagattactttggctattttgaaaaaacctgttgctatcaattaaggatagagtggctaaattaagtaaattctgtaagcaaacaaggatgggtctttaattctcctccactttygatttatggctgaagatttgacagttatctgaagtctgactagcttgaaaaccaagacatctgtgattagacttaccttttgttcttcccattagtgtaatacattgttt

SEQ ID NO: 556317 - DNA, 609 bp, Homo sapiens
gctgaatgccgaaagcagagtttgcaagatggtgtgtcagcccagttctgagaaacaaactcccataccaggattacacatatgtgatttttattaacgcggaaatgcccttgagagaaagcaaagaaggtgccacataaagctgggagaacctgagacagtaatgcaagtctgactctgagtaaaagagagaggagaaaaaagttagggtgcgaacaccatagggaagtccctaagccaaagccggggacaggggaatcctgtgtctcccggggaggggtctgctttagtgtccctgccatgctcagtcattagccaggagcacctcatggaaggaagcatatggattccccagcgcagcagctggggccctggttaattacactcccagtagaggsaggtcgatgaggcccattctcagggccaccacgtggtgagccatgcagcactggcctggcagaacatttgtctgggttcatacagtatttacattaaaaaaaatcagggctgggtgctgtggctcacacctgtaaccccagcattctgggaggccaaggcaggcagatcacttgagattaggagctggagaccagcgtggccaacaagggg

SEQ ID NO: 556318 - DNA, 609 bp, Homo sapiens
gctgaatgccgaaagcagagtttgcaagatggtgtgtcagcccagttctgagaaacaaactcccataccaggattacacatatgtgatttttattaacgcggaaatgcccttgagagaaagcaaagaaggtgccacataaagctgggagaacctgagacagtaatgcaagtctgactctgagtaaaagagagaggagaaaaaagttagggtgcgaacaccatagggaagtccctaagccaaagccggggacaggggaatcctgtgtctcccggggaggggtctgctttagtgtccctgccatgctcagtcattagccaggagcacctcatggaaggaagcatatggattccccagcgcagcagctggggccctggttaattacactcccagtagaggcaggtcgatgaggcccattctcagggccaccacrtggtgagccatgcagcactggcctggcagaacatttgtctgggttcatacagtatttacattaaaaaaaatcagggctgggtgctgtggctcacacctgtaaccccagcattctgggaggccaaggcaggcagatcacttgagattaggagctggagaccagcgtggccaacaagggg

SEQ ID NO: 556319 - DNA, 609 bp, Homo sapiens
gctgaatgccgaaagcagagtttgcaagatggtgtgtcagcccagttctgagaaacaaactcccataccaggattacacatatgtgatttttattaacgcggaaatgcccttgagagaaagcaaagaaggtgccacataaagctgggagaacctgagacagtaatgcaagtctgactctgagtaaaagagagaggagaaaaaagttagggtgcgaacaccatagggaagtccctaagccaaagccggggacaggggaatcctgtgtctcccggggaggggtctgctttagtgtccctgccatgctcagtcattagccaggagcacctcatggaaggaagcatatggattccccagcgcagcagctggggccctggttaattacactcccagtagaggcaggtcgatgaggcccattctcagggccaccacgtggtgagccatgcagcastggcctggcagaacatttgtctgggttcatacagtatttacattaaaaaaaatcagggctgggtgctgtggctcacacctgtaaccccagcattctgggaggccaaggcaggcagatcacttgagattaggagctggagaccagcgtggccaacaagggg

SEQ ID NO: 556320 - DNA, 573 bp, Homo sapiens
gactgtgttttatttggttcatgtctaattcctccactggaccgagagctccatgatggcaggaaccaagtccgtgggtggccccctgtggtgtccccagcattgaacacagcagcacgtccctcatgggtgttcactacataataatttgttggatgcacaggtggatacatgacttactactttaagaatgtgtgcatttgagatgtttacttggaacaacgaaggcttattcttgaagaaacaacaagtgataagtcaccagaagacagaaaacagcatgttggagctgggtggctcctggtgcctgggaaatgaacccttggggtggttcttggaaggaagtgagcaggtttagtcccatctgatgaactctttcctctccatggttaagttggcttctaactcagggactaagttttatttgagactgaggccactgctggtgggttggttggtctcctccacctttcccttcacccgtaaatgggatattagtgaaygggtggcataacccacctgagggttcttatagggtttcaggagaacagccctcatctcccaatttcctga

SEQ ID NO: 556321 - DNA, 573 bp, Homo sapiens
gactgtgttttatttggttcatgtctaattcctccactggaccgagagctccatgatggcaggaaccaagtccgtgggtggccccctgtggtgtccccagcattgaacacagcagcacgtccctcatgggtgttcactacataataatttgttggatgcacaggtggatacatgacttactactttaagaatgtgtgcatttgagatgtttacttggaacaacgaaggcttattcttgaagaaacaacaagtgataagtcaccagaagacagaaaacagcatgttggagctgggtggctcctggtgcctgggaaatgaacccttggggtggttcttggaaggaagtgagcaggtttagtcccatctgatgaactctttcctctccatggttaagttggcttctaactcagggactaagttttatttgagactgaggccactgctggtgggttggttggtctcctccacctttcccttcacccgtaaatgggatattagtgaacgggtggcataacccacctgagggttcttatagggtttyaggagaacagccctcatctcccaatttcctga

SEQ ID NO: 556322 - DNA, 517 bp, Homo sapiens
cttcactcatttttgtgtgtatgcaaacttaatgtctttcaataaaattttccaagttattgtatgttcgcaaggacataattctgtttgacttcccatctttccaatactagtagtgagcctcattagcacatgaatgctggkgtctgtgagatgtgcttgccttcactgtcctgtttgccttgcccaaggtgggcgatggaaaggacaagccatctattattggttggaggaaggaccaaccatctactgtggcagtctgctcaggctgccatacaaaataccacatactacgtggcttaaacaggagacatttattgttcactattctgggggctgggaattcgaagatcaaggtgctgggtgatttgtttctccagtgagggccctctttgtggctttcagttggaagccttcttgttgtatcctcacaggggagagagagagcacgccagcataagagagagtgcgagagagagagggagagatcaagcaagagtgagagagagagaaagat

SEQ ID NO: 556323 - DNA, 427 bp, Homo sapiens
gaattctcacatgttgtgagagggaccyggtgggaggtaattgaatcatgggggtgggtctttctcatgctattctcatgatagtaagtctcatgagatctgatggttttataacagggagtttccctgcacaagctctctttttgcccgctgccatccatgtaagacgtgacttgctcctccttgccttccaccatgattgcgaggctccccagccatgtggaactctgagtccattaaacctctttcctgtaaaaatgacccagtctcaggtatgtctttgttaagagcatgaaaatggactaatacacccaccaaggtgcctggcacatcactaaaactgcactagacccttcagagcagccccgaagccctctgaatactactgagtgacctcagatgatactgtgtgagcagaagaactgcc

SEQ ID NO: 556324 - DNA, 406 bp, Homo sapiens
gggacctggtgggaggtaattgaatcatgggggtgggtctttctcatgctattctcatgatagtaagtctcatgagatctgatggttttataacagggagtttccctgcacaagctctctttttgcccgctgccatccatgtaagacgtgacttgctcctccttgccttccaccatgattgcgaggctccccagccatgtggaactctgagtccattaaacctctttcctgtaaaaatgacccagtctcaggtatgtctttrttaagagcatgaaaatggactaatacacccaccaaggtgcctggcacatcactaaaactgcactagacccttcagagcagccccgaagccctctgaatactactgagtgacctcagatgatactgtgtgagcagaagaactgcc

SEQ ID NO: 556325 - DNA, 421 bp, Homo sapiens
taattttcatcacttattataattacttttacatcccattgaaatctttataaaagttaatttttttctttttctttctttcttccttctttttttgagatagagtcttgctgtgtttcccaggctggagtgtagtggcacaatcttggctcactgcatcctctgcttcctgggttccagtgattctcctgcctcagcctcccgagtagctgggattacaggcccacgccaccatgcccggctaatttttgtacttttagtagagacagggcttcaccatgttggccaggctggtctcgaactcctgatccacccgcctctgcctcccaaagtsctggattacaggcatgggccactgcacccagccttaattttttttcttgattaaaatttctaaacagaaatgtttattcatattcta

SEQ ID NO: 556326 - DNA, 353 bp, Homo sapiens
aaccataagacgtaatcatgagctgactgttgttttaagtcataatacctttgaattatttgtttcataacagtagatatttaagaaagattctggcacctggaagtggggcactgtcatgacaaaatcytgagacatgtagtattatctttaggaacaggtagtgagcagaaagtgggagaacattgaagagactgttagtagaaacttagcctccagcaaagtgttagtggaagcccagagggctgaaggaggctgtcaatcagggctcaagcaaagtacaggaaatgcaattggcaacactgtcacccttagtaatgtgaaaaattgaaaatgtacttaatgaatgtgaa

SEQ ID NO: 556327 - DNA, 569 bp, Homo sapiens
ggattataggcttgcaccaccacacctggctaatttttttttgtatctttagtagacacagggtttcaccatgttggccaggctggtcttgaactcctgacctcaaatgatccgcccgcctccaccgcccaaagtgctgggattacagacgctcatgcctggctgtttcatttccctttttttatgttcagaaaaatctgaaacacccagtgagctcgctcatcctaatcacatttcatgaccagtaataccaccatgcaattaacttaataaatggttttcatttaaaaagtagaaagaatagttaacaaaattataaaaatgaataaagggaagtcgccctaccggacaatacatctcacagctacaaytcttacaatattgtagcactatcacataaagacccacatacatgaatgaaatggaattacaaacgttgacttcagtaatttatataataaaggcaacatttcaaatcaactagatagccatcaagaaaaaggatatttgcacccctacctcatatcttagagtaaaattaatactgaatacagcaaaggtaaagatgt

SEQ ID NO: 556328 - DNA, 619 bp, Homo sapiens
gaattctattggctaacatttaatcaggatttttcaagttcatcttcaatgtcacttagatgtctacaattttatttgacttgttgcttctaatgtggctttggtttggtaaggtgattgttttagttttacttctaccagatctgtattaatctcattaagttttcttactgctcttttgaacttgtgctgcttagaagccacgtttacttaagtacattgagagtacaaaacagtttatatttagaattttcccgagtcatcttccaaattatatatttacttcttttttttttttttttgagacagagtcttgctctgtcaccagtctggagtgcagtggcgtgatctcagctcactgcaagctccgcctcccaggttcaagtgattttcctgcctcagcctcctgagtagctgggactacaggcacgtgccaccatgcccagctaatttttgtatttcagtagagacggggtttcaccatgytggtcagactggtctcgaactcctgacctcaggtgatccacccacctcgatctcccaaagtgctgagattacaggcttgagccaccgcgtcggcctccaaattatatttttatctgccttttgcataattgca

SEQ ID NO: 556329 - DNA, 619 bp, Homo sapiens
gaattctattggctaacatttaatcaggatttttcaagttcatcttcaatgtcacttagatgtctacaattttatttgacttgttgcttctaatgtggctttggtttggtaaggtgattgttttagttttacttctaccagatctgtattaatctcattaagttttcttactgctcttttgaacttgtgctgcttagaagccacgtttacttaagtacattgagagtacaaaacagtttatatttagaattttcccgagtcatcttccaaattatatatttacttcttttttttttttttttgagacagagtcttgctctgtcaccagtctggagtgcagtggcgtgatctcagctcactgcaagctccgcctcccaggttcaagtgattttcctgcctcagcctcctgagtagctgggactacaggcacgtgccaccatgcccagctaatttttgtatttcagtagagacggggtttcaccatgctggtcagactggtctcgaactcytgacctcaggtgatccacccacctcgatctcccaaagtgctgagattacaggcttgagccaccgcgtcggcctccaaattatatttttatctgccttttgcataattgca

SEQ ID NO: 556330 - DNA, 354 bp, Homo sapiens
acttgcctttgtttcctcataggctctgcmtcttctcctgggctgttgtatcctgcacattgtggatggtcaataaatgttgaagtgtaattgggttcaccaggataggacacaagcgctttatccagaaataaagttttgcacttggccagtgtccctcatgtctctggagcttgtggatagggtctattaggaatcaagagcccaagagcaggtaaagtgacagcagtgaaaatgaaacagacaggtatgtatctgaatagaagaacaggatattacttatcaagtgtctcctggctaaaaaaaaaaaaaaaaagaacttgatgatacaagcctctggagcactgacactat

SEQ ID NO: 556331 - DNA, 591 bp, Homo sapiens
agcaatgccccactcttcagtatcaattctctggattagtctattcttgcatcgctataaaggaatacccaaggctgggtaatctatagagaaaatagattcttctttggcttatggttctggaggccgtacaggaagcatggtgttggcatctgcttctgatgagggcctctggaagcttacagtcatggtggaaggtgaaggggagccagcatgccatatggcaagagagacagagggcaagagagagagaacagagaggtcccagactcctaaacaaccagattccacatgaactaactgagcaagaactcacttatcaccatggggatgctgctaagccattcatgagggatgcatccccatgatccaataactcccactaggccccacctccaacattggggatcacatttcaacatgacattcggagggtacaaatatcaaaaccatatcagaaacttaatcccaatgcaacagtgttgggaggtgggcctaataagaggttattgtgtcacragttcttcgccctcgtgaagtttaatgttgttattgtggaaatgggttcctgataaaaggatgaagtttggt

SEQ ID NO: 556332 - DNA, 592 bp, Homo sapiens
aaaccatcaaatctcatgagaactcactgacyatcatgagaaaagcatgggggaaactgcctccatgatccaatcacctccctcccttgacctgtggggattacaggttcctccctggacatatggagattagaatttgagaagagattgggtggggacacagagccaaactatattattatcctaacaattttacatatattatctcatgcaatcttctcttctattaaggaattcaatgagaggtaagagaggttaagcaacttacatcagatcaatcagctataaagtggcaaaatcaagatttgcctcctgagtgcagtcttttgggcatttaaactacttcccagaatgaccaagtgaacatagtctcctgtttgttgagcttattcttttcctctctattcccttcagtctcagggctgtaaatcatcacattggtggcttaaaccatattttctccaaatatgttaagtttggccaggaaatgaaacaagtcacttaggtcttaaaaaggaacctcagaaacaaaattcaaagtggaaacaccattcttttatcattttgcaatgaattttttttaaaaatctta

SEQ ID NO: 556333 - DNA, 592 bp, Homo sapiens
aaaccatcaaatctcatgagaactcactgaccatcatgagaaaagcatgggggaaactgcctccatgatccaatcacctccctcccttgacctgtggggattacaggttcctccctggacatatggagattagaatttgagaagagattgggtggggacacagagccaaactatattattatcctaacaattttacatatattatctcatgcaatcttctcttctattaaggaattcaatgagaggtaagagaggttaagcaacttacatcagatcaatcagctataaagtggcaaaatcaagatttgcctcctgagtgcagtcttttgggcatttaaactacttcccagaatgaccaagtgaacatagtctcctgtttgttgagcttattcttttcctctctattcccttcagtctcagggctgtaaatcatcacattggtggcttaaaccatattwtctccaaatatgttaagtttggccaggaaatgaaacaagtcacttaggtcttaaaaaggaacctcagaaacaaaattcaaagtggaaacaccattcttttatcattttgcaatgaattttttttaaaaatctta

SEQ ID NO: 556334 - DNA, 541 bp, Homo sapiens
tatcccaaatatggttattttagcacgtaatcaatataaaataataagatattttacattctttttttctagcctttgaaatttggtgcatattttacacttatggcacatctcaattcagactatccacatttcaagtgctcagtggctgcatgtgcctggtggctaccatattggacagcacaggtctaaggatttcattcctgccacaagtccaaactcctagctttaattttgagtgtttttaacaaactggcctctgtttatcattctttcttctagtacttycccaaggatgattgtaccctcagcactcaagaccgcttgcggttcccctacacactttttgttcaagctgtttcttttacctggaatgctgtctttgcaccttcttcctggacctggttcaccctcgttgcctaggctggagtgccatggcgcgatcttggcacactgcaacctccaccttcccggttcaagtgattctccttcctcagcctcccgagtagcggggattacaggcatgcaccaccacgcctgg

SEQ ID NO: 556335 - DNA, 541 bp, Homo sapiens
tatcccaaatatggttattttagcacgtaatcaatataaaataataagatattttacattctttttttctagcctttgaaatttggtgcatattttacacttatggcacatctcaattcagactatccacatttcaagtgctcagtggctgcatgtgcctggtggctaccatattggacagcacaggtctaaggatttcattcctgccacaagtccaaactcctagctttaattttgagtgtttttaacaaactggcctctgtttatcattctttcttctagtacttccccaaggatgattgtaccctcagcactcaagaccgcttgcggttcccctacacactttttgttcaagctgtttcttttacctggaatgctgtctttgcaccttcttcctggacctggttcaccctcgttgcctaggctggagtgccatggcgcgatcttggcacactgcaacctccacctycccggttcaagtgattctccttcctcagcctcccgagtagcggggattacaggcatgcaccaccacgcctgg

SEQ ID NO: 556336 - DNA, 541 bp, Homo sapiens
tatcccaaatatggttattttagcacgtaatcaatataaaataataagatattttacattctttttttctagcctttgaaatttggtgcatattttacacttatggcacatctcaattcagactatccacatttcaagtgctcagtggctgcatgtgcctggtggctaccatattggacagcacaggtctaaggatttcattcctgccacaagtccaaactcctagctttaattttgagtgtttttaacaaactggcctctgtttatcattctttcttctagtacttccccaaggatgattgtaccctcagcactcaagaccgcttgcggttcccctacacactttttgttcaagctgtttcttttacctggaatgctgtctttgcaccttcttcctggacctggttcaccctcgttgcctaggctggagtgccatggcgcgatcttggcacactgcaacctccaccttcccggttcaagtgattctccttcctcagcctcccgagtagcsgggattacaggcatgcaccaccacgcctgg

SEQ ID NO: 556337 - DNA, 550 bp, Homo sapiens
tgattttttaaaaaaagtttaaaaggaaatatctgttctgaaaccccacttaagcattgtttttatataaaaacaatgataaagatgtgaaactgtgaaataaatataccatattagctacccaccaaatcaagtggtcatctatacaatgattgttataagatccaatctggagaaggtatgtatcacagtacaaactcaatgggctcacatccttctatcctcatgttcccccaaccccaaacggtacacatatatgctcaagacacacatataaaccctaccattaatatcttctgccaagcaaatagtaaatgctggtgacayagccaatgttttctttgacatcactgcaccacaacacctgccttgcagttaaacagctgagcctggtgatagcaaaagagccaattctcaaaaaatgtcacagattttcttctaagcattctttatcacttggaattctcttttttgttgttgaatgatatttttatagtttgagaatacactttgcggggggaacattgactcttggattttgtatcactct

SEQ ID NO: 556338 - DNA, 550 bp, Homo sapiens
tgattttttaaaaaaagtttaaaaggaaatatctgttctgaaaccccacttaagcattgtttttatataaaaacaatgataaagatgtgaaactgtgaaataaatataccatattagctacccaccaaatcaagtggtcatctatacaatgattgttataagatccaatctggagaaggtatgtatcacagtacaaactcaatgggctcacatccttctatcctcatgttcccccaaccccaaacggtacacatatatgctcaagacacacatataaaccctaccattaatatcttctgccaagcaaatagtaaatgctggtgacatagccaatgttttctttgacatcactgcaccacaacacctgccttgcagttaaacagytgagcctggtgatagcaaaagagccaattctcaaaaaatgtcacagattttcttctaagcattctttatcacttggaattctcttttttgttgttgaatgatatttttatagtttgagaatacactttgcggggggaacattgactcttggattttgtatcactct

SEQ ID NO: 556339 - DNA, 415 bp, Homo sapiens
ttgcagttttctcaggctttccctcrtataatttgatgctgctgttaggcacatacatgttgaagattgttgtctttcagataattgatccctttatagttatgtaatgctctttcttattcctgataacttccttgcattaaaatctgctctttttgaaatttatacagctactccacttttgttttcattcgtgttagcatggtatattttctccatctatttacttttgatatatatgtatttttatatttaaactgagtttcttgcagacaacatctagttgtgtcttgttttcttgatgtgctctgacaatttctgtcttgcagttgatgcattttgaccattgatgttcaaagtgattatgtagttggattactatctaccatatttgctactgttttctacttgttgc

SEQ ID NO: 556340 - DNA, 478 bp, Homo sapiens
ctcaggaaatgtttgctgaatggrtgaataaactgtgaatgtataaatgccccctctcagaattgtactggcttttcccaaaagcagcaaaaccaggctaagggctggcctgaggcaaaaccataaaactgacaagggttctttagcacttacacacagcaaatcattttggggcactccagccctttctaaccttcaggcacatagcacctcattgtggagctctactgatcaaggcttgttcagggaacattctatttatctctttttattcttttagggtgtacatcatatttatttaattaattaattgcattttttgacatcttaaccattttgaagtgtatagttcagtaatgtaaaatatattcatactgttgtgaaacagatctccagcacttttttatcttgcaaatctgaaactctatattaattaaacgactcctccttttcttctcccctaaaaccctggtaacca

SEQ ID NO: 556341 - DNA, 582 bp, Homo sapiens
acatcatatttatttaattaattaattgcattttttgrcatcttaaccattttgaagtgtatagttcagtaatgtaaaatatattcatactgttgtgaaacagatctccagcacttttttatcttgcaaatctgaaactctatattaattaaacgactcctccttttcttctcccctaaaaccctggtaaccaccattcttttttctgtttctatgaatttgactactttagatgcctcataatagtagaattatacagtatttgcattttagtgactggcttatttcacttagcaaatgataattacttagcaacatggataccttcaagattaacccatgttttaccttgtgacaaaatttttgccttttttacggctgaataatactccactacatgtatataccacattttgtttattcattcatctgttgatagacctttggattactcacacctctttgcctattgtgaatagtgatgttacaaacgtgggtgtgtgtggttccataatacggtatttttattttatcttttctgtgtttagatatgtttagatacacaaatacttaccattgtgt

SEQ ID NO: 556342 - DNA, 582 bp, Homo sapiens
acatcatatttatttaattaattaattgcattttttgacatcttaaccattttgaagtgtatagttcagtaatgtaaaatatattcatactgttgtgaaacagatctccagcacttttttatcttgcaaatctgaaactctatattaattaaacgactcctccttttcttctcccctaaaaccctggtaaccaccattcttttttctgtttctatgaatttgactactttagatgcctcataatagtagaattatacagtatttgcattttagtgactggcttatttcacttagcaaatgataattacttagcaacatggataccttcaagattaacccatgttttaccttgtgacaaaatttttgccttttttacggctgaataatactccactacatgtatataccacattttgtttattcattcatctgttgatagacmtttggattactcacacctctttgcctattgtgaatagtgatgttacaaacgtgggtgtgtgtggttccataatacggtatttttattttatcttttctgtgtttagatatgtttagatacacaaatacttaccattgtgt

SEQ ID NO: 556343 - DNA, 442 bp, Homo sapiens
tcccacacatatgataccataggaagttgaaaattggggtacctgagtgtagtcaaaggattctcacagacaacctaacacaaaaggaagaaacatcgctggcttagcacttccacctccctttcctaaacagttaaggagctcaataccccaaaaaagaaatatagttaagtttgttttatctccratacttggaaagggctctagtcaaaagttttgcagtttagtcaattttcttcacatttttaagtgaaacctttaaaaaataacaacagaaattgttctcagcctgttatgaattgaagtttcaaaagtttgaaggaatggctgaaccacacccctggtctcttacagaaattatctggccatcgattctactcaatctattctgtcatctgaccctgagctttcatcctctcatatttctataaatcagaagcaa

SEQ ID NO: 556344 - DNA, 614 bp, Homo sapiens
ccacagaaacccatttgctttcttttgtttcatgtcttaaaaagatgagtagaaggtcagatgagtcatcttttgggaacctgagaatttcaagctttatttacaaggatttcatatttttccatcaagatgaagcatttaacagaatttcacatttttctgccacatggtaacaataaggatgatgattgatgaggattaaatctcaatggattatttactgcattagttaaaatttcatcagcttcatgggacatctcctgtccaacatgtcttagggtacagataagaaatattattttatttctggctaggcrcagtggctcacgcctgtaatcccagcactttgggagactgaggtgggtggatcacctaaggtcaggagtttgagaccagcctgggccaacatggcaaaactccatctctactaaaaatacaaaaattagccaggtatggcggcaggcatttgtagtcccagctactcaggaggctgaggcagaagaatcgcttgaacctgggaagtgaaagttgcagtgagctgagatcatgccactgcactccagccccctgggtgaagaacaagactccatctcaagaaaaaaaaaaaaaaagaa

SEQ ID NO: 556345 - DNA, 572 bp, Homo sapiens
acacttccctgtgtgttatttttagtcttctattcctgccttttattttgggacttggcccgcttcctttgtagtttccccttaagttgctcatacctttctttcttatataatgcattttaagctacccttttattttttttttcacctctcaaaggaaattcaaggaatgttggccagttcaggaactcctgctagtcttggcaccagtaaagttcttggtttgaaaacaacctaggaaatccaggatcgtggttgactttccagttatttaatgcatcagagctgctgacagatctgagcctggagacacgttgattttgaataccatttcatgaaattgttttatggcttatagaaactagaggaatttgaaactggactcttttcaataaattgatataaaagcaatatccagttttaaaaattaggagaaagtcgagtaagtctagttcagggctatttaatcttttaccaattagcacttagttagacagtcttggtggaggaacatttattctgcactatgtcaatggaagcagmgtgagaagatgaaaagttatggttccgtc

SEQ ID NO: 556346 - DNA, 619 bp, Homo sapiens
gactctaatgttccctgcctttctgattgtgggccttaagcccctcccaagagagggtccttccttatacctcaggggaaggaatgctgatgtcatgaagccttcttaaaaacccaagaggaccagggttcagtgagcttccagatagctgaacatgtggaggttcttgaacccagggcaccaggtaggctccatacccctttccccataccttgccctacatgtgtcttcatctgtatcccttgtaatcccctttataataaagtggtaagtgtaagtaattatttccttgagttctgtgaatcctttcagccaattaatcgaactccaagaaggagttttgggaacctcaacttgaagccagtttgtcagaagtttcagaggcccagacttgcgactggtgtctggggggtgtggggagcaatgttggggactgagcccccaacaggccagatctgacactatctctgggtaggtagcatcagaactgaattggaggacacccagctggagtctgctgcttggtgtgtagggaaaaactccacacattctgtgttgggaagtcttctgtgttgatgattgttgttgtggtggtgtmagagtagagggaaaatgcagt

SEQ ID NO: 556347 - DNA, 463 bp, Homo sapiens
tggacagggatatttggccagatacttaatgatatcattaaagaaaaaacacaacagcacaagtttctaaaccaataaaaaaatagtaaaactgttttctagcttctttaaaatgggcctactatattgttactttgattttagcagggaccctaacgattgacaaaatatactcatagtacatgaaaatacaactccactgtggtgtaaattgctctgaaactaatatgctggtgataataaacattaygcatttaactaacaacaattttgcttcgttgcagaatttagaaaagctttttggtagcattttggaaggctcagatttctttaagacatctctctagggaaatttgaactaatttctcttttatttccctctgtaaaaattcccattagaaagcaaatgcattcaaaaccgttccattgatcttataactgtgctttatagcaatagccatga

SEQ ID NO: 556348 - DNA, 463 bp, Homo sapiens
tggacagggatatttggccagatacttaatgatatcattaaagaaaaaacacaacagcacaagtttctaaaccaataaaaaaatagtaaaactgttttctagcttctttaaaatgggcctactatattgttactttgattttagcagggaccctaacgattgacaaaatatactcatagtacatgaaaatacaactccactgtggtgtaaattgctctgaaactaatatgctggtgataataaacattatgcatttaactaacaacaattttgcttcgttgcagaatttagaaaagctttttggtagcattttggaaggctcagatttctttaagacatctctctagggaaatttgaactaatttctcttttatttccctctgtaaaaattcccattagmaagcaaatgcattcaaaaccgttccattgatcttataactgtgctttatagcaatagccatga

SEQ ID NO: 556349 - DNA, 463 bp, Homo sapiens
tggacagggatatttggccagatacttaatgatatcattaaagaaaaaacacaacagcacaagtttctaaaccaataaaaaaatagtaaaactgttttctagcttctttaaaatgggcctactatattgttactttgattttagcagggaccctaacgattgacaaaatatactcatagtacatgaaaatacaactccactgtggtgtaaattgctctgaaactaatatgctggtgataataaacattatgcatttaactaacaacaattttgcttcgttgcagaatttagaaaagctttttggtagcattttggaaggctcagatttctttaagacatctctctagggaaatttgaactaatttctcttttatttccctctgtaaaaattcccattagaaagcaaatgcattcaaaaccrttccattgatcttataactgtgctttatagcaatagccatga

SEQ ID NO: 556350 - DNA, 588 bp, Homo sapiens
gtttttactagctttctctttgcttgtttatcagtctgtttatacaatcagtgttaagctgtcctcagtttaaaatagtgggttataagatagtcttggcaagtctcatgttaacttgaaataaaaaaaaagaaataaaacaaataaataaaaaataaaaagcaagaaaatcaaacatattaccaggaaaaaattaccttcactaaaaggaagacaggaaggaaggaaagaagaaagaagagaccacaaaacaaccagaaaacaaataacaaaatgacaacagtaagtccttacttatcaataataacattgatggtaaatagactaaactctccaatcaaaatacatagagtggttgaatggataagaaacccacacccagtgatctgttgcctacaagaaacacacttcatctataaagatacacatagactgaaaataaaaggatggaaaaagatattccatgccaatggaaaccaaaagagagcaggagtagctatacttgtatcagacaaaatatatttaaaaacaaaaaccttaagagacaaaggagggcattayataatgataaaggagtcaattcagcaa

SEQ ID NO: 556351 - DNA, 596 bp, Homo sapiens
gtttttttttttttaagtttagtcacacraagtatgttactggagtaaaacacaataaaattagaaatcaaacatggcagaaaaaataaaaaatcagaaatatgtgggaattaaaaatgtaccactagataattaatgggtcaaagaagaaatcatgacagcaatgataaataatttgatttagtggaaaatgaaaacaaaacataataaattgaatagaatacagctaaatcagtgctcagaggaaaatttatagctgcaatatgcttatattaaaaatagaaaggtctcaaataatgaccaaatcttccacctcaagaaattagaaagaacgttaagaacaaacaaaacccaaaagaaaagacattttaaagattagagaaaaaaataaataaaacggagaatagaaaaatgacagagaatatcaacaatgaaaattgtgttttttaaaataattgataacattattcaacattttagctccttacaagattgtacaagctatgccatcaatgattcctggtgccttcaatttgttaaataggtaaaaatgcacatacattgaagtattgtgaggataaaattaaatggcaagt

SEQ ID NO: 556352 - DNA, 502 bp, Homo sapiens
ggaggggggagggatagcattaggagatacacctaatgttaaatgacaagttaatgggtgcagcacaccaacatggcccatgtatacatatgtaacaaacctgcatgttgtgcccatgtaccctataacttaaagtataattaaaaataaaaaagacattgttagttgaccatgaacaatactagatgataccacgacaacatagaaaaatgtatttggaagccaaactttaatttcatgtgacatatgctataaagagctaagaaaatttaaggagtacttgttttctttctttttttttaaacaaaatagaatccactatgttggagacttgatattatgtgcttgtcaaactattctcttttataaatgaggatacaatctagtgtgctcatggwcatcaaatggatttgcatgaaaagttacattttatttgtgatttttaaaacatcacagtaaccataaactgagctggtttactcaacttttcattgttttgttg

SEQ ID NO: 556353 - DNA, 578 bp, Homo sapiens
ttgggcagagagggaaacaagagtaactacggagagtggacatttcgttgtgcaggttttatatattattaatggtagagacttaggtaagtttacttactaagagcaaagtagcaagtaggagcttatagacagagagagagtgagagggagaataatcaatgaaacaagtacctcagagaataagaarcatggtggccatagcaaaacatggcagaatgagtcttagacaggtatatgtatgtaacttggtaagtgttagtacaggaaatagggagatctcagctgaaactctggaatcagtgaggaacagaacaaattaagggaagggaaataaaattgaatgagttctttaccccaagtggtttctccaagcatgatcagaatccagggtaaatagaaaaatgaaataaacatatgaacttatgaaatgagacactaaacagaaacgtatttcctgaaattaaggaggttttcaagaagaaaattctcactccatttctgaaagttactcctccacctccaattccccatgaagagatcaatgcctaagagtctctgagataaattcagatttt

SEQ ID NO: 556354 - DNA, 441 bp, Homo sapiens
attgaatgcaattaccagagtaattaacctcttaaaaactgagataggagaaagaaggagagaaacttaccaggaaaaaatctattcctgttcctccacctgtaaatacactctaagaaaatgaattgactttagagttattttaattttaacttaattttattgkgtctacttgtgtttgcaaacatttttgagaatctttccataactattgctttcattcaaattcactcatttcacatcagtaaaattagtgtgaaaactggaagtataggttctgattgaatcagcatatagcaagatagcactaattgatttgacttgtgattcaagtcagaacattttttttggtaacgttgtattattatgcatgtagacatagccttagtattaactgacattatctgtcaaggtccaccacacttacacaatacagtctga

SEQ ID NO: 556355 - DNA, 544 bp, Homo sapiens
gttagaaaaacaaaaggagcccacgaggcaccacaatgtcataaagaaacatgtgggccaggtgtggtggttcaaggctataatccgagcactttttggaggccaaggtaggacgatggtttgagcccaggagttcaagaccagcctaggcaacaaaacaaacaaagaccccgtcgctactaaaaaacaaaaacaaacaaacaaaaattaactgggtgtagtggtgtgtgattgtagtcccagctactcacgagtctaaggtgggagaattgaggactgcttgagcccaggtggctgaggctgcaatgagccatgatcacaccactakactgcaggctgggtgacagagagagacctgcctcagaaaaaaagaaaagaaagaaacaagtgggagttcacccacatgtgggagccctaaactccctaaacttagcatttttcagacagtcttatggtctgtttcctgaaaaggccagaaacccaagaccatgtataaatagtccccaggagcagggatcagaaaacttggatttcagtcttagtt

SEQ ID NO: 556356 - DNA, 621 bp, Homo sapiens
tttttgtacttttagtagagatggggtttctccatgttggtcaggctggtctcaaactcctgaactcaggtgatccacccgcctcggcctcccaaagtgctgttattacaggtgtgagccaccgcacccggccccaattatgtttttaaaaagagtccttatcttttggagatacaccctaaaatatttcatagatgaaataagatattgggatgaaataatatgatattaggatttgcttcaaaataccctgggagattgcaggtaggaaaaggagtaggtaaaaggggagatgaaataagtttataattgctcaagtgggtgatggatacaggaagattcattatatataccatayatataccatttatattttcttatttttacttttttaaatttaaaaatatggcacacttcacaaatttgtgtgtcatccttgcacaggggccatgctaatcttcttattccaattttagtatatgtgctgccgaagtgagcacaccatttctattttccactgataaaagttttcttaaaaagcccctaattcatgaatttcatggttgtctctttaaggtgattatcatgaaacgtaaatcaattatgatttgtcagaaaaaa

SEQ ID NO: 556357 - DNA, 424 bp, Homo sapiens
ctacttagtcatttgaagactgaggaccaagtcaacaaatmaaaatccagttgtgcaaccaatctcagaggtcttgtttgactgaaaaatgatattgtaaacagcctatacccaaagtttgtcaggatagtcaaattaatttatgagtgcagaaagagccttaaaacaatcactaccatcaagattgtagaaatgtttaggtttatcctaaaatctttagttgcagaagaggaaacctccaaattaaatattgatacatgcaggaccatgctaagtgtaagagacccttttcagtagttgtttgacttctaagcagacttttgacattgctgaatactccttttcgaaacagtctcttctgttggtttctgtgatttaacattgtgtacgtgaaggtggctgcacttggtggcttaacataatt

SEQ ID NO: 556358 - DNA, 438 bp, Homo sapiens
ccagaagggaacctgctgccttgaagaaagagatgtagttctgccggcattcatcacctgctaaatgaagagtccttgggccccaagtaaacagcagtgatatccgggtactacatcaagggctttgggtgagcctctaagacttgctggcttcaggtgagtctcagcacattaccacctgtggtggctactgggcaaaattccttactcytgagaaaagcaaaggggattttgtcttgcaccttaggtgccagcagagccacagtggggtagagcaccaagtgggttcttggggtcctcgatttcaggacttgactcttgaacagcatttatggacatgccctggatcaaacgggagaccatttccctgaagggtgagtcccaggccaggcagcatctaccacaagctgacttaagggaacataggccttaagggaa

SEQ ID NO: 556359 - DNA, 601 bp, Homo sapiens
gacaaaacagccacatgtgcctgtgacttgagtttttcccgggtgcaccctcaggctggctcaataaaccttgatgatttaagatttattatgctcagttactcattttggttgtcaccaccatattttaggctgttgtttgttactggaatactccttcattcccagaaatcctgaaaattcttccaaacatataagtttaatkagcattttaatactaattatctacatagggtattatgagtatatgtttttccatatcaccctttggcttaccttattacagcagcaacagtgttttgcttattttagttgcagttagaagggtttcttctaatcagattacattttcatttgacaaatttatgaaaagaagccttaaaaatacttgccaggagaatctgataatttatgtcaaaattacatcagctgatttttaaaaatttttatttccatgcttttgggaatatagttggtttttggttacatggataagttctttagtggtgatttctgagattttagtgcacccatcacctgaacagtgtacaccatacccaatatgtagtttttttatccctcatacccccaacattccccc

SEQ ID NO: 556360 - DNA, 601 bp, Homo sapiens
gacaaaacagccacatgtgcctgtgacttgagtttttcccgggtgcaccctcaggctggctcaataaaccttgatgatttaagatttattatgctcagttactcattttggttgtcaccaccatattttaggctgttgtttgttactggaatactccttcattcccagaaatcctgaaaattcttccaaacatataagtttaatgagcattttaatactaattatctacatagggtattatgagtatatgtttttccatatcaccctttggcttaccttattacagcagcaacagtgttttgcttattttagttgcagttagaagggtttcttctaatcagattacattttcatttgacaaatttatgaaaagaagccttaaaaatacttgccaggagaatctgataatttatgtcaaaattacatcagctgatttttaaaaatttttatttccatgcttttgggaatatagttggtttttggttacatggataagttctttagtggtgatttctgagattttagtgcacccrtcacctgaacagtgtacaccatacccaatatgtagtttttttatccctcatacccccaacattccccc

SEQ ID NO: 556361 - DNA, 627 bp, Homo sapiens
tggtcgtggtggcgggtgcctgtaatcccagctattcgggaggctgaggcaggagaatggcttgaacttggaaggcagaagttgcagtgggccaagattgcaccactgcactccagcctgggcaagaagagtgaaactatgtctcaaaaaataaaaaaaaattaaaaaaaccctgttatttttattattataattctttttggctattactggtgtaaacacagttcacgcttcgctccatatacagttatgtgtggtgtccacacaaataatgtgtataacatatctcaaattttctgacttggaaaccaaaacaggaactgatttcttcataaaaacatgcccttctccaccctctccattctctgctaaccctcactactcaaaatacttggtttaatggtttgtcttttgttctgggattagaatacctttgtattagagactgacaatgagaatggaaaaaaacaatgaaggctgtakggagggaaggataaataggtggagaacagggacttttaggacagtgaaactattctataatggcagatccattatgcggttgtcaaaacccatagaatgtataacacaaagagtaaaccctaatataaactgtggactttagtt

SEQ ID NO: 556362 - DNA, 524 bp, Homo sapiens
gtgaatatatacctagcagtgggattgctggatcatatggtagctaaatttatagttttttgaggtacctccatactgttcttcatggtggctgttatttatttacattcccaccaataatgtatgagggtttccttttctccacatgcttgccagcatttattgttgcctgtcttttgaataaaagccattttagctgaggtaagataatatctccttgcagttttgatttgcatttttctgatgatcagtgatgttgagcactttttcatatttttgtttgccatttatatgtcttcttctgaatctactcagatcttttgcccatttttagtgggattattagattttttcctatagagatgtatgacctccttgtatattgtggttattaacccrttgtcagatggatagtttgcaaatacatttttttctgttctatgcattgtctcttcatttatttgattgtttcttttgctgtgtagaaacttttaaacttgatatgatcccgtgtgtccattttg

SEQ ID NO: 556363 - DNA, 573 bp, Homo sapiens
cagacacctctcaaaagaagacatacacgcagctaacaagcatgtgaaaaaatgctcaacattactaataattagagaaaggcaaatcaaaaccactataagataccatctcacaacagccagaatggctatccttacaaaatcaaaaaataacatgctggagagattgtagagaaaagggattgcttgtacggtgctggtgggaatgtaaattatttcagcaactgtggaaaacagtttggagatttctcaaagagctttgaattaccatttggcctagcaatctcattactgggtatattcccaaaggaatataaatcattccaccataaagacacatgcacccgtatgttcattacagtactattcacaatagcaaagacatggaattaaatgcccattgatggtggactagatatagaaaatgtggtacacatacaccatgcaatactacacagccataaaaagaatgaggtcatgtcctttgcagcaacgtgaatggagctgaaggccattatcctaagcraattaatgcaggaacagaaaaccaaatatcgcatattttcatttata

SEQ ID NO: 556364 - DNA, 603 bp, Homo sapiens
ttgtcatcttgcttcctttgcctaytatagttacctgcttgatgccttaggatgtttgcgtttgtgttgccagccttcaactcgatgtgaggcacaggaatgtcagtcagaaagcgagagtgtcccctcatcaaggaactcaggcaatagaactcaggcaatagagcctgttggatttattttgtgtggtttgtttttgtaaaattctggtgtttgaatacttgtggtgtcaggagtaatgactatggtagatgcaaaagagaaactttgttattcctgttagacataagtgattccagtggcagtaatgcactagggttcggggagagtctgagcggtcacagggctgtggaaagcttaagtataatgaactgtgaattctttgaagaagaaaacaagctcttcatatccttccctatgttggaaattacaaaagaaaacgcaggcttgaaccctaccgccttttgagactgcatcaaagaaggaaatgtgagagccattatgtattgtcttggagctcactggaggacagacttcccagctgagttctccgtgagtttgtgggaagagtaccatggatggaagatctgttgaaaaattcat

SEQ ID NO: 556365 - DNA, 531 bp, Homo sapiens
aaaaaaatttactaatctgatttaaaaatgggcaaaagatctgaatatacatttcttaaaagaagacatgcaaatggcaaacaggtatatgaaaaggtgctcaacatcactgataatcagagaaatgcaaattaaaactccaatgagctatcttcttaccccatttaaaatggcttgtatccaaaagaaaggcaacaacaaatgctggtgagtatgtggagaaaagggaaccctcatacactactggtaggaatgtaaattagtacaaccaccatggaaaacagtttggaggttacacacacacacacacacacacacacacacacacacacacasacagaaaaagaatgatcaggtgatccagcaattccatggctaagtatatagccccaaagcaaggaaatctcagtatgttgaagagatagctgcactttcatgtttattccagcactattcacaatagccaagatttggaaacagcctaagtgtccatcaacaaatgaatggatataaaaaatatgatacatatat

SEQ ID NO: 556366 - DNA, 531 bp, Homo sapiens
aaaaaaatttactaatctgatttaaaaatgggcaaaagatctgaatatacatttcttaaaagaagacatgcaaatggcaaacaggtatatgaaaaggtgctcaacatcactgataatcagagaaatgcaaattaaaactccaatgagctatcttcttaccccatttaaaatggcttgtatccaaaagaaaggcaacaacaaatgctggtgagtatgtggagaaaagggaaccctcatacactactggtaggaatgtaaattagtacaaccaccatggaaaacagtttggaggttacacacacacacacacacacacacacacacacacacacacacasagaaaaagaatgatcaggtgatccagcaattccatggctaagtatatagccccaaagcaaggaaatctcagtatgttgaagagatagctgcactttcatgtttattccagcactattcacaatagccaagatttggaaacagcctaagtgtccatcaacaaatgaatggatataaaaaatatgatacatatat

SEQ ID NO: 556367 - DNA, 451 bp, Homo sapiens
gcctggtgcgatgctcacactatgtcttcttctcttatccacacaaacatacttggtattctgtttattggtctcccttttctacaacaggttctgagctgctatacagggattctgaaacaaaactgtttctgatcccaaatactccgaaaggtttttgttactgttgtttttttgtttggttgtctatttaccagtaagttaaaggaattaaacaatcttctaagtattttgaaaytatcaaaaatgtgaaagaggacttgtacagatttgtttttcatatttacaatacatgaattcttcaaagaaacatctgcaaattaaaccaaaattaatacatttaaattctactcacaataagttcatatttttcaaatcattctgtggtttctttagacaataggtctgttattcaataaaccagatgtccacaaactctgacttccaggtc

SEQ ID NO: 556368 - DNA, 451 bp, Homo sapiens
gcctggtgcgatgctcacactatgtcttcttctcttatccacacaaacatacttggtattctgtttattggtctcccttttctacaacaggttctgagctgctatacagggattctgaaacaaaactgtttctgatcccaaatactccgaaaggtttttgttactgttgtttttttgtttggttgtctatttaccagtaagttaaaggaattaaacaatcttctaagtattttgaaactatcaaaaatgtgaaagaggacttgtacagatttgtttttcatatttacaatacatgaattcttcaaagaaacatctgcaaattaaaccaaaattaatacatttaaattctactcacaataagttcatatttttcaaatcattctgtggtttctttagacaayaggtctgttattcaataaaccagatgtccacaaactctgacttccaggtc

SEQ ID NO: 556369 - DNA, 412 bp, Homo sapiens
aatataatattataatatttttaaaaagcataatcacatagacaataatgctgcttataaccctgatttaattcatttgggggaatctgaattggtgggtgtaggagaatatagccaacttataaacytaatactaatgatggttttatagtaactggaagtcatagtgttaaaaaataataataataaatttttaaaaaacaaacctacaagcctgaactacaaaataattgcaagcctctcaaaacatacagtattttcaccgtgtaaacataatgtagtaaaatttcatttaactgaacctaaagtgctggatccctaaactaatagtatttttagtattttattttttaggaagggggcataagaaagcaaaaaaatcagaccatgttagaagactcaaaaaagcgta

SEQ ID NO: 556370 - DNA, 421 bp, Homo sapiens
gtgactcaaccattttcgcaactgtaaaatgagccttgtaaagtcatctacttcatggggctggttacaggattagaaaataaatgcaaaaaggcctagcgtagtatgtgcatatagtatgtacttaataaatgttagttacatttaagattccatatcctttgatatcacaatgaaatttcattcatttgggccctagtaattaaaaatgtattacactatttgctctatttcatatgtatcctycacagcaaaaataacttcctaattgataatgcatatgttattgtaacctgaaaatcctaaacagacagaagttatcaatgtttttgttgacaattcataaataggctgagctggaaattgtctcctttatcattgaaagcctattgaaatgttaagaagttacaaggttatattt

SEQ ID NO: 556371 - DNA, 605 bp, Homo sapiens
gtgttacagacttcatttgccactttttttttttttgctttgrcagagtacagaataagtaaatgtacacacacatatacacatgcacacatacatatagtttgtagtcccagtgtggggagcttttaaaagtctgatttctgaaccttatctctggagagactcactaagtctgggatgaggaccaagaatctacattttaaaagcatctgtgtatttctgatggtcatctaggtggaggaatcattggtgatgaatttgcatttttctagctctatgcttgtaatattccacttcaattaaatatctatggtcctgattatacatttctattgtgtgagtttattgtctatcttcttattttatcttggagatcaccttaatatagaattggaatttaattgttaggagaataaaatcctctttctcctttcctgaaaccatgatttctcccaagtataaatgcagaatgtgaagcctccggtttgagaggtcataaatcagcagcaagtttctcagcagggtgtatattaaaatggaaggccttctattcttacagcaggtcactaaagttataccagcaaatgcaatgaaaattcacagtg

SEQ ID NO: 556372 - DNA, 454 bp, Homo sapiens
aatgtcttttgtcatcctcaaccatgcaagagctaagcacttgactgttcctattatctctttccctgctccagtgcaatgctgcaacttgcaggcatcactgattgctacttgaagcaaatttttttaaaagcaaggaggtaggaggagagtggaaattakgccagaaagaaaatatgttttttaatttgttcttcctaaaatggcattagggataagggacatcaatatagtaagtgtacaatagtaggtgtgttattataaccatcatctcagctgaggtggtctctagctagatccattgggcacctgtacttaccaagacctgccacagtgggaccctgattcacactcctcaggtggttctgtgctagtttcacgcacctgagcaggagtgccctttttatttttgaaaaatccctggcgtcaactcctaaaccttgagagccattta

SEQ ID NO: 556373 - DNA, 481 bp, Homo sapiens
atgctgctgagagcaatggaacaggatgaaaacaagctatggaataatgtcatttattttatgcagagaatattcttttagtcttgtgagtagaaatcaggttataaagggttgaggatggagggaggaggcagagattagattttcttctttttttatttgtacagattctctttctccttatatttttctcagtttccttaacaaatagaccaacagcttttgatgggtatactttattttaccttttttttttttttttttttttttacctcttttcttctttgttagtcttgctagyggtctatcaattttgttgatcttttcaaaaaaccagctcctggattcattgatttttttgaagggtttttgtgtctgtatttccttcagttctgctctgatcttagttatatctttccttctgctagcttttgaatgtgtttgctcttgcttctctagttcttttaattgtgatgttacg

SEQ ID NO: 556374 - DNA, 452 bp, Homo sapiens
gtttttaatttgcatttccctgattagtgatgttgaccactttttcatgtttgttggctgtttgtacacttgatcttagccaaaaggccaagagcaaatgttgttggctgtttgcatacctycttttgagaaatgtctattcacgtcctttgcatactttttgatgagattatttgtttttttcttgttgatttgtttgagttccttgtggattctgaatactagacttttgtcaaatgcgtagtttgcgaatattttctcctactgtatgggttgtctgcttactctacagatttgtttttttttttttttttttttttttttttttttgctctgcagaagctttttagtttaattaggtcccatttatttatttttgtatttgttgcatttgcttttggtgtcttagtcatgaatcctttgcctaagccaatgtccagatcagtttctct

SEQ ID NO: 556375 - DNA, 593 bp, Homo sapiens
ggttcttcatctctaaatgaggcaggacacctacgtcttttaagagtgcttcaagggctaaataacataattacatgatgagtctgacataaatagtggcttactaagcattaggtcttcctcctcagagaaataaacatggtactgagtactcaaaaggcctataatgattacggttattgggaagctttagaggtgactggctttctgagaaataatggagaaattcawtacaaaattaaaatgttgccttactaagttctatttctgaagatttttcttcctttgtttgatgctagataagtatcttcaaccaccagagagaatccttcaaattttttaatacaaattatagtcattttaagagaaaaacttattctattcatctatcaacatcatgaaagtacaaacctcaagaaaatgattaatttctttttaaaatttttatcattacccctatttatgtatttatggatttatttatttatattttttatttccataggtttttgaggaacaggtggttttggttacatgaataagttctttagtggtgatttctgagattttggtgcatccatcacctaagtaat

SEQ ID NO: 556376 - DNA, 586 bp, Homo sapiens
ttactctgctgaccattccttttgcggcacagaagctttttagtttaattaagtcccatctatttatctttgtttttgttgcatttgcttttggtttcttggtcatgaagtctttgcttaagccaatgtctaggagggtttttctagttattttctagagttttcatagtttcaagttttagatttaagtacttgatccatcttgagttgatttttgtatgaggtgaaagataargatccagtttcattcttctacatgtggcttgacaattaccccagcaccatttgttgaatagaaaagaacatgattaatttctgaatcaccatatgtttggctacaagtagcagaaaactcaactcaaaaatcgcttaaacaatgaagaagaaaatttattattttataacaaaaagacaagaagcatgaacattccggagttggttaattcagtagctcagtgatttcatcaatggttcagttctttctatgtttctgctgaaacctcctccatgtgttggccagaccacaactggaaatttcatggtaataagaaggctgaagcagctgccagcatcatattcagatatg

SEQ ID NO: 556377 - DNA, 334 bp, Homo sapiens
tggtggcacatgcctctaatcccagctacttgggaggctgaggcaggagaattgcttgaatccaggaggtagaggttgcagtgagctgagattatgccmccgcactgtagcctgggtgacagagcgagactatatctcaaaaaaaaaaaaaaaaaaaaaaaaagccgggtgctgtggctcacatgtgtaatcccagcactttgggaggccaaggtgggcagatcaagaggtcaggagatcgagaccatcctggctaacacggtaaaaccccatctctactaaaaatgtcaaaaaaattagccgggcgtgatggcgggcgcctgtagtcccagct

SEQ ID NO: 556378 - DNA, 493 bp, Homo sapiens
aatatataaagaactcataactcaaaaaaaggaaaaaaaaattttaaatgggtaaaatatttgtgtagacacttcactacaaaaaaatccatatggataaaattaaaaagactgacaataccaagtattgacaaggatgtaragcagctggaactcttctatattactgatagaaatataaaataatacatccattttgggaaatattttcatactttcttttttttccagcttgttgaggtataactcacaaataaaatattaagtttaaggtgtacaatctgatgattcaacatacataaacattgtgaaatgaataccacaatcaagctaatttacatatccataacttcctacagttgccttttttgtatgtggtgacaataagatctattctcttaacaaatttcaagtatacgatacattttattaactaaagtatattagatgtgcagaacttattcctcttataactgaaagtttgtactatttg

SEQ ID NO: 556379 - DNA, 429 bp, Homo sapiens
acagtttggaattttttaactattaaactttagaatttttgagggaagaatgattcacatcaggcatagttgtgatccattcacagatgttccatgatattcatcggatatctccccattgtgtcattccagtgggcagataactaggtccatgtggtccacctagacagatacctctaccattagtcataggagtcaactaccaactccaacagtggctcagattatccatccatcctggttcaatattttgcctctatcagggacagcaggggatttttttttattggttagtgtgattatttttttttaagtcattcaaacatgactatacttgaaacaagaacactggcatccaaaacatatcttggttatttctcaggaaggaataaacattctcaayactacaaaatacaactgatctggttt

SEQ ID NO: 556380 - DNA, 524 bp, Homo sapiens
ctttgtcaccaattttccaatcatgcttcttccaagtccctgaccatccagccaaaccattggctacarcccatgaatcagtatataatcgcacatctggtcatttctccttccatgcgaagtgcacaaccaggtgcactgcttgaagttctgcccactgggaacatttctctttcccttcaccactatccttcagggatatcctagaaaggggctgtagtgctgcagctgtccactttcaggtggtgcctgcatatcatgcagaccatctgtgaaccagaccctagtctcctcttcccctgtcaactgatcatagcaactccccatgaggcccttggtgcaggctgggggcgagaaggcagggtggcaggagtggagaccatgggcatttgggccatttcctcatgtaacttacttgtgccttcaagacctgctcgagccttatcatgtatatacctcttccatttgatgatggaatgctgctgtgcatgaccaactttatggctagatagctcagaaagcac

SEQ ID NO: 556381 - DNA, 524 bp, Homo sapiens
ctttgtcaccaattttccaatcatgcttcttccaagtccctgaccatccagccaaaccattggctacaacccmtgaatcagtatataatcgcacatctggtcatttctccttccatgcgaagtgcacaaccaggtgcactgcttgaagttctgcccactgggaacatttctctttcccttcaccactatccttcagggatatcctagaaaggggctgtagtgctgcagctgtccactttcaggtggtgcctgcatatcatgcagaccatctgtgaaccagaccctagtctcctcttcccctgtcaactgatcatagcaactccccatgaggcccttggtgcaggctgggggcgagaaggcagggtggcaggagtggagaccatgggcatttgggccatttcctcatgtaacttacttgtgccttcaagacctgctcgagccttatcatgtatatacctcttccatttgatgatggaatgctgctgtgcatgaccaactttatggctagatagctcagaaagcac

SEQ ID NO: 556382 - DNA, 524 bp, Homo sapiens
ctttgtcaccaattttccaatcatgcttcttccaagtccctgaccatccagccaaaccattggctacaacccatgaatcagtatataatcgcacatctggtcatttctcyttccatgcgaagtgcacaaccaggtgcactgcttgaagttctgcccactgggaacatttctctttcccttcaccactatccttcagggatatcctagaaaggggctgtagtgctgcagctgtccactttcaggtggtgcctgcatatcatgcagaccatctgtgaaccagaccctagtctcctcttcccctgtcaactgatcatagcaactccccatgaggcccttggtgcaggctgggggcgagaaggcagggtggcaggagtggagaccatgggcatttgggccatttcctcatgtaacttacttgtgccttcaagacctgctcgagccttatcatgtatatacctcttccatttgatgatggaatgctgctgtgcatgaccaactttatggctagatagctcagaaagcac

SEQ ID NO: 556383 - DNA, 611 bp, Homo sapiens
cgcttatttaccgggaaggtacagcctctccttttcaaaatgcaaatttacttccaactccaggccttgcaatttatctggacgaagtgctgatattggcagggtacctttaaatacactttaggagtctgtttctttgatacagccaggagggtaaaackgccatatccacagatgtcttcaattgctgggatattctcttcccactgtggagactttttcaatctgtttaatactagggaggagtcaggttgctattttgggtttaactatgaaatatttattgggctctaatttaccaagagttatttgaaactctggagccttaggaattcaattttttttttaaataaaaatgagcctagaaactgctcaagtaatggtaggggaaagaggaagggccagtctgatttgaaaaggattggcagaccaagagacaggaaggacaggctttgagtgttgcaaatgcttctgtgggtacagaatgagaatgctacacaataccttacagatcttgtattgcaaactttgcattttatatgaggaaactgaggtccagagagtgtaagtgacctacctgagatcacacagctagtcaatagcagaatcag

SEQ ID NO: 556384 - DNA, 611 bp, Homo sapiens
cgcttatttaccgggaaggtacagcctctccttttcaaaatgcaaatttacttccaactccaggccttgcaatttatctggacgaagtgctgatattggcagggtacctttaaatacactttaggagtctgtttctttgatacagccaggagggtaaaactgccatatccacagatgtcttcaattgctgggatattctcttcccactgtggagactttttcaatctgtttaatactagggaggagtcaggttgctattttgggtttaastatgaaatatttattgggctctaatttaccaagagttatttgaaactctggagccttaggaattcaattttttttttaaataaaaatgagcctagaaactgctcaagtaatggtaggggaaagaggaagggccagtctgatttgaaaaggattggcagaccaagagacaggaaggacaggctttgagtgttgcaaatgcttctgtgggtacagaatgagaatgctacacaataccttacagatcttgtattgcaaactttgcattttatatgaggaaactgaggtccagagagtgtaagtgacctacctgagatcacacagctagtcaatagcagaatcag

SEQ ID NO: 556385 - DNA, 602 bp, Homo sapiens
atgatggtggtctcatttcaacaycaatttttatccattctatctcccaagaatgccaaatgatggctggagagaatctcacttcctgtttccagacaatcagaagctggtatttatgaaaacttggaagtttgtgaagtcgattgcatggctagaagatccaaaggaagatggcaattctttaagatatctacattcattaaattggctaaaactttagaaaagattccttttaaatattatatttccctgattaaattaagttcaacaaacatttaagatgcctactgtattcggcattgttgcataacaaattaccacaaccttaccagcttaaaataatatacatttgttatctcagtttccacaagtcaggagtccaggcatggctgaagcaggtcctctgctcagctgttcatatgttacagttaaggtgttcgtctggaggcttgaccatggaaaatatccacttccaagctcatttggattgttggtagaattcatttccttgtggctatgtggctgaaccacctgttttcttgctagccagtggctgggaactgctgccaactcctagaggccaccctcaggaccttgccaca

SEQ ID NO: 556386 - DNA, 542 bp, Homo sapiens
ctctcttacccatgcttgagtacagtgatgtgatcacagctcattgcaggcttgacctcctaggctcaagtgatccttctgcctcagcctcttgagtagctaggactacagtgggctagctttcctgagcaagatacttgacactgctcaatattgggcatggaatctcagttgaatagttgtctttcttgaacttaggtctgtggaaataaccatttccatagcaaagtgagagactagaacagggaattctaaataatgcaactatctttgctgatagagaagagagtttaaacatttttcatattaattggatgatctagtaattttkgggtttgtctttggagtggaattggatacatatataatgtgttttgttcctcagaaagctgtatgagtaatactgtttactgaactataccctggggatttaattaaagatgatgtgttgaaagcagtcaaaagtgaagtcatgactgaatttttttttttttttgaagcagggtctcactttattgcctaggctggagtgcagtggcaca

SEQ ID NO: 556387 - DNA, 390 bp, Homo sapiens
gtgaggattactgagatttgaagtgaaaatataaaatacttatattttagaggaaaaaaaggtaatgtgggatgttggtgtgttttaatttgtttggtagtatgtcagatggggcttccaaaggtaagtttctaggaccttcacgttgttaaatggccttggatcctgcctcttctctaggattcacagaagcatttttcaaaccgcacctgcccctccttatacctccttgctcataatcaggtttaggctccttactttcccttcaggaagtcagttattctcatcaaggcttcagaaatagtcctagtgttgagcaygtgggagagctgcttgtcttcagagtggtttgacccagtcattgatgagttgaagttttcactgtctcac

SEQ ID NO: 556388 - DNA, 576 bp, Homo sapiens
gttctaagccgagaatggcattccctaggttagcttccagggtttttatagctttaggttttatatttatgtctttgatccacctggagttgatttttgtatatggtataaggaaagggtccagtttttgtcttctacatattgctagccaattattccagcaccatttgttgtcctttccccatttcttgtttttgtcaactttgttaaacagcaaatagttcgtggtgtgcagcattatttctagagtctctattctatttcattggcctaggtgtctgcttttgtaccagtagcatgctgttttggttactgtagttttgcagtatagtttcaagtagggtaatrtgatgcctccagctttgttatttttgcctagaattatcttggctatttgggttctttcttggttccttgtgaatttttaaatagatttgtctaattctgtgaagaacgttattggtagtttgataagaatagcattgaatttgtaaattgctatggggaatttgtctgtttcaacaatattaattctttctatacctgagcatggaatgtttttccatttgtttgtgt

SEQ ID NO: 556389 - DNA, 549 bp, Homo sapiens
gaggtgggaggaatcacttaagcctgtcagttccawgctgcagttgagtcatgattatatcactgcattccagcctgggcaggcaacagagtgaaactctgtcccccacccacccccagaaaagaaacataaaaattttcttataaaattttactttttagagtctccagccttatttaattcagttaccatatttgacaaataaatggtggaaccaagatgttaccaggtttaagtttcatatacagtagaactgtgacaggaacctagagtacctggaactagaatccagatctctgccctttcagtttaggatgtactgacaatatatattgctacttaaaattgctaaaacaaaatttataagcatctatatattttgcagctaggacaattatctacaaacatgatatttaatggaagatatggtaataacatctgagatatacaattatgttataaaatctaaaatcaacaagaaaggaataaagttgtaccattccaggaaatacatttccagagctttagatatccttattagattctaca

SEQ ID NO: 556390 - DNA, 581 bp, Homo sapiens
tttttcagaagctagaagatttttctccactctgaacttctagggatcaacaaaagtatttatatcacaaataaaaaaaaacacagttacctctcagtaaacaattttttttcagattattctatttaaaaaatctctccaaatctgttaattttctgttaataaaacatcagtttcaataaaagtcataagcctgtcaaaccaattttagtcctttatcttggatatagtaggttaaaatatttttgttgggtgttaagccaataataaactcagctattttaacaaccaaattattttcctcctataaaccaaatttacaatcaagctacttaagaaataaagacaacaaatagaaactgttttaatcttcatatcctgacctaaaaaatagaagcacgaactcatgtcacattctcatattatctgattagactaggaatgcctaaaaagaattttcccataactccatttacttgttgtttatttcctagctcattccaaaagcaawtttaaataacaacaccaaaagagtaaaatatcctcaatctgacatcctagcaatctttttattttggtga

SEQ ID NO: 556391 - DNA, 630 bp, Homo sapiens
aaggcatcctaacagtcttcagacyttagcaagtttggggggacactaaggagagaattcatatgcagttgtgggcattgttggtgaactctggatggaaataagttttttcttaattttgtttctctagcattagaaaaaataagcatatatgagtgattaaaacaaagaagtaaaaataaaaactttggctaggggaatctctggaatgataaaggttattgagatgcaatcctagattctttacaaactcttcagaccgagctaattcttcggcttttgtagttgctcagcttctcgtggctgtagatttactgcactctacaacaggagggtagtatgtgttctgtatgcttctcctctgtaaatgaatcccacaaagaacgcaaaacacaatgaaaccagccttttttgtgataaagaagaatcctaggagactttataatcacacaaggaactatttttaaaaattaaccaaaacatgggagtagggcaaaaagatgactgtgtaacctttgttgtcaggccagggagttgtctagccaaccccacccaagtttcttctaactctctctaggctggggactataactttgtttgactcacaatttactgttaataagggcccag

SEQ ID NO: 556392 - DNA, 568 bp, Homo sapiens
attgtcagtaaataatgcttgcaattatctatcataaagcagaatatttcactttattaaaaaggatgcctcttcccctttttcaaacaaatacagcacataaacgtaaaacatctctttatttttcctttataaactaggcccttatttgtgcagctctgcagaaaacagataatttcatgaaagcgtaggtatctattgaagtatcacgtcagctgctgaagtggctatttgttatatctcccgaagagaccagtgatacagttcattgaattctaagagcttattgaggggaaaaggggctgtttgtagagcaggtgagacgaaagaggagtgtgtttacagagttgatgaagcaccttccctctccagtgtttgccctgagtgggttcaattggatagagtaatcctacaaggagaatgatttggtcaactgagctttaaaacgcaaataargaaaagtgttcaacagtccagaaattaagggaaaaaaatgtattaaaggaaagtcttttaatagtgtgactgatattaatttatccatactaatggagagccaaggattgca

SEQ ID NO: 556393 - DNA, 397 bp, Homo sapiens
aggtccattgacttgcttaaggtcacacaactagaaaaggcaagaccaaggttkgaaccaggccacttgaggccatggagctttctagttcatcagtcttatgccatggatgatgaactgcatggttcatgaccctcagtcttcccatcacagacacccaaacacacacaggtacaaaagcccctggtcaggatgactgacacatgcaggaacctgcctcagtctacccaagaactccaggtctaggctgggtgtggtggctctcacctgtaacgccagcactttgggaggccaaggcagcaggattgcttgagcccaggagtccaagaccagcctgggcagcatagtgaaagcccatatctacaaaaataccaaaacttgccaggcgtggtggcat

SEQ ID NO: 556394 - DNA, 564 bp, Homo sapiens
ggtaaattgtatgttatttatattttatcacaataaaaagaaatcagttttaatttgtctctggtatctatatctttagcattgcctgcatgtactactaattatacaggattactgtatttgtaaatatttatcagaactgggtgaatatatgactagtttgttttctcttgtcaaaatttgagtgttgaatttagatatttcttataatacctagcaattatagtaaatgttctggaatttcaccaattcctataagaaattagatattttttccttctaatggaaaacaggagaatatttgttaaccttaatgtatgtatgtgtgtgtatatatatacatatatatataaattattttacatttgagggacaggccagagtaccctggaatttcttcctcaatgctrtagaattcttggaatatttaaactcttaactgtttactagatttttttttttactttcttttatttttcaacttttattttagacagagtggatacatgtgcaagtttgttacctgaacatattgcataatggtgaggtttggggtacaaatcc

SEQ ID NO: 556395 - DNA, 590 bp, Homo sapiens
ccatgtgttgtggaagggacccagtgggaggtaattgaatcacgggggtgggtttctcctgtgctgttcttgtgatagtgactttgctcctccttcgccttccaccatgattgtgaggcctccccagttacgtggaactgtaagtctattaaacctatttttcttgataaattacccagtctcgggtatttcttcatagcagtatgaaattggactaatatagacttcaaaccttcagggcaatacatttctgttgtttaagccaaccagtgtgcggtactttttaaggcagacctagtaaacaatgcatgctgttaaacataaaatttgtattcctagttagacagaagaccacttctttttttcaaaattatattttgaacttgattgattatgtcacttatcacatagtctctatattttcttgaccatccaaataagttgaatgatgaaaactttgtcatttttctatattttgaaatatcaactagaataatgtatatgagatatggactatatatgagatayggaacaccctcagttcacaaactccacccacttcatacacaacgtgcttagcaagcaaatta

SEQ ID NO: 556396 - DNA, 610 bp, Homo sapiens
tgtatatattatatatttatataatatatgtatatattgtatattatataatatattatatctaatataatatatatgtaatatatacatataatacatataaatatattacatatatttatataaatatattatatgtacatatgtatatataatatatttatatattgggattttggtaagaattttattgaatttgtggattgctttgggtagtattgacatcttaacaatagttagccttccaattcataaacatgtaatgtatttctatttatttrtgtcttagaatttctttaatttttgtcttaaaattgtcattatacaagttcttcacctccttggttaggataatttttatttcattattttccgtgctatttgaaatgaaactatttttattacattcttttgagactgctaattgtatatagaaatacaactgatttattgtgcattgactttgtactgcactttgctgaattcatttattcattctaacagggtttttgtgtaatctttagggttttatcacataatgttttatcaccagtgaacagagattattttacttcctcctttccaatgtgcataccttctatttctatat

SEQ ID NO: 556397 - DNA, 610 bp, Homo sapiens
tgtatatattatatatttatataatatatgtatatattgtatattatataatatattatatctaatataatatatatgtaatatatacatataatacatataaatatattacatatatttatataaatatattatatgtacatatgtatatataatatatttatatattgggattttggtaagaattttattgaatttgtggattgctttgggtagtattgacatcttaacaatagttagccttccaattcataaacatgtaatgtatttctatttatttgtgtcttagaatttctttaatttttgtcttaaaattgtcattatacaagttcttcacctccttggttaggataatttttatttcattattttccgtgctatttgaaatgaaactatttttattacattcttttgagactgctaattgtatatagaaatacaactgatttattgtgcattgaytttgtactgcactttgctgaattcatttattcattctaacagggtttttgtgtaatctttagggttttatcacataatgttttatcaccagtgaacagagattattttacttcctcctttccaatgtgcataccttctatttctatat

SEQ ID NO: 556398 - DNA, 354 bp, Homo sapiens
ttggaatatccatcacctcaaacatttatcttttctttatgttgggaacattccaattcttctatctattttgcactgtacagtaaattattgttaakgggtatgaaaataaagttagaaggagtaagatctagcattcgatagtacagtagtaggttgtctgtagctaacattgtcttagtgaccaaagctttcattttgcatttgggtccactaattagagttcttcatctttctttttacatgtggatatgtgttgcctttcattcatctgtaatttccaggtccttaaaaaaaaaaagtagattgagaatgcaggcattttgaagactgggtgcaaaaatcctagaattc

SEQ ID NO: 556399 - DNA, 354 bp, Homo sapiens
ttggaatatccatcacctcaaacatttatcttttctttatgttgggaacattccaattcttctatctattttgcactgtacagtaaattattgttaatgggtatgaaaataaagttagaaggagtaagatctagcattcgatagtacagtagtaggttgtctgtagctaacattgtcttagtgaccaaagctttcattttgcatttgggtccactaattagagttcttcatctttctttttacakgtggatatgtgttgcctttcattcatctgtaatttccaggtccttaaaaaaaaaaagtagattgagaatgcaggcattttgaagactgggtgcaaaaatcctagaattc

SEQ ID NO: 556400 - DNA, 636 bp, Homo sapiens
gcaaaatcatcagaaaattgatcaaagcactttttaaatagggaagggttaataggacatctggctgtgagaaattttgaatggattctatctgctaggagtagtgcccactacaagaacactgatgtcttgataaaactagattgtgcctggagaagtagcaatgcatgactataacttgatttttaattgcatatctctgaaagcataktttatatcatatatttagtaaaaactatatatttgctatgttaattatttaaaaactattttaactagatattattttagaatatccattaatatagagaacaggctcaaaccatattatttagtgtttcttgactatggaaaaccacagtacttctctgcaaatgtaattctggcaaagatttgtctccattctggacatttgaaatttctttcccagtttagaatgatagtgtcccagcttacacctaaaatattgctttaatattctttgtttgagtgtttagtgaaaagggagtgcaaaggaaattcactcaactctccactggaaatgaataccccatcatttttatcatgagttcccgtagcaataaagcattgtaaatgtgtagcaattactgaatctgtggtataacaattttctcc

SEQ ID NO: 556401 - DNA, 636 bp, Homo sapiens
gcaaaatcatcagaaaattgatcaaagcactttttaaatagggaagggttaataggacatctggctgtgagaaattttgaatggattctatctgctaggagtagtgcccactacaagaacactgatgtcttgataaaactagattgtgcctggagaagtagcaatgcatgactataacttgatttttaattgcatatctctgaaagcatagtttatatcatatatttagtaaaaactatatatttgctatgttaattatttaaaaactattttaactagatattattttagaatatccattaatatagagaacaggctcaaaccatattatttagtgtttcttgactatggaaaaccacagtacttctctgcaaatgtaattctggcaaagatttgtctccattctggacatttgaaatttctttcccagtttagaatgatagtgtcccagcttacacctaaaatattgctttaatattctttgtttgagtgtttagtgaaaagggagtgcaaaggaaattcactcaactctccactggaaatgaataccccatcatttttatcatgagttcccgtagcaataaagcattgtaaatgtgtagcaattactgaayctgtggtataacaattttctcc

SEQ ID NO: 556402 - DNA, 632 bp, Homo sapiens
tgccttttagtaaaggcaatgaagatgacttggcagttccttatatacccagctccttttccatagatagaaccagtaaacaaagagttggaaagaacaggcaaaagagaaatttcttgggtgttgctaattaaatgatgactataagctgcagtgccaggcacttgctgtcctctgacatgcatgccagacccactataccccctcaagaacagcataattagagcaagggggaacagagtatcattccccaagcatttcttgtgttgaactggagacagttaatgaaactactgtacagtgctgtagtggcagatgatctgtgactgccctttttctaggcgcttaaactttcaacatctgaaaaattcttcttgccatttctgcagtagatatggtgtaaatgccacatgttcttactcataagtgggaattgaacaatgagaacacatggacacagggaggggaacaycacacactgggacctgtcggggttgggtgaaaaggggagggagagcattaggaaaagtacctaatgcatgcagtgcttaaaacctagatatcaggttgataggtgcagcaaactaccatggcacatgtatacgtatgtaacaaacctgcacgttcagcac

SEQ ID NO: 556403 - DNA, 632 bp, Homo sapiens
tgccttttagtaaaggcaatgaagatgacttggcagttccttatatacccagctccttttccatagatagaaccagtaaacaaagagttggaaagaacaggcaaaagagaaatttcttgggtgttgctaattaaatgatgactataagctgcagtgccaggcacttgctgtcctctgacatgcatgccagacccactataccccctcaagaacagcataattagagcaagggggaacagagtatcattccccaagcatttcttgtgttgaactggagacagttaatgaaactactgtacagtgctgtagtggcagatgatctgtgactgccctttttctaggcgcttaaactttcaacatctgaaaaattcttcttgccatttctgcagtagatatggtgtaaatgccacatgttcttactcataagtgggaattgaacaatgagaacacatggacacagggaggggaacatyacacactgggacctgtcggggttgggtgaaaaggggagggagagcattaggaaaagtacctaatgcatgcagtgcttaaaacctagatatcaggttgataggtgcagcaaactaccatggcacatgtatacgtatgtaacaaacctgcacgttcagcac

SEQ ID NO: 556404 - DNA, 595 bp, Homo sapiens
cattgcagccttgaactcttgggctcaaacgatcctcctgcctcagcctctcgagcagctaggactacaggcatatgccaccatgcctggctgatttttaaattttttttgtagtgttgcccaggttggtctggaactcctggtcttaagtgatcctcctctctcagcctcccaaagttctgagattacaggtgtgagccatcatgagcagacacattattgacttttaatcaactattagccaattaaatctttaagactttttacctcctgaagacttgcyagtaaaacatacctctactatcttatcatttgttggtttttaacctaagttcaggtgttttatttattcttattgaatgtcttcatgttggtcttatctatcattccagcctatttagaatcctgtttggtcacccaaaacttatgattaactttttactttttaacttttcagtatccccagatttgataacacttccttctatacctttatctaattattaataaaaatggtgactacatcagagccctgtggtaaaccagtagaaaccatccagaggatcaacccctcctttggatatggtcatttatt

SEQ ID NO: 556405 - DNA, 595 bp, Homo sapiens
cattgcagccttgaactcttgggctcaaacgatcctcctgcctcagcctctcgagcagctaggactacaggcatatgccaccatgcctggctgatttttaaattttttttgtagtgttgcccaggttggtctggaactcctggtcttaagtgatcctcctctctcagcctcccaaagttctgagattacaggtgtgagccatcatgagcagacacattattgacttttaatcaactattagccaattaaatctttaagactttttacctcctgaagacttgccagtaaaacatacctctactatcttatcatttgttggtttttaacctaagttcaggtgttttatttattcttattgaatgtcttcatgttggtcttatctatcattccagcctatttagaatcctgtttggtcacccaaaacttatgattaactttttactttttaacttttcagtatccccagatttgataacacttccttctatacctttatctaattattaataaaaatggtgactacatcagagccctgtggtaaaccagtagaaaccatccagaggatcaacccctmctttggatatggtcatttatt

SEQ ID NO: 556406 - DNA, 589 bp, Homo sapiens
tgtgtaaatatattattaatcatacttagtactaatttattaaattacttcttttacagttggcaaacatgaattgactgggcataaagtagctgtgaagatactcaatcgacagaagattcggagccttgatgtggtaggaaaaatccgcagagaaattcagaacctcaagcttttcaggcatcctcatataattaaactgtaagctctgtttatattaaatatagtccagtcatcttttcatcttttttgttaacctacttaatgtgacaagtgagaaaaatgactgacacttctttttgtttcctaagggtttkgaaaagtttcttcctaggctgtgtgcggtggctcacacctgtaattccagtactttgggaggctgaggcaggcggatcacctgaggtcaggagttcgagaccagcctggccaacatggtgaaaccctgtctccagtaaaaatacaaaaattagctgggcatggtggtgggcgcctgtaatgccagctactcgggaggctaaggcaggagaatggcttgaacctgggaggcggaggttgcagtgagctgagatcgtgccattgcactccagct

SEQ ID NO: 556407 - DNA, 589 bp, Homo sapiens
tgtgtaaatatattattaatcatacttagtactaatttattaaattacttcttttacagttggcaaacatgaattgactgggcataaagtagctgtgaagatactcaatcgacagaagattcggagccttgatgtggtaggaaaaatccgcagagaaattcagaacctcaagcttttcaggcatcctcatataattaaactgtaagctctgtttatattaaatatagtccagtcatcttttcatcttttttgttaacctacttaatgtgacaagtgagaaaaatgactgacacttctttttgtttcctaagggtttggaaaagtttcttcctaggctgtgtgcggtggctcacacctgtaattccagtactttgggaggctgaggcaggcggatcacctgaggtcaggagttcgagaccagcctggccaacatggtgaaaccctgtctccagtaaaaatacaaaaattagctgggcatggtggtgggcgcctgtaatrccagctactcgggaggctaaggcaggagaatggcttgaacctgggaggcggaggttgcagtgagctgagatcgtgccattgcactccagct

SEQ ID NO: 556408 - DNA, 629 bp, Homo sapiens
ttattataagtaacttcctctaagaacttggaaataaatttattgtctgagagttaaattttaaaaatagtataatagatgacattgcagataygtacatactcaccttgtaagtggttccaggcctacaatattggactcgtaatcaagaggttgcaaactcatatgctccagacagctagatagttacaaacgcatagagaaatacttcaaggcctatatgcatatagcagcacaattcgcagttgcaaaaatgtggaaccagcccaaatgcccatcaatcaatgagtggattaaaataaactgtggtatgtatatatgatggaatactactcagccataaaaaagaatgaaataatggcattcacagcaacctgggtgggattggagactattatcctaagtaaagtaactgagtagtggaaaaccaaacaacatatgttctcactcataattgggagcctaagctatgaagatgccaaaggcaaaagaatgatacaatggactttggggactcagagggaaagggagggaaggggatgagggataaacagtgtatattgctggggtgatgggtgcaccaaaagctcacaaatcaccactaaggaactggctcatgtcgccaaata

SEQ ID NO: 556409 - DNA, 629 bp, Homo sapiens
ttattataagtaacttcctctaagaacttggaaataaatttattgtctgagagttaaattttaaaaatagtataatagatgacattgcagatacgtacatactcaccttgtaagtggttccaggcctacaatattggactcgtaatcaagaggttgcaaactcatatgctccagacagctagatagttacaaacgcatagagaaatacttcaaggcctatatgcatatagcagcacaattcgcagttgcaaaaatgtggaaccagcccaaatgcccatcaatcaatgagtggattaaaataaactgtggtatgtatatatgatggaatactactcagccataaaaargaatgaaataatggcattcacagcaacctgggtgggattggagactattatcctaagtaaagtaactgagtagtggaaaaccaaacaacatatgttctcactcataattgggagcctaagctatgaagatgccaaaggcaaaagaatgatacaatggactttggggactcagagggaaagggagggaaggggatgagggataaacagtgtatattgctggggtgatgggtgcaccaaaagctcacaaatcaccactaaggaactggctcatgtcgccaaata

SEQ ID NO: 556410 - DNA, 541 bp, Homo sapiens
gccaccacttcaatacctcctcacttggcagacatctccaatgttggttttttttgtaactgtcccacactagtgaaaccctcactgtgaggtttggctagagataactcaactgggctggtgggtgattttgtgtctctcactctttctaaacacaacccagtagacgcatggcttcatgttacttmaagggctttcctagctggagattctaagctggtttgtttcaaaatttctccacatttctgacggaaaaaaaaggggtgccgatactgatagatgccaggcattgtactactcccttatttaagttattttatttaattctcacaatagcccttatgaaatagatattgtcattctcattttataaatgctgtaactaagatacagagagattaaatcacttcatgaaattgaatggctcaaaaccaaataaactgagatttgaatctaatttctcactgttttgctacataatttgtcccatttcctgaattgccttaacttgcaaattaccccagggtcattatggttatat

SEQ ID NO: 556411 - DNA, 436 bp, Homo sapiens
ttcagcttttgctcgtgaagtttgacagtagtcagaaagtgcctctttaataaagcacacctttaaataactctcacagattcattccagcttttaaagtgagaagatgrcttgaactcccactgctgccagctcagctgtggatctgaaatatccagctgtgccctctctgcctctctcatcaccaataacagactttgcagtcagaatctgtctggcacgtgtgttgatgtgtgaggcgagatagcattttgctcaccgtattggcttctccgcgctagaccatagtaaacatttgtctttgtcagcagttaaagcactgtgatttgaggatgtacagggattacggacacttctgctctgttatgcttttgtctaggtctacatagaaatttatattcaaaaagagtcgatttaactgttagaatagtaattc

SEQ ID NO: 556412 - DNA, 552 bp, Homo sapiens
aaactgggacagtttgaacaacaaaataagtaataatcctattggattatcacttctgctccaaagaataaaacaaatatttataagtccatactgatatatatatatatatatatatatctgattgattatatagataaaatataactcatatagaaggcatgagagaattacaaaatttcactctctcytaaaatatttactaattactgtgatggtttttaatgtatgacacttaagaaagtgaagcttcattctttgatatacctaccttgaggaaaaggagcttaatcacctcctattgaatgtggggaaacttattagaagagtagagtatagaaagggaaatgtaataatgtggcggagaaatctggcagacaccttcctcaataaatgatcaagattagtatcactagtaataagacatactgacatattgtacccccaatatgcaatgaaataaagcatgctacctctatggtttcttatagaaaatacaaaacctcatcagaaatcaccagacaaatctaaaatgaggaatattctgcaaag

SEQ ID NO: 556413 - DNA, 279 bp, Homo sapiens
accatgcctggctaatttttgtatttttagtagagatgcagttttaccatgttggctaggtgatcctcctgcctcagcctcccaaagtgctgggattataggcatgagacattgtgcctggccactaaacgtactattttctatcaaaatatgaccttttcttttcttcatctctatttattttactgagtgaagaaacwttctgctaaatctttcctgatggatccctgctcccctgtgcctttcttttgtgctgctgtctttattcccacatttgtg

SEQ ID NO: 556414 - DNA, 444 bp, Homo sapiens
attatttaagaacatgtttaatcatgaaagaaataatcagggccggaattagtaaatggttcattgcaaagcatgagattagtcagatactcttttcagtttgcaaaaatatattaggattttatctgtggcttaaaacatactcattgagcatatagatatgcctagataccttttacataatcaactcttttgccttctgtgtgtgtgtatgatatctattatatgtattatatatatgtttatatataatctcatttgatcatcactgcagccccctaagatagtgtaatttctgttttctgtaggtgcaaactcatctgagatggtaaarcctcatgattacacaactagaagacagctaggattcaatcccaagtcagactgactccacagtccatttctttccactactctgcttcttccattttcttttttcaaatt

SEQ ID NO: 556415 - DNA, 589 bp, Homo sapiens
cttcaaactggtcttatggtattctgaatactaaacatcagttgttaacagaccaggaactttatctgattctttgcaccatctcccagcatctagactagtgtctggcacccatgaatattaggtacccagaaatgttaacatgaattaattttccaaaagtggttaaattagtatatctgaagattaacttactgtagtgagattttaatcatgatctagcttaagacgagttttgaaggcaagaactgtctttttttaggagtttttgtatatcgtttggtatttatttatttatttttgagacggagtcttgctctgttgcccaggctggagtgcagtggcgcaatctttgctcactgcagcctctgcctcctaggttcaagcarttctcctgcctagcctcccgagtagcttgctgggattacaggcatgccccactatgcccagttaatttttgtatttttttgtagagacagggtttcaccatgttggccaggctggtcttgaactcctgacctcaagtgatccacccaccttggcctcccaaagtgctgggattacagaaatgagccactgcggccagacc

SEQ ID NO: 556416 - DNA, 580 bp, Homo sapiens
aaaacaagtaattctgacacaggagactttttactagggaagccagacaaaaatcrtgttaacaaagcttcagtcttagctgcttctaatgaatggcttccctggctttctttatgtctccaaaccgtggtctttgttttcatattttctctaacaccttttttgtttaatgtaccttatactgcctttctcattgttacatctttgacatttcatctcagcgtgctttttaatttttaactttgaatggataattgttataacttctcattttcattattttctttcaaactgcgtcggtttttgtctttttatcacagccttgttttattggaattttaacaaaataaacgtttatcttaagtatctagtcttttaattatctctcctcatcatgttttaacattttattattcacattaaatgtttcatagatttatttaaatgtagatgtgtataaaataaaaagttcaaatgctctctccctaattttattctctagatgaaactactgtgaaaaagctgtgtgcccattcagttttttttttcctataaactgataaagtatctaaacatattt

SEQ ID NO: 556417 - DNA, 742 bp, Homo sapiens
cacttggtatacatgtttacacaaaattatagtcagactatacatacaattctaaaacttgtttcttttaaaaatgtattttgtgagtgatatcatttaatcccataacgattccatgaaataggaaagagtattatctcctattttccaactgagaaaacaggttcagagaaattaactctactgcttaagctcatatggatagtagtaacaggcagagatggatgaaaaattaacctatctgactctaaattgctttatctcaacaatgttaatatgtgggtaatctcagtaaacaagaactgggctgacaagttgggagaatctggagagggttgagggaccaaaggtgctgataagaacatcatgaaagctcagcaagaataaggtatggcagaggtgagataatggtaggtggtcatcgggaaaaggccaggatttgacgtcttatwagtaaaagagtttgggaccagagtaggcttaaagaatcattaatcttggtaagagaagtgcagctggaggtaactgggaaagataaggaactttggagtcttaaacctcacttctcagaaaatgtggtagagacagggaaagctgcctgaagtttcctaaagctgacacctaaggtctggccatatgggactgtgtgtgttttgctgtttgtgaagttagaaggaatggcaggaaaggtgttgattgttctctaggtgatcaaccatctgggtttgccctttgcccatga

SEQ ID NO: 556418 - DNA, 606 bp, Homo sapiens
cttccaccttttgtgctcataaaatcaacccatgtttctggaaatgcatgcattgtcagggctataaaaaaaggatgcatttaatacagcaaagtgttttactaactaaatgttgtgtgccatggttcagttgtaaccacccaaggggttcaccttgcctgctgcctagacagagctgattcatcaagacaagggaattgcaatagaggaagagtaattcacacagagctggctgtgtgggagactggaggtttatgattactcaaatcagtctccttgagcattcagggagcagaatttttaaggataacttggtgggtggggggaagccagtgagccaggagtgttgattggtcagagatgaaatcagaaggagcwggagctggagctgtcttcctgtatgcagtcagttcctgggtgggggcctcaagatcagatgagccagtttattgatctgggtggggccagctgatccatcaagtgcagggtctgcaaaatatctcaagcactgatcttaggagcagtttagggaaggtcagaatcttgtagcctccagctgcatgactcctaaaccataatttctactcttgtggctaatgttagtcc

SEQ ID NO: 556419 - DNA, 575 bp, Homo sapiens
gtgaccacacaaataaggagggttctctgagttagttctgctagatttccatcagcagcccctctgagatcccttccacatatacagacacatacaaagatgagatggacagaaggccttccaaatcagatccctaaccaagaactccaagagtatcccttcaaaactatcctcttattctctgtctgagaaacttctcaaaaacttcctgattgaggagaaatttcccaaaccaggattcttcccactagttagaaagaaccaactgagaccacccccactgcccccacaaggagctgaaccatacagctacagaaccagttgggagaaggaaagaggtgttggcagtacttaagattcaccaatccagacaccccgtaacgaggctacagacagacaccccaccacggggctacagacagacaccctgtgatagggctacagttaaggatgtctccccaggactatttctccrttgcaattaaatccatgcacattgggtcagcagcacccagccagtagagagagtaccagagtcagtccccagtccaagagaactaggcagtcacttgggc

SEQ ID NO: 556420 - DNA, 554 bp, Homo sapiens
cacgccctttctcactgaggcaggagaaaaggtgggaaggctgagtgcagatgtcagtttagtagcagggggttgagaggaagtttccatctttaagtcagaaaaaagcaagaggaaaaaggaagttgaagtttgaggacagtggagatttaagacagtctttgcagagcacggagaaacaatttgcctagaggaatgtaataagacttacaggcagttttgggcttgtattcgtggtgcaattggcttgtttgaagcaaatgaatttatgatatcagtgagagagtcactgaaattctaggtagttaatcttaagctggaaaggcaaagaagtgggaatagtggatagaaagtaagtaaaagagttgttccagttattaagctcytgtcttttggcttcaaacccacatggggccagggttgatactcagcaaaattacacttctatgacatttgacacaggattctttccctttcctttcctttcctttcctgtcctgtcctgtcctgtcctgtcctgtccttttcttttcttttcttttttctgatggagt

SEQ ID NO: 556421 - DNA, 397 bp, Homo sapiens
tgcttttgaaagaagagaaatatggctctgttccgccagggtcaccggcggtcagagtttaaggttatctctcttattccctgaacattgctgttatcctgttcttttttcaaggtgcccacatttcatattgctcaaacacacatgctgtacaatttgtgcagttaatgcaattatyacagggtcctgaggcaatatgcatcctcctcagctgacaggattaagagattaaagtaaagacaggcataggaaatcacaagggtattgattggggaagtgataagtgtccatgaaatctttacaatttatgtttagagattgcagtaaagacaggcataagaaattataaaaatattaatttggggaactaataaatgtccatgaaatcttcacaatc

SEQ ID NO: 556422 - DNA, 397 bp, Homo sapiens
tgcttttgaaagaagagaaatatggctctgttccgccagggtcaccggcggtcagagtttaaggttatctctcttattccctgaacattgctgttatcctgttcttttttcaaggtgcccacatttcatattgctcaaacacacatgctgtacaatttgtgcagttaatgcaattattacagggtcctgaggcaatatgcatcctcctcagctgacaggattaagagattaaagtaaagacaggcataggaaatcacaagggtattgattggggaagtgataagtgtccaygaaatctttacaatttatgtttagagattgcagtaaagacaggcataagaaattataaaaatattaatttggggaactaataaatgtccatgaaatcttcacaatc

SEQ ID NO: 556423 - DNA, 397 bp, Homo sapiens
tgcttttgaaagaagagaaatatggctctgttccgccagggtcaccggcggtcagagtttaaggttatctctcttattccctgaacattgctgttatcctgttcttttttcaaggtgcccacatttcatattgctcaaacacacatgctgtacaatttgtgcagttaatgcaattattacagggtcctgaggcaatatgcatcctcctcagctgacaggattaagagattaaagtaaagacaggcataggaaatcacaagggtattgattggggaagtgataagtgtccatgaaatcttyacaatttatgtttagagattgcagtaaagacaggcataagaaattataaaaatattaatttggggaactaataaatgtccatgaaatcttcacaatc

SEQ ID NO: 556424 - DNA, 397 bp, Homo sapiens
tgcttttgaaagaagagaaatatggctctgttccgccagggtcaccggcggtcagagtttaaggttatctctcttattccctgaacattgctgttatcctgttcttttttcaaggtgcccacatttcatattgctcaaacacacatgctgtacaatttgtgcagttaatgcaattattacagggtcctgaggcaatatgcatcctcctcagctgacaggattaagagattaaagtaaagacaggcataggaaatcacaagggtattgattggggaagtgataagtgtccatgaaatctttacaatttatgtttagagattgcagtaaagacaggcataagaaattataaaartattaatttggggaactaataaatgtccatgaaatcttcacaatc

SEQ ID NO: 556425 - DNA, 587 bp, Homo sapiens
tgaaactaggttaagtcatcaagtaaaatgaagtgtcttattaagattacagataggaaacaaaacttaccaatacaaactcccatgcaaattgttctttaaagaggtttccagaattggtgggattaccttaggttaacctttcggaaataagtgtcctctggtcattattctcagttctactatgttagggtaaccatacaatttatcatttaatctcggagacttttgaaaattaaagagggtactattaaaagttacctcaaaataataggcgtagccctgcactattgaatatattttccatgaatctctgtcagacagaagatggacaagacacatcatgaggctgaactgctaaaaagtcatcctggatgagacatcctgaaggattgcacaacaccagttttgcagtctgaagcccatcaatgcactaacaacaacaacaaaccaaaartgactaaaaggggatacatatgacttagtgactattgcttataaggttcaaacttgcttacctccatggcatcttccaaattctcttctgcatctgctttctctgtcatcagtttggctgccttaaaata

SEQ ID NO: 556426 - DNA, 630 bp, Homo sapiens
acaacacaatcccagaaaacattctttcatttaaaattaacctggaagctattgcttttaattactstgtagtacccaatgggtttctcatcctaaagacctccttagcttagtgggcaagcctgaaataattcagattaaagataatttatataaagtatggctgttttatgggtagctttggtatttactaaatatcacacttaaatacaacttaaactttcctatacactccagatttcttcagttttgtagcaccatcaaaagaatgcctgtataaaaatggtgtgtgttaagataatgctacatgctatgacaagcaaaccagaaaatatcaatggcttaacacaatagtagtttatttcttgctcatgtagtaattcaaagtaaatgtttgggttcataggcaactttcctcccgtggtgactcagggacccacattccatcttctggttttgctcttcttaatagccttgaggtaccgtttccagttggcagaagtggaaagagagaggagaaacccttctgacttcttaaaagtcccagcctggaagagacatgctaatttccgttcctattcttttagaaagatctaatcacatggtcacagatgaatgtaaagtgcacgt

SEQ ID NO: 556427 - DNA, 371 bp, Homo sapiens
actagagactcagcgttcaacatttttattgggggctcatcacatctactctctgcataacacatgccaaaattccagactggcagaaggaaagcaggtgttcagcataaatcacattttcacaaacaatctaggcacagtgaaacttctttatcatttggaatttattccaaataattatctgtggaaattattgtgctaagggccaaccttgcaagcagaccctactaaaaatagcagccttaggcctgctatgttgacatyctgcccatggcccaaaacagagataatgaatatcagctagactaataaattctctctcgggaatttgacttgaaaaacacaaagagcctcaggcagttgattttgaa

SEQ ID NO: 556428 - DNA, 477 bp, Homo sapiens
gaacatgacaagaatgtccactgtcaccactgttattcaacatagtactggaagtcctagctagagcaatcagacaagagaaagatataaagggcatccaaattggaaaggaagaagtcaaattattcttgtttgcagatgatatggacttacatttggaaaaacctaaagactcaacaagaaaactattagaataaacaacttcagtagagttgcagaatacaaaatcaacatacaaaactctgtaacatttttatatgccaacagtgaacaacctaaaatagaaatttaaaaagtaatcccatttacaatagctacaaataaaattgaatacctaggaattaaccaacaagtgaaagatctctataatraaaactgtaaaacactgatgaaagaaattgaagaggacaccaaaaaatggaaaaatattccatgttcttggattggaagaatcaatattgttacaatccccgtact

SEQ ID NO: 556429 - DNA, 578 bp, Homo sapiens
tttagggtttttatcatgaagggactttgaattttattgaatgctttttcagcatcaattgayatgatcatatggtttttttcattcattctgttgatatgatgaatcacattgattgatttgcatatgttgaacgatccttcagtccctcagataaatcccacttgctcatgatgaatgatctttttaatgtgttgttgattttggtttgctagtattttgttgaggatttttgccttaatattcatcagagatattagcctgtagtttcctttttccgatgtgtatttgtctggttttggtataaaggtaatacaggccttttattcccctctcttctatgttttttagaatagtttgagtaggattggtattagttctttaaatgtttggtaaaattcagcattgatgacattgggtcctaggcttttctttgctaggagactttttattacaactttagtctcgttacttgttataggtctgttcaggttcaggatttctttaaggattaatcttggcaagttgtatgtgtttaggaatgtattcatttcttctaggttttccaatttattggc

SEQ ID NO: 556430 - DNA, 532 bp, Homo sapiens
ccagctctacatttcccttctgcactgccctagcagaggttctttatgagtgccccctccctgaagcaaacttctgcctggacatccaggcatttccmtacatattttgatatctaggcgaagtttcctaaatctcaattcttgacttgtgtgcatccataggctcaacaccatagggaagctgccaaggcttggggtttctactctctgaagccacagtctgagctgtatgttggcctcttacagccatggctggagtggctaggacactgagcaccaagtccctaggctgcacacagcacaggacactgggtccggcccatgaaaccactttttcctctgggcctgtaatgggagtggctgccatgaaggtctctgacatggtctgtagacattttccccatggtcttggtgataaactttgggcttcttgctacttatgcaaatttctgcagccagcttgaatttttcctcaaagaatgggtttttcttctctcctccatcatcaggctgtaaatttgccaaagtttta

SEQ ID NO: 556431 - DNA, 580 bp, Homo sapiens
tggcacttcagtaggttatactcatgttgctggtctaccatccatagccaatgctttgttgatggtaccaactggcttgcatttttagtgaagataacagcatggttttggtggttctttttcatttcttaagcattttaaatcttttaaraaaatgtttttggaaggagacattatttctttcagtagttggcttgggcaaatctgtaaaagttatgctgtcaggcaatataccaaagacaactatttgaagaggaaaatacataaagtactgatatttgtgcatttagcatatataataaaactacctttaatataaaagagatggaatccctagactatcttttcctcagtttatgcttgaaaacattgatatttaataacccagggtaaaggacaggtaatcagcaattttcttgaacagtaacttacatttgatatatattcctgtcctctttacaagcttcatgcagtcctgtaattttatatctcattatgctcactggcatctaataaaaaatgccagtgtataaatcaactatgaaattagcctaataaattgtgtcacactttagagttt

SEQ ID NO: 556432 - DNA, 599 bp, Homo sapiens
ttccccagtgggccatgaaaagccctatcagtttttgcattttgttaaaaagaaaataaactatactagaaattgcatagccctaggaagacctgaagttttttatttttgaatagatttgatatgcattctaacacttgatcctaagtggtgcataaaggttagtattgcagtatcatactcaatatcaagaaagttcatagctttcttctcataaagctactctttcttggacttctcatgaagaagtcccatgatgaaatctcacaatttctgttratgccatgattttggaacactgttaagatacagaataatacaggtttcttctccgaatgctgaactccaaaaaaatgcataaaatttcagagttcaccgaaattccaaatgatagaatgaaatctgaactctggaaatctgcagtagcatcacaaacaattatttaattttcaaaatacttgaaaaaacttgaagtttttctaatacttttcttctgtcaaggagagccagttggagggaagttgactatgatagcaaagtgtgtcattctcaggaccctgagatcagacattaccttaggctttaatatagctacaatt

SEQ ID NO: 556433 - DNA, 498 bp, Homo sapiens
ttttacatttctagaaattctatttggttcttttcaaaactgcagttattcttgatggtcttttgttcattccttagagtcatcattccctctgttacttcataaacagtttaagcatactyattttacattcttttttagataattctatgcccaaaaacttcttggggtctaattttgcccacaaatttgtgctgagtggtggtttattttatgggagcttattttctcgtgtgtttgtaattttctgttctttgttcatataaagttcctcttaaatgtaggaatcctgaagagtctgagttgaaggtgcttcccaccagatggcaggtattgcggtgttatgaactagaaatacgtttcaattaatttttttgagagagagggtcttgctctgtcacccaggctggagtgcagtggcacaatctctgctcattgtagcctcaacttcccagggctcaagtggtcctcccacctcagcctcctgaatagctggga

SEQ ID NO: 556434 - DNA, 498 bp, Homo sapiens
ttttacatttctagaaattctatttggttcttttcaaaactgcagttattcttgatggtcttttgttcattccttagagtcatcattccctctgttacttcataaacagtttaagcatacttattttacattcttttttagataattctatgcccaaaaacttcttggggtctaattttgcccacaaatttgtgctgagtggtggtttattttatgggagcttattttctcgtgtgtttgtaattttctgttctttgttcatataaagttcctcttaaatgtaggaatcctgaagagtctgagttgaaggtgcttcccaccagatggcaggtattgcggtgttatgaactagaaatacgtttcaattaattkttttgagagagagggtcttgctctgtcacccaggctggagtgcagtggcacaatctctgctcattgtagcctcaacttcccagggctcaagtggtcctcccacctcagcctcctgaatagctggga

SEQ ID NO: 556435 - DNA, 584 bp, Homo sapiens
tcaatatctttcctctcctttcttagtaaaagaaccttatcttttatttgggatgcagtgaattcagttaaaagagtttcctagccttctttgaactacgtttgactgactaggtttgacctggtcaaagagaagtgatggggggtgctatggactgaatgtttgtgtcccctcaaaattactctgttgaaatcctaatgcccaaggtgactggtatttagagatgaggcctttgggaagtgattaggtcataggtttcatgcgcgtccgtgtgaagagacmaccaaacaggctttatgtgagcaacatggctatttatttcacctgggtgcaggcgggttgagtccgaaaagagactcagcaaagggtggtggattttcattagttcttataggttttgggataggcagtgaagttaagagcaatgttttgccggcagggggtggatctcacaaagtacattctcaagggtggggagaattacagagaaccttcttaagggtgggggaaattataaagaacattcttaagggtggcagagattacaaagtacattgatcagtgagggttgggcagaaacaaat

SEQ ID NO: 556436 - DNA, 612 bp, Homo sapiens
gtgctttgggaggttgaggtgggaggattgcttgaggccagccaggagtttgagaccagcccaggcaacatagcaagacccttgtgtattagcttcttcccacactgctataagaactattggaactcagtaatttataagaaaagaggtttaattgactcatagttccaaaagctgtactggaggcatgcctggggaggyctcatgaaacttatggtggaagggtgaaggggaagcaagcacgtcttcacatggtggcaggagaaagagtgagtgaagggagaggtgctacacactttcaaacaaccagacctcatgagaacgcactcactatcacaagaacagcaagggggaaatccgcccccatgatccaatgacctcccaccaggtccctcccctaacactgggaattacaatccaaggtgagatttggatggggacacagagccaaaccatatcaccctgtgatacttgggtgaattgtaataatccccatgtgccattggagggacctggtgggaggtaattgaatcataagggcagatttttcccgtgctgttctcaggatagtgaataagtcccatgagatctgatggttttataaaggggagt

SEQ ID NO: 556437 - DNA, 562 bp, Homo sapiens
gaattctttcggagattattaatgaccttagaaagaacaattctttggggcaatggggacagaaggcagctgagagtggatatagctgcaagtgagaacggagcagaaataaggataagtgacaattgttcaacgactaagtagtcccatgctttaaaattcttcagaataagcagtatgattcataggtgtatgtaagttaactttaatcagacctcagtaggaggttagttagctcttagatgaatgtcattaggaatctagacttacagaggcactaagacaagtgcttcaaatactatctcaatctaccccagatagttaattaccttactggatgttggaaataaattttcttttgtgaaatgagtagggttcatgatatttggagaagaaaagagattgtgtgggttctatcttctccatctgaaagaaattaaagaatctagcaaacctaatagcctaacaccttctaactagagcctaggtttccaactcctgtgtcctccacacatacagggctctgatgcccgatccartcagaagtcccacagaatatcag

SEQ ID NO: 556438 - DNA, 521 bp, Homo sapiens
ctttaaaatgtgtcttactatataatgctcyatcaatcaatggagaatgatattcctgaatgaactattattaaagataagaattgaaagaccagatatggtagttttccagaatccacttgctagataattctgagtctcaataacctgtttcttcattttaaatatgtcatattctcaaaagtgacctaaaactaaccttttcatgttatcagcttgccttatcttgtttctatcgctactgagatctctgtttaaatgtgtcataggattttctcaaagctatcgcagtgaaaacagaagtcttgacttctcttcccctctgccaacaaagtgattcttccccaatttcagaaagtagcatcaccattcgccttgatgaagtcaaaactctgtttgataatttctcttttccccacaccaaaaacaatccatcagcaagttctggcacctctttctccaaaacataacctgaatctccccactgcccatcatcactgctctcaccgtggcaagcgacc

SEQ ID NO: 556439 - DNA, 471 bp, Homo sapiens
tgtgtgtgtgtgtgtgtgtgtgtgtgtgtgtgtgtgtgtgtgwgacagagtctcattctgtcgctcaggctggagtacagtggtgtgatctcggctcactgcaacctccgcctcccagcttcaaacggttctctgcctcagcctcccgagtagcttggattacaggcgcccgctgccatgcctggctaatttttgtatttttagtagagacagggtttcaccatcttggccaggctggtcttgaactcctgaccccgtgatccacctgcctcggcctcccaaagtactgggattatttatacgcatgagccactgtgcccagccgtcattcttatattattatttcctaggtgtctttcctgaagactatcttctggtctcgaaatggacatgatggatccatggatgtacagcagagagcctggaggtccaaccgcagtagacagaaaggtatggctctgttggagtccc

SEQ ID NO: 556440 - DNA, 471 bp, Homo sapiens
tgtgtgtgtgtgtgtgtgtgtgtgtgtgtgtgtgtgtgtgtgagacagagtctcattctgtcgctcaggctggagtacagtggtgtgatctcggctcactgcaacctccgcctcccagcttcaaacggttctctgcctcagcctcccgagtagcttggattacaggcgcccgctgccatgcctggctaatttttgtatttttagtagagacagggtttcaccatcttggccaggctggtcttgaactcctgaccccgtgatccacctgcctcggcctcccaaagtactgggattatttatacgcatgagccacygtgcccagccgtcattcttatattattatttcctaggtgtctttcctgaagactatcttctggtctcgaaatggacatgatggatccatggatgtacagcagagagcctggaggtccaaccgcagtagacagaaaggtatggctctgttggagtccc

SEQ ID NO: 556441 - DNA, 435 bp, Homo sapiens
taaccccacattcccacagccagcaggaacccragcagaggcttcaacccaggcttctgacttgcaaaccagtgctccttcctccttacacagtaacaacaggggaaggtggccttccgggttgccagagccgagtggtaccagcaatagagtggaaactcacacacaggcttgcctgcttcctgggttagggttagggtttatatggctccgggaggttgatgcattgtgtttgatcttcccccttttttttttttttgagacagagtctcattcctgttgcccaggctggagcacagtggtgtaatcttgctcacagcaacttctgcctcccaggttcaagcaattgtcccgcctcagcctcccgagtagctgggatcacaggtgtgcgccaccacacccagctgatttttgtatttttagtagaaacggggt

SEQ ID NO: 556442 - DNA, 435 bp, Homo sapiens
taaccccacattcccacagccagcaggaacccaagcagaggcttcaacccaggcttctgacttgcaaascagtgctccttcctccttacacagtaacaacaggggaaggtggccttccgggttgccagagccgagtggtaccagcaatagagtggaaactcacacacaggcttgcctgcttcctgggttagggttagggtttatatggctccgggaggttgatgcattgtgtttgatcttcccccttttttttttttttgagacagagtctcattcctgttgcccaggctggagcacagtggtgtaatcttgctcacagcaacttctgcctcccaggttcaagcaattgtcccgcctcagcctcccgagtagctgggatcacaggtgtgcgccaccacacccagctgatttttgtatttttagtagaaacggggt

SEQ ID NO: 556443 - DNA, 435 bp, Homo sapiens
taaccccacattcccacagccagcaggaacccaagcagaggcttcaacccaggcttctgacttgcaaaccagtgctccttcctccttacacagtaacaacaggggaaggtggccttccgggttgccagagccgagtggtaccagcaatagagtggaaactcacacacaggcttgcctgcttcctgggttagggttagggtttatatggctccgggaggttgatgcattgtgtttgatcwtcccccttttttttttttttgagacagagtctcattcctgttgcccaggctggagcacagtggtgtaatcttgctcacagcaacttctgcctcccaggttcaagcaattgtcccgcctcagcctcccgagtagctgggatcacaggtgtgcgccaccacacccagctgatttttgtatttttagtagaaacggggt

SEQ ID NO: 556444 - DNA, 435 bp, Homo sapiens
taaccccacattcccacagccagcaggaacccaagcagaggcttcaacccaggcttctgacttgcaaaccagtgctccttcctccttacacagtaacaacaggggaaggtggccttccgggttgccagagccgagtggtaccagcaatagagtggaaactcacacacaggcttgcctgcttcctgggttagggttagggtttatatggctccgggaggttgatgcattgtgtttgatcttcccccytttttttttttttgagacagagtctcattcctgttgcccaggctggagcacagtggtgtaatcttgctcacagcaacttctgcctcccaggttcaagcaattgtcccgcctcagcctcccgagtagctgggatcacaggtgtgcgccaccacacccagctgatttttgtatttttagtagaaacggggt

SEQ ID NO: 556445 - DNA, 513 bp, Homo sapiens
tctcctgcctcagcctcccaggtagctgagactacagttgcgtgccaccacacccagccaatttttatatttttaggagagacggagtttcactatgttggccaggctggtctcgaactcctgacctcttgatctgcctgcctcagcctcccaaagtgctgggattacaggcgtgagccaccacgcccggccccatgggtgttttttagagttctctttgattcacacttagtcacaatcccctgtaaatagttcattgttctgttaaaacttccctgtttaaatgactctgtggtttccgccttgtgagtggatcccgatcgatgtagcattattacaagaggggtgcctggagatagatccacaaggatagcatttggggactggtttgtccatgcccttgggtttgagctttgtctgagctccaaggkaatgggaactggacgtcggtaatctgtgatgtgctgtggcatcgagttaatcagactgttgcctacagcttgtctttataaa

SEQ ID NO: 556446 - DNA, 513 bp, Homo sapiens
tctcctgcctcagcctcccaggtagctgagactacagttgcgtgccaccacacccagccaatttttatatttttaggagagacggagtttcactatgttggccaggctggtctcgaactcctgacctcttgatctgcctgcctcagcctcccaaagtgctgggattacaggcgtgagccaccacgcccggccccatgggtgttttttagagttctctttgattcacacttagtcacaatcccctgtaaatagttcattgttctgttaaaacttccctgtttaaatgactctgtggtttccgccttgtgagtggatcccgatcgatgtagcattattacaagaggggtgcctggagatagatccacaaggatagcatttggggactggtttgtccatgcccttgggtttgagctttgtctgagctccaaggtaatgggaactggacgtyggtaatctgtgatgtgctgtggcatcgagttaatcagactgttgcctacagcttgtctttataaa

SEQ ID NO: 556447 - DNA, 533 bp, Homo sapiens
taaccacagaacctgagggaaacatagaagaataaaagagatgtagtccctgccctcaggaaattcagagtaggacaaaagaaacagaaatacccattacaaaaccactttaatacaagttccagtgacaaaaaggacatctcaggagacagtgatcgaggagctcatggagttataaacaggaattaaagatgagatcattaaatggctgaaggatgggtgaaaaaggggaccaaygggtaggagaggaggagaggactccacaagggagatgacgggattggagggaaatgcaggggtgtaagtgctggcaaacacaagcttgatgtggagccaggcaggcagagggtgtagactccccaggatcaccaaggacggctttttattcatctctcaccactacatttgaaagacatttattcttattaccgaaatgatggaataggcatgtgctttggactcagaaaatcttgggtttgcaccctagctctactactatgtaccagctatgtgaccttagacaacttacctac

SEQ ID NO: 556448 - DNA, 570 bp, Homo sapiens
ctgccaaactaaactttcctatataagtaagatataaataacagttctattctatctgtctrtgttcttctctgtggtttcgaaattgtctctgtttccatctagatcacccacttcactcctataaggtttcacattttgataaagattagttgtatactatttcagagtttacttattgcatatgcatgtattaatttaaatgaactttgtgaatatgggtaaggaaagtattattagttcctttttatagctgagcaaaatccatgttcaggaagattaaatatcttcaatgaaattagacagcaagtaagcagaagaactaaaagacaaatgtttctcaattttatcatccttctattagttttcctacaaatatatgtgtttttcttgtacttgatggtacataaaaaacaacattcactaaggtttaaaatagaagtatttcaattgatcacagaggttttactttctatggttttgcactaattttagtgagagtaagaaccaaaaaattatatttaatataattttgtcactgttaacacagaaatatttaactgcccatgt

SEQ ID NO: 556449 - DNA, 551 bp, Homo sapiens
aacaaagagatagaaataattaaatagaakcaagcagacattctgaagctgaataatgcaactggcatgaagaatgcatcagagtcctttaatagcagaactggtcaaacagaaaaaagaattaatgagcttgaagacaggctatttaaaaatacacaactggatgagacaaaattaaaaagaataaaaaataattaagcacatttacagaatctagaaaatagcctcaaagggacaaatgttaagagttattggccttaaagaggaggtagagaaagagatagtaatagaaagtttattcaaagagataataacagagaatttcccaaacctagagaaagacatcaatatccaaatacaagaaggttatagaacaccaagcagatttaaaacaaagaagactacttcaaggcatttaatattcaaactcccaaagatcagggttaaaaaaaaaggattctaaaaccatcaagagaaaagaaacaaaaaacatacaatggagctccaaaagggctagcagtagacttttcattggaaatattacaggccag

SEQ ID NO: 556450 - DNA, 551 bp, Homo sapiens
aacaaagagatagaaataattaaatagaagcaagcagacattctgaagctgaataatgcaactggcatgaagaatgcatcagagtcctttaatagcagaactggtcaaacagaaaaaagaattaatgagcttgaagacaggctatttaaaaatacacaaytggatgagacaaaattaaaaagaataaaaaataattaagcacatttacagaatctagaaaatagcctcaaagggacaaatgttaagagttattggccttaaagaggaggtagagaaagagatagtaatagaaagtttattcaaagagataataacagagaatttcccaaacctagagaaagacatcaatatccaaatacaagaaggttatagaacaccaagcagatttaaaacaaagaagactacttcaaggcatttaatattcaaactcccaaagatcagggttaaaaaaaaaggattctaaaaccatcaagagaaaagaaacaaaaaacatacaatggagctccaaaagggctagcagtagacttttcattggaaatattacaggccag

SEQ ID NO: 556451 - DNA, 577 bp, Homo sapiens
tctcagcgaggtgaatggggagccagaagaggratgcattgggaacgtggtcttcccctggagtcaggccaccagtggccagactctcctctgaccgccccaggccaaattccccttggcatccacatctttccaccatcaatggcctaccagtgtctgctggtgtgtgtcagtgtgttcttttactcctcccaatgtccaactacttgtgtctgtgcccactaggtctcaggtttttatggatacagaatggcggggggtgtagtgggccaaaagacaattttttgggtgtgaaaacagaaatgtttttcctcacttaggttcctggcacaggtccaaggtgtagccctcaccaggtaccccacccttctctaactagtacttccctgctcccctccagtatcaataacagagaccaaatttactgtctactttggaacaatcataccacagacaaaatgtttgcaagatactggatactgggtagtgcaagttagcgatagctgtgagatggtgtgtgtgtgtgtgtatttgtgtgtgtgtcccatcctaatagtctgccttggaacaggtacaa

SEQ ID NO: 556452 - DNA, 510 bp, Homo sapiens
aatctgtgccccgtctgcagggcagaggcagatgtggcatgtctttttgtacccacagagcttgttctatggcacgcccttttctrggctttttgtatcatttcttagtacattgtaatagattcaaaccagtcttggctgaattaaagtgagaatgagagtcatttaggatggggagaagggagctggctgcagagatggagacactggctagttttgccctcacctttagggtggctagggtgggacaaattgtatcctggagacaggcttgaaggtaaaggctgcgaggacctgaagccagagaggcagagaaaccaagacagagaaaaaggcagcaggaccaggtgaggtggctcacacctgtaatcccagcactttgggaggctgaggcgggaggatcgcttgaacccaggagtttgagaccggcctggcaacagagtgaggcctgactctacaaaaagtcaaaaagtggggcaggaggattgcttgatcctgggaggtcgaggc

SEQ ID NO: 556453 - DNA, 510 bp, Homo sapiens
aatctgtgccccgtctgcagggcagaggcagatgtggcatgtctttttgtacccacagagcttgttctatggcacgcccttttctaggctttttgtatcatttcttagtacattgtaatagattcaaaccagtcttggctgaattaaagtgagratgagagtcatttaggatggggagaagggagctggctgcagagatggagacactggctagttttgccctcacctttagggtggctagggtgggacaaattgtatcctggagacaggcttgaaggtaaaggctgcgaggacctgaagccagagaggcagagaaaccaagacagagaaaaaggcagcaggaccaggtgaggtggctcacacctgtaatcccagcactttgggaggctgaggcgggaggatcgcttgaacccaggagtttgagaccggcctggcaacagagtgaggcctgactctacaaaaagtcaaaaagtggggcaggaggattgcttgatcctgggaggtcgaggc

SEQ ID NO: 556454 - DNA, 384 bp, Homo sapiens
atggagagaaaccttggacaatacccagctttcaagggcagaggtccctgtggctttctgcagtgcattgtgcccctggtttattgagactagagaatggtgatgacttttaccaagtayactgcttgtaaacattttgttaacaaggcacgtcctgcacagccctagatcccttaaaccttgatttcatacaacacatgtttttgtgagctccaggttgagtcaaagtggctggggcaaagtggctggggcaaagctacaaattactaacatctcagcaaagcaattgtttaaagtacaggtctttttcaaaatggagtctcttatgtctttcttttctacatagacacagtaacagtctgatctctctttcttttccctaca

SEQ ID NO: 556455 - DNA, 555 bp, Homo sapiens
ggagtgcagtggtatgatcatggctcattgcagcctccaacttctgggttcaagcaatcctcccacctcagcctcctgattagtggtgactacaggtgtgtgacaccacctctggctggcttttaaattttttggagagatrgagtcttgctattttgcccaggctggtctcaaactcttggtctcaaatgatcttcccatcttgacttcccaaagcactgagattacaggtgtgagccattgcacctggctggttctcatttatttaagtattactgctgtcatggtttgctttggtccctgtgggttcccccaccctttgaaacaagtgcctgacacatggtagggttcacaataaatatttgtagaataaataagagctgagccttcaaggggtccaaaatacttgcacggagtttttctaggtgggcacgatgccacccagctgcaggactatttcagggtgttcattggctcctctggttgatcttttgatgcctgtataagaactcccacttctccaaatctgggggccacatctttagagttctcagc

SEQ ID NO: 556456 - DNA, 627 bp, Homo sapiens
agtatttattttttaccaaaattgttaaactaattttattgaactagagagagtatcaaratcaaagactctgaagggaaaatatgccatcattcatatatgaagatcaagttccacaggcaaaacaaataagaaagatgaaaagagagccgttgccctttttttaattctccatgaaacaaaaatggaatcttcagtaatatgttcaggttttactatttctcaccagtggtgtttcaacccttgacagttgttaatgcttttttttttttttttttttttgctttacattactgtacatcacattccataaaatcgctctctaggaacaaagagtcacacctggccttattcttcaaacaaaataaaccccagctaactaagctttatgtgatatggacaattttcttccccattttgcttattttcagagtttaaagcaagtttgtgttctctaatgtcgtattctatttttaaataaatttcaataaatttttttaaagatagcttgtagggcatttctaactttcacgtatattctgattgccccagagagttaatctggggcagtaattccacaaatgcccagactaccataggcaggcagtactgagggcagacgcagaa

SEQ ID NO: 556457 - DNA, 545 bp, Homo sapiens
tatgcatcaaacaacagagatgcaaaataaatgaagcaaaagttattgaaattaaggcaaaaacaaattcataattataattggaaacttcaataaccctctctcaacaattgatagaactagacagataatcagaaaggatatatcratagaactcaacccactaaccaacaagatctaattaacatttacagaagattacaccgcagaacagcagagtattcattttctccaactgcctacagaacatgaagcaagataagccatatcctaaacgttaaaatagaacttggctgggcacagtcgctcacgcctgtagtccccgcagtttgggaggctgaggcgggcggattacctggggtcgggagttcgagaccagcctgaccaacatggagaaaccccgtctctgctaaaaatacaaaattagccaggcatggtggcatatgctgtaatctcagctacttgagaggctgaggcaggagaatctcttgaacctgggaggcagaggttgcagtgagccaagattgcactattgcactccagcc

SEQ ID NO: 556458 - DNA, 545 bp, Homo sapiens
tatgcatcaaacaacagagatgcaaaataaatgaagcaaaagttattgaaattaaggcaaaaacaaattcataattataattggaaacttcaataaccctctctcaacaattgatagaactagacagataatcagaaaggatatatcaatagaactcaacccactaaccaacaagatctaattaacatttacagaagattacaccgcagaacagcagagtattcattttctccaactgcctacagaacatgaagcaagataagccatatcctaaacgttaaaatagaacttggctgggcacagtcgctcackcctgtagtccccgcagtttgggaggctgaggcgggcggattacctggggtcgggagttcgagaccagcctgaccaacatggagaaaccccgtctctgctaaaaatacaaaattagccaggcatggtggcatatgctgtaatctcagctacttgagaggctgaggcaggagaatctcttgaacctgggaggcagaggttgcagtgagccaagattgcactattgcactccagcc

SEQ ID NO: 556459 - DNA, 571 bp, Homo sapiens
tcctttgttcatttatccactcatttaagaaakaaaaattgattgaataccaaagtccaacccctccctaaggggaaaaaaataatgtatcaatccaatttcagtcgactacaatttaaagatgagatgacatgttcatcagtaattatattctggggtttggtgtgatctttagctgtacagagccaagttccataggaattcacctgtgtaacctccagacagatcatgaaaagttttcatcagggagatgaaatgtaagctggactttgaagactatacagcaagagtagagacagagaagggaggtcactgttggtggaagaataccaaaaaaaaggaattttgaggggaggaaagaatgttagctaagctgctaaagcaggaaagtccaggaagtgttctagataatggaaactagtgaagatttttgtggggattcagtagccaagtaaaggtagaggtgtatgaaatgatagcttcaaattggatagtgtgggtatctgaatgccaaaatgaattagctagaaataatggcatccataagaagcaaaatctggcaaagcgtggt

SEQ ID NO: 556460 - DNA, 582 bp, Homo sapiens
caactatcatttaagagtgatgtcaaaatgaagttctcagtcatttgaagacctatactgtatacatcgtagtrtataatattcctattcttccaaattgttgatgttctttgacatgaccctgaatgcgtggggattatacatcctcataaattctgccctgtttaactgagatatgtccatatgacttactttggccaattaagtgtaaatgacagtgatgttcatttcctccaagcagaagttttaagaaccagaaatagggttgaaggattgtattaaatgggcaattaccctgtattaagatcctggttgtgtttgggtaataatagtagaaatattgaataattcttagagattgttagacagcaatcacaggaacagaaaaccaaacactgcatgttctcacacatgagtgggagttgaacaatgagaacatatggacacagggaggggaacaacacacaccagggcctgttgggggatggggagcgaggggagggaacatagaggatgggtcaataggtgcagcaaaccaccatggcacacatgtacctatgtgacaaacctgcacgttctgca

SEQ ID NO: 556461 - DNA, 582 bp, Homo sapiens
caactatcatttaagagtgatgtcaaaatgaagttctcagtcatttgaagacctatactgtatacatcgtagtatataatattcctattcttccaaattgttgatgttctttgacatgaccctgaatgcgtggggattatacatcctcataaattctgccctgtttaactgagatatgtccatatgacttactttggccaattaagtgtaaatgacagtgatgttcatttcctccaagcagaagttttaagaaccagaaatagggttgaaggattgtattaaatgggcaattaccctgtattaagatcctggttgtgtttgkgtaataatagtagaaatattgaataattcttagagattgttagacagcaatcacaggaacagaaaaccaaacactgcatgttctcacacatgagtgggagttgaacaatgagaacatatggacacagggaggggaacaacacacaccagggcctgttgggggatggggagcgaggggagggaacatagaggatgggtcaataggtgcagcaaaccaccatggcacacatgtacctatgtgacaaacctgcacgttctgca

SEQ ID NO: 556462 - DNA, 587 bp, Homo sapiens
ttaatattcatcttgatttcattgttgacccaatgatcattcaagagcaagttatttaatttccatctatttttatcatcgtgagggttctgtttggagtcaattttcaattttattccactgtcatctgagagagtatttgatataatttcaattttcctaaatttattgagacttgttttgtgaccttttatatggtctatcttggagaatgttctatgtgctgatgaatagactgtctattctgcagttattgggtggaatgttctgtaactatctgttaagtccatttgttctagcgtataatttaagtccattgtttctttattgactttatctctatgacctgtttagtgctgtcagcggagtattgaggtcccccactattaytgtgttgctgtctatctcatttcttaggtctagtagtaatgtttataagtttgggagctccagtgttaggtgcgtatgtatttaggattgtgatatttttctgttggacaagtccttttatcattatataatgtccctctttgtcttttttaactgctgttgctttaaagtttgttttatctgatataagaatagct

SEQ ID NO: 556463 - DNA, 562 bp, Homo sapiens
gcccagctcatttttttctttttaatttttttcatagagatggagrtctcatcatgttgcccaggcaggtctcaaactcctgggctcaagcaatgctcccacctcagcctcccaaaatgctaggattatagatgtgggccatcacaccctgcctacacttgccttcttgatgttcctaattagttcccattctgatcctatttcacttggtcatttccactatcttccagtcacttggtttttctggtaggaacttttttctatgctaaacagttttaatgataaaaaggatattaagaaataaggtaagattactgggagatttaaactgttacctgatagtggtccttttacaaacagaactctactacccaatcatgccaagttttggccatttatgaacgttcatgtgaattcacagagggcagttaatccatctgggtagaaatataagcaatcccttttctcctgcctctgaagaaaaggaagaggagtacaaaaaggcaggaataaaagatactgatctacttttagctctaattacaaaaccgagaactatttc

SEQ ID NO: 556464 - DNA, 562 bp, Homo sapiens
gcccagctcatttttttctttttaatttttttcatagagatggagatctcatcatgttgcccaggcaggtctcaaactcctgggctcaagcaatgctcccacctcagcctcccraaatgctaggattatagatgtgggccatcacaccctgcctacacttgccttcttgatgttcctaattagttcccattctgatcctatttcacttggtcatttccactatcttccagtcacttggtttttctggtaggaacttttttctatgctaaacagttttaatgataaaaaggatattaagaaataaggtaagattactgggagatttaaactgttacctgatagtggtccttttacaaacagaactctactacccaatcatgccaagttttggccatttatgaacgttcatgtgaattcacagagggcagttaatccatctgggtagaaatataagcaatcccttttctcctgcctctgaagaaaaggaagaggagtacaaaaaggcaggaataaaagatactgatctacttttagctctaattacaaaaccgagaactatttc

SEQ ID NO: 556465 - DNA, 396 bp, Homo sapiens
attgctactttaaaatggataaaatttataaaaaaatcagctgtgttrgatttcagaagctatgctgatctgaatttttctcttgttattgataaattaatggtttttcactcttacagatccttcatggatttaaaaatcaagttggcgatgaaaattggaggcgtttctctgaccagtttcctcttcccttaaaagagcgtcttgcagctttttatggtgtttaatctaatacacttaagctgcagtcccaaaattaggggtaagttataagaagtttggaaattttcaggatgaagaaaattttgttagggctgtcatttcaaactactaaatagaataaaaagctatttgttttctatagaggttgaataaaacatagcctcatatcattct

SEQ ID NO: 556466 - DNA, 491 bp, Homo sapiens
gctttcaaaagaagaaatacatgtggccaacaagtatatgaaaaaatgctccacaccattgatctttagagaaatacaagtcaaagccacagtgagatatcatctcataccagtcagcaaggctattaataaaaagtaaaaaaataacatgctggtgaggttgtagagaaaagggatcacttataaactgctggtgggaacgtaaattagttctaccattgtggaaagcagtttggtgacttctcaaagaacttaaaacacaattatcatttgacccagcaatcccattattaggtatacacccaaaggactataaattgttttaccataaagacacatgcatgcctatgttcattgcagtgctrttcacaatagcaaagacatggagtcaacctaaatgcccaccaaaggtagcccaacaatggtattgtttaaaaataaaaataatagaaagcaataaatgctgatgcttaagacagaatcatttcttc

SEQ ID NO: 556467 - DNA, 592 bp, Homo sapiens
tggaggttgtagtcagccgagatcgggccactgcactccagcctgggagacagagcaagactccgtctcaaaaaagtgtgccctttcctaaggatggtatgcatggaaagacagaaagcaatttcagaaggataccaaaaaaacttcccctaatgggtactttaagtagtcaggctggggcagaggagctttttaatgatatgccccttttttgaacaatttatctattcatttaaatggtataaggtactatttttacttttacaaaggcaagatagctcctctaacatcccaggagataaggggttaagctgmaagttttaactctgtattacaggattggtttttctggcaaccaatccccattctgaggctgtccagaagcccctggaaagcagtaatctcattagcatgcgaaagacatttctcatatcagacattccaaagattttaagggctgcatacaaaaaaactgagacagaatataaccacattctcacactgataggagccaccaggcctggctcagctctggctctccctgggaagctttgttctacccacctcattttaactagagctcacccccatt

SEQ ID NO: 556468 - DNA, 593 bp, Homo sapiens
ctgcactctaggctgggtgacggagtgaaaccccatctcaaaaaattaaaaaataaaaaataaaaattaattttaaaaaataaggactacttgaatacaagctctggaataccaagacagtggatatactaacctataagtgactaatgggtgcacagtgtctacagcctggatataccggacaaaggaatgattcacgtcccagacaggactgagcatgatgacatgagattttatcagctactcagaactccacactatttaaaagttatgaattgtttatttccggaattgttcatttaatattttcagaccaaggttgaccctgggtaactgatactgtggaaagcaaaatcttagataagggggaacaactgtaatarcagctgcaaatacgaaaccccaggcatggagggctcccagcacggacatgattcttcccaaggtagtggaccggacctcggggctgggaagcagtggtattccacattggacgtggaggcagatctaaagggaaaactccatatggaaagctaatcctcagtgtttggcttaagcaaacacagaaaaggaactgtagcaaattgaaattt

SEQ ID NO: 556469 - DNA, 610 bp, Homo sapiens
tgcaaacagaaaccatagcaaagttagagtggctatactaatattagatgaaatagattttaaaacaaaaaaaaagttactagatacaaagacagatatatcataaagagtaagtccatcaggaagatataacaactataaacagatatgtacctaataactgagcaccaaaatacatgaagcaaaaacttacagaaatgtagagagaaagaagcaattcaacagttctagttggagacttcaatatttcactttaaataatgtatagaaaaaaaatcacaggagataaacaaggaaatgaagacttcaacaacactataaaccaactgaacctaacagacatctatagaccattccactcagtaacaacagaatatacattcttttcaagtgcacatggaacattatccaaaatagatmacatgctaactcttaaaacaaatcttgataatattatccaacctcaatggaataaaattagggaacaatagtagaaatgcataaaaattaaactacacactcttaaataatgggtcagagaagaaatcacaagggaattagataatactttgagacaaatgaaaatgaaaacacagaataccaaaattta

SEQ ID NO: 556470 - DNA, 580 bp, Homo sapiens
tctgctaccagcagaagttggaagaatcttctcagtgcgataaaaaaaaaaatcacccagagcctctaaaattcaagaagcaagactaagaaaaaaaactgaaaatagaactagatacacagttgacccaaatattgaagttatttgccattgactttaagataattgtgattattaatgtattcaaaaaaataaatgacatgatagtttcaaatggaaattgcagagcagaaaaatataataactaaaattttaaaaatcaataacaagtttaacagaagacagaactgaagagactttgcaatctcgaagataggtcagtagaaaatataaaaactgaagcataaaatttaaaactgataaaaaatcaagcatgaaagacatatggaacataatacaaacttttaaatctcataaactggaatctagatgggagaaagagagagaatgctgcaaaagcatgtatgaagagamacaggctgttatttttcctaaactgctaatagatgtcaagttacagattgaagaatcagtatgatctcacacataagatcatataacaacaacaacaaaatgcact

SEQ ID NO: 556471 - DNA, 596 bp, Homo sapiens
agaaatgatggcagctacaggatagtggcatgatttctctacagtactgaaagagaataaactgccacaataatatcctttaaaagggaagccaaaataaagacatttcttgacagaaaaaaagagaatttgtcaagataagtgtataaatgcactttaaaaatactgaagggacttttttcagcagaagaataacagaaaatggtcctgatccaatataaaatgttaaattatagaaaagacaaacataagaggcaaaaatatgcataaatcttagtgaatactgatcatacaaaatagtaataattttggtgataattaaagtatatataactaaaattcaagataataatttttttgcttttgagacagagtctcactctgtcacccaggctggagtgcagtggyatgatcttggctcactgtaacctctaccttctgggttcaaacaattctcctacctctgcctcccgagtgattgggattgcaggtgtgtaccaccatgcccagataattttgtatttttagtagagacagggtttcaccatgttggccaggctggtctcaaactcctgacctcaggtgatccgccctcc

SEQ ID NO: 556472 - DNA, 596 bp, Homo sapiens
agaaatgatggcagctacaggatagtggcatgatttctctacagtactgaaagagaataaactgccacaataatatcctttaaaagggaagccaaaataaagacatttcttgacagaaaaaaagagaatttgtcaagataagtgtataaatgcactttaaaaatactgaagggacttttttcagcagaagaataacagaaaatggtcctgatccaatataaaatgttaaattatagaaaagacaaacataagaggcaaaaatatgcataaatcttagtgaatactgatcatacaaaatagtaataattttggtgataattaaagtatatataactaaaattcaagataataatttttttgcttttgagacagagtctcactctgtcacccaggctggagtgcagtggcatgatcttggctcactgtaacctctrccttctgggttcaaacaattctcctacctctgcctcccgagtgattgggattgcaggtgtgtaccaccatgcccagataattttgtatttttagtagagacagggtttcaccatgttggccaggctggtctcaaactcctgacctcaggtgatccgccctcc

SEQ ID NO: 556473 - DNA, 564 bp, Homo sapiens
tggtaaatgacttcagtacagtttcaggatacaaaatcagcatacaaaaatcagtagtatttctatacaccaataaygatcaagcttgaaaactcaatcacatttacaataaccaccaaaaaaaaaaatacctagaaggtattttaaacaaaaatgtgaaagatcttgttaatgaaccacagtggggtccactcgtctggtgcagtaaggccaaacatccacactgaggtttgcagcacaagaaaggagggtgtttatttgtaaagtgccaagcaaggagaatcaggcagctcacttaaaacctgaactcctcagtagcttgtgagcaagggtatttaaaggcagggggaaatttcaggaaagccaaagttacaggcaaaagtataaattaatacagggtgtacatggaggttacacattaatttggcctacaaaggagggttatcttgaagcaggggctcacaggtcattcataggaaaattacagatgttctaatttacaattggttatagaaaagaaactttgtttaaaaatttggggtcaatagaaaataatgttagctc

SEQ ID NO: 556474 - DNA, 576 bp, Homo sapiens
ggcattcactgtggcataacctctctcatctattacctgattccatccatagattcctgtctgtgaagcagactgattctgacttcctcattcctcactccaggagcggtgagtcaggctgagataattgtggactgcaayagccaaattggtttaaacagcacccacttcaggtagatgaacatgaatgtgtaccagtgaagatatacgtattaaggaggatgaaattttagaaattatacccccttgtttgttgattcattctcatttcaaccaaaactagaaagtgatgattatagttgtgggtgcaggtaggactcatttaaaaataatattttttaaatttttcgaggccaaacttgagtgaatttgtgtgctatactttcaacagtaataaagctaagattagcagaaacaaaaataaatttgcatctcttattcataaaatttatatgatatgtaatcctataaagtcaagcatcaccagcctcacatgttctgctttatttgtgttattcatcagtggatatgtgaataagagtctattttaagacactgtttgtaataacattttta

SEQ ID NO: 556475 - DNA, 392 bp, Homo sapiens
cccctgaggaaggagagcagactcagagaaaaagtattctagggcaaattacctaaatggaagttgttacctagccctgcacactccccagcccctttgggaaacagctggtaccaagatgggtgacagagaaaccaagatggagaaatatctggggtgtgccctggggctcacttttctcagaaaggaaaacaaccttctaaatctactaaggatgctgctgggaggactaaatgagatatagtgtgttttaaaataccaaatggttcgacattgttatattgaatgtaagctgggactacttagcaagaagcagataaagatgaagtcaatatttactccaaaaactactgaaataatgaaatgrgactttgttacttgaagtatggcct

SEQ ID NO: 556476 - DNA, 610 bp, Homo sapiens
tttgtaaatgagtgaatgaatgagtgagtgaatgaatgaacaagatgactaagccaggtttaaaacccagttctcgggcctmcttgaccatttccatgatactaggatacccccctatggatgcacagattttcaagaaagaataaaagacattaacgagattgtgcctagtgccatacgacataacctcccacttaatttcatataaatttatggctgaaccagtttggagatttgtttccagaaagtactgatttattcagttgagatcaatcatggtaaatacaagtcttagtgggtaggtagtgcattgctgtggacggctacctactacatggcattcacatttgagttgacggtgttttatggtctcagcggtgtaaggctggatcaaggtcaggctttctcctcatagaaggatgtgttgaaggaggttggagagccaaggaattggaagacacctgcatgatccctgctgcatgctgagagggccagtgtctagaatcagagaaaacagcaggagctctcattctttctgctgggtgtcacctgctcctggcccttttacctgctcctgcatctaagcaccaaaagccagtaggtttcacaa

SEQ ID NO: 556477 - DNA, 610 bp, Homo sapiens
tttgtaaatgagtgaatgaatgagtgagtgaatgaatgaacaagatgactaagccaggtttaaaacccagttctcgggcctacttgaccatttccatgatactaggatacccccctatggatgcacagattttcaagaaagaataaaagacattaacgagattgtgcctagtgccatacgacataacctcccacttaatttcatataaatttatggctgaaccagtttggagatttgtttccagaaagtactgatttattcagttgagatcaatcatggtaaatacaagtcttagtgggtaggtagtgcattgctgtggacggctacctactacatggcattcacatttgagttgacggtgttttatggtctcagcggtgtaaggctggatcaaggtcaggctttctcctcatagaaggatgtgttgaaggaggttggagagccaaggaattggaagacacctgcatgatccctgctgcatgctgagagggccagtgtctagaatcagagaaaacagcaggagctctcattctttctgctgggtgtcmcctgctcctggcccttttacctgctcctgcatctaagcaccaaaagccagtaggtttcacaa

SEQ ID NO: 556478 - DNA, 408 bp, Homo sapiens
gctgggcacagtggctcatgcctgtaatcccagcactttgggaggccaaggcaggtggatcamctgagatcaggagttagagaccagcctggtcaacatggtgaaaccctctctctactgaaaatacaaaaattagtcgggtgtggtggtatgtgctggagtcccggctactcgggaggctaaggcaggagaatcacttgaacctgggaggcggaggctgcagtgagccgagattgtgccactgaaacttcagcctgggttcagagtgagaccctgtctcaaaaaataaataaataaaaataaaaatacagattccagattctcacctgattctctagaggtgccatccccaaaaatgttttaacagaggtcccagtggattctgacacaaacaagtttagtgatcac

SEQ ID NO: 556479 - DNA, 614 bp, Homo sapiens
ttaactccattcttctcactccatttcttaatttcattcctttataaagcttctcttcttactatttcaagatggctgcccaattcatgtgcagaggaaagagaagttctttctctttactctgacagttgaataaaaaatccaaagcctggctctctttggtccatccctgaatcagtcattatggcctggggaatggagtaygctaattgacttaagggaatcagggcccagcactggagtgaaggtggggctaatgccacctaatccactggagagtaccaaaagtgtgcttccccaaaggaaattcacaatactgtgggaaaggatgaattgatgctgactcactataaatgacaaatgcaaaagataaacataccaggccccactccttgcaggaagcaaaagatcctagagggagaggctgacatggaacaggatgtctgaccaataaaacttcttccaatgaggattcacagacatagtcataccttccaggctaagtaaggctcaattccaggcagctgtctgtctcagctcctcatgcacatccgtcgcttctgtctacccagcatttgtttctcccttattcagttctcattgctgtgtaacaa

SEQ ID NO: 556480 - DNA, 614 bp, Homo sapiens
ttaactccattcttctcactccatttcttaatttcattcctttataaagcttctcttcttactatttcaagatggctgcccaattcatgtgcagaggaaagagaagttctttctctttactctgacagttgaataaaaaatccaaagcctggctctctttggtccatccctgaatcagtcattatggcctggggaatggagtacgctaattgacttaagggaatcagggcccagcactggagtgaaggtggggctaatgccacctaatccactggagagtaccaaaagtgtgcttccccaaaggaaattcacaatactgtgggaaaggatgaattgatgctgastcactataaatgacaaatgcaaaagataaacataccaggccccactccttgcaggaagcaaaagatcctagagggagaggctgacatggaacaggatgtctgaccaataaaacttcttccaatgaggattcacagacatagtcataccttccaggctaagtaaggctcaattccaggcagctgtctgtctcagctcctcatgcacatccgtcgcttctgtctacccagcatttgtttctcccttattcagttctcattgctgtgtaacaa

SEQ ID NO: 556481 - DNA, 614 bp, Homo sapiens
ttaactccattcttctcactccatttcttaatttcattcctttataaagcttctcttcttactatttcaagatggctgcccaattcatgtgcagaggaaagagaagttctttctctttactctgacagttgaataaaaaatccaaagcctggctctctttggtccatccctgaatcagtcattatggcctggggaatggagtacgctaattgacttaagggaatcagggcccagcactggagtgaaggtggggctaatgccacctaatccactggagagtaccaaaagtgtgcttccccaaaggaaattcacaatactgtgggaaaggatgaattgatgctgactcactatraatgacaaatgcaaaagataaacataccaggccccactccttgcaggaagcaaaagatcctagagggagaggctgacatggaacaggatgtctgaccaataaaacttcttccaatgaggattcacagacatagtcataccttccaggctaagtaaggctcaattccaggcagctgtctgtctcagctcctcatgcacatccgtcgcttctgtctacccagcatttgtttctcccttattcagttctcattgctgtgtaacaa

SEQ ID NO: 556482 - DNA, 614 bp, Homo sapiens
ttaactccattcttctcactccatttcttaatttcattcctttataaagcttctcttcttactatttcaagatggctgcccaattcatgtgcagaggaaagagaagttctttctctttactctgacagttgaataaaaaatccaaagcctggctctctttggtccatccctgaatcagtcattatggcctggggaatggagtacgctaattgacttaagggaatcagggcccagcactggagtgaaggtggggctaatgccacctaatccactggagagtaccaaaagtgtgcttccccaaaggaaattcacaatactgtgggaaaggatgaattgatgctgactcactataaatgacaaatgcaaaagataaacataccaggccccactccttgcaggaagcaaaagatcctagagggagaggctgacatggaacaggatgtctgaccaataaaacttcttccaatgaggattcacagacatagtcataccttccaggytaagtaaggctcaattccaggcagctgtctgtctcagctcctcatgcacatccgtcgcttctgtctacccagcatttgtttctcccttattcagttctcattgctgtgtaacaa

SEQ ID NO: 556483 - DNA, 484 bp, Homo sapiens
ctgttaattattttattgattttcagagtccattaatttatcgaattttctagtgataacaagtctctcggctatagaataaaaaataaaaacctacaacagaacagattccaagaactacttttcacattgcacatggccaaccaattagtmctgaagaagaacaggtccctccctcatttctcctgcaaaagccacccagcaatgaatacattttcaaaagtcgtctctgatctaccttggaatgagctcagagatctcccagagccagtgtaattagttgtatctcccctgcagggagacctgccattttaaattaacccactgcagcctgaacagacattgatgaaagagaaaacaggattcacaagcaagctcacagaaggaagcgcaaatccaaggaataagatacaatattttcatcccaaaaagtagcagacgtcccaaaaatacccagcaaaggaacagagcaggcattcttgct

SEQ ID NO: 556484 - DNA, 494 bp, Homo sapiens
cattttgacttctggccagtgagctgtgcagtgagaaaatgcaagtaggcagggaagcaaaggagcctcagtttccttctgtgtgaaatgggtgagaatgaaatacagcttgtctgttataaagctccagtgtttgtccctaattctgggtttagggacactcagaacagtgtgacttggacccagtcatgcagggcactcccaacttggagcacttgctgtgagatgtcagagcagatgraagcagttctactaaagactgctggggagtgcaggcagaagttttccctggaagaagagattagactggcaactagatggtttaacagagagaaatggaaggttgacttatgcctggatgttgagagtggggttcaaggaaagaaggttttaagagtcaaacaaaaggttttaagagtcaaacaaaacatggatgtgccttatggctttgcaccctactagcagtgtgtcctggagcaagttgcttcccacct

SEQ ID NO: 556485 - DNA, 426 bp, Homo sapiens
tcctcctcctcctcctcctcttccttctcctcctccttctcgtattcctcttcctcctcctcctcttcctcctcgtcttcctccttctcctcctcctcctccctactctctgacctgtgaactctagtactttgccctgagaactttagctgcttcgccctcccccgactcccaaccttatttcttcaacttagagagtccactgggctccgcccaggtttcccttctctgtgctgtggaccataaatgccctcccggcagtaacctctggcctcctgctcagccttgtgtgacccagtcagcccatttggcttcaagggatcctcytgtgtatgtgcgcaccctgagagtcttgggtttcatcctataaagactgtgccaggtctgccatcccaaggatacagcaagtaacatctccactacgtg

SEQ ID NO: 556486 - DNA, 426 bp, Homo sapiens
tcctcctcctcctcctcctcttccttctcctcctccttctcgtattcctcttcctcctcctcctcttcctcctcgtcttcctccttctcctcctcctcctccctactctctgacctgtgaactctagtactttgccctgagaactttagctgcttcgccctcccccgactcccaaccttatttcttcaacttagagagtccactgggctccgcccaggtttcccttctctgtgctgtggaccataaatgccctcccggcagtaacctctggcctcctgctcagccttgtgtgacccagtcagcccatttggcttcaagggatcctcctgtgtatgtgcgcaccctgagagtcttgggtttcatcctataaagactgtgccaggtctgccatcccaaggatacagsaagtaacatctccactacgtg

SEQ ID NO: 556487 - DNA, 482 bp, Homo sapiens
acaggatctctctgtattacttcttacaattgcatgtgatctacaattatctaaaaataaaaagtttaatttaaaatgtgttataaatcagttctttccatttgagkgctatttgccatccctttaaggattgtgtttttaacacaaatttagagaggttatttaaggccagtttctccctggcactttccagtaatttggctagctgttatttggtgggcgatatagttcctatggagtagccacctagattttcttcggttcaagagatgaaggagacataccttagaatatggttctgtcacttcaactgtcacgtcccagaagacttcttcaacaactgcataatttggatagctgtttaatttgagctgatctttaaaatgtgcccactatagcaccatttaaagaaaagtttactcatagaataggcatttataccatgcctaatatatgtcaagcactgtttaagaatggcgggt

SEQ ID NO: 556488 - DNA, 646 bp, Homo sapiens
aagtaaaggaataaaagaatggctacgacatcgagcagccccaagggctgctggttgcccatgtttatagttttttcttgatgatatgctaaacaaagggtgaattattcatgcctcccctttttagaccatatagggtaacttcctgatgttgccatggcatttgtaaactgtcatggtgctggttggagtgtagcaaygaggatgaccagaggtcactctcatcgccatcttggtcttggtgggttttagccatcttctttattgcaacctgttttatcagcaaggtctttataacctatatcttgtgctgacctcctatctcatcctgtgacttagaatgccttaaccgtctgggaatgcagcccagtaggtctcatcctcattttacccagctcctattcaagatggagttgctctggttcaaacaccttgaccacagggtcacagaacgagaagatgggagggaacctcaaagccatttccccaaggaagttgaggcttgggtttttgagggctttggagtgggcagaagtgtggagatcaagagtacagggtgaagtcataggaaggggagaggaagcagctgtgttctcatgctgatcctgttcccctgtgggagacttccaactggtggctggaattc

SEQ ID NO: 556489 - DNA, 422 bp, Homo sapiens
tatgctgcgtgaaaaaagcttgacataaaagagtatatgattctaacccagatatccatgaatgggcgaaaggataaagaaaatgtggtatatatcacttcttggccttttggctaagatcaagtgaagaaaatgtagtatatatacataatggaatattattcagtcataaaaaagaacgaaatcctgtcatttgcagcaacatggatggaactggaggttactatattaaatgaaataagccaagcacagaaakacatatatcacacgttctcactcatatgtgggcactaaaaaagcagatttcaagacagagagtagactgttggttaccaaaggccaagaaaggtaggaggaaggaagaggggttaattaatgggcacaaatatacagcttgatagaagaaataagacctagaattt

SEQ ID NO: 556490 - DNA, 430 bp, Homo sapiens
gtgtgtgtatacacatacatatatatatagagagagagagagagagagagtaaaagataacctgatgtttttctcccaaacttacttgactatacagactatatagtctcccaatctacacgttcttttttaattttcacatggacttttcaaaagtaaactaaaatattaaatttgatgaggtccagtatatcaactgtccattttatggatcatgcctttgatgtcaagtttaagaactctttgcttagattgaaaaaggttttctcctaacttatttctaaaatrtttataatttttcatttcagatttatgtgtgtgagttattttgagttgattttagcatagggtgtgaggttttggttgaggtttttttttgctcctggatattcaattgctccagccagcacccttggttgagagggctgtc

SEQ ID NO: 556491 - DNA, 430 bp, Homo sapiens
gtgtgtgtatacacatacatatatatatagagagagagagagagagagagtaaaagataacctgatgtttttctcccaaacttacttgactatacagactatatagtctcccaatctacacgttcttttttaattttcacatggacttttcaaaagtaaactaaaatattaaatttgatgaggtccagtatatcaactgtccattttatggatcatgcctttgatgtcaagtttaagaactctttgcttagattgaaaaaggttttctcctaacttatttctaaaatatttataatttttcrtttcagatttatgtgtgtgagttattttgagttgattttagcatagggtgtgaggttttggttgaggtttttttttgctcctggatattcaattgctccagccagcacccttggttgagagggctgtc

SEQ ID NO: 556492 - DNA, 597 bp, Homo sapiens
aatcacaactacagagtttctgattttgtaggtctggaatagggcctgataacttgcatttctaggaagatactaggtgatgatgatactgttggtgcagacactttgagaacgattgacttaaattagaaactcagtgaactctgtagtaaacataaattgatatggaagtgcttacacaccctgtacctgatgtcagatagatctgagatcaaatctttgatcttccaattatcaattctatatattaaaaaaaatagattcaggggtacatgtgcagatttgttacatggatatattgtgtgatgctgaggtttgggcttcagctgaacctgtcacctaatgaatgtagtgtcccataggtggtttttcaatgcttgcgcctctccctccaccttytggaattcctaatatctatttttccgtctttatgtccacttgtacaaaatgattagttccaactttaagtaaaaacgtgttatttggttttctgattctgtattaaatcactcagtgtaatgacctccatctgcatcgaggttgctgcaaaggacatgatttcatgcttttttatggctacatagtattccatggtat

SEQ ID NO: 556493 - DNA, 528 bp, Homo sapiens
tggccaacatggttaaaccccatctatactaaaaatacagaaaaaaaaaattctgtgtgttggcgggcacctgtaatcccagctactctggagactaaggcaggagaatcacctgaacccggaaggtggaggttgcagtgagccaagatcacgccagtgcactccagcctgagcaacaaaagcgaaacattgtctcacaaaataaataaacaatataataaagtaaaaactaagttttcttatgaggaaagatttggcttttaaaatgaaacagcaagawgtgcattgacatcatatatccttccagatctgtgtctcagcagaggcacacaaccactccctctggcaagttcctccctggttttgtgttaatttggtgcaatctctgatgtattctcccactacaaagtcatattgtagagatgaggattcaaataagaatagaaagtatccaattagatagcaggatattcattgatagcacccatttgagcaaacatgcgttttcaaatcacagatatcacaagt

SEQ ID NO: 556494 - DNA, 570 bp, Homo sapiens
gattcctgctcacagagaaaaggtcataggaggacacagtgagaaggcagctgtttgcaagccagggagagaggcctcaccagaaaccagccctgccggcacccagacyttagatttgcagcctctaaaactgtgagaaaataaattcctgttgtctaagctgcctggtctggggtattttgtcatggcagcctgagctaatactctggtttgtaaatctacgtcacccagacccctggaagagctactgtagctagagtccccacttcccctcttgtctctcctacagcccaatctctgcatagtagcaggagagaactttctaaaatataaatgagacctcggaactcccaattcagactcaatgaatgacccccttccacacaaaactccaaattaaacatggcggcccccctgtgtcacagatctttctcccctctggcacacatcagctatgcaggcctttcctgttatccagacaccgaactccagcttcagggcttttgcactcatttcccctctgcctgcggcacacttccccgaacacggttgcatggctgtcacctcctc

SEQ ID NO: 556495 - DNA, 570 bp, Homo sapiens
gattcctgctcacagagaaaaggtcataggaggacacagtgagaaggcagctgtttgcaagccagggagagaggcctcaccagaaaccagccctgccggcacccagaccttagatttgcagcctctaaaactgtgagaaaataaattcctgttgtctaagctgcctggtctggggtattttgtcatggcagcytgagctaatactctggtttgtaaatctacgtcacccagacccctggaagagctactgtagctagagtccccacttcccctcttgtctctcctacagcccaatctctgcatagtagcaggagagaactttctaaaatataaatgagacctcggaactcccaattcagactcaatgaatgacccccttccacacaaaactccaaattaaacatggcggcccccctgtgtcacagatctttctcccctctggcacacatcagctatgcaggcctttcctgttatccagacaccgaactccagcttcagggcttttgcactcatttcccctctgcctgcggcacacttccccgaacacggttgcatggctgtcacctcctc

SEQ ID NO: 556496 - DNA, 273 bp, Homo sapiens
tgccaggctggtctcaaactcctgacctcatgtgatctgcctgcctcagcctcccaaagtcccgggattacagtcatgagccaccacacctggccttaaattttttatagagatggtgtttcaataggttccccagactggtctccaactcctgasctcaagcaatccacccacctcagcctcccaaagtgctgggattacacgtgtgagccaccgcgcccggcttccaagacattttaatcaccccaaaaggaaacccgtattcatttagca

SEQ ID NO: 556497 - DNA, 487 bp, Homo sapiens
atgcaaaaatttccctacaaatactgtgttgcaggaccattataaaatatgtcaaggaaatatattttggggcaaaatattttgatttccttcaggctctgcctgttatgtgatgctatactagaatcatgttgggatttgatatgttattgccgcaaagaatatgttttgtctgtctcacgatctctattttaatgttaatgctggtcagttgtgcctaaactccaaaagggaggtgtgtaacaaagtgtatccaacctcccttcctgttagggcctggattccagttttttttttttttctttttttttttttgagacagagttttattctgtcccccaggctagagtgcagtggtgcgatctcagctcactgcaccctccarctggcaggttcaagcagttctcccgcgtcagcccccctgagcagctgggatgacaggtgtgcagcaccactgccagctaatttttgtattttttgtagagac

SEQ ID NO: 556498 - DNA, 487 bp, Homo sapiens
atgcaaaaatttccctacaaatactgtgttgcaggaccattataaaatatgtcaaggaaatatattttggggcaaaatattttgatttccttcaggctctgcctgttatgtgatgctatactagaatcatgttgggatttgatatgttattgccgcaaagaatatgttttgtctgtctcacgatctctattttaatgttaatgctggtcagttgtgcctaaactccaaaagggaggtgtgtaacaaagtgtatccaacctcccttcctgttagggcctggattccagttttttttttttttctttttttttttttgagacagagttttattctgtcccccaggctagagtgcagtggtgcgatctcagctcactgcaccctccagctggcaggttcaagcagttctcccgcgtcagcccccctgagcagctgggatgacaggtgtgcagcaccactsccagctaatttttgtattttttgtagagac

SEQ ID NO: 556499 - DNA, 393 bp, Homo sapiens
ctcactggcttctcatttgcattaaactgtgagcttctttagcgtggggacaggaccctgctcccattgcattctcagcaccacaccacacactccttgttggaggccactccagacagcatgtgctgaaggatgccctgtggtcagaaacaagttcattaactttccctttgaagtgttttcgyccctgtttcctagcgttctgggaattttacacatccttcctataaaaccaagtatcaggtgagatccttaggatcaggaccatgaatcaagtggtgtgagggcaacacagcaaacttaccctttttaggccatttcctttttctgccctcaaactctgtgaactgaaccttgttaaagtcagtcaacaccagggtggatggtttgccg

SEQ ID NO: 556500 - DNA, 393 bp, Homo sapiens
ctcactggcttctcatttgcattaaactgtgagcttctttagcgtggggacaggaccctgctcccattgcattctcagcaccacaccacacactccttgttggaggccactccagacagcatgtgctgaaggatgccctgtggtcagaaacaagttcattaactttccctttgaagtgttttcgcccctgtttcctagcgttctgggaattttacacatccttcctataaaaccaagtatcaggtgagatccttaggatcaggaccatgaatcaagtggtgtgagggcaacacagcaaacttaccctttttaggccatttcctttttctgccctcaawctctgtgaactgaaccttgttaaagtcagtcaacaccagggtggatggtttgccg

SEQ ID NO: 556501 - DNA, 428 bp, Homo sapiens
aggtagagaggacctccttcctgtaccagggtcccctctaccacactcatggccattgtaatcccaacactttggaaggccaaggtgggtggttcacctgaggtcaggagtttgagacyagcctgaccaacatggtgaaaccccatctctactaaaaatacaaaaattagccagacgtggttgtgtaatccagccaggattacacgcctgtaatcccagcaacttgggaggctgaggcaggaaaatcacttgaatccaagaggtggaggctgcagtgagccaaggttgcaccactgcactccagccagggcaacaaagtgagactccatctcaaaaaaaaaaaaaaattgtcagaggctctaaggaaggactttgatgtgctcaggctgttctaggagagtgtgggcagtcccccagggctcacctcc

SEQ ID NO: 556502 - DNA, 597 bp, Homo sapiens
ctgagccttcagtgaatcaaaatcattttgttggaagaaggtctagcttcagtgttgatggctgatgactgatcagggtagtggttgctgaaggctggggtaattgtggcaatttcttaaaataaaacaacagtgaagtctgtcacattgactcctctttcatgaaagatttctgtagcatgcaatgctgtttgatagcattttacccagagtaaaacttatttcaaaattgaagtcaatcctctcaaaccctgctattgctttatcaactaaatatatactattctaaatcctttgctgtcatttcaacaatgttgacagcatcttcaccaggagtagattccatcttaagaaaccactttctttgttcatccataagaagcaactcctcatctgtcaaagttttatcataaaattgaagcaattcagtcacatcttcaggctctgatatggtytgactctgtatccccatctaaatctcaccctgaattacaataatctccatgtgtcaaaggcaggataaggtggaggtaactgaatcatgggggcagttcccccatgctgttctcatgataatgagtgagtctcctgagatct

SEQ ID NO: 556503 - DNA, 489 bp, Homo sapiens
gtctaatgaaatcagtcaacrttagaagagctgtataacccagtaatcagcagttctgaaatgattaatgcatgctgttacatcactgttcacatttggcgtagtatcacaaaaggataaccaaaattatcaaaacagctagtaaaatactccttccttttccaactacatatttgagtgagactaaattttctttatataattcagccaaaacaactgattaaaatagactgaatggaaaagcagatctgacactccagctatcttcgattaagcgagatattaaagaaatttacaaaatcatgctattctaaattttaaaaatatactagtttattttaatttcttatactataaataacaacagttataacccagtcaataattttgaagagcgtaaagaggtcctgagaacaaaaagtttgagaactactgagtcagagtaacatgcacacgagcctcttttccaacaggaaaagaaagccagat

SEQ ID NO: 556504 - DNA, 593 bp, Homo sapiens
cagatcctgttcttgttatagcaacgctgtgaatgtctccattggggcaggccaggcccttggactggttttctctgctccacttctcagtgttgtttcagttggccggagggtgctctcatgacaggcagaagagggcggaaatgctactgatcgtcagcaaaccacctcctcccccagtaaggcttcatgaacagacattagcctgctttcagctgagctctaagagtggtgttttatttttcatgatcctagatgtggagaatgaattgacaggtagccaaccagagcaaactacaaagccttgagatataatgcctcgttacgggcttgtagagtcccacagacctgggttcatatcctgcctctgctatttcttagctctgtgtctttacaaattaatgacattctttggtccataatttccttatgtgtaaaatgaggactattaacacctgccttctcagcttagtttggagattcaaagaggcaagcacttaaagcaccctgggagctgtctggcacatggcaagcacayaatacatgttaataataatgataatgataatagtaatccaaaataaaatgtaatc

SEQ ID NO: 556505 - DNA, 579 bp, Homo sapiens
cttggcaacttaattacatttggaggccacttaataggactgattccctttatttagacagcctgaatcttcttagtcatgacttgagaatgtgatcatctacgcgttgctttatcttgaaaacttaccaaaccaccacagccatctctccaagcaaacaaaatgtcatgttgagacastacagtttggacatccccaaaaccccattcgagatttctcatctggcaaaattcactgttgcctgctgcagggtgggtggtaacacagtctaattgtggttcttcttttctatttctgcagcataaagtcattctgccgcaattgtttctcatcactgcaccctaggttttccacaaagaacctctgttttgatagaggcctatttttttttaaccctgccaagaagcagtctattgtgttggaaagagttcagctgaacttacaagcccaaatttaaggactgcatgtaccatttttaaaaatcagagacccagcatgggaaatctccaagagctatttctagtgtgtgactgcccaatattctaaactaagaacttgaggaagccattcccaatgatc

SEQ ID NO: 556506 - DNA, 619 bp, Homo sapiens
atgcttatacagtggagtatttcacagcaataaaaagatgagctattgataaacacaacaaaaacactatgttgagctaaagaagctggacactaaaaagtgtctattgcattattccactgtatgaagtcctagaacatgaggccataggctatggtcttagaagtcagaataatgacccatgggctggggacagtgttgagtaggaagyggcatggaaaactctttgatgagatggcaatgttctgtatctcgatcagggtggtggttacatgagtgtgcacatgtgaaaaaggtcagcaaagtatattctatgaaatggaaatggatacctcaatataaaagatggcatcaaaaacatcatgacgtctcatatgcaaaattgttacgaagatgaaatgaagatagttcatgggatgcagctgtcctggtggctaagatgagtggatagccaatgaatgatggctagcattattgtttatgttgtcctcatcatccctgtaatcatttcagtggagctacatctgacccagagattggggtctgaagttcaacacataaggcaaaaaaaaaaaaaaaaaaaaaactgttcaaattgcctcccgaggatcccttaaat

SEQ ID NO: 556507 - DNA, 605 bp, Homo sapiens
aactatacaattcccagtgttccaaagggaccatgtatcagtcagagttttccagagaaacagaaccaataccaygtacacacacagacacacatatacacacaaaatatataggaagatatttattataaggaattggctcgtgtgattatggaagcagagaagcctcaaatctgcagttggcaagctggagactcaggagagtcaatgggagagctccagtttgtgtttgagtccttagacagaagaaggctgatgtcccagcttgaataaagtcaggcagagagagcaaattcttctcccttactctgtctttttttttctctttgggccttcattgagttggatatgccccatccactttggggcaggcaatccaccttactcagtctactgattgaaatgtcaatatccagaaacaccctcatatatacacccagaataatgaaaaaaaaaaaatctgggtaccttgtaacacaatcatgtaaacatataaaattaactattacagaccggaattgtatttaggtccagatggtcctcaagcattaaattagctacacagagcttgcctgaaaactcacattgagtcaatgcaaagctga

SEQ ID NO: 556508 - DNA, 561 bp, Homo sapiens
ctccttgtaaaccattccagagcaaaggaaagagagggaaagagaggtcaggctgaagccaaggcctgcagcattaggggagaagcaaggaaaaattgctgtggagtctttcctaactagaaagctacactttgtcttacgcatgagggagaaagcatgtctgcacttagcaaggccattttccccaaagttgtcagtgatgtcactcatatcacctggtaaaagttttttcttctaacaataattgttattgtacccattatggaaaatttgataatacagatcaataaagaagaaattggattacctatatagtgacattcctgacatgaccacttatcagctgtcctaggcaaacactatgacatcagcaaacctcagggcttttttacttgtttgggtttttttgtttgtttgcatttctgagacagtgccttgccgtgatgcccaggctggagtgcaatggcatgatctcagctcactgcaacctctgcttccagggctggagccatcctcctacctcagccgccckagcacctggaactacaggtgtgcaccacc

SEQ ID NO: 556509 - DNA, 581 bp, Homo sapiens
ggaccatctggtggcaagaaaacaagctttgctctcccactgtttctacattatggtgagttgtataattaattcattatatattataatttaataataataaaatgcacaataatgtaatgtgtttgaatcatctggaaaacatccccaccccactcccagtccatggaaaaattgtcttttatgaaactagtccctggtgttagaaaggatggggagtgctgctctagagaacttaaagattcccagatttttagagagatgagatgcagaggatagagattatctcatcttaactccactgcctttcttttatttaatcctatgaagttaggaagacctggactttacccctttgaaccacctaggcaagggtatgcttatacaagctctagcaacagaattaaaatgtctcatgttagtccctgattttcatctagaaagttaagagtacatactttaacaccattgacctttcaaatagctgataaggccggatatttaggaaattagagcttggggaatggcgacattacccagaaasttactggcaggcaagtctagggcaagtctcctggttt

SEQ ID NO: 556510 - DNA, 333 bp, Homo sapiens
acttgaagaggacatctgccatttttgtctgtctagcatcaatcctaattcctgtaactacactctggtttttcccttggggagccaatctgctccctttctcatggaccttcgtttagaggggctgatctccctcccaagctttataatgaacatgtgacccaggattggctcagtaggttcatttttcctggccacgtggatggtttcaggcattacctgaccatgtaaatctaaggagaattcccctggactttgatgggagccrgtgaagaggaggatctctcttttttgatggttataaatatattataatgaaatgagatataattt

SEQ ID NO: 556511 - DNA, 545 bp, Homo sapiens
ctttactaaaaatacaaaaattagccgggcgtggtgacacacacctgtaatcccagctgcttgggaggctgaggcaggggaatcgcttgaacctgggagatggaggttgcaatgagctgagatcgtgccattgaactctagcctgggtgagtagagtgaaactctgtcttaaaaaaaagaaaagaaagargcagagatacagacagagacagaaaaatgagatagtctgacaaaaagagacagagacagagatatatataaagacagagagaaagacagagatagagagagagacacagaggaaggagagaaagagaaagacagagacagagaaaaagagagagacagaccaaaagagacagaggcagagacagagagctagaggaagagagagagagaggaaggaaagacagagacagagaaagagagacagacaaaaagagacagacagagacagagagagcatgagagcactttttggatccctcagcagcagagatctgactgacactcacttcccaggagcacggatgggagcgatcaca

SEQ ID NO: 556512 - DNA, 534 bp, Homo sapiens
gatggaggggtgggtagaactcaaatcctggggcttctctcttgctgtgttccacagagctatgtttccagatatgtcaccctcacagagcatgatgtgaatggcactcctggaggttctggatggaagtggagtccctgagcatagactacactactcttgagtctcttggctgagaagagaagggaggaggcagtagctagtggggagtatctagctctgaggggatggtggtggtgaagaggcatccattactattaaaaacaaagaggggccaggtgcggtggctcacacctgtaatcctagcactttgggaggccaaagtggacagatagcctgaggtcaggagttcaagaccagcctgaccaacatggtgaaaccccgtctytactaaaaatagagaaaattagcccggtgcagtggcacgcacctgtaatcccagctacttgggaggctgaggcaggagaatcgcttgaatccggaaggcagaggttgtgacgatgagctgagattgtgccactgcactccagcctg

SEQ ID NO: 556513 - DNA, 310 bp, Homo sapiens
gtttttaaaatttcttccatttccatttgacatactcattctcccaatactttaggctgagagtaaatggaatttattctaaaatttttaaaaaawatatatagacacttcttgcatctcagttaaggaaaggaagatatgttgcttacagccacatgctatctatgaatatatttacttggcttctctagttgtgatctcgcctcactgcaacctccaccatcagcgttcaagtgattctcctgcctcagccccctgagtagttgggattacaggcatgagccaccatgtccagctaattttttgtaat

SEQ ID NO: 556514 - DNA, 414 bp, Homo sapiens
tttctttttttttttttttggtcaaagattttacttagagttttaatttctctaacaattacaggacgtttgtatttcctttttgttcttgttttagctttataaattttatttttctaggaaaattttagaacattcacttcacttgaattctaaaatttgttgccaaaagttatttataatayccactaatgaagtcgaagatatttccatgattagtgatggatcaactatctcttaagaaactggccctttgaaggatgccaaggaaccaactctttcttatgatagtaaaaataaaaatcaagtttttctatataagacacatgtttgagcaaccaaatagttgacaagagcttttttacatatgtttgttggctgcataaatgtcttcttttgagaactgtctgttca

SEQ ID NO: 556515 - DNA, 621 bp, Homo sapiens
tcggcctcccaaagtgctaggattagaggagtgagccactgtgcccagctgtttgttagttttctgcctcaatgatctgtctaacactgtcagtggggtgttgaagtctcccactaatactgtgtggctaagtctctttgtaagtcacaaagaacttgttttatgaatctgggtgctccaatgctggatgtgtttatacttaggatagttcagccttcttgttgaattgaaccctttatcattacmtaatgacctccttttttccttcttagtttttaaaggtttaaagcccatttaattgacataagaatagtgactcttactctttttttttccatttgcatagtagatctttcttcaacctttattttgagcctgttggtgttgctacatgtgaaatggttctcttgaagacagtagatggcttggtcttgtctttttatgcaacttgtcactctgtgttttttaaatggggtgttcatttacattcagcactagtattgatatgtaagagtttgcctgtgtcatcatgttataagccattttgtagacttggttgtgtagttgctttatactacaggctttgcacttaattatttatagtagcaggtgccgttcttt

SEQ ID NO: 556516 - DNA, 577 bp, Homo sapiens
cttaatattgttaaaatgttcatactacctaaagcaatttacagattcaatgcaatccctatcaaaatatcaatggtgttttttacagaaatagaaaaaaaaattaaaatttatatggaaccacaaagaaccccaaatagccaaaagagtttccttatttcaaaacatattacaaatctacaacaatcaaaacagtatggcactggaataaagacagatatgaagaccaatgaaacagaataaagagcccaaaagtaaacccacatgtatatggttaaatgatgtttgacaaaggtgtcaagactatgcaatggggaaaggatattctcctcaacaaatggtgttaggaatactgcatattcacatgcaaaagaatgaattggacccttatcttataccatacacaaaatcaactgaaaatggattaaagatttaaacctgaaactaaaattgctagaagaaaacatagaggaaaagctttatagcattggtattgcaatgatttcttggctacaaccccaaatgcacaagtaataaaagcaaaaatagacaagygggactacatcaaactaaaaat

SEQ ID NO: 556517 - DNA, 564 bp, Homo sapiens
tatagcataaatataacttttatatgcactgggaaacaaaaaaaattgtgtgtgactgactttcttgtgatatttgctttattgtggttgtctaaaaccaaaaccacagtatctctgaggtatacctctattaacatttgtgatagcagaacctgctgaaagttgtctgagaaataaatgawaacatctctattgataaaaacaacttacatagaaaattagccattaaacaaagacatttatttttatcaatgatttgtattcaccttaaaatactccaaataaaaaatgtgaagaattgattttgacaaaatgaaaatcactcatttattttttatgatcatattttaaaaataaattactatcatatataaaatggtaccaaataaaattatcatgccatatggacaatattagttacagacagtccctgacttacgatggttcaacttactatgtttcaattttattatggtgcgaaagcaatgaacattcactacacgtctcaacttataatgctgttacatctgaataaactcatcataagttaaaaattaaaaacac

SEQ ID NO: 556518 - DNA, 564 bp, Homo sapiens
tatagcataaatataacttttatatgcactgggaaacaaaaaaaattgtgtgtgactgactttcttgtgatatttgctttattgtggttgtctaaaaccaaaaccacagtatctctgaggtatacctctattaacatttgtgatagcagaacctgctgaaagttgtctgagaaataaatgaaaacatctctattgataaaaacaacttacatagaaaattagccattaaacaaagacatttatttttatcaatgatttgtattcaccttaaaatactccaaataaaaaatgtgaagaattgattttgacaaaatgaaaatcactcatttattttttatgatcatattttaaaaataaattactatcatatataaaatggtaccaaataaaattatcatgccatatggacaatattagttacagacagtccctgacttaygatggttcaacttactatgtttcaattttattatggtgcgaaagcaatgaacattcactacacgtctcaacttataatgctgttacatctgaataaactcatcataagttaaaaattaaaaacac

SEQ ID NO: 556519 - DNA, 572 bp, Homo sapiens
tgtttcaattttattatggtgcgaaagcaatgaacattcactacamgtctcaacttataatgctgttacatctgaataaactcatcataagttaaaaattaaaaacacaacttcaacttatgatactttcaacaggatgggtttatcacagtgtaactccattgtaaatcgaggagcatctgtatatactatgaagcattttggaggcaggggcatgagaacataaaccacacctttggcaaaatgatgaacaatggggagctgtggcgcttcctgcaacttaccagggactatgtagtagcttgaaatggtcactaattaaatggtttcataaaaccaaccacagcctggaggcttctgcttataaattattttttgtttgtaaaaatgtattacatcattcattgaaaaaaatccccaaatattttattttctaaatttaaaatagaaagtttttatttgatccagcaatctgattactgagcatatatctgtaagaaaataaattttctgcccaaaagacatcggcactcgcatgctcatcactgcgctattgacaatagcaaagacat

SEQ ID NO: 556520 - DNA, 617 bp, Homo sapiens
cttgaaccccggaggcggaggttgcaaygagccaagattgtgccattgcactccagcctgggcaacacaaagagcaaaactctgtctcaaaaataaacaaacaacaaaaaaagtggcttatgtatataaatataaataggttgctgttattttcttctgaagtttaagttgtccagcttcagttcacagggctttatgaaaacacagcttagttttcagtgactccagattaggcaaaatggggaaaaaaagaaggaaaaatttgaaaacattattttgaagacacgttgccaagaaaaattagaatttggttcaaactgtagataataataagaattgaaaaatattagacaagactagaatctaacaatgagtgttactatagttttggaaacataattttcctctctctagtttcctatttttactaaagacaaatcatggtaggactggtttgctttattgtacttggcctaattatttgtatacactacagcaaaaataattaatgtttacacaggcttttaaactggttttgatggaacgttgtcccagagaaggaatctcagataagactttttttaaagccgagcccagccatgaatttgtaccatcaa

SEQ ID NO: 556521 - DNA, 617 bp, Homo sapiens
cttgaaccccggaggcggaggttgcaatgagccaagattgtgccattgcactccagcctgggcaacacaaagagcaaaactcygtctcaaaaataaacaaacaacaaaaaaagtggcttatgtatataaatataaataggttgctgttattttcttctgaagtttaagttgtccagcttcagttcacagggctttatgaaaacacagcttagttttcagtgactccagattaggcaaaatggggaaaaaaagaaggaaaaatttgaaaacattattttgaagacacgttgccaagaaaaattagaatttggttcaaactgtagataataataagaattgaaaaatattagacaagactagaatctaacaatgagtgttactatagttttggaaacataattttcctctctctagtttcctatttttactaaagacaaatcatggtaggactggtttgctttattgtacttggcctaattatttgtatacactacagcaaaaataattaatgtttacacaggcttttaaactggttttgatggaacgttgtcccagagaaggaatctcagataagactttttttaaagccgagcccagccatgaatttgtaccatcaa

SEQ ID NO: 556522 - DNA, 617 bp, Homo sapiens
cttgaaccccggaggcggaggttgcaatgagccaagattgtgccattgcactccagcctgggcaacacaaagagcaaaactctgtctcaaaaataaacaaacaacaaaaaaagtggcttatgtatataaatataaataggttgctgttattttcttctgaagtttaagttgtccagcttcagttcacagggctttatgaaaacacagcttagttttcagtgactccagattaggcaaaatggggaaaaaaagaaggaaaaatttgaaaacattattttgaagacacgttgccaagaaaaattagaatttggttcaaactgtagataataataagaattgaaaaatattagacaagactagaatctaacaatgagtgttactatagttttggaaacataattttcctctctcyagtttcctatttttactaaagacaaatcatggtaggactggtttgctttattgtacttggcctaattatttgtatacactacagcaaaaataattaatgtttacacaggcttttaaactggttttgatggaacgttgtcccagagaaggaatctcagataagactttttttaaagccgagcccagccatgaatttgtaccatcaa

SEQ ID NO: 556523 - DNA, 617 bp, Homo sapiens
cttgaaccccggaggcggaggttgcaatgagccaagattgtgccattgcactccagcctgggcaacacaaagagcaaaactctgtctcaaaaataaacaaacaacaaaaaaagtggcttatgtatataaatataaataggttgctgttattttcttctgaagtttaagttgtccagcttcagttcacagggctttatgaaaacacagcttagttttcagtgactccagattaggcaaaatggggaaaaaaagaaggaaaaatttgaaaacattattttgaagacacgttgccaagaaaaattagaatttggttcaaactgtagataataataagaattgaaaaatattagacaagactagaatctaacaatgagtgttactatagttttggaaacataattttcctctctctagtttcctatttttactaaagacaaatcatggtaggactggtttgctttattgtacttggcctaattatttgtatacactrcagcaaaaataattaatgtttacacaggcttttaaactggttttgatggaacgttgtcccagagaaggaatctcagataagactttttttaaagccgagcccagccatgaatttgtaccatcaa

SEQ ID NO: 556524 - DNA, 581 bp, Homo sapiens
cacacaccgcggcctgttgtggggtkgggggaggggggagggatagcattaggagacatacctaatgtaaatgatgagttaatgggtgcagcacaccaacacggcacatgtatacatatgtaacctgcacgttgtgcacatgtaccctagaacttaaagtataataaaaataaatattaaaaaaagaagcatcatctttattaaaacatttaatggtcctactattccttatgctataaatttcttataatttaataaatatttttccataattgtgactctcttctatagctcttgttactcccgatattcttctaattatcaggcagtagcacaaagctgcttacacctctttacacatctctttattttaggcctccttgcatttgctcatgctgttcctttttgtttgaaaaacttacacatttcttcatttggttaatccttgcacactttcaagattcatttgaggcctcattgactttggaaaccttccctgtaatcttgtattattaatttatcttagttttcacttattagctcttattagattactgtccttacgtgtgtaactctcccac

SEQ ID NO: 556525 - DNA, 628 bp, Homo sapiens
tgatcctctgtatttctgtggtattagttgcaatatttcctctttcatttctgattttattgctttgagtattctctcatttttctagtctagctaatggtttgtcagttttatcttttcaaagaacaaattcttagtctcattgatctgttctattttctttcacagtcttttttgtatttgaaggacttgtatttgttaactggctcaagcctggacatttgttgaggtgctatgagtctctattgctctcatttctcttcactagacatagaaattttctgattacacgaatcaaataagactaataagcttcccagggatgaatcccacttaagctggtgaatttttttgctgtktttttttaaaaataatatttgctaatatttggctgaaggtttttccatccaagttcatcaggagtattggtctgcaatttatttttattatagtgtccttctctggttttggtatcagggtaatgctggttttgaaaaatgaatttgaaagtattcctcttcttcattttttttggaagagtttgggaaggattggtgttagtcatctaagtgtttgttggaattcagccaccaagccattcaatccttggtctttcttttatgagaga

SEQ ID NO: 556526 - DNA, 628 bp, Homo sapiens
tgatcctctgtatttctgtggtattagttgcaatatttcctctttcatttctgattttattgctttgagtattctctcatttttctagtctagctaatggtttgtcagttttatcttttcaaagaacaaattcttagtctcattgatctgttctattttctttcacagtcttttttgtatttgaaggacttgtatttgttaactggctcaagcctggacatttgttgaggtgctatgagtctctattgctctcatttctcttcactagacatagaaattttctgattacacgaatcaaataagactaataagcttcccagggatgaatcccacttaagctggtgaatttttttgctgtttttttttaaaaataatatttgctaatatttggctgaaggtttttccatccaagttcatcaggagtattggtctgcmatttatttttattatagtgtccttctctggttttggtatcagggtaatgctggttttgaaaaatgaatttgaaagtattcctcttcttcattttttttggaagagtttgggaaggattggtgttagtcatctaagtgtttgttggaattcagccaccaagccattcaatccttggtctttcttttatgagaga

SEQ ID NO: 556527 - DNA, 628 bp, Homo sapiens
tgatcctctgtatttctgtggtattagttgcaatatttcctctttcatttctgattttattgctttgagtattctctcatttttctagtctagctaatggtttgtcagttttatcttttcaaagaacaaattcttagtctcattgatctgttctattttctttcacagtcttttttgtatttgaaggacttgtatttgttaactggctcaagcctggacatttgttgaggtgctatgagtctctattgctctcatttctcttcactagacatagaaattttctgattacacgaatcaaataagactaataagcttcccagggatgaatcccacttaagctggtgaatttttttgctgtttttttttaaaaataatatttgctaatatttggctgaaggtttttccatccaagttcatcaggagtattggtctgcaatttatttttattatagtgtccttctctggttttggtatcagggtaatgctggttttgaaaaatgaatttgraagtattcctcttcttcattttttttggaagagtttgggaaggattggtgttagtcatctaagtgtttgttggaattcagccaccaagccattcaatccttggtctttcttttatgagaga

SEQ ID NO: 556528 - DNA, 573 bp, Homo sapiens
ccaagttcatcaggagtattggtctgcaatttatttttattatagtgtccttctctggttttggtatcagggtaatgctggttttgaaaaatgaatttgaaagtattcctcttcttcattttttttggaagagtttgggaaggattggtgttagtcatctaagtgtttgttggaattcagccaccaagccattcaatcctkggtctttcttttatgagagacctttcattggtgatttaatttccttattcatgatttcttctaaattttgaattcttcatgattcagttttggtacgagtttatcaatttcttctaggttatctaatttgctggtgaataattgtttatagtagtatgttatgattttttaacttctgtggtatcagttgtaatgtctcttctttcacttctgagtttgttttcttttttcttagtctatgtaagaatttgttaattttgtttatcttttcaaaaaacattcttatttttattgaaattttcagtttctattatattatttctgctctgatctgtgttattgtttccttctgctaaattggcggttggaccc

SEQ ID NO: 556529 - DNA, 596 bp, Homo sapiens
gtagccaataaccttattttycaatcaaggaaactaaggtcagaagattgaaaataaatgaatataaaagccccttatggaaacagaacatggaggagtggagctggagagagaaatacattccatttatttacgttctaactgggaaaatattgttgttaatagtttatgttatattcatagctcaaattcatttcaagacagaatatttttcttaacaacaaacagaaaaaaatggaatttttaggtgtatttttttattgagttacttcaatttcccccaagaagcacatttcaaatttttaagaacaataaggtaagaaaaccataatttttaacatagagaaatgcattttatataggacttgccaagcacatatgaaaatcaaaacagttattatgagaatgcttacagtaaaatgggcagtcttaccctgacagtaaaacaaaaattggggtaactttatcagaaaataatgtcacaaaataattgaaactcttaaatgtctttataatccttaactactactcttacttctggatatacatcctgaaaagtaaataaacaagaaaatttaaaaaacccaaaaagttaa

SEQ ID NO: 556530 - DNA, 448 bp, Homo sapiens
tattaatgataaaaatgatttaataatgattcaaaatatgtatctaattattaatatgtctcccataatgttctaggtgctaggaatttgctgtgaaccaggaagaccaggttccagtctgtatgggtttcatgctgtcrtgggacagagagaaaaatacagaaaaaaaattcaagtagttgtagcatgttatggataaacactaatcagtgtactggaagggaaagagaaggaggatggggtgggtattttgacagaactgacttaaaagatgatatttaggaatctgagcaaagatgtatttcaggaaaaggaaaaagcaagtgaaaacttttgcagtagaagcagataggtcatttaaaaatgaaggggggcctagtgctgtggctcacgcctctaatctcagcactttgggaggccgagacaggtggatcacttgaggccagaa

SEQ ID NO: 556531 - DNA, 540 bp, Homo sapiens
cttctcagcgtcgcaatggagtcacggccaggctgcccacaccagccgtccggacctgcaccagtgccacggggtctgccccatcttctcttccctctccttcccctctccctctctctcctgtctctttctcctctctccatgctattgactgaatgtttgaattccctgcaaatgcattcctaacccccaatgtgactgtgtttggagacaggttctttaggaggtaactgaggttaaatgagttgtaaagatggggccctgaaccgatgggactggggtccttatgagaagaggaaaaggggtccctccccatggagggacgaccacagcgaggcagcagccgcccacacgccagagaaggggactcagasggaagccttgcttcaccggcaccttgatctttgagtctagcctccagaatttgtgataaataaatttctgttgcttaagcccccaagtttatggtattttgtcacggcagctccaacagattcagatgctctccctcctccctctcattccttccctcctccgact

SEQ ID NO: 556532 - DNA, 621 bp, Homo sapiens
agattaggaggtattattccattcctgaaatcagaaaaatgatttgcccaaaattatgtacacaatattgcccttactcccaggcaagaccaagatggtaccctgctccaggttctacacttggagagaatgtgtatcacaaacatacccaaaataacactcagatctgatacagtgtgaccccaaatcctaaatatctactctcctaactaatactattcaggctaaagaaacatttctccacctctgtgccctgaatcctctaaaaagacatttatgttcaaaaactgggaacgtttgtggttgtctgtgctggtattagagacagactgcttcagagcaagggtaggatttgaacagcagaagttcttccataaaagaaaagacagtacataggcatgggcaaggacttcatgtctaaaacaccaaaagcaatggcaacaaaagacaaaattgacaaatgggatckaattaaactaaggagcttctgcacagcaaaagaaaccaccatcagagtgaacaggcaacctacagaatgggagaaaatttcgcaacctactcatctgacaaagggctaatatccagaatctacaatgaactcaaacacatttacaagaaaaa

SEQ ID NO: 556533 - DNA, 621 bp, Homo sapiens
agattaggaggtattattccattcctgaaatcagaaaaatgatttgcccaaaattatgtacacaatattgcccttactcccaggcaagaccaagatggtaccctgctccaggttctacacttggagagaatgtgtatcacaaacatacccaaaataacactcagatctgatacagtgtgaccccaaatcctaaatatctactctcctaactaatactattcaggctaaagaaacatttctccacctctgtgccctgaatcctctaaaaagacatttatgttcaaaaactgggaacgtttgtggttgtctgtgctggtattagagacagactgcttcagagcaagggtaggatttgaacagcagaagttcttccataaaagaaaagacagtacataggcatgggcaaggacttcatgtctaaaacaccaaaagcaatggcaacaaaagacaaaattgacaaatgggatcgaattaaactaargagcttctgcacagcaaaagaaaccaccatcagagtgaacaggcaacctacagaatgggagaaaatttcgcaacctactcatctgacaaagggctaatatccagaatctacaatgaactcaaacacatttacaagaaaaa

SEQ ID NO: 556534 - DNA, 621 bp, Homo sapiens
agattaggaggtattattccattcctgaaatcagaaaaatgatttgcccaaaattatgtacacaatattgcccttactcccaggcaagaccaagatggtaccctgctccaggttctacacttggagagaatgtgtatcacaaacatacccaaaataacactcagatctgatacagtgtgaccccaaatcctaaatatctactctcctaactaatactattcaggctaaagaaacatttctccacctctgtgccctgaatcctctaaaaagacatttatgttcaaaaactgggaacgtttgtggttgtctgtgctggtattagagacagactgcttcagagcaagggtaggatttgaacagcagaagttcttccataaaagaaaagacagtacataggcatgggcaaggacttcatgtctaaaacaccaaaagcaatggcaacaaaagacaaaattgacaaatgggatcgaattaaactaaggagcttctgcacagcaaaagaaacyaccatcagagtgaacaggcaacctacagaatgggagaaaatttcgcaacctactcatctgacaaagggctaatatccagaatctacaatgaactcaaacacatttacaagaaaaa

SEQ ID NO: 556535 - DNA, 621 bp, Homo sapiens
agattaggaggtattattccattcctgaaatcagaaaaatgatttgcccaaaattatgtacacaatattgcccttactcccaggcaagaccaagatggtaccctgctccaggttctacacttggagagaatgtgtatcacaaacatacccaaaataacactcagatctgatacagtgtgaccccaaatcctaaatatctactctcctaactaatactattcaggctaaagaaacatttctccacctctgtgccctgaatcctctaaaaagacatttatgttcaaaaactgggaacgtttgtggttgtctgtgctggtattagagacagactgcttcagagcaagggtaggatttgaacagcagaagttcttccataaaagaaaagacagtacataggcatgggcaaggacttcatgtctaaaacaccaaaagcaatggcaacaaaagacaaaattgacaaatgggatcgaattaaactaaggagcttctgcacagcaaaagaaaccaccatcagagtgaacaggcaacctacaraatgggagaaaatttcgcaacctactcatctgacaaagggctaatatccagaatctacaatgaactcaaacacatttacaagaaaaa

SEQ ID NO: 556536 - DNA, 396 bp, Homo sapiens
tcctaactatgcaactagaatgttaatgtatgcataatacaccctcttcaatggtgacacccagagatatcggtaaaagccaaattctaacatcatctttcaattcatctgctcagctgaatagcattcagagctaattcttgactctgaattaatttcttttaatatccctttccctggtttcatttmacttggaccacttccaccattttgacctggtccttctccttgactatgattcgaatcctactcccaagcaagtgacgttctagttaaaaaaatacattttagaggagcccttcataggaaactcacacattggcctaactacaagactaggaagatcataaaatatgatctcctcatggttggggatgtatctccctatactccttt

SEQ ID NO: 556537 - DNA, 377 bp, Homo sapiens
ccaatgtcttgcacaattccaggaacagaataaatgaacagctgtttgtgaatccccactaaatcactgagatgatactgggtgtcttgagatcaagttcaaatcatacgacttcttcaagatttaggcaatagctacttccttaagagattctttttctamaactctatatgcctcattcctgggacttagtctctttcttttaatgattcatattactttcaattgttgtgtggttgcattattatcatgactgtaaatcagttatcatgtgcctaattttctcccctcagaatattccactcttgagagaaggagtcatatcttaatctttacattgtttaaaatgccaaaattgaaaagtgaatgcaaaggac

SEQ ID NO: 556538 - DNA, 497 bp, Homo sapiens
tggagatgaaagtttaggaaagctcactacctcactctgtgcaacatatatgaaaagatttacatttgaagcaagatgtaaagaaatatatatttcttttatgtacctagagcagttattatttcaattatttcagcttgaacttccctgctatttttttctccttatcttttaaaatattttaacttttgaagactctgggtccttgacaatttgttggatgagatcatcactgatggtagtagaatttaagaacatttgctcacattataaatttcaaactaggcttgtttgattaattttattaaggaakttctaccacaattaaacgccaagtatctggcatgtaacatattcaggtagacacttaaattttatggagacaaaaatatgtacataggcttctcctgtcaatttctaatattctgcattttaaaaatttcttttactatgaaatttggaaaccctcccttattcttttgtgtgtttaagcaaaa

SEQ ID NO: 556539 - DNA, 589 bp, Homo sapiens
ctgaggcttctcaggcttttcaaccaaatgcaaacattaaatgaaggttttcctgcaatttcaaagcaaagaaattaccctaaagggagagaaggtaattgttgattgtccacaaacatagtgaggctcagcatgcatatttggaaggagaaagggaggtctgagctaagaataagagtgcaggacagtggtgctgcctgatacaagttgttaggacagggtagggagaaaatcaaagaataaagatgatattcttaatatgtatgtagatagctcygtcatgagaaccttgtctccttcacaagacagagcacaaaactgcctatgtttggggatttcaaggttataagaagggccagtgtcacacttcatttacccctgcctcagataatcttgtgttctgtctgactgttgatccttgatcccttccccatcatgacacagcctatgttttagccaccaaactaaaaattatatgcataattttacagaatgcgcatttttagaaaatgcatatagcataaatataattttccctttggcccagaaattctacatccctaaatataaatatataataatgctgtaa

SEQ ID NO: 556540 - DNA, 522 bp, Homo sapiens
gaaaatacaaaaattgggccaggcacggcggctcacacccgtaatccccatactttgagaggctgaggcaggtggatcacttgaggtcaggagttcaagaccagcctggccaacatggtgaaatcccgtctctactaaaaaaaaaaaaaattacaataattagtcaggcgtggtggccagcacctataatcccagctacttgggaggttgaggcacaagaatkgcttgaacccgagagggggaggttgcagtgagctgagattgcaccaccgtactccagcctggatgacagagcaagactctgtctcaaaataaaaattaagataaataataaaaaataaataaaaatcagcaaattaggccaggtgtggtggtggctcatgcctgtactcccagcactttgaggtgggaaggttgcttgaaaccagaagtttagaccagcctgggaaacaaagtgagaccccatctctacaaaaataaaaataaattagccaggtgtggtgggacgtacttgtactccta

SEQ ID NO: 556541 - DNA, 563 bp, Homo sapiens
caagctgggttgggttacctcctcggctccccacaggcctacggtgcccccacctcagcaccgatgacactacctgtctttagtgttgccatatagaatacaggatgcccactatgactcagaaacagaaaacaaaaaactgcatgttctcccttataagacggagctaaacaatgggtgcacacagaacagacacacagaggggaataacagacactgaggactccacacagcgagaggatggaggggtgayggatgaaatgccacctactgggtacaatgtacattatttaggtgatgaatacactaaaagtccatatttcacacaatacgtcctcgtaatacaactatacttgtacccctagatccatacaaaaccttgaatttcagataaacaatggatgatttaagtataagtatgtcccatgaaatattcaggacatacttatactttaaaaattgtttatctgcactggtcacagtggctcaggcctgtaatcctagcacttcgggaggctgaggccggtggatcacctgaggtcaggagtttgagaccagcctgg

SEQ ID NO: 556542 - DNA, 563 bp, Homo sapiens
caagctgggttgggttacctcctcggctccccacaggcctacggtgcccccacctcagcaccgatgacactacctgtctttagtgttgccatatagaatacaggatgcccactatgactcagaaacagaaaacaaaaaactgcatgttctcccttataagacggagctaaacaatgggtgcacacagaacagacacacagaggggaataacagacactgaggactccacacagcgagaggatggaggggtgacggatgaaatgccacctactgggtacaatgtacattatttaggtgatgaatacactaaaagtccatatttcacacaatacgtcctcgtaatacaactatacttgtacccctagatccatacaaaaccttgaatttcagataaacaatggatgatttaagtataagtatgtcccatgaaatattcaggacatacttatactttaaaaattgtttatctgcactggkcacagtggctcaggcctgtaatcctagcacttcgggaggctgaggccggtggatcacctgaggtcaggagtttgagaccagcctgg

SEQ ID NO: 556543 - DNA, 528 bp, Homo sapiens
taaaaacacaaaatagtactgtatgggattatgaatataaacttaggttgtaaaacaaaaaaacaggaacaagaaacatacatactaacttctcagttaatagggtatctaagaaaaaattttttaaaaaaagaaaacaaagataaatgctaactttagaacttggttagctctggggaggacattagcaaaacaaaacaaaacaaaacaaacaaaaacaaaaaaaccaaaaagcaaatattatggcaaaatgttaacacttgttaagtctaagatgtctgagttaaattatgggggtgtattgtatattgttttctgtaattttgcttgaagtatttcatatcttaaaaacaggccaaaatgaacyttaagaacactatgccaagtgtgtaatcccagctacttgggaggctgaggcaggagaattgattgaacctgggaggcggaggttgcagtgagccaagatcatgccattgcactccagcctgggcagcaagagtgaaactctgtctcaaaaaacaaagcaaa

SEQ ID NO: 556544 - DNA, 512 bp, Homo sapiens
gttctattgtacttctgtgctaacgtgcacaaacaagtaaccagcttctttttttttttcttgttcttatttttttaacagccatgtaactgacattctgaaaaataacaagtactagaaattctaaatggtcagagagacaaggaaaaatgaagagatctttcacaccttatcaagtattagctactactgcctatacttttttttcackaatcatagatgtgtgatgtactattctgttttatttatatcattgcactccccggagtaacacacatgtggtatatattattctccagtgtttctggtaattaaactttctcagatactagaatgtggaagacctgaaaccagagctggtcttccaatccctgcatcccatgtgtttgaagtgtttgaaaaaccctaaattgttctatatatctgatcacaccagctgtgcatggagatatctgaggcaagaatgacagacagcagctggcatcaggagccttatcatgtcataatgtgag

SEQ ID NO: 556545 - DNA, 618 bp, Homo sapiens
aagcttgtggaacggacgtgaaatcttgtgaaggtgccctcttcctctccacgtttccttcctgcttctgaaggctccttccgtgcaggggcgcccccacccctttactcactcagctctggagaggagtgggtgggagggctgatctgattcataaacaacagtagaattaatgggatattgcgacccagcctggctcttcttccccctggcagtggtgaaattttatgttgttcctttgtgcactggctttcagaaggggctgcccacatccaccctaatgaagtgtgggggcttcagtggccccaggctgctgtagctgcacgggtgagtctgttgctcactgtcaatctaagccaccggctcccagctgagctttcatagcaaaagttttggcttctctttgcccaagtctgtcattcctcaagcggtttagaattcaggcaacctcctggttttactggagagaacctcactgaagggcagcggggggaaatgaacttccccaagatacaaaatcttacagtcagggccgacggggggttcccagtgcccagtctggggtgcagcgggtttcagcttacctcatatgaaaatrctaattggatgggaattctc

SEQ ID NO: 556546 - DNA, 497 bp, Homo sapiens
tggtgggatgccactctgctccctggcactgccacgtcagaagccttggcaggtagcaggcacatggcctcattttggtcttgaatggcaaacagactcttggctgtcatagaaagactctgcaaagaaagacttgcgccaacatttcccattgttcagatacaaaggaaaacaactcatgtctatgccatgaacatatccacgatgcgctcttttctaatcacaaggcatttctcttccactgggccctcggccatccttctcaactgattcactgtgaggagactaaactcacagagcagtatcataccagctctgaggcccaaggaatcttcagccgattgtatatttrctggctcagaataaaggagctccctgtgatgtgcacggaaggatatatttgtctttcccacggcatgtttcaaaacagatttctgccgcaaaaccccaagtgtgaagcctcgcctgagaatgcttgcttctgccatagggaagct

SEQ ID NO: 556547 - DNA, 430 bp, Homo sapiens
ttctcaaagtgagggccctgggccagygcatcagcgctcctggcacctgttagaaatgaatcagcccctctgggggtggggagcttcgatgagccttccagtgactctgatgcacacgaaagtttgaaaaccactggctgagatgtctctgtagattatgcaagggtaagccacaaggcaatcataagatctgtgaaatctttcatgtaaataatagtatattttagtttttgagcaggagatgacaacccaagaccaataaaagacccatgacatctgtttggcctatttcaacaaaggcttgtcaaccacaagagtgaagtacttcaacacaggcagctgtgactgcggcctgctgcttttctgggagtggtggagtgtggctccctcatgggcagtgttggagtcctgtgccccacatatggggatc

SEQ ID NO: 556548 - DNA, 467 bp, Homo sapiens
cccagctactcgggaggctgaggtgggaggatcrcttaagccagggaggtcgagactgtagtgagctctgatcataccattgcactccagcctgggggacagagagcaactctgtctcaaaaaaaaataaaaataaaaattgatatggtttagctgtgtccccacccaaatcccatcttgaatcatagctcgcataattctcacacgttgtgggagggacctggtgggagataattgaatcatgggggcagtttcccccatactgttctcatggtagtgaataaatctcacaagatctgatggtttttataaggggaaacccctttcgcttgactctcattctctctttacctgccaccatgtaagatgtgcctttgctcctccttgccttccactgtgatcgtgaggcctccccagccacagggaagtgtgagtctattaaacctcattttctttattaattaccc

SEQ ID NO: 556549 - DNA, 582 bp, Homo sapiens
  misc_feature 579, 580, 581, 582: n = A,T,C or G
tgacatgtcccaccccttcgctgctctatcctcttctcctcccatcctcccccctccactcaggcaagttcctgcctcaggacctttgcacatgctattccctctgcctggaacactctcccctcaggcgtctgcatgtttccctccctccttcaagtctttgtgctccaatgtcaccttctcagggaagccccccgaccaccctctgtagaactgcagcccccaccctgtctcagccctcctaagcccagccctgctttattttcctccatagcacttgtcacctcccaatagatcacattttcagtttgactgtctactccctttctaatggaaactccaggagggcaaggatttttgtgcattttctttaccaytgttaaccagtcctagaaccatcattgaatctgaggctttagagaagagttttgcatcatgtatccaaaatcttataaacatggccaggctcagtggctcacgtctataatcccagaactttgggaggccgaggcgggtggatcatttgaggtcagggattcgagacgagcgtggccgagatggtgaaagcccgtatctacnnnn

SEQ ID NO: 556550 - DNA, 399 bp, Homo sapiens
acagaattcattatccaaatgggacactgaacataataccctctcacacacacacatcctcacagtccacgggatttggttttgcctaagcctggccttattcttaaataccaaagtgcatcaatgatctaactcctacaaagctgggagggttttccattcacaatagaccttataaaaatcatgcatttttcagtaaatcagagatctgcttcttctctcctgtttttttgtttttttttgagacaaggtctcactctattgcccaggctggagtgcagtggcrtgatcacagctcactgcagcctcaacttcccaggctcaagcaatccttccatcttagcctcccgagttttttgtactacaggtttgcaccacacacccagctcattttttttt

SEQ ID NO: 556551 - DNA, 584 bp, Homo sapiens
cttcccaggggtatctgggcaatccccaacagagcacttggtctctaatttctcagagtggccacctgctttggactcactcaggaaacttattaaggatacagatgctttggtgcccttgtccccaaccaaccagggtcccagggtcaggactcaggggttttgtgagtcacaaggtctccagatgattctgagactttcaaccagagactttaaagtagggaggagaaaccaagatgcctgtccttcggctttatgtgctaacacttgccaaatgccttcaaatctgaggaaatgggacgggaagagttcagttcaagaagggaaaacttcggcgatgacctggggttttcacttttattttctagaattccatmattttagccatggctttaagcaactgctcaattcagctattgcccattttatagacatggaaactgaggtgaagatgaccaaactcctgcctaaagcccaacgaattctgcctgtggaaccctgggcttctcctctcctcctggtgttctttcttccacaagtttgtgatccaaacgcatgcatcgtcaaaagctcattttcagtgt

SEQ ID NO: 556552 - DNA, 599 bp, Homo sapiens
gagaccccatctctacaaaaacataataataatgagaactgtgattattataaagaggaagagggattcagtctatggcctcaaaaataaaaagaatagatgagtggaagacctcaaggatgcagattccagttggatgggaggaaaaacaatattcgaatagagctttctaaaaattaaatgggctgtcccaggagaggactttccaatctttggtgtggttgtatgtaattcagatctgtcactcccaaaccaggtacacatcagaaaatctgggtgggggggcttgttaaaaacactccagtgtttctgacttagtaggtctggatgtggctcagaacctgtatttttatcagcmcctgggttattctgaggcagctggtccatgaaccagcatttggaaatcacttgtccatatgaccacctgatgaagacattatgaagggaagtgaggcattgggtggaagattggggaaagattcaatttcatttcattaaatatatttttagaatgtttttggaacatgtgattcctttctcttttcccattttattaggaatgttttcaaacacacaaaaaattgaaaaaattttacggt

SEQ ID NO: 556553 - DNA, 596 bp, Homo sapiens
aatatttaattacagtaacaagcagtaaattgataaaagaacaagagggccagggtacacaggaattgttttattgccttttccatgtctcaggcattctataattgtctacttcatccatgttctgaagctaattatttattccatccccaggataaagttaggtctcttggtttaactttgtatttgcaggtttgacctaattccttgccggctcataatataattaaagttggcatttccttctcttatccgccctccccactccccggstttccctccccgctgtgtgcctgtttatcactagatggtgctaagacttgggttatagctgccagagactctaggaaagttgttcaggagccaagcaggctggaatttgagaactggaagatgccttcagagctcatccggacagcacttttgttttacaaatgaggaaacagaaactcagtgaaaataagtaatttgtcagagacccagagatctctcccctcctttttttttctctttcttatctgttaatagcttccagtgttacctcatcacccaggaaggagcacagctcagagagcaacaaggtcagagttgctttg

SEQ ID NO: 556554 - DNA, 492 bp, Homo sapiens
ttttcttttagagacagggtcttgctctctctctcaggatggggtacagtggtgcaatcatagttcactgcaaccctgaattcccgggataagcaatccttcctcctcagcctccctagtagctagaactacaggtgcacaccaccacatgaggttaattcttccttttagagagacattttctcactatgttgcccaggctggtcttcaactcctggatcttcccacttcagcctcccraagtgctgtgattatgggcataagccactgcacccagccagcaattttgtaacattttaatcactctaaaaagaaatcctacatccattagtgcacccctaaaaaatgaagaccttgccaaccactagtctttctatgaatctgcctctttgagacatttcatataaatggagtcatataatacatgtttttagggttcaatcatgttgtaacatgtaaaccattcctctcatatcaatggagtcatacaca

SEQ ID NO: 556555 - DNA, 492 bp, Homo sapiens
ttttcttttagagacagggtcttgctctctctctcaggatggggtacagtggtgcaatcatagttcactgcaaccctgaattcccgggataagcaatccttcctcctcagcctccctagtagctagaactacaggtgcacaccaccacatgaggttaattcttccttttagagagacattttctcactatgttgcccaggctggtcttcaactcctggatcttcccacttcagcctcccaaagtgctgtgattatgggcataagccactgcacccagccagcaattttgtaacattttaatcactctaaaaagaaatcctacatccattagtgcacccctaaaaaatgaagaccttgscaaccactagtctttctatgaatctgcctctttgagacatttcatataaatggagtcatataatacatgtttttagggttcaatcatgttgtaacatgtaaaccattcctctcatatcaatggagtcatacaca

SEQ ID NO: 556556 - DNA, 618 bp, Homo sapiens
tttctttttttttttttaaagctagtcaagtgaagcagtgagagtggagaaggaacaaataatctgtaactagttgtgatcaattagttgtaaacaccactgcactcggaccagcgcaaactcattcttaacctaatcacctaaaataattcttatcatctattcttcttcaggtaaaaatggagccctggatgttattttaacgacttgccatccttcctgttttgagagtgtctttgttaactsgtggcataccttcgtgacccggtcctaccttcctcattcagacctgtgctgttcattgctgtattcccagtcccttaaaaagtactcaacacgtgaattgcaaaatgaattaacaactttgagggaggtgttattatcatcctggctttacagatgaggaaactaaggtttacttagcaagattaagtaacttgcctaggggttacaaaccactagccagaaacaaacccacatctgaccacaaagtccttgcttctactctaccctactggctagaatagctttttaatgtcttgcacttctgtgtctttactggtggcagctctcttctaaaggggaagctcaatttaagcttcatcaacctgggcatcc

SEQ ID NO: 556557 - DNA, 601 bp, Homo sapiens
ctggcatgttgtgtctttgttctcattagtttcaaataacttcttgatttcattatttacccaagactcatttggcagcaggttgtttaactttcatacagttgtatggttttgagtgactttcttggctttgatttctatttatattgtgctgttgtctgagaatgtggtcwgtatgatttcgtttttttgtgtgtttgctgaggattgttttatgtcagattgcatggtcaattttagaatatgtaccatgtggtgatgaaaagaatgtatattctgttgtctttgggcagagagttctgtagctgtgtactaggtccatttgatctagtgttgagtttaggtcctgactttctttgttaattttctgccttatctgtctaatgctgtcagtagggtattgaaatctccaactattattgtttgtgaaactaagcctattcatagatctctaaaaacttgctttatgaatctgggtgcacctgttttggctgcatatagatttagggtagttaggtcttcttgttaaattaaacctttcatcattatgtaatgccctactttttcctttttgatctttgttggtttaaagtctgttttg

SEQ ID NO: 556558 - DNA, 601 bp, Homo sapiens
ctggcatgttgtgtctttgttctcattagtttcaaataacttcttgatttcattatttacccaagactcatttggcagcaggttgtttaactttcatacagttgtatggttttgagtgactttcttggctttgatttctatttatattgtgctgttgtctgagaatgtggtcagtatgatttcgtttttttgtgtgtttgctgaggattgttttatgtcagattgcatggtcaattttagaatatgtaccatgtggtgatgaaaagaatgtatattctgttgtctttgggcagagagttctgtagctgtgtactaggtccatttgatctagtgttgagtttaggtcctgactttctttgttaattttctgccttatctgtctaatgctgtcagtagggtattgaaatctccaactattattgtttgtgaaactaagcctattcatagatctctaaaaacttgctttatgaatctgggtgcacctgtkttggctgcatatagatttagggtagttaggtcttcttgttaaattaaacctttcatcattatgtaatgccctactttttcctttttgatctttgttggtttaaagtctgttttg

SEQ ID NO: 556559 - DNA, 556 bp, Homo sapiens
taaaggtgtgcaccaccatgcacagctaatcttggtattttttgtagagatggggtttcaccatatttcacaggctggtcttaaactcctgagctcaagtgatctgcccacctcggcctcccaatgtgctggggaactattttctrttatctgttctggactcacacattctggatgactggaattctttggacccatatgagcctctgcaaagacattggtatgtgctggtcatattcaaatgtgagattcataagaatagaataatttgtgtatggaattacctgtcctgggttacctaatccagagatccagcaatttttcttaattcctgaatttccaggcattgtaaagcatacttcactgtgcttggcacagattaattagtctatatattatatataggtacaaaaagtataagcttattctctcctattctaatagaaatgaggcatttttaacttgcttggaaatagcaattcataccattgcatagtggttatttgcaaatcttcctaataaactccaggaataaattttaggtaaatgtatgatg

SEQ ID NO: 556560 - DNA, 556 bp, Homo sapiens
taaaggtgtgcaccaccatgcacagctaatcttggtattttttgtagagatggggtttcaccatatttcacaggctggtcttaaactcctgagctcaagtgatctgcccacctcggcctcccaatgtgctggggaactattttctgttatctgttctggactcacacattctggatgactggaattctttggacccatatgagcctctgcaaagacattggtatgtgctggtcatattcaaatgtgagattcataagaatrgaataatttgtgtatggaattacctgtcctgggttacctaatccagagatccagcaatttttcttaattcctgaatttccaggcattgtaaagcatacttcactgtgcttggcacagattaattagtctatatattatatataggtacaaaaagtataagcttattctctcctattctaatagaaatgaggcatttttaacttgcttggaaatagcaattcataccattgcatagtggttatttgcaaatcttcctaataaactccaggaataaattttaggtaaatgtatgatg

SEQ ID NO: 556561 - DNA, 566 bp, Homo sapiens
ttattttttctagagatgaggtctcactatgttgcccaggctggtctcaaactcctgagcttragctatcctcccaccacggcctcccaaagtgctgggattgtaggtgtgagccaccatgcctggccaataggagacattttaaacttgccctatttaaacttggcatctatgaaccctcttgaaaaaagcataaatagaaaaaccatagagtcctcttactaaaggattcaaagggaatcaacttttatatatgatgataaaaagatttgcatttgcacaacttggagaatgagttaccatctcattccagtcccaaacagttgactgtgggaggctatgggtggaagaggtgtttggaactgaaattcaattttaactccatctgagaagcttacaaggcatcccagtggagatgttgaataggcagttggatctaagagactagaagttggaagacaggtctgggatgaagatacacatttgggagtcatagacatacaggtggtatttaaggcttgagagtggatgagatcactcaaagggtgtagacaagaaggccaagg

SEQ ID NO: 556562 - DNA, 560 bp, Homo sapiens
gaaatgaccaaatgattatatcatggaatctcaaagaaaatatgagaagttatttagtccatgtagaaagaaggtgaagaaaaatattcaatgtaatttaaattgttttgtaattggccaggtgtggtggttcrtgcctgtaaccccagcacgttgagagcccaaggtgggcagatcacctgaggttaggagttcaagaccatcctggccaacatggtgaaacccggtctttactaaaagtacaaaaattagccgggcatggtggcacgcacctgtaatcccagctacttgggaggctgaggcaggagaatcacttgaacccaggatgcggaggctgcagtgagccaagattgtcccattgcactccagcatgggcaacagagtgagactccatctcaaaaaataaataagtaaatacataaataaataattttgtaatcagtaatggtaacatacccctcttgattgaggtatactaataatcattcctatttaaacaaaaaacaaaaaaaaatccttataaagcatttaaaagtggcaaagcacttttatatttattt

SEQ ID NO: 556563 - DNA, 594 bp, Homo sapiens
agcaattctcctgcctcagcctctagagtagctgggattacaggtgcacacaaccaggcccggctaatttttgtgtttttagtagagatggggtttcaccatgttggtcargctggtctcgaactcctgacctcatgatccacctgcctcggcctcccaaagttctgggaatacagcgtgagccaccatgctcggcaggattttcttaacacaagtgactccaatgattctgacaactttaacattcccccctttttaatcaaggtatttctttaaaagcatcgctgatcaatcatcctgtggttagattttgattttctcttggtgttgggatggacctttcctgggttgttggtatgatcccacattggagggagtgattggcagttagggttcagtgtcaaaaccctttagccacatttgagaaacaagaaaggtttgaaggaagtggttctcaggctaagtctatctggagcccactattaagtttaattttctctgttccacactcttttgcaatcacctcaaagtgctgggccagcagtatttttttaaggaggtgtacttacgcaaaagtttaacatgtaacaaatg

SEQ ID NO: 556564 - DNA, 594 bp, Homo sapiens
agcaattctcctgcctcagcctctagagtagctgggattacaggtgcacacaaccaggcccggctaatttttgtgtttttagtagagatggggtttcaccatgttggtcaggctggtctcgaactcctgacctcatgatccacctgcctcggcctcccaaagttctgggaatacagcgtgagccaccatgctcggcaggattttcttaacacaagtgactccaatgattctgacaactttaacattcccccctttttaatcaargtatttctttaaaagcatcgctgatcaatcatcctgtggttagattttgattttctcttggtgttgggatggacctttcctgggttgttggtatgatcccacattggagggagtgattggcagttagggttcagtgtcaaaaccctttagccacatttgagaaacaagaaaggtttgaaggaagtggttctcaggctaagtctatctggagcccactattaagtttaattttctctgttccacactcttttgcaatcacctcaaagtgctgggccagcagtatttttttaaggaggtgtacttacgcaaaagtttaacatgtaacaaatg

SEQ ID NO: 556565 - DNA, 616 bp, Homo sapiens
agacaggcttttgctgaatctttaatgcattgtcttttggctgggttcattcaccttcagggaattctcaaaagacaagcgtcatttctttttgtctattgatctgtcctccagaaaaaagggacttctttataaactcaaagcccttagctaattcattgttcatttgttacatttattgaaaatctactgtttgaaaggcacttgttctattgtgctatggaaacaagacagacaaattcctagtcgttgagagcttaccttctagtaggcattacagaccagaaaaatggctgttcagtaggcctgtagcaataagagccgtgaaaacaaggttgggattaaggatgagtaatgagaaggagttactctttttgatcaagaagtcaaggaaggtttctgttttgaggacagacgtgaatgaaatgagggagcaagtcatgaaaactctttggaaaagaaaaaagtcttataggtgaggaaccagcaaatgcaaagaccccaaaataaaaattaacacctgktggctgggcgcagtggcttacgcctgtaatcccagcactttgggagtccgaagcgggtggatcacgaagtcaggagatcgagaccatcctgg

SEQ ID NO: 556566 - DNA, 578 bp, Homo sapiens
tcaaaatactcctatgcggggaccaacacttatatccaagaggaagtattactcttatcgctgagttaaatcaaggttgaattacgcacagaaaatgtgcgcataaggtccccgtgattcactggaaatgccatgacataattcttcgtttccaagacaaacaaaaaagttgtttttttatgctgccttcttcattgagatctgaaagtagttccctatggaagtgattcatggtgttgtgaaatcctmcgaaattgtaaacagcctggtgggcaggaatcccgaggtctcattcaggccccctgcaaattctgagttcctagcctgaggaaagcccccaacaaatactgacctgactttctcctaaaagattgccataaacacttttggttatctcttaatgtacttggttcataactgcttagtcaattatttttattagcataacattccttttaagcataatgatattgggaaaacagaaatgatacaagcgtaatttcttggctatgactgtttatgttttgagtttttttgttttgttttaactttctttgccgatttgatgaattaattgt

SEQ ID NO: 556567 - DNA, 470 bp, Homo sapiens
gcgcctgtcttgtcacacttgctgtttaacagccttaccatgccattcttgagagaaataaagtgaggtttcattaatrtgagagatcaacagtagttcagttataagttatcactgcagagggagagcagcaggttcagctcctcaagttggaaataaaaaagatgaatgggaggaggaaatgaagttagtgatctaccgcctgggcactttgtcaagggtgcgtgaggagagaggggaaagccctttctaaacacagattatacaccaaaggcaattaataattgtttaatccttctggagagccatttgttgtggtgatattcacatgactgtctttaacaccatgacaccaggagggtcttacttcgccagccaccaagctgggggcatcatgctgggtaattgtctgcaggtgcatttaactgaaacctttctctaagattctggagttcacagcacacaaagaa

SEQ ID NO: 556568 - DNA, 470 bp, Homo sapiens
gcgcctgtcttgtcacacttgctgtttaacagccttaccatgccattcttgagagaaataaagtgaggtttcattaatatgagagatcaayagtagttcagttataagttatcactgcagagggagagcagcaggttcagctcctcaagttggaaataaaaaagatgaatgggaggaggaaatgaagttagtgatctaccgcctgggcactttgtcaagggtgcgtgaggagagaggggaaagccctttctaaacacagattatacaccaaaggcaattaataattgtttaatccttctggagagccatttgttgtggtgatattcacatgactgtctttaacaccatgacaccaggagggtcttacttcgccagccaccaagctgggggcatcatgctgggtaattgtctgcaggtgcatttaactgaaacctttctctaagattctggagttcacagcacacaaagaa

SEQ ID NO: 556569 - DNA, 470 bp, Homo sapiens
gcgcctgtcttgtcacacttgctgtttaacagccttaccatgccattcttgagagaaataaagtgaggtttcattaatatgagagatcaacagtagttcagttatragttatcactgcagagggagagcagcaggttcagctcctcaagttggaaataaaaaagatgaatgggaggaggaaatgaagttagtgatctaccgcctgggcactttgtcaagggtgcgtgaggagagaggggaaagccctttctaaacacagattatacaccaaaggcaattaataattgtttaatccttctggagagccatttgttgtggtgatattcacatgactgtctttaacaccatgacaccaggagggtcttacttcgccagccaccaagctgggggcatcatgctgggtaattgtctgcaggtgcatttaactgaaacctttctctaagattctggagttcacagcacacaaagaa

SEQ ID NO: 556570 - DNA, 572 bp, Homo sapiens
acccccgctttgtaccccacctcactcccagcttctagatacctgaggtttggcgacccagctacgagactgtcccttccttccaccacctgatagtgcaaaaytgggacaaagtcatcattaggcagcgtagttagtagcaagatattagaagtcctcagaatagcatttgcgttttcatatactactttgttaaccctatgcaaaaataatccaagatagaattttagtagatttatttccacagagaccaagatagttttcttggtggccgtcataactgtttgatgtaactaaaaataaaactagccctgactgctaataactcaaaaccggtggagattagagcaagggaaatgtggttaattcaactccagcttgctttgacctgaatttatgccaactgggacttttgcctgaattattcgggaaaatgccctgagctgccccttaattcatcttgtacgtttggtctcttacatattgaaaaagtgtgttctatgattcttttccatatagctaatgtcatcttgaccaggtcagagttcctccaagttgtttttaacatacaa

SEQ ID NO: 556571 - DNA, 564 bp, Homo sapiens
aaagaaacgaacaaatataaagaatacaggtttttctcagcaggtggcagaggatacacaatggctaagaggaaggaataagagacttcctgaaatacgagcatggaccatttcagacttccataaaatgtgatcctttccaaagcccatgaaaaaatgaattgctgtacacttgaagtctccaaacacctgaaggttaagtatcaaaactttaattacggtttaaattcacatccttacatctgcccctgacaccttcccatcatcctatcctgcccttaacctcccccaataccatttgtgcctgcccaattcccacccgtctttgaaagatcagttstaatgccagctgttctacagatttttcctagatcactccatcctgccacaagctgcacctccgcccttacctctttgtaggtaaaaatagattcctgttatgaatttccccagcaccttatcaataactttattatgacatactatggaatgatcaagttctggcctacattatggtatttctctatttcctttagtaaactccaagttccttgaggctggagc

SEQ ID NO: 556572 - DNA, 551 bp, Homo sapiens
aaggtccctagagaagccggcatgtgccctcatctggagtccatttactccctcatctgaacaccatgggcctttgcccaggttgcccagctcattcaggctcctcctcagacacagaaatgttaaaacaagaaacctagtcttgcagggtgcagactatgggctcatgcccataatcccagcaccttgggaggctgaggcaggaggatcacttgaggccaggcatttgagaccagcctgggaaacaatagggatgaccatgtctctactaaaaaaatgttttaaaagtccaggcatggtggctcatgccgatagtcccagcattttgggaggccaaggtgggaggatctcttgagcccaagagttcaagaccaacatgggcaacatagtgagaccctatctctacaaaaaattataaaaatttggccacgtgtggtggctcacacctgtaatcccagcactttaggaagccaaggtgggaggatcatctgaagtcaggagttcsagaccagcctggccaacatgacgaaaccccgtctcaactagtagaa

SEQ ID NO: 556573 - DNA, 553 bp, Homo sapiens
ctcctttttttttttttttttttgagacagttttgctctgttgcccggcctggagtgcagtggcacaatcttgactcactgctacctccgcctctcargttcaagcaattctcctgcctcagcctcctgattagctgggattacaggcacccgccaccacacctggctaattctgtttgtatttttagtagagatgaggttttgccgtgttggccaggctggtcttaaactcctggcctcaggtgatctgcctgccttggcctcccaaagtgctgggattatagatgtgagccactgtgcccgggtcttctagctattttgaaatatacaatagattattgttaatgataatcaccctactggactaccaaacactagagcttattccttctatctaactggatttttatccttccaatcaacatcttcctccctactcccctaatcacctatctactctctatcttcttgtcatctactttttttagctcctacataggagtgagaacatgtgatatttgtctctaagtgcctggcttatttcagttagtat

SEQ ID NO: 556574 - DNA, 553 bp, Homo sapiens
ctcctttttttttttttttttttgagacagttttgctctgttgcccggcctggagtgcagtggcacaatcttgactcactgctacctccgcctctcaggttcaagcaattctcctgcctcagcctcctgattagctgggattacaggcacccgccaccacacctggctaattctgtttgtatttttagtagagatgaggttttgccgtgttggccaggctggtcttaaactcctggcctcargtgatctgcctgccttggcctcccaaagtgctgggattatagatgtgagccactgtgcccgggtcttctagctattttgaaatatacaatagattattgttaatgataatcaccctactggactaccaaacactagagcttattccttctatctaactggatttttatccttccaatcaacatcttcctccctactcccctaatcacctatctactctctatcttcttgtcatctactttttttagctcctacataggagtgagaacatgtgatatttgtctctaagtgcctggcttatttcagttagtat

SEQ ID NO: 556575 - DNA, 342 bp, Homo sapiens
aatgaagtctccattttactttaaatgaaatacaaatatatcacttggaccaaaaagagtgctatggactagtaagtatatatataatttatatatatatatcatgtgtgtatatatatatatatatgtatatatatatatatatatatatatatatatatayatatatatatatatatcatgtgtgtgtatatatatatatataatttatactagtccatagcactctttttggtcccagtgatatatttgtattttattttaagtatatatatatatatataaaatttaaaattttaggccagacacggtggctcatgcctgtaaccccagcagtttggg

SEQ ID NO: 556576 - DNA, 633 bp, Homo sapiens
ttaaataagcaagccccagaaagataaacgttgcatgttgtcacttatttggtgacatttaaaaatcaaaacaactgaacttatgaagacagagaagaatggttaccagaagctkggaagggtactggggggaacaagcgggggtgtgaggtttggtaatgggtataaaaaaatagaacaaatcaaacctagtatttgacagcacaagagggtgactctagtcaataataatttaattacacatttgaaaatcactaagagtatagttggatggttggtaacacaaagaataaatgcttgagggtatggatacctttttccatgatgtgattattacacattgcatacctgtaccaaaatatctcatgtaccacatatataatatatatactgtatatatatagcatatatatactatttatacatatacagtgtgtgtatatatatatatatatacacacacatactatttacccacataaattaaaaacaattattttttttaaagtagggctttgtgagtggtgttttggatttaattttcaaattagaatttcaaatgccaatggcagagaatgctatgtttttcttaaaaggggtttctccattgactaacacacatttacaaaaagg

SEQ ID NO: 556577 - DNA, 633 bp, Homo sapiens
ttaaataagcaagccccagaaagataaacgttgcatgttgtcacttatttggtgacatttaaaaatcaaaacaactgaacttatgaagacagagaagaatggttaccagaagctgggaagggtactkgggggaacaagcgggggtgtgaggtttggtaatgggtataaaaaaatagaacaaatcaaacctagtatttgacagcacaagagggtgactctagtcaataataatttaattacacatttgaaaatcactaagagtatagttggatggttggtaacacaaagaataaatgcttgagggtatggatacctttttccatgatgtgattattacacattgcatacctgtaccaaaatatctcatgtaccacatatataatatatatactgtatatatatagcatatatatactatttatacatatacagtgtgtgtatatatatatatatatacacacacatactatttacccacataaattaaaaacaattattttttttaaagtagggctttgtgagtggtgttttggatttaattttcaaattagaatttcaaatgccaatggcagagaatgctatgtttttcttaaaaggggtttctccattgactaacacacatttacaaaaagg

SEQ ID NO: 556578 - DNA, 616 bp, Homo sapiens
ttatttctttatcttttccatttctcaattttatgagtcagcttgactggacttggagatgcccagatatctggtaaaacattatttaaagctgtgtgttagggagtgtttctagaataaattagcttttgaattggaaaaccaagtaaagaagaatgccttcacaaatgtaaatgtaagggcagagaaatatggatgtactctccgagctgggacatccatcttcttctacccttggacatcaatactcctagttttcaggcactcagactgaattattctctcgttatcttttttaaataaraggataaagttgggatactttgaaaagtagatttttaaaaaaatatataatagtgctgattctggctgattctctagtcaaaaatactgtgtgttgaggggaaagaacttcaaataattattttcttaagaagtgcagagagggcatccctgtcttgtgccagttttcaaagggaatgcttccggtttttgttcattcagtatgatattggctgtgggtttgtcacagatagctcttattattttgagatacgtcccatcaatacctaatttattgagagtttttagcatgaagcgttgttgaattttgtca

SEQ ID NO: 556579 - DNA, 563 bp, Homo sapiens
agtcccagctactcgggaggctgaggcaggagaatggcgtgaacccgggaggcggagcttgcagtgagccgagatcgcaccactgcactccagcctgggcgacagagcgagactcttgtctcaaaaacaaaaaaaaattaaaccatgtactttgagatataatttccatacaatgttgtgcacagatcttctgtgtgccacacactgaatttttttgcatgtgcacatatctgtgcaattgtccaaatcaaaatacttaatgtgttcatcaccccagggtgctacttytaaatcaacacctttccccaggaaaactgttcttacttcaaataaaatgcatttattttttcttttgttaaattatatatatatatatatatatatatatatatatatatatatatatatatatatataaaatcatgaggtaggtaccacttttgtgtatggtttattttgcacaatattaagtctttaactatattgcgatacgtatacagagtttggcttttttcagttcctatgtagtattctgttgaatgactatcagaatttatatttcc

SEQ ID NO: 556580 - DNA, 483 bp, Homo sapiens
tttcttataataagttttcttataaagtaattgtaaaggcaaagttttctttttttttcttttagagagagagttttgctcttgtcacccaggctgaagtgcaatggcatgatctcgactcactgcaacatccacctcctgggttcaagtggttctccttcctcagcctcccgagtagctgggattacaagcgtatgccaccacgcccggctaatttttatatttttagtagagacagggtttcaccatgttgaccagcctagtctcgaacttctgacctcaggtgatcgacctgcctcagcctcccaaagtgctggggattacaggcgygagccactgtgcccggccaggcaaagttttcttatacagtaattgtaaataaataaaagtatcaataattatactatattaaaataaagtattctcatcaggagagattattaggagaacaaaaatgtatgccacagatctattgcttgattc

SEQ ID NO: 556581 - DNA, 547 bp, Homo sapiens
aaagtactgtgattacaggtgtgagccactgcacccagccaaaaggcacttcttacatggcaacagcaagagaaaatgaggaagaagcaaaagcagaaacccctgataaacccatcagatctcgtgagacttattcattatcatgagaatagcacaggaaagaccagcccccatgattcaattacctcccactgggtccctccaacaacacgtgggaactctgggagatacaattcaagttgagatttgggtggggacacagccaaaccatatcaaggactaagtaggaaactaaagttatatcatattagactccccacatacatagacaaccatgaccccaaaatgaagactgaagcaaaagcaaattgttaacatccacttctaatatggttgtgagagctcctaccaaactgagtatatgatagacagcatttataaactctggagaaattatcaaaacacaaacttmataaagggagaagactggagaaaaaactgagcagcttttggagcagactcatttggaagaagggaagagcataga

SEQ ID NO: 556582 - DNA, 540 bp, Homo sapiens
ccaccgcgcctggcctgctactcttttattaggcttaatctgaaagctgtttccccatggaaggcttttatgagtcccttggtcaggcagattcacttgttttatggtgtcttggcatcatatatttgtcctaacataacccttctcttctttgaaattgctagattatcgttygtctttcctttgcgaatagcagacagcaagtctgtcttgggctctactgtatccccagggtctagatcagtgaatggaaccgagtatttgctggattaatgggtgttgagtgacagaatgagtaaatgagtgactgaagggtcaggactaaatgtagaaatggagtctcctgatttccaggttcaagacactcttttccatccactgggcttattttaagactccaggctcttctaagggagtcccagaagatgccatcattcctccccatgcttgtgcctttcacaaagcatttctaggtaaatttcccaaatgttcattgcctacattgggccatgtcctatgcttggattgaggaacaagggg

SEQ ID NO: 556583 - DNA, 590 bp, Homo sapiens
tgttggtggagttttatttttttcaaccctgaagatcttattccactctctccttgcttggcgtagtttctgatgacaaatctgttgcaattcttattcttgtttctctgtagagaaggtggttgatttttccctctcgcttcttttaagcctgtctgtttgtctttagttttcttcaatttaaatatggtatgcctagatagatattttgataatgatggttgttgttctctgagattactatgcctgtggtttagtttctgtcattaattttggaaaatttcccatcactattacttcaaacaatttttctgctactttcttccttctggttttccaactttgtatgcattataccttttaaaattgtctcacagttcctggatattctattattgattgattgattgattgattsattgattcattgattttagagtctcactctgctgtccaggttggagtacagtggcatgaacttggctcactgaagcctccacctcccaggttcaagtgattctcctgcctcagcctcccgagtggctgggactacaggcacacaccacaatgcccagcttatttttgtattt

SEQ ID NO: 556584 - DNA, 489 bp, Homo sapiens
ctttctctcctctctgctcaaattcagttcaatgaattgcttaatatcacttctcacggtgttctctgccccctgctatggacaggcttccatcattttttgcacaaattgccttgtaaccagtctgtcaacatcctctctggttcctctccaatatagtgtccatactgcagccagaatagtctcctttttttttttttttttttgagatgggtcttgctctgtcgcctgggctggctggagtacagtggtgccatcctagctcactgcatcctccaactcatgggctcaagtgatcctctcaccttarccttctaagtagctgagaccacaggtgtgcaccatgatgcccacataatttttaaaattttgtagagtaggggtctcactgtgttgtccaggctggtcttcaattcctgggctcaagtcatcctccctccttggccccctgaagtgctgagattagaggaatgagccaccatgcctggc

SEQ ID NO: 556585 - DNA, 478 bp, Homo sapiens
aataatcgttgataataactcatatttcttgggtgcttactatgcaccaggtgctattcaaaaatggattatcacatccattccctctatctgtcccttaaagacatccttttggtctcatcctstctccagaatttagaaatgagaggcggcaaaagctcgtgactactcctctggcctaagcctgaaggtgtttcatgtgtacgaatgtaagtcaaggagtcacacaagtctgtctctgacagtatgtgagcctctatgtaggtgtaaagcatatctgtgtgtgaataagaaagtaagcacgagtaagtgtatgcatccatatatgaagtatgtgtttatgtgaccaagtgggtaagtacgagagtgtatgtttgtataccatatgtgagcatatatgtgtgtaaacatggtatgaagatcatgaaattttcacctagagatgagtgtctaggtgcctacacatctttgcatgtcc

SEQ ID NO: 556586 - DNA, 478 bp, Homo sapiens
aataatcgttgataataactcatatttcttgggtgcttactatgcaccaggtgctattcaaaaatggattatcacatccattccctctatctgtcccttaaagacatccttttggtctcatcctgtctccagaatttagaaatgagaggcggcaaaagctcktgactactcctctggcctaagcctgaaggtgtttcatgtgtacgaatgtaagtcaaggagtcacacaagtctgtctctgacagtatgtgagcctctatgtaggtgtaaagcatatctgtgtgtgaataagaaagtaagcacgagtaagtgtatgcatccatatatgaagtatgtgtttatgtgaccaagtgggtaagtacgagagtgtatgtttgtataccatatgtgagcatatatgtgtgtaaacatggtatgaagatcatgaaattttcacctagagatgagtgtctaggtgcctacacatctttgcatgtcc

SEQ ID NO: 556587 - DNA, 478 bp, Homo sapiens
aataatcgttgataataactcatatttcttgggtgcttactatgcaccaggtgctattcaaaaatggattatcacatccattccctctatctgtcccttaaagacatccttttggtctcatcctgtctccagaatttagaaatgagaggcggcaaaagctcgtgactactcctctggcctaagcctgaaggtgtttcatgtgtacgaatgtaagtcaaggagtcacacaagtctgtctctgacagtatgtgagcctctatgtaggtgtaaagcatatctgtgtgtgaataagaaagtaagcacgartaagtgtatgcatccatatatgaagtatgtgtttatgtgaccaagtgggtaagtacgagagtgtatgtttgtataccatatgtgagcatatatgtgtgtaaacatggtatgaagatcatgaaattttcacctagagatgagtgtctaggtgcctacacatctttgcatgtcc

SEQ ID NO: 556588 - DNA, 478 bp, Homo sapiens
aataatcgttgataataactcatatttcttgggtgcttactatgcaccaggtgctattcaaaaatggattatcacatccattccctctatctgtcccttaaagacatccttttggtctcatcctgtctccagaatttagaaatgagaggcggcaaaagctcgtgactactcctctggcctaagcctgaaggtgtttcatgtgtacgaatgtaagtcaaggagtcacacaagtctgtctctgacagtatgtgagcctctatgtaggtgtaaagcatatctgtgtgtgaataagaaagtaagcacgagtaagtgtatgcatccatatatgaagtatgtgtttatgtgmccaagtgggtaagtacgagagtgtatgtttgtataccatatgtgagcatatatgtgtgtaaacatggtatgaagatcatgaaattttcacctagagatgagtgtctaggtgcctacacatctttgcatgtcc

SEQ ID NO: 556589 - DNA, 391 bp, Homo sapiens
gaattctgcatctgtaacaaactccaggtgattctgatactgctggtctatagtgtccacactttgagtactgtgacattatatcacatattccagaggttagctgaaaaccattcctaattacagtaagcggtcagaccaaattggggggattggttttctgcctcaacatagcattttatcagcattactcatcactgtaacaaggccttggttttcacatccggagggagcccagtctcttccttgcctgctggaggcatggacaggaaaacggtcagatacatacatcatgtagcatgagtccctgggcccgctcagtattgcccagggtaagtgaggacagataaagatgtcgctgctacckgaacacctttgtatggaagtctgc

SEQ ID NO: 556590 - DNA, 345 bp, Homo sapiens
atttgatatcaccaaatgcccagttagtacttacattttactgatggtcttaaaaattgttacacaatttgattgagcagaactcaaatgaaatccatatattgtgtttgacttatatgtctcttgtctcctttaatagataggtcacccctgtctatgttcttccaacagacagataagaaggcatggatatggccagatgctgtggttcacacctataatcccagcactttgggaggcagaggcagaggcaggtggatcacgaggaygggagatcaagatcatcctggccaacatggtgaaaccccgcctctactaaaaatacaaaaattagctaggcgtggt

SEQ ID NO: 556591 - DNA, 345 bp, Homo sapiens
atttgatatcaccaaatgcccagttagtacttacattttactgatggtcttaaaaattgttacacaatttgattgagcagaactcaaatgaaatccatatattgtgtttgacttatatgtctcttgtctcctttaatagataggtcacccctgtctatgttcttccaacagacagataagaaggcatggatatggccagatgctgtggttcacacctataatcccagcactttgggaggcagaggcagaggcaggtggatcacgaggatgggagatcaagatcatcctggccaacatggtgaaaccccgcctctrctaaaaatacaaaaattagctaggcgtggt

SEQ ID NO: 556592 - DNA, 364 bp, Homo sapiens
caattaaatgatggctattatctttactattgttatttaattttcattttttctcaattattaaagagatgatacctattgtacaaaaattaaaagtattgaaaagtgyaaagagtcaaatcaaatagaaaatcacccataatcacttcacctagaagcaactaattcaacattttggcatatccctattccactcatatgtttgacagcattttagatacaaactattgaaactaataggagggtgccatacaaaaatcaattgtgttcttatttatctgacatcacataattacaaaatgtatttattaaatcgggtgtgatttataatggcaacccaaatgtgtagagaaaaaaactaacg

SEQ ID NO: 556593 - DNA, 610 bp, Homo sapiens
atgttttgttttgttttgttttgtttttgagatggagtttcgcttgtaggccaggctggagtgcaatggtgcaatctcggctcactgcaaccttcctgggttcaagcaattcccatacctcagcctcctgtgtagctgggattacaggtgcccgccaccacacccagctaatttttgyattttcagtagagacggggtttcaccatgttggccaggctggtctcaaacttttgacctcaggtgatttacccgcctcggcctcccaaagtgctgggattacaggcgtgagccaccgtgcctggctgcaaatgtttccttttttctttttctttgtgtttttgagacagggtctcgctctgctgtgttgcccaggctctagtgcagtggcacactcatagctcactgcagcctctgcctctcaggctcaagtgtcctcccacctcagcctcctgagtagctggtaccacaggtgtgtatcaccacacttggctaatttttaaattttttgcagagaagggagtctcactatgttgtctaggctggttgtgaacgtgcctaggctgatcgctgaagcgatcttcccgccttgacctcccaaagtgctgggatt

SEQ ID NO: 556594 - DNA, 610 bp, Homo sapiens
atgttttgttttgttttgttttgtttttgagatggagtttcgcttgtaggccaggctggagtgcaatggtgcaatctcggctcactgcaaccttcctgggttcaagcaattcccatacctcagcctcctgtgtagctgggattacaggtgcccgccaccacacccagctaatttttgcattttyagtagagacggggtttcaccatgttggccaggctggtctcaaacttttgacctcaggtgatttacccgcctcggcctcccaaagtgctgggattacaggcgtgagccaccgtgcctggctgcaaatgtttccttttttctttttctttgtgtttttgagacagggtctcgctctgctgtgttgcccaggctctagtgcagtggcacactcatagctcactgcagcctctgcctctcaggctcaagtgtcctcccacctcagcctcctgagtagctggtaccacaggtgtgtatcaccacacttggctaatttttaaattttttgcagagaagggagtctcactatgttgtctaggctggttgtgaacgtgcctaggctgatcgctgaagcgatcttcccgccttgacctcccaaagtgctgggatt

SEQ ID NO: 556595 - DNA, 609 bp, Homo sapiens
tgggtggcttaaacaacaaacatttattttctcacagttctggagcctgggaagtcccagatcaaggtactagctgattcagttcctggtaagggctttcttcctggcttgtggacagccactttgtggactgtggacagcttgtgacagctacgtgctcacatggaggagacacagagccctggtgtctctggctcttcttctaagggagctggctctattagatcacagccctaccttgattacttcatttaaccgttgtcatctcttaataggctctttctccaaatacagtcacattaggggttagggcttcaacatacgaattttaggcrgacacaaatatccagtccatattagactgatctagaacccaaatggaagaggccagttaggaagcaggtgacagggaagagggcactgtctttctggccagtggtctaagctggcccctcgccatggaggttgtggttgaggcagcatccttctatccatccactttcccccttcagtgtcctggcctggcaagtgcaggatctgtaccttcagtgtggaagaagagggcagtgatatgtgttcaagcactgttaattgcccgacacttcacat

SEQ ID NO: 556596 - DNA, 609 bp, Homo sapiens
tgggtggcttaaacaacaaacatttattttctcacagttctggagcctgggaagtcccagatcaaggtactagctgattcagttcctggtaagggctttcttcctggcttgtggacagccactttgtggactgtggacagcttgtgacagctacgtgctcacatggaggagacacagagccctggtgtctctggctcttcttctaagggagctggctctattagatcacagccctaccttgattacttcatttaaccgttgtcatctcttaataggctctttctccaaatacagtcacattaggggttagggcttcaacatacgaattttaggcggacacaaatatccagtccatattagactgatctagaacccaaatggaagaggccagttaggaagcaggtgacagggaagagggcactgtctttctggccagtggtctaagctggcccctcgccatggaggttgtggttgaggcagcatccttctrtccatccactttcccccttcagtgtcctggcctggcaagtgcaggatctgtaccttcagtgtggaagaagagggcagtgatatgtgttcaagcactgttaattgcccgacacttcacat

SEQ ID NO: 556597 - DNA, 552 bp, Homo sapiens
accacagttaaagactagcaattgcaaaaagaggagatcctgtaatcccagcactctgggaggctgaggcaggtggatcacaaggtcaaaagatcgagaccatccaggccaacatggtgaaaccccgtctctactaaaaaatacaaaaattagctgggcatggtggcacatgcctgtagtcccagctacttgggagactgaggcaggagaattgcttgaacctgggaggcggaggttgcagtgagccragatcatgccactgcactccagcctggtgacagagtgagactccatctcaaaaaaagaaaaaaaaaaaagggtcggggggagatccctgaaaattatcaggaaaagccactgtcatatgatgtgggtgcacatgagaatagcaggatggaagctgtcaaaagtagcaactattaatactaagtgcaataattaaagtccagcaaaaggatcaagaaacaagggtagggcctctgggtgaatccatgtggatgattggggaaggcaatttctggaagagctgcttgggacgtagatcagtgaaga

SEQ ID NO: 556598 - DNA, 356 bp, Homo sapiens
agattcagagaaaacatttgagaarattcaacacccattcatataaaaattctcaaggcatctgtgaaaggacatctgtgaaaaatcctcagctaacataattaatggtgatatactaaacactttccctctagaattgaaaacaagacaaattctcacttgtattcaacattgtacaggtgattctaaacagtctactggtacaaagaactgaaataaaaacatatgcaggtcggaaaggaagaagtaaaaatgcctttctccatagcaaacatgatcatgcaagtggaaaatctaaaagaattacaaagaaaagtaccagaattaaggctatgaaatgtcacttgaggaagcta

SEQ ID NO: 556599 - DNA, 587 bp, Homo sapiens
gttgcagtgagctcatattgtgccattgcatgccagcctgggtgacagagtaagactgtctcacaacaaaacaaaacaaagaaaaagtttgctgacctctgatctgagctcttgtctcttgcctggacaattgctcctgacttgtttcctaacttcactctcagagtagtcatcatggcctttgaaacattatgcagrtaaggtaattatcttgcttaaaatcttctaatgttgtccagccactgttagaataatgtacatttcttacactggcctgtgagggcctgcagaatcttgctccatactctctccaatgtgatgctgtaccattccatttttgctcatgacatctggccacaccagctccttgctgctcctggaaccgtccaagccatttccatgttctgggtattaatacttgtttcccctacccgaaggactcttcccctagctcctttcgtatccgacttattctcatcctttgggttttccctgactttcctgattttcttgtcagaagtagttcccttcactacagagcaggatgcatcagcttgtcactgttcattccccagtgcctaatataa

SEQ ID NO: 556600 - DNA, 646 bp, Homo sapiens
aatatataatatttttataaaatgcttatcataaagaaaaagataaagaaaatcatggtaaagcatgtgcaaaggacactgataccttttttgaaaacacaaggaaatagaagacagagatagtgattyaccttgtctgcaaggagaaggaaagccacctgaaaaaaataagtgacaaattcattattacctaggttcagaagtcatctgggtatacatagcaatagaagatgggtacatttactatctataggtaatgggaatactggcttcaaaggtacagataggaaaaacattaacctgagtcctgggaattctaagttgtttaaaaatgaagaaccaggcccggcacggaggctcaggcctgtaattccagcactttgggaggctgaggtgggtggatcacgaagtcaagagattgagaccatcttggccaacatggtgaaaccccgtctctactaaaaataaaaaaattagctgggcgtagtggtgcatgcctgtagtcccagatccttgggaggctgaggcaggagaattgcttgaacccaggaggcagaggttgcagtaaaccgagattgtgccactgtactccagcctggcaacagagcaagactctgtctgaaaaaaaaaaaaaagtaccagatgt

SEQ ID NO: 556601 - DNA, 646 bp, Homo sapiens
aatatataatatttttataaaatgcttatcataaagaaaaagataaagaaaatcatggtaaagcatgtgcaaaggacactgataccttttttgaaaacacaaggaaatagaagacagagatagtgatttaccttgtctgcaaggagaaggaaagccacctgaaaaaaataagtgacaaattcattattacctaggttcagaagtcatctgggtatacatagcaatagaagatgggtacatttactatctataggtaatgggaatactggcttcaaaggtacagataggaaaaacattaacctgagtcctgggaattctaagttgtttaaaaatgaagaaccaggcccggcacggaggctcaggcctgtaattccarcactttgggaggctgaggtgggtggatcacgaagtcaagagattgagaccatcttggccaacatggtgaaaccccgtctctactaaaaataaaaaaattagctgggcgtagtggtgcatgcctgtagtcccagatccttgggaggctgaggcaggagaattgcttgaacccaggaggcagaggttgcagtaaaccgagattgtgccactgtactccagcctggcaacagagcaagactctgtctgaaaaaaaaaaaaaagtaccagatgt

SEQ ID NO: 556602 - DNA, 646 bp, Homo sapiens
aatatataatatttttataaaatgcttatcataaagaaaaagataaagaaaatcatggtaaagcatgtgcaaaggacactgataccttttttgaaaacacaaggaaatagaagacagagatagtgatttaccttgtctgcaaggagaaggaaagccacctgaaaaaaataagtgacaaattcattattacctaggttcagaagtcatctgggtatacatagcaatagaagatgggtacatttactatctataggtaatgggaatactggcttcaaaggtacagataggaaaaacattaacctgagtcctgggaattctaagttgtttaaaaatgaagaaccaggcccggcacggaggctcaggcctgtaattccagcactttgggaggctgaggtgggtggatcacgaagtcaagagattgagaccatcttggccaacatggtgaaaccccgtctctactaaaaataaaaaaattagctgggcgtrgtggtgcatgcctgtagtcccagatccttgggaggctgaggcaggagaattgcttgaacccaggaggcagaggttgcagtaaaccgagattgtgccactgtactccagcctggcaacagagcaagactctgtctgaaaaaaaaaaaaaagtaccagatgt

SEQ ID NO: 556603 - DNA, 401 bp, Homo sapiens
ctcaaaaaaaaaaaaaaaaaaaattaaaaaaaaccagaaagctttttttagaaattggcaagcagattctaaaatgtaagtggaaatgagaaggacctagaatagccaaaataatcctaataaggaaaaaattcagaggacttacactggctgattttaagamctgctataaacagcagtagctaagaccatttggtagtggcgttaggatacacaaaatagaatcaatggagcagaaaacagagtccaaaaatagacctacataaatatggccaactgattcccaacaaatgtaccaaggtaattcaatggagaaagaaaaacctttcaacaaatgggctagaataattgtctatttgtaaggaaaaacaaattgcctatttgtaaggaaaacaaatgaa

SEQ ID NO: 556604 - DNA, 574 bp, Homo sapiens
tgaacctacatacagaacatgtgtctgtttcagtgaggatgaatctctgcccctgctgtgatggaaggggtccaacgattcctcaggtttcctgtgatggaaggggtcattctgccrctggtggttggctggtctccccagggaatgatgcaatggtgagcttcagtgttggtctctgctgctggcagatttggcacctggttagccttggtcggggaaagtccatgttgttgaagccatgcatggcctccatccctgccacccagggcagtttgcatgtggatccaagcactgggatggctggcgagaaaagctgaccaacatctatagagcttgccacatagattattaaatctctactaaaaatacaagaaaaaaaacagccgatcatggtggtgggcgcctgtagtcccagctactcaggaggctgaggcaggagaatggcgtgaacttggaaggcagagcttgcagtgagctgagattgcaccactgcactccagcctgggcgacagagcgagactctgtctcaaaaaaaaaaaaaaaaaaaaaaaaaatttctgttacagggttttgg

SEQ ID NO: 556605 - DNA, 515 bp, Homo sapiens
ttactgttgttttaaaccaaaataatggtagtataacactctttcatttatttttatcaaagcatctgtggaaatatattccatttttcaaatatatcagtgctcaagtgtcatcrtgaaagaacaactaaccaaactgtattgaagatggggttgtaaagagttttacatgttgatcacaataatacatatttttggttcattttgttttcttttataaataaatgtttcctttctttagtaggaacaactacaagagctttccctgttttttttggtatactttcttgtgactgacaggtatctgaggccataagagtatttttattttaaagatgaggcaattgagttcagaggttggataacttgcccaagaccctataacaggcaagcagcagatcccagaatcaaacccaggccgtttgaattcaaattcacttcctttttcactatggtacaagaattggaaaataagagcattcttttgcatattagagactgaattatcaaaattc

SEQ ID NO: 556606 - DNA, 633 bp, Homo sapiens
tgttcatagtagccttgaatgatcttttgtatttcagtggtgtcagttktaatatctcttgtttcatttctttgtgaggttatttagattttctcccttgttttcttggttaatcttgccaatagtctaccaattttgtttatcttttcaaagaaccatctttttgttttatttatctttctttttttttttgtttcaatttcatttagttctgctttgatcttggttatttcctttcttctgccgggtttgggtttggtttattcttgtttctctagtcccttcaggtgtgaccttagagtgtcagtttgtgctctttcagtcttttcaatgtgggcgtttagggctatcaactttgcttttagcaccgcctttgctgtatcctagaggttttgataggttgtgtcattattgtcattcagtttgaagaatttttaaattttcatcttgattttgtttttgacccaatgccattcaggagcaggttatttaatttccatgtatttgcatggttttgaagtttccttttggagttcatttccagttttattccactgtggtctgagagaatgttgatataatatgaattttcttaaatttattgaggctcattttatggcctatcatatggtc

SEQ ID NO: 556607 - DNA, 633 bp, Homo sapiens
tgttcatagtagccttgaatgatcttttgtatttcagtggtgtcagttttaatatctcttgtttcatttcttwgtgaggttatttagattttctcccttgttttcttggttaatcttgccaatagtctaccaattttgtttatcttttcaaagaaccatctttttgttttatttatctttctttttttttttgtttcaatttcatttagttctgctttgatcttggttatttcctttcttctgccgggtttgggtttggtttattcttgtttctctagtcccttcaggtgtgaccttagagtgtcagtttgtgctctttcagtcttttcaatgtgggcgtttagggctatcaactttgcttttagcaccgcctttgctgtatcctagaggttttgataggttgtgtcattattgtcattcagtttgaagaatttttaaattttcatcttgattttgtttttgacccaatgccattcaggagcaggttatttaatttccatgtatttgcatggttttgaagtttccttttggagttcatttccagttttattccactgtggtctgagagaatgttgatataatatgaattttcttaaatttattgaggctcattttatggcctatcatatggtc

SEQ ID NO: 556608 - DNA, 570 bp, Homo sapiens
aaatgttataagggaacaaatgatgtgttgtgaatatggttgtatttcagaagtgcaaaggcaaaagaattgcagctaagcatgtacaatgagtacaaaactatgtacacatctatcctaagttaacacttttggataatatgaaactataaaagatgtggacctttgcctttgcaatggcaatgagatagtagggagttagagagatgacaaagcagattaatagttaagggacacattcattaagactgaaaccaaactcagaaatgatgagaatgttttcgagcacattttctcattaagacatatacttttctgtaaataaaaatttgtacgtatggaggaaattgtttagcacacttcctctgtgcttgagttgtattgatgcttgtaattaaatgttacttccttttcttcagataagctayattttgaaacgtaattgcaggtagcatagttggtcattttttcctagaaggtgtctaagtgatttgtttctccattcattcaataactgtcaggcctctgagcccaagctaagccatcatatcccctgtgacctgcacatac

SEQ ID NO: 556609 - DNA, 385 bp, Homo sapiens
gccaattgattcctacaatgtagtgcccagatcagcagcatcagcatcacctgggaacttgttagatatgcagattcttacgccccgtcccccctcaactctattataacaaatcagaaactctgtgggttgggcgccaatatttaaataagccttccaggtgattatgagacctaataaagtttgagattacatttttaaaagagggcctggcttagcagaacatctcaactctggtgagtactcattacacgtcagttgaaagaatgttgartattttccttttaaatgctgtttacacttgcatgattcagttttcaaaatgttgttgcacaaaatttctcctttagcctagtgaggtaggccctattttatatatgagtca

SEQ ID NO: 556610 - DNA, 507 bp, Homo sapiens
gggagcacgggacacctatgcatggccacctgcctcaggcacccacagacgaaagtggtacatgtggaacggacagacagagaacagcctaaaattggaagctaaattgtgtgagaaagacaagtacttcagagaagatagtgtggagtcgcaaaataagtttcatgagagctcatacagaaaacagcctaaaactagaagctaaattgtgtaagaaagacaagtacttcagagaagttggttgggagtaagaaagcaagtctcatgagagctctgagggtgtaaatgggacttttaacagccaaagcacacagcaagtctagcctagcaagaggagctcaatggatggaagtcctcacttgtttccctgtgttaacrtagaagggggtctttttaaaattttgttttcacttcagcttttctgccagaaatgtctagtgtagtgatgttttaaaaaaaaccataagatctgtttccgccacaaatccccattaagacataaatgga

SEQ ID NO: 556611 - DNA, 502 bp, Homo sapiens
aagccctgattcctgggaggaaaaatggtttcatgggctgggcccagggccttgctgctttcgtagtctcaggacttgctgccctgcatcccagctgtttctaaaggggccaacatacagttcagaccattgcttcagagggtgtaagcagcaagccttggtggcttaygcatggtgttgggcctgtggatgcacagaagtcaagaattgaggtttgggaacctctgcctggatttcagaggatgtatggaaatgcctagatgtcccgacagagttgtgctacatgggcagagcccttatggagaacctctgctagggcagcgtggaagggaaatatggggtgggaacccacacacagagttcccactagggcaccacctagtggagctgtgagaagaaggtcaccatcttccagacaccagaatggtagctccaccaacagtttgcaccatgtgcctggaaaagctgcagacatacaatgccagccaatgaacgcagccag

SEQ ID NO: 556612 - DNA, 362 bp, Homo sapiens
ttgccctgtcacccaggctggagtacaatggcatgatctcagctcactgcaacctccgccacccgggttcaaacgattctcttgcctcagcctcccgagtagctgcaattactcggcgcccrccaacacacctggctgatttttttttttttcatctttaatagatatgatgttggtcaggctggtctcgaactcctgacctcatgatccgcatggctcagcctcccaaagtgctgggattacaaacgtgagccactgagtccggccacaatggcaattttcaagcctcaaagaataaagaagttagagataacatgtttaattctttgaatgttaattagcattatgttaaatattaattg

SEQ ID NO: 556613 - DNA, 505 bp, Homo sapiens
caggattactggcgtgagccaccacgtccagccctgatttgttctttctattcatatacccctatacattctattagtaaattccaacagcaagactcccagaatatatgygagtatatttcaaatattttcacttttatctgtttgaactgaaacctgttaattcaatctactaccttgtactttttgaatttctgaaattttcttctaatcatctccctaccgccacctaacctgactccaatcaatttgctacaaaacatccagaataaatgtcatagcaatcacatacctattatgaaatatctcagtgattttccattgctcttataacaaacttcaaatttattaagtttattaaattatcctagtgatctggtcctttcagatagatatcatattctccagaagagcataaatcaatcaaaatattttctacccaacccaaggcacacaacgtattctaaagtctactctgtatctaattggtgctcagtaaaaagtt

SEQ ID NO: 556614 - DNA, 524 bp, Homo sapiens
ctcttttccaaaaataaactatgaaaaccatgtaacagccataggatatccttttgacagacaacaaatgagaatgtgtcattctctattgattacatcagtttttttccctgcagctacaattttgaaatctcagttcacagtgattgaaataagttttttttttgttctgatttatcttaataacaattttaaaaaagatgttggatatttggtcatattctattgttgccaattccagctttttaaataaatacttgaaatattttatggttaattatatcatttattagaaacaaacatgaaaattacactttttgcatattatttttcttgtgtacttattcargaaaattaagacagacataagaaaatctgaagaggacaaatttttggagatttttccaataactctaaaaacgtaagaataaaatcttcaaatgcatatgtttagtttttaaacaaataatttattttcttttgaaggactaaattagtaaacacaattaaacttataaattata

SEQ ID NO: 556615 - DNA, 595 bp, Homo sapiens
aaaatgaaacttacatagtgtttgttggaaggtaaactagtaaagccactatggaaaacaatgtggagatttctcaaaaaactaaaagtagaattaccatttgatccagcaattctactactggatatctacccaaaggaaaagaaatcagtatatcaaaggatacttgcattcacatgtttattgcagcactatttataatagcaaagatatggaatcaacctacgtgcccatcaatgggttaatgaataaagaaaatgtggtatatatacacaatagaatgctacttggccataagaaagaataaaatcatgccatttatrgcaacatgtatggaactggaggtcattatcttaagtgaaataagccaggcactaaaagacaaatatcacatgttctcacttttatgtgggagttaagaaaattcattatatggaggtagagagttgaaagacagataacagagactgtaaagggtgagtgggagatatggagaacaaggaagcaaactgagttaaagggtaaaactctcagtaagatagaaggattaaattcaatgtatgatagcagagtagggtgactatacctaacaaaa

SEQ ID NO: 556616 - DNA, 540 bp, Homo sapiens
tgctagaatctacattctccagttycgttctcctgttctatactgctgtaaaaataagacgtcttcctcctaaattcttataattgtcattgcccttatactgactaaatatcttagctacttgatcccccaatgcctgctgtcccagactaatttaggatcaagaagtaaaatagtcatcatggggatatatattgacaagtttatctgaattaaaaattaagtaattaaaaaagttaaaagtagatacataatgacattctttctcacataaaatatgtcttatttgcctaattgcttttgctaattaatttatatgcaggcatttcccatgaaccaaatgttcagctccaacattttccaaaatatatttcaagcacaagaaaacataaaagctcttaatccaaaatgtaatattttaaaaatgcattaaaattaacattattttattttttcccaataatctaagtctatcaaattaagccagatgtctttaaattaaaagtttccagaaaaaacataatagacatgtattagtct

SEQ ID NO: 556617 - DNA, 465 bp, Homo sapiens
tctctttaccctctttctgtatgcatctgtgatagaaaggaagggagcaaatacaatatctgaagagagaaaaggctggagttagtactctttgctttcaccagtcacctctgttagttttataatggatgcaagtgccaactggaaatttttccctttcttttctcccccaccctcacatggtacattctaaatactrcacttgtatttttcggttaagattgtgctcagtgctccgactctctttctcgccactaatatttatcatccgttggcatattgtttcgagtaaacataataacctctgtaaatgcaagttgctttactacaaagtggaaggtgttaatatcatgggtacagtaattctgcaggagaaaaaaaaaaacctgtagcttataatttggagtcatttggcacctctgggtctattcaggaaaagattgtttaaatgagacaataagagga

SEQ ID NO: 556618 - DNA, 564 bp, Homo sapiens
tattctgcttagaacactgggaaaaatcacaataattgttagttgtccatatttacaaatcaatcctaggtctttaggatagcttctcaaaatactcatgactttctcagatttgtagggttcacctaaccaaaacaaaagtaatagtaattctaagtgtgtatagaaaatacaataatacaataagtattatctacatacctagacagccaaagcagtttcccttgactcatattagttttcagtggttgccttataaactattgcaaatgtaatggtttaaaatagcatacatttatctcacaatttgtgtgattcaagagtctaggcatgrcttagatgtttcctctgcttagggactcataaggagaatcagagtcattcaatccctgttttcatctggttgcttgtattagtccattctcatgctgataggtaattcataaagcaaagaggtttagttgactcacagttctgcatgactagagaagcctcaggaaacttataatcatggtgctaggagaagcaaacatgtccttcttcacatgatggcaggaaagagaa

SEQ ID NO: 556619 - DNA, 473 bp, Homo sapiens
tattttctcttccttatgatttatataataacattttctcttctccatcttactgtrttgtaagaatgccatatattataaatattccatacaaaatatatgttaatcaactgtttatgttatcagtagggcttgtggctaacagtaggctattaataaagttttggagaagtcaaagttatacataaattttcaactgaatggaaggtctgcgaccccaaccccatgttgttcaatgatcaactataacttgattaactcttcttataggaatgaagattggaagtgtacctgtgtgtttagtgtgcaatgcttgatcagagaactaaaccttagatggcttacaaaccttcctaaacactaccagattcgtattctttttttatcctaccatttttttatccttacaatcctccccagttttaagttgccctttaaattgtccatatccaacattaataatgatgatgttg

SEQ ID NO: 556620 - DNA, 644 bp, Homo sapiens
tttacgttatcttgctctgtgtctcatccattttttcacttatgctgtttcatacctccctgtccctgaaaggctgagacctctgcctgaagggccctgagtcatctcgtctctccaggtactattcagacatcacctcctccatgaatccttctccttcagcttgtattagtcagcaggtatttactgaaagttcgttttgattgggcatggtggctcacgcttataatcccaacactttgggagtccaaggcgggcagatcacgaggtcaggagatcgaaaccatcctggccaacatggtgaaacccgtctctacttaaaaaaaagtacaaaaattagctgggcatggtggtgcatgcctgtagtcccagctacttgggaggctgaggcaggagaattgcttgaacccaggaggtgggggttgcagtgagcctagattgtgacactgcactccagcctggcaacagagtgagactccatctcaatgaaataaaataaaataaacaagaaagctcactttgtgtagggtactatggtatgttctcttggggaacacaaagaggtatgwgtcatgttcctggctttggagtgctgtcatcgagaggaggagcccaagacatatcccgagatatctaccggtgta

SEQ ID NO: 556621 - DNA, 573 bp, Homo sapiens
gctcaaatttttgcaccctttttatcaagtcgtttgccttatttacagtgatattggctttccttcaatagaatcttgttcatcaatagaaatgagtctggactgaaaattcattttcaaacttaaacakaagctagatggtataggagtaagatgtcaaaaagggaataacatattttaaaattcgaactaaaataagaacaaataacccaacaaaccataaatgttcttagctgtctcaggacaaaaaaataaaagacagggtagactataaaccgcatctgagttcagagtcaggactgacaataaggtttcccatttggggctccatggatccccagattaaaaaaactaattcaacgggcagactaagatcttatcagggacctgagggtatgtggttacttacagagcacctaaaagcagacacagaaggctgaaattggcatttccatgccagttttcccaggtgccaatccttgtgtcctctggtggccacctcttatctttgcatgattcttcctcaataggtgaaggaagcaacctccagccaacaatctcctgagagggctg

SEQ ID NO: 556622 - DNA, 610 bp, Homo sapiens
tttctatgaggttttcgatttactttgtccagatccgtcaaaggaatccccacctatggcagctatagcctcacaagatgtgtttttaaataagatgttaaactcgaaatgacttcttgacccatgggctatggaatggatgttgtgttagcaggcttgaaaacagcattaatctccttgtacatsttcatcaaacctcttgggtaaccaggtacattgtccatcagcagtaatattttgaaaggaatctttttttcttagaagtaggtctcaaaaatcagcttaaaatattcagaaagccatactgtaaatagatgtgctgttatctaggctttgttgtcccatttatagagcacagacagaatatgttaagtgtaatttttaggagcctaggattttcagaatgctaaataagcattacccccaacttaaagtcaccagctgcattagcccctaatgctcatggacaatgcgcctggttacctaagagctctgatggagatatacaaagagattaatgttgttttcacatctgctaatataacatccattccacaggctaagggtcaagaaagtcagcctgtcctttgaatttcaaagccaggcattg

SEQ ID NO: 556623 - DNA, 590 bp, Homo sapiens
aattaattaatctgttcaaaaaagatagtacacctggacctaaaaacccaagaggtcatttatgttgtgtgatattggaaacacaatgaaatccagtctttctcaaagcatctctctcctgaaccatcagacaaacatcctcatctgttgcctcaaatctgtacccttcaagttgcccctgattagataacacagcctgaaacattatgacccaatgatctccactaagtgtttatgttacctgaagcttttgctccatttcttttacataatcatattgattcaaattaagttgtcatggaactcttttggcattacctccaaagaccctgagactctgactctgaaggaatattcagagaatatcagaggcgctagaccaatgttacaatagccaactcttcttttttatagatgaaaaaactgaggcccgctcaaagaaattgtcttgttcaagaccagacraccaattaagaaaaaagtttagtacaggacttaaatcctttcagtttggtactctacataacagacagatttcagcaaaagaaatatactcaacagtactgagtgaggtgtctgcacgaagcaat

SEQ ID NO: 556624 - DNA, 655 bp, Homo sapiens
ttttgatttcaaaatactattctccagtaaatagaaccaaagctccctggagaaatggctggctctagggccaggaaaggaaaattataagatgagcctgaagcatcttgtagtacaagaaaataatgaagtcatcagaaaattagagaatggggtcatgtcaaaggcccacaggagccagctgggagcgctcttagtggtcaatgctggactttgagtaacaaaataaatattataatattgcattgaattataactcatagtgcaaaataaatataaaggagtcaaaaatatacaccamtgtctaaaataaatatgtatgagtccaccagagacataaataattgaataaataaataaacaagagagaaagacaatcttcttcacagaagaatttgaaataatatacatagatacttgccactccaagaggtataagcttattcatgctccaccccctcccttaccaatttgtgctggatttaaagacttctttccaaagactagatatcagaaaactgagaagtgtcacagaccaaagtacattaaagagacatgaccaatacatggaataaaatatcccagatgagagtctggaacaaaaaaatgacattagtggaaaacccaaataaatctggagcctagttaataataa

SEQ ID NO: 556625 - DNA, 582 bp, Homo sapiens
aaaaaaaaaaagattaaatctataaaaattttataaaagatttggaaagtacagaaaatatgttttatattttaattttttctattatttcataggggcttttttcatttaaactttatcttatcgtctctttatattgttctagtatttttagttctctggggactttttctcgtgtgttgtacgtacagacatcctctttctctctcatggtgatttctctcttcttgtggtttgtaattttttagtgtgagctcatctttggtagaattgggccccagtttatgaaagcagacccatagagtgcttttgcatccgtctcatctgaacttccygggattctgcattcatatgtatattaattaattcttgtttgggaatctcataccacatggggagtgtaaattaatatctcataaagtagcatagcagaggggtttcagtttctcctggtagatcttttcctctccactgaaagtctgtagaagacagtgaagttcttccactttcatactggaaggtcttttaaggattctagctctatgtaaagctctgcctgtctctcatggaagtcccaggggc

SEQ ID NO: 556626 - DNA, 614 bp, Homo sapiens
agtaggtaaaacagaaaactaggaggaggaagwgaagaaggagaaaagggaacatttctgtgcttaccttaagttaaataaaccttactaaatacttttcctgattattctcaaagcataccctgctttctctgcaatcagggtcttaccctcattgccagcaacctgagtcattgtctcattttcaattttgacctgcaagtatccgagagttgtgaaagttttgttgttcttaaactctttctgaccaggaaagagccaaaagggaccagggctcaaggtaaataaaccttaggtagacagagcagtgtcaggaagcctcagagaaaatcacacatccaaaaaatgccgtatctcactcatgacaatctttccagcccatatactcttgttcaatcccacgacagaatagaagtcattaaggcaaattgccactctttctccaaaagaaaatgcctctgtgggtgacaattattaaaaagtcagaaaacaataaatgctggtgaggctgtggagaaatagaaacacttttacactgttagtgggaatgtgaattagttcaaccattgtggaagacagtgtgccaattcctcaaagatctagaaccagagata

SEQ ID NO: 556627 - DNA, 555 bp, Homo sapiens
tttcatatttcaaaaactttgtttctttggaaaatcarccttgttggaggtagacgcaccttttcccaatacttttgaacatgcccactagtcttttctttttctggactttttcatctggcctgcttatataattagactacaaatcaatcagtacagctcttgattttctgcaatctttagcttcaggctctatgatgatataatgatctcaccacattctgcttaagccagacaattggatctgccatttaccttagtgtgccaggaggtgaacatgtactacatttcaggaaaaacagaccgatttgttcaggtgtgagcagtggtttcttaaccgccaaagcattccagttcaacaagatgttccaggaaaatataattttggaaccagttggttcagctctaggtaggagaggctgcttaattactctcaggtggtctccagcaagaacagtgtctcagcttcacagcaaccaaaacctgcctgcagataggcaggccttacccataaaccttcaaggataagagatggaaagtgaactgggccaggtc

SEQ ID NO: 556628 - DNA, 555 bp, Homo sapiens
tttcatatttcaaaaactttgtttctttggaaaatcaaccttgttggaggtagackcaccttttcccaatacttttgaacatgcccactagtcttttctttttctggactttttcatctggcctgcttatataattagactacaaatcaatcagtacagctcttgattttctgcaatctttagcttcaggctctatgatgatataatgatctcaccacattctgcttaagccagacaattggatctgccatttaccttagtgtgccaggaggtgaacatgtactacatttcaggaaaaacagaccgatttgttcaggtgtgagcagtggtttcttaaccgccaaagcattccagttcaacaagatgttccaggaaaatataattttggaaccagttggttcagctctaggtaggagaggctgcttaattactctcaggtggtctccagcaagaacagtgtctcagcttcacagcaaccaaaacctgcctgcagataggcaggccttacccataaaccttcaaggataagagatggaaagtgaactgggccaggtc

SEQ ID NO: 556629 - DNA, 555 bp, Homo sapiens
tttcatatttcaaaaactttgtttctttggaaaatcaaccttgttggaggtagacgcaccttttccmaatacttttgaacatgcccactagtcttttctttttctggactttttcatctggcctgcttatataattagactacaaatcaatcagtacagctcttgattttctgcaatctttagcttcaggctctatgatgatataatgatctcaccacattctgcttaagccagacaattggatctgccatttaccttagtgtgccaggaggtgaacatgtactacatttcaggaaaaacagaccgatttgttcaggtgtgagcagtggtttcttaaccgccaaagcattccagttcaacaagatgttccaggaaaatataattttggaaccagttggttcagctctaggtaggagaggctgcttaattactctcaggtggtctccagcaagaacagtgtctcagcttcacagcaaccaaaacctgcctgcagataggcaggccttacccataaaccttcaaggataagagatggaaagtgaactgggccaggtc

SEQ ID NO: 556630 - DNA, 558 bp, Homo sapiens
aaatattactttattttagacagtctccttctctgttatttggtttgacaatattttgctacattgataaatgtattaatctgctattaatttctttcttaacatattctttcctgtgtaktattttttttttttttggtcaataacagaaggttataactgcttgatttgctatttgatttaagtaataacatggaataaataagacaaagaaaaaatcaatagaattgtctggtccaagaggttgcttgttgcattctgccagaaatatatggatcaaatattcaatttatttattcgtttaatttattgattcaattactcattgccttcattgtggaaatagcagataaaacatggtcttacaccttggtaatggtaaagtataggaaacatatggaatcctatcttggaatccagtacccaataataattttttaaaggacttaatttttagatgaacatgttgttaaatagtgaccagatatggccccaaatttaaaacataattataggccaggcatgatggctcatgcctgtaatcccagcactttagga

SEQ ID NO: 556631 - DNA, 538 bp, Homo sapiens
ttattatacccattagacatttacaatgattaaagaaatacttattcatcaaaagcagtgaccattgcctagtgaaactctcatggattatatttcacttaaaatgtacatggtggccttttttagtggccttttttatcctttctccaggatctgcatacatggagtgtcatattttccatctggtgttttattgtcactcttctttaactccaattctgccttttctttcttcagaacagtaatatgtacaaaatattgccagtatcaaaaccctaagggtgagcaggattgggggraaaaaatctcaactaagcaaataattaacttcttaaataaaataagatttataatgtcaaaaaagatcccttatcatatataattttagagtaggtagttagatttttatttatcaaaaatgtataatatatgtgaatttggtgatacccatgcttgccattctcacattttcatagcatttttaaattgtattttcttttaaatttatttttatttttttattgtactttaagttctg

SEQ ID NO: 556632 - DNA, 581 bp, Homo sapiens
gattttatctactgtatgctttttaatcaatattctacaatttttttttttagattttggcatgaatttactcttgtttatctggctctttgggatagataacagatgaatttaatgctttatttctaaataacagatgaatataatgctatacattttcttcttaacattgttttaattaaatctcagaagttttgtttctatatatcttgaatattatcccatgaaaaatatattcattgcttttctttaattcatgcatttacagagacactgtaaaagaaagagaagaaaatacttttttaaacctttattttaagtatagcaatacatgygcaggtttgttacatgggtaatcttgtgtcatcagggtttgttgtatagattattttatcaaccaggtctcaagcctagcacccattagttatttttcctgatcctctccctcttctaatcccccaccctcctataggtcccagcgtgtgttgttcccctctatgtgtccatatgttctcattatttagctcccacttataagtgagaacatgcactatttggttttctgttcctgtgttagtttg

SEQ ID NO: 556633 - DNA, 573 bp, Homo sapiens
tttattttgagggctgaggaaccacaaagaagtttatgttttatgttaaagtcagtatgaaaaacaatggaaagaaatgagattagakagacaaagaaggccagatcataaatgaagccttattagcataggttttgcttggtgaaatgcattgagttgagcatgctagtctgaggctatttcacacataatgaatttaaataacttgccccaaatttcagaaatgaaaataattattccctttctagtcaatatagctctagagtctaactattaagcccgaactgtcttacttttctataaatatgagttggaaaagaggaatccaatttgtttttcttctttatgactatcttagaaaaaacactttatcacgaataaagtgaatatatttggttagatacatctatgttcgttgatcttcatgcagaaaagaaaacagagtaaaatttcgtatagtctgagaattggcaagactaagagttaaaatatgggatgttcaagagacaaagaggaaccagtgagattcaataggagatgagtacgtcggttttgtttttgactaacccgttg

SEQ ID NO: 556634 - DNA, 477 bp, Homo sapiens
cctgccagaaggaagaaactctggaaatatctgaaggatcaaactctggacataacagctttaagtactgtaacagtcaccagtaaggtctgcaacttcattcttgaagtgagcaagaccatgaacctgccagaaggaagaaacactggacacatctgaaggaacaaattgtggacataacaactttaaatgctgtaacactcaccacaaaagtctgcagcttcattcttgaagtgagcaagaccatgaacctgccagaaggaagaaacactggacacatctgaaggaacaaactctggacataacacctttaagtgctgtaacactcaccagtaaggtctgcagcttcattaaggaagtgagcaagaacacgaacctgcaagaaggaagaaactctggrcacatctgaaggaacaaacactggacataacacctataagtgctgtaacactcaacactaaagtctgcagcttcatt

SEQ ID NO: 556635 - DNA, 477 bp, Homo sapiens
cctgccagaaggaagaaactctggaaatatctgaaggatcaaactctggacataacagctttaagtactgtaacagtcaccagtaaggtctgcaacttcattcttgaagtgagcaagaccatgaacctgccagaaggaagaaacactggacacatctgaaggaacaaattgtggacataacaactttaaatgctgtaacactcaccacaaaagtctgcagcttcattcttgaagtgagcaagaccatgaacctgccagaaggaagaaacactggacacatctgaaggaacaaactctggacataacacctttaagtgctgtaacactcaccagtaaggtctgcagcttcattaaggaagtgagcaagamcacgaacctgcaagaaggaagaaactctgggcacatctgaaggaacaaacactggacataacacctataagtgctgtaacactcaacactaaagtctgcagcttcatt

SEQ ID NO: 556636 - DNA, 477 bp, Homo sapiens
cctgccagaaggaagaaactctggaaatatctgaaggatcaaactctggacataacagctttaagtactgtaacagtcaccagtaaggtctgcaacttcattcttgaagtgagcaagaccatgaacctgccagaaggaagaaacacyggacacatctgaaggaacaaattgtggacataacaactttaaatgctgtaacactcaccacaaaagtctgcagcttcattcttgaagtgagcaagaccatgaacctgccagaaggaagaaacactggacacatctgaaggaacaaactctggacataacacctttaagtgctgtaacactcaccagtaaggtctgcagcttcattaaggaagtgagcaagaacacgaacctgcaagaaggaagaaactctgggcacatctgaaggaacaaacactggacataacacctataagtgctgtaacactcaacactaaagtctgcagcttcatt

SEQ ID NO: 556637 - DNA, 477 bp, Homo sapiens
cctgccagaaggaagaaactctggaaatatctgaaggatcaaactctggacataacagctttaagtactgtaacagtcaccagtaaggtctgcaacttcattcttgaagtgagcaagaccatgaacctgccagaaggaagaaacmctggacacatctgaaggaacaaattgtggacataacaactttaaatgctgtaacactcaccacaaaagtctgcagcttcattcttgaagtgagcaagaccatgaacctgccagaaggaagaaacactggacacatctgaaggaacaaactctggacataacacctttaagtgctgtaacactcaccagtaaggtctgcagcttcattaaggaagtgagcaagaacacgaacctgcaagaaggaagaaactctgggcacatctgaaggaacaaacactggacataacacctataagtgctgtaacactcaacactaaagtctgcagcttcatt

SEQ ID NO: 556638 - DNA, 461 bp, Homo sapiens
  misc_feature 81: n = A,T,C or G
agtttcttccttctggcaggttcgtgrtcttgctcacttctttaatgaagctgcagaccttactggtgagtgttacagcanctacaggtgttatgtccagagttgttcctcaggatgtgtccagagttcttctttctggcagtgtcgtggtcttactcacttcaagaatgaagctgcagacattactggtgagtgttacagcacttaaatgtgttatgtccagagtttgttccctcagatgtgtccagagtgtcttccttctggcaggttcatggtcttgctcacttcactaatgaagctgcaggccttactggggagtgttacagtacttaaaggtgttttgtccagagtttgttccttcagatgtgtccagagtttcttccttctagcaggttcattgtcttgctcatttcaagaattatgctgcagaccttagttctgagtgttatagcacttaaagg

SEQ ID NO: 556639 - DNA, 461 bp, Homo sapiens
  misc_feature 81: n = A,T,C or G
agtttcttccttctggcaggttcgtgatcttgctcacttctttaatgaagctgcagaccttamtggtgagtgttacagcanctacaggtgttatgtccagagttgttcctcaggatgtgtccagagttcttctttctggcagtgtcgtggtcttactcacttcaagaatgaagctgcagacattactggtgagtgttacagcacttaaatgtgttatgtccagagtttgttccctcagatgtgtccagagtgtcttccttctggcaggttcatggtcttgctcacttcactaatgaagctgcaggccttactggggagtgttacagtacttaaaggtgttttgtccagagtttgttccttcagatgtgtccagagtttcttccttctagcaggttcattgtcttgctcatttcaagaattatgctgcagaccttagttctgagtgttatagcacttaaagg

SEQ ID NO: 556640 - DNA, 461 bp, Homo sapiens
  misc_feature 81: n = A,T,C or G
agtttcttccttctggcaggttcgtgatcttgctcacttctttaatgaagctgcagaccttactggtgagtgttacagcanctacaggtgttatgtccagagttgttcctcaggatgtgtccagagttcttctttctggcagtgtcgtggtcttmctcacttcaagaatgaagctgcagacattactggtgagtgttacagcacttaaatgtgttatgtccagagtttgttccctcagatgtgtccagagtgtcttccttctggcaggttcatggtcttgctcacttcactaatgaagctgcaggccttactggggagtgttacagtacttaaaggtgttttgtccagagtttgttccttcagatgtgtccagagtttcttccttctagcaggttcattgtcttgctcatttcaagaattatgctgcagaccttagttctgagtgttatagcacttaaagg

SEQ ID NO: 556641 - DNA, 365 bp, Homo sapiens
cattcttgaagtgagcaagaccatgtacctgccagaagacagaaaccctggacacatctgaaggaacaaactctggacataacacctttaagtgctgtaacactcaccagtaaggtctgcagcttcattagtgaagtgagcaagaccatgaacctgccagaakgaagacactcaggacacatctgaaggaaaaaaactctggacataacacctttaagtgctgtaacactcaccattaaggtctgcagcttcattaaggaagtgagccagaccacgaacctgcaagaaggaagaaactctggacacatctgaaggaacaaacactggacataacacctttaagtgctgtaacactcaccactaag

SEQ ID NO: 556642 - DNA, 365 bp, Homo sapiens
cattcttgaagtgagcaagaccatgtacctgccagaagacagaaaccctggacacatctgaaggaacaaactctggacataacacctttaagtgctgtaacactcaccagtaaggtctgcagcttcattagtgaagtgagcaagaccatgaacctgccagaaggaagacactcaggacacatctgaaggaaaaaaactctggacataacaccttyaagtgctgtaacactcaccattaaggtctgcagcttcattaaggaagtgagccagaccacgaacctgcaagaaggaagaaactctggacacatctgaaggaacaaacactggacataacacctttaagtgctgtaacactcaccactaag

SEQ ID NO: 556643 - DNA, 527 bp, Homo sapiens
ttcctcttttcttttttctttttgtgtaaaagctaaactgcttaattagatgtctctactttgtaatactagggacttcaaggagcaacgttcgttcctctgtcctgacattaccttggtctctgtccatctgccttcatctctagataacgaaaaaaagccctagttagtctacctgacccattctcttccccttccaatccatctagcattttgctgccttttttttgtttttttttttgagayggagtctcactctgtcgcccaggctggagtgcagtggtatgatctcagctcactgcaacctccacctcccgggttcaagcgagtctcctgcctcagcctcctgagtagctgggatcacaggcacacaccaccatgcccggctaatttttgtatttttagtagaaacagggtttcaccatgttggccaggctggtcttgaactcctgacctcaggtgatccacccgccttggcctcacctggccaaggtgctgggattacaggcttgagccactgcacccgg

SEQ ID NO: 556644 - DNA, 565 bp, Homo sapiens
gaggtctgggtttggtgccaacccagttagggggcagattccctggagaaagaggagatgatgatgtgaagaacttgtaaagtctctaaatgtagactagtaccggctcaaatggaacgaaaccaccctggaactcaggggtcaagggtgaaagaatataatgtgtatctgcaagggtcgatccacccttgcccatcctgtggagctcagagattcttgggagctgaaggtcttcttaatgtcagatcagcaacccctgtgaggtggttggaagagaggagtctcgtggacacaagaccaagggtgtctgggtcccatttcagggggcgggagtggacctagggatttggtgtctyagcccactttgggggtggtggagacaggctttgtttcaccattgtccatcttgtggccgtctgaccccagagcagctgacaccacaggcttcctctgggaatagcaggcaccaaggaggtgtcactgcccggagtgtcctggtttccacctactcagcagtgagagcacttggggaaaatttcaaatgggtcctctgtgacacacacag

SEQ ID NO: 556645 - DNA, 544 bp, Homo sapiens
ggacaagtggttattgggatgatattgcttttcccacttctgtgttagtaatcaaaagcaggacttggcctttccagagagcaattttgcaatttggctgtactggaacggagaattccacggagtccattgatacattctcttgtaaaytctctcagccaacattttttggaggttattttctttaattaaaaagaaaaactgttcctattaaaaatataaaaccaaaagagatttcccccttcctcttggagctctgacagcaaaatattggaactaaatagatctaaatagaattgtcggcaagttttgacaacttttataatgttttattgttattataatttttcttctttttctttttttcttttttttttccattacgtagcttgaaccacaaagcaagagctgtaaagctaattccattcccttcagcctcctggccccagggggagattctgactggtgcggctgctcggatggctccagctttggttctgagatggcacagggaagctgggctaggagacccctgggtgtcctg

SEQ ID NO: 556646 - DNA, 544 bp, Homo sapiens
ggacaagtggttattgggatgatattgcttttcccacttctgtgttagtaatcaaaagcaggacttggcctttccagagagcaattttgcaatttggctgtactggaacggagaattccacggagtccattgatacattctcttgtaaactctctcagccaacattttttggaggttattttctttaattaaaaagaaaaactgttcctattaaaaatataaaaccaaaagagatttcccccttcctcttggagctctgacagcaaaatattggaactaaatagatctaaatagaattgycggcaagttttgacaacttttataatgttttattgttattataatttttcttctttttctttttttcttttttttttccattacgtagcttgaaccacaaagcaagagctgtaaagctaattccattcccttcagcctcctggccccagggggagattctgactggtgcggctgctcggatggctccagctttggttctgagatggcacagggaagctgggctaggagacccctgggtgtcctg

SEQ ID NO: 556647 - DNA, 599 bp, Homo sapiens
aaaactgttcctattaaaaatataaaaccaaaagagatttcccccttcctcttggagctctgacagcaaaatattggaactaaatagatctaaatagaattgtcggcaagttttgacaacttttataatgttttattgttattataatttttcttctttttctttttttcttttttttttccattacgtagcttgaaccacaaagcaagagctgtaaagctaattccattcccttcagcctcctggccccagggggagattctgactggtgcggctgctcggatggctccagctttggttctgagatggcacagggaagctgggctaggagacccctgggtgtcctgagggtgtctgtagactcatggaaacttggcagatgctctgtgttcctgcctggccactctggtgtgctttcacatgacaaacaaaggcagggacatagggtggagrtgttcacacacttgagggggtagaagtagaaagagtcttgtaccccaaaaccctgctcccctaaaagcatattgtgttctaaaaattgaaagacatcattaggatacaatgcaaaagttatgaggaaatgattggattagaattct

SEQ ID NO: 556648 - DNA, 503 bp, Homo sapiens
agtgacaagttgcttaacctttccaagcctcatttttaaaaatctgtaaatatgggctcagggtacgacttgtctcataggcttggtgcagagatgtcaaaaaatcatacacatcatatgttatctcagggttgactcagaaagtagtagctgttttgctctaaaagacacyaattttaatctacaaagtggcctgttgaacctcacagcctcagtggtcaacacaagcctttgtgaatccagtgcccagtgcctagccctttaggaaaaaataactcgctaacaaccaatgggaatggatgctttggtagctttttctggagctggggttacatgaggaaagtaacatagtttgactatttgacatttaccaatcttgcgttttaaaggagggaagagctgtcattggtatttacatggggctaggagctgacctggatgaggcctgacttccagacttacctgaagccaatccaaactccttgaatctcaaaggcctgaac

SEQ ID NO: 556649 - DNA, 564 bp, Homo sapiens
aatcactaggggattgtagcacactgatgcccaggccggagcctcggagttctgattcaactctgctagggacaggccttggcatccatattttataaaggactcctccctcccccacataaacacacaccccttggtaattaatatgcagctagggttgaataaactaggatttatctacctttaggaatgctatgccttagtaaaaaagaatgagtttgttctgtatggacctatatggcatcgttgaacaaaagaaaccaggtatagcatcacatgttcaagatagtgctattaaaaaagaaagaaaaacaaagcaaatcaacacactccaactgaaaagtctacatattaatatatacacatgcaaaataagcctatctattgaatgaggtacagagaaagtcaggcataaaagaagttttggaaagagacggatattccaaaatgctatcaatgkttacttcttgggagacaatgagaagaccaaggtgaggtggggcccatatgcccttatctgtaggattaagcaagaagaacctattcatgtattaattgtataat

SEQ ID NO: 556650 - DNA, 648 bp, Homo sapiens
atgggaagtgggggaggtagggatagacttaggtgaacacctgtcaatatrgctgatttatgtcatggtataggaaagttgtgaaggctgctctgaggaagtattctttaagctgcaattaggaagataagtaggaattaactagaaaaataagggccagttgttctccaggtagaggggacagcatgtgcaaaggccctgaggtgggactgagctaaatcaattctaggaacaggaagaggtcagtgtggctggagcacaggatgctgggagagcagaggtggtgagggccagtgaggttggcagagactggatcacacagatccttggaaacaggttgaaggaatttcctctctactcttcagaacatggaaaacaacgtcaggggtttcagcaagggagcattttggcaagttcacagtggtctccatcaggagggaacatggaagattttagtacagcaagtacaaatgtggggacaaaaggaagggccctgaacccaggcaggatgagctagaggtcaggatttcctgtctcttcatgctcatccccatccaatcaatatctccaattcctccctgcctccattccctcaaacacagccactcagtactcaagggttctgtttctgccctgttttctcacatg

SEQ ID NO: 556651 - DNA, 648 bp, Homo sapiens
atgggaagtgggggaggtagggatagacttaggtgaacacctgtcaatatagctgatttatgtcatggtataggaaagttgtgaaggctgctctgaggaagtattctttaagctgcaattaggaagataagtaggaattaactagaaaaataagggccagttgttctccaggtagaggggacagcatgtgcaaaggccctgaggtgggactgagctaaatcaattctaggaacaggaagaggtcagtgtggctggagcacaggrtgctgggagagcagaggtggtgagggccagtgaggttggcagagactggatcacacagatccttggaaacaggttgaaggaatttcctctctactcttcagaacatggaaaacaacgtcaggggtttcagcaagggagcattttggcaagttcacagtggtctccatcaggagggaacatggaagattttagtacagcaagtacaaatgtggggacaaaaggaagggccctgaacccaggcaggatgagctagaggtcaggatttcctgtctcttcatgctcatccccatccaatcaatatctccaattcctccctgcctccattccctcaaacacagccactcagtactcaagggttctgtttctgccctgttttctcacatg

SEQ ID NO: 556652 - DNA, 648 bp, Homo sapiens
atgggaagtgggggaggtagggatagacttaggtgaacacctgtcaatatagctgatttatgtcatggtataggaaagttgtgaaggctgctctgaggaagtattctttaagctgcaattaggaagataagtaggaattaactagaaaaataagggccagttgttctccaggtagaggggacagcatgtgcaaaggccctgaggtgggactgagctaaatcaattctaggaacaggaagaggtcagtgtggctggagcacaggawgctgggagagcagaggtggtgagggccagtgaggttggcagagactggatcacacagatccttggaaacaggttgaaggaatttcctctctactcttcagaacatggaaaacaacgtcaggggtttcagcaagggagcattttggcaagttcacagtggtctccatcaggagggaacatggaagattttagtacagcaagtacaaatgtggggacaaaaggaagggccctgaacccaggcaggatgagctagaggtcaggatttcctgtctcttcatgctcatccccatccaatcaatatctccaattcctccctgcctccattccctcaaacacagccactcagtactcaagggttctgtttctgccctgttttctcacatg

SEQ ID NO: 556653 - DNA, 605 bp, Homo sapiens
ttgggtacaaacagatataaagttaggaacaatagacactggagagaattagggagggggacaagggctgagaaaacttcctgttgggtaccatgtttgctgtctgggtaatrggatcaatagaagcccaaacctcagtatcatgcaatatacccttataacaaaccttcacatgtaccctctgaatctaaaattaaaattaaaaaaagaaaaagtctgtatctttgacgaaattattgagcagctgcaaaagctctggaggttttaatcttgttaatgatattttaatatacattttactattgctatatttatttgtcttttcactgcacgtgaacacatcctgaaagatagggcatgacagggagaatggggagctcagacactgtttcattggatgctcatattggacagaggaggaaaccaaggctcagagaggggaaggggctggcacaggtcacacagtaaatcactgacagagaaaacttctgcctccttggtctcaatgggaacgtagcatatcccaggctggtactcttgtttgtgctaccataggaaggtgacaacggataacaggaacattaaaaaaatgtgcatacccactc

SEQ ID NO: 556654 - DNA, 603 bp, Homo sapiens
acagccacataattagacagggacttgagaatctyggccttccagggaatatggagtccactactcagaaagggaaaaacaccaggctgctgcactagggctccataagagcgggagctctgttattgtttactgagctatccccagtacctagtagtggagctggcatggagtatgtgctcaataaatacgtatagtctggactgagccctctcttacgcagtctcccctttaaccctcaaaatgaacctgtgaagtaggtagatttcctgagtctctttttgcaaataataaaagagaaacttaaaggggtagataatagagccaggcttcacatactggtctgttagattgcaaagctcttgttcgggctattctccataagaatgctcaccttagacttttctgcatagaaagaaatgtgggctcaaggacagaaatagaaatggagctgtcatagtccaagttttagagcctaagccctcaatttgcagaggaaaaggggtagagggtgggaaagagagaggaatgaaatcattcatttaaaaaatttctttattcagcaaacattaaaaaataccacatgtaaaacactaaaccatt

SEQ ID NO: 556655 - DNA, 603 bp, Homo sapiens
acagccacataattagacagggacttgagaatcttggccttccagggaatatggagtccactactcagaaagggaaaaacaccaggctgctgcactagggctccataagagcgggagctctgttattgtttactgagctatccccagtacctagtagtggagctggcatggagtatgtgctcaataaatacgtatagtctggactgagccctctcttacrcagtctcccctttaaccctcaaaatgaacctgtgaagtaggtagatttcctgagtctctttttgcaaataataaaagagaaacttaaaggggtagataatagagccaggcttcacatactggtctgttagattgcaaagctcttgttcgggctattctccataagaatgctcaccttagacttttctgcatagaaagaaatgtgggctcaaggacagaaatagaaatggagctgtcatagtccaagttttagagcctaagccctcaatttgcagaggaaaaggggtagagggtgggaaagagagaggaatgaaatcattcatttaaaaaatttctttattcagcaaacattaaaaaataccacatgtaaaacactaaaccatt

SEQ ID NO: 556656 - DNA, 603 bp, Homo sapiens
acagccacataattagacagggacttgagaatcttggccttccagggaatatggagtccactactcagaaagggaaaaacaccaggctgctgcactagggctccataagagcgggagctctgttattgtttactgagctatccccagtacctagtagtggagctggcatggagtatgtgctcaataaatacgtatagtctggactgagccctctcttacgcagtctcccctttaaccctcaaaatgaacctgtgaagtaggtagatttcctgagtctctttttgcaaataataaaagagaaacttaaaggggtagataatagagccaggcttcacatactggtctgttagattgcaaagctcttgttygggctattctccataagaatgctcaccttagacttttctgcatagaaagaaatgtgggctcaaggacagaaatagaaatggagctgtcatagtccaagttttagagcctaagccctcaatttgcagaggaaaaggggtagagggtgggaaagagagaggaatgaaatcattcatttaaaaaatttctttattcagcaaacattaaaaaataccacatgtaaaacactaaaccatt

SEQ ID NO: 556657 - DNA, 626 bp, Homo sapiens
gaactcacctaatcctcacacctgtgaaatagttgctattgctatcctcattttccagataagaaacatacagttaagtaattagcccaaggtcactttctcagctgatggatttttatatttttttcataaccattacagatggccgggcgcggtggctcatgcctgtaatcccagcactttgggaggccaaagcaggtggatcacgaggtcaggaaatcgagaccatcctggctaccatggtgaaaccccatctctactaaaaatacaaaaaaattagccgggtgaggtggcaggtgcctgtagtcacagctacttggaaggctgaggcaggagagtggcgtgaacctgggaggcagagctcgcagtgagccgagattgcgccactgcactccagcctgggtaacagagcgagactcygtctccaaaaaaaaaattaaattaaattaaatttaaaaaccattacagacaatacagcaaacatctttgtatctgcttcttcacatacgccatttatttttatatgtgaaaggtttattttgagtagaattgctgggactttgagtatgcacactgctaactttgctaaatattttcaatgtcaacatctgcatgtgtggtttggg

SEQ ID NO: 556658 - DNA, 444 bp, Homo sapiens
catcattaaatagtggcacagcaaacccacttgggaaagtctggaccccactatccttctccccatctcttctcacctccctcctgattcctcaaattctcctggcaaacattgcatggggcagcctccctctcacaaaggcaaagggcagggaaattaaacagagaggcaagaaggccaaggagggtggcctgagtcacgtttccctggtgtctgcagccctggcggagagggcattgggcaaatgatcaaytagggacacggggagatgggacagagccttctagataagcatgggttttatcagcctataaaaagtaccactttcacttatctgctggctccttctccaggctcctgggaagagatggaaaggtagccaaaagaaaggcccaggggacggggaggggtaatcggtgatgggggccacttggggcagaagga

SEQ ID NO: 556659 - DNA, 332 bp, Homo sapiens
aagtactcgtgccttatatttgtgtgccaattaatgcctaataaataccatgtgcttaaacaagtacaaggaagttgaacacccattttttttttttcctgttctttctaccgactgaatagaggggataggaattggaggaaacaggaagaggttgtcttgcatgtgaatttctcacctcacgtgatttctcatgcccatcgcaggagaatttgggatccattgtccttgagtgtgatgaagctgaatatatgatccactggtttatatccytggaatgaggttacttgttttaatggaatttgtgtaggcactggagaagaaaagtcttt

SEQ ID NO: 556660 - DNA, 489 bp, Homo sapiens
attacaagttattcatttaatcaggtcccctgggacctttcccaggcaaagaagccctgagaagtgtgaattaattataaagaaatgacaattcagcttctttcaagtgcaatggagaaactaggtcaatggctttcctgttcccccaaaggactgcattagtaaagtttcactgaacaggttctgactgtgctccaaatagatatttattctgatgggttcagtttwaaaaaaaaaaaagttgcctttgaagacattgcctttgaaactaattttatcaactctatacaacagtcagtcttatgctttcagaggaacatcatccaaattaggaatctgcatccccaccccaccactcaaacagttgccaccattggaaaatcattaaaaatatgttcacagcaagtttcacaaatcagacaagggacactgtcatttcataaccaatacaggttaacctctttgggttctaaatgattgttatagtgg

SEQ ID NO: 556661 - DNA, 481 bp, Homo sapiens
ctcttttataaccacatacaacccctgcaaccctatttctaaccccagacaaccactaattaatctgttcatttctataattttatccaagaatgttatataaatagaactatagagaatgttatataaatgacaagaatrttatataaataggactatttcaagaatgttacataaatagaactatacagtatataagttttgggcggttggctttttttcattcagcataattccctttagattcatccaaggcattgggtgtattaatagctcattcattttttttttaaatcactgagtagtattccatggtataaatgtaccttctggctgtctcctcacatggtctcttctctgtgggcacatgagggtgggaaggagagagagacagagagagagagaagagagagagagagatctggcatctctccctctttctgtaagattagggaaccctcttatgacctcacttgacctt

SEQ ID NO: 556662 - DNA, 533 bp, Homo sapiens
agatcttggcttgaaggatcaaaggtttacaaaaataggttttcaggagatttccattagttcttgaaacaccaaagcccgagtttccatcccattgcactgaggctgcccttttcagaggtggggaagggagaagaccaatgacttcactcaatcttttcttcccctttgccatcaactataatggggtgtggagcagaagacccggagtgctcccaaagccctgtttattttgggctgattacatgctaagcattttatatgattatcatgcataggtctcaaractgcctttaagctttttggaagtcagagccagagggagacctactcagttaaaggattcccaatatagccctgtgaggtgtgtaggaaaatattcttatccctgttttatggatgaggaaatggaagcttacagggttgtcacttacctaaggtctcattcttgggatagacaaacactttcactttcttcattcaccatactagatacattttgtaatgtgccaaactacaaagccgaacaaccc

SEQ ID NO: 556663 - DNA, 533 bp, Homo sapiens
agatcttggcttgaaggatcaaaggtttacaaaaataggttttcaggagatttccattagttcttgaaacaccaaagcccgagtttccatcccattgcactgaggctgcccttttcagaggtggggaagggagaagaccaatgacttcactcaatcttttcttcccctttgccatcaactataatggggtgtggagcagaagacccggagtgctcccaaagccctgtttattttgggctgattacatgctaagcattttatatgattatcatgcataggtctcaaaactgcctttragctttttggaagtcagagccagagggagacctactcagttaaaggattcccaatatagccctgtgaggtgtgtaggaaaatattcttatccctgttttatggatgaggaaatggaagcttacagggttgtcacttacctaaggtctcattcttgggatagacaaacactttcactttcttcattcaccatactagatacattttgtaatgtgccaaactacaaagccgaacaaccc

SEQ ID NO: 556664 - DNA, 671 bp, Homo sapiens
gtgtctccacgggtactttgccatcctaaaggttaaacatctagtaattaaggatagagctaagctgaacctttcatcttttcaagccactggtagcctgcaaactcaagttgtggtcttcaactagtttagcattgcccttgaagagtaaccatagccaggagtcctaatcaagtgcactgtggaagccagtttctgggtgaattgtggactggtgatgagcttgtttagagctaataatcgattagatctgatacttagcatcagatcaagaaccaacrgcccatgtgttacttttaacctctaactggctgtctgaccttgaaccagtggcaactcctgtctgggcctcagtttccctttgggaagagacatttctgaagtgtgtacatgtgtgtactgtctttcacagccaagagccttaagggtacatgtaaggaaagaacacgtcatcttgtttttttttgttgtttgtttgtttttgagacagggtctcactctgttgcccaggttggagtacagtggcacattcacagctcactgcagcctcaacctcctgggctccagtgatcttcccacctcagccttcccagtagctagtactacaggcatataccaccaagcctaggtaattatttttaatttttaaattttttgttgaggtggaagtc

SEQ ID NO: 556665 - DNA, 545 bp, Homo sapiens
cttcttctactttataaagatcttccaactctacatcttaccaaacgccaacaacccacttagttcataatagaacttctctctgcaagatgaggaggctgggtccagagaggttaagcaagcggcccaggaatgcacagtagtggaaagcctggacctaaactcaagacttcagactaaatttctgtcattttcgactataccacaaacaatttcttacaacaggttctcccaccccaagacaaggcaccccaatacgcatgctagcatcgcggtgggatggagcccacgccaagcctgagccaggagtcccaggtcgagctgtgggaaagagaaaatgcggatcggaggtcaggtgcacccttaccggcaacttggrgtacacaaccggggtcccagcatcacctcccctcgccccgcgctcatgtccccactctgaggcccgtgggcactgaggtggcaccgacctcccaggacccctgcattgcctcacactttcacttccctccctgctccgcagtgtccataaaataccagccgttcac

SEQ ID NO: 556666 - DNA, 480 bp, Homo sapiens
aatgaaagccatataccttccctccccacttctcaatcctgccttaattttgggatgttccaggggagagggagagcccagctcacctgccccctcttttccagatgggaaatgaactcataagagaactatggtgccagtgccactttttagcttgatactcccggggagatctgttttttttccaacaaccagctttctccctttccacactgtgcccagagcaggcgaatgtaaaccagggtcctaaacttggagtctggattggacccaagagaggggactggtgaatttcctgaaactgaatgcagggtattgaatgtgcagcctgctcaccacmcaaaagaatgtgtaggttttagtggattcttagtagggtcatcacccctcttccccaaagaaaaacaaaacacaaaacactgatttttgaaaaaatgtccccaaatctcatcgtagaagataattaattactagaacaga

SEQ ID NO: 556667 - DNA, 520 bp, Homo sapiens
cccagggtcatcaatgcaaataatcaaagtcacagagacaacctccgcagttcccgggaaaaagcaggccagattttcaggctgttaaacgcggcgattcgcamgttcggtggggatgtgtcagagcgttctggtaaatactagcgtcatcagaacaacaaacccagttttattggtgaggatgctcatctgtgactagccctggctccagcaagaacgtgcagcctggaagtcctcctcctcctcctcttcctaatgataatggtggttgtaaaaattacagcacaactacagcagttaggacccctcttgtccctgggaacacccctaaatatggggaagataggaagtagaaagagaatattcccgaaaaagcagatgtagccgttctgtctggggccaagcgtggagataattctggttgtggatcctgaaacgtgataaagctggagaaagggagtttccaaggcaaccagccccttctttgaggggtgtgggtggtgcttcctccccacacctt

SEQ ID NO: 556668 - DNA, 520 bp, Homo sapiens
cccagggtcatcaatgcaaataatcaaagtcacagagacaacctccgcagttcccgggaaaaagcaggccagattttcaggctgttaaacgcggcgattcgcaagttcggtggggatgtgtcagagcgttctggtaaatactagcgtcatcagaacaacaaacccagttttattggtgaggatgctcatctgtgactagccctgkctccagcaagaacgtgcagcctggaagtcctcctcctcctcctcttcctaatgataatggtggttgtaaaaattacagcacaactacagcagttaggacccctcttgtccctgggaacacccctaaatatggggaagataggaagtagaaagagaatattcccgaaaaagcagatgtagccgttctgtctggggccaagcgtggagataattctggttgtggatcctgaaacgtgataaagctggagaaagggagtttccaaggcaaccagccccttctttgaggggtgtgggtggtgcttcctccccacacctt

SEQ ID NO: 556669 - DNA, 520 bp, Homo sapiens
cccagggtcatcaatgcaaataatcaaagtcacagagacaacctccgcagttcccgggaaaaagcaggccagattttcaggctgttaaacgcggcgattcgcaagttcggtggggatgtgtcagagcgttctggtaaatactagcgtcatcagaacaacaaacccagttttattggtgaggatgctcatctgtgactagccctggctccagcaagaacgtgcagcctggaagtcctcctcctcctcctcttcctaatgataatggtggytgtaaaaattacagcacaactacagcagttaggacccctcttgtccctgggaacacccctaaatatggggaagataggaagtagaaagagaatattcccgaaaaagcagatgtagccgttctgtctggggccaagcgtggagataattctggttgtggatcctgaaacgtgataaagctggagaaagggagtttccaaggcaaccagccccttctttgaggggtgtgggtggtgcttcctccccacacctt

SEQ ID NO: 556670 - DNA, 520 bp, Homo sapiens
cccagggtcatcaatgcaaataatcaaagtcacagagacaacctccgcagttcccgggaaaaagcaggccagattttcaggctgttaaacgcggcgattcgcaagttcggtggggatgtgtcagagcgttctggtaaatactagcgtcatcagaacaacaaacccagttttattggtgaggatgctcatctgtgactagccctggctccagcaagaacgtgcagcctggaagtcctcctcctcctcctcttcctaatgataatggtggttgtaaaaattacagcacaactacagcagttaggacccctcttgtccctgggaacacccctaaatatggggaagataggaagtagaaagagaatattcccgaaaaagcagatgtagccgttctgtctggggccaagcgtggagataattctggttgtggatcctgaaacgtgataaagctggagaaagggagtttccaaggcaaccagccccttctttgaggggtgtgggtrgtgcttcctccccacacctt

SEQ ID NO: 556671 - DNA, 301 bp, Homo sapiens
acattcttgggaaaggtttgccttgttaaaatgaaaacagagcaacctgcaccaccagcagcttgggataacactcccaagctggacttagacaaagagcctgcagaaccacagcttggtgaggggaggcagacctgcattgcttgggagaaggtggctgcagtttggtgtaggggcggkatgctgtcgcatggattgtgtgaaagtcagaccccatgaggttcaaaatccaggcactggttttggcatttcaaagcttgacaatgactttggagcaggctgcctatagcggcaggttgga

SEQ ID NO: 556672 - DNA, 607 bp, Homo sapiens
agcttcctgccctcggaaagaaaactcattcccctcaagacaccattcctttttaaatgggtaggaggatttttcygagtatccttccacctgttgaaccagcaagagcaaaaccgagggtcgaatgccctgaaagatgcaaaactatttcaggccaatttgagtctgtctccttgaaacctgtttccctcaatggctgctgtaaacctgtgtttagctttgcggtgacggtcacaggaaaaaaaaaatagcaataaggaagctcaattcttcctatatatgtatatacttacatgctctcagaccagactggggtccaaaaatatatgagatcttttccccctctaccccaagaaagcccaggttcatacaggaggataggaaagggtagacatataaaagtgaccggcttaaaaaaccatctgaattctcaggtcctttggaagaaacaccctaaattctgtgtagttatgttcttaagactcatcaggtgtggatagatgtgggaaaactcactccctctctccctctttctgttgacagccttattgaggcataattgtcatctaataaactgccatatttgaaacagacaactagataagct

SEQ ID NO: 556673 - DNA, 607 bp, Homo sapiens
agcttcctgccctcggaaagaaaactcattcccctcaagacaccattcctttttaaatgggtaggaggatttttccgagtatccttccacctgttgaaccagcaagagcaaaaccgagggtcgaatgccctgaaagatgcaaaactatttcaggccaatttgagtctgtctccttgaaacctgtttccctcaatggctgctgtaaacctgtgtttagctttgcggtgacggtcacaggaaaaaaaaaatagcaataaggaagctcaattcttcctatatatgtatatacttacatgctctcagaccagactggggtccaaaaatatatgagatcttttccccctctaccccaagaaagcccaggttcatacaggaggataggaaagggtagacatataaaagtgacckgcttaaaaaaccatctgaattctcaggtcctttggaagaaacaccctaaattctgtgtagttatgttcttaagactcatcaggtgtggatagatgtgggaaaactcactccctctctccctctttctgttgacagccttattgaggcataattgtcatctaataaactgccatatttgaaacagacaactagataagct

SEQ ID NO: 556674 - DNA, 607 bp, Homo sapiens
agcttcctgccctcggaaagaaaactcattcccctcaagacaccattcctttttaaatgggtaggaggatttttccgagtatccttccacctgttgaaccagcaagagcaaaaccgagggtcgaatgccctgaaagatgcaaaactatttcaggccaatttgagtctgtctccttgaaacctgtttccctcaatggctgctgtaaacctgtgtttagctttgcggtgacggtcacaggaaaaaaaaaatagcaataaggaagctcaattcttcctatatatgtatatacttacatgctctcagaccagactggggtccaaaaatatatgagatcttttccccctctaccccaagaaagcccaggttcatacaggaggataggaaagggtagacatataaaagtgaccggcttaaaaaaccatctgaatkctcaggtcctttggaagaaacaccctaaattctgtgtagttatgttcttaagactcatcaggtgtggatagatgtgggaaaactcactccctctctccctctttctgttgacagccttattgaggcataattgtcatctaataaactgccatatttgaaacagacaactagataagct

SEQ ID NO: 556675 - DNA, 590 bp, Homo sapiens
tatcaattcaaggactatttgtctagcgttttgccttggataaatgagcagggaaaagaaaagcaatgcatgtgattaaattgccaagacaatttggaaaaataagggccacmgtttttatggtcaaagggcccagtgccttcagaatgatctgtctctatttggatgtaggtaccaggtggaggtaggtaggctacatggttcatttcttaggctgcaatcacatacccatataccactgggcccctaatgacgagacacatttcctcagcccagctgtgatctcgggctggatttgggacttatttccccagatggttgacagcttaaaaaagatatttaaaaactcaaatcttccccagcgacgttcattctgtgaaacacgtttttgtaaagttttcactgcagttgtcagcagctcccagtgcaatccctagaaatatttaggtgttaaaaaaaggtcacgtgggcatttcatttccctgttcttgcaacaatggctgtgtatgcaagcaatgtctatccccagatattaacttaactttgccattaaaaggcattttcctcctgcttaaatcattgtgtaagga

SEQ ID NO: 556676 - DNA, 565 bp, Homo sapiens
acaaaacaaacaaaacaaaacagaaaacaggttcaagaagggaggacaagttctctcttctacctagaaggagtgtcaaggaawtcgtcgacgcattttaaaactgcctcagcaggcatggaagcacacagcacagtgtctggcccagagggacgctcgatcgctggtaggtgttaagacacggtccatgttctgttgaagccagatgccaggttgacttgcccaaggtcacacagtttggatgaaggggcctgcctggctgcaagcttgctttcttcaggatggagagaaccccctttccactaaactgggcttctgctcatcttcttgtaaccataaaccccagaatatgaacaagcaatagcaaagtccttcatctcggtatttcttagctcacctcacacagaatgaccatgagcaatgactggtcttttcaccataagaagtatttatggagcattatcaggggctaagtagatgatggattgggggacttggttggcctcagagttcttcatggaagaaatgaagctccctttacttccttgctctcttagtgtgctgc

SEQ ID NO: 556677 - DNA, 565 bp, Homo sapiens
acaaaacaaacaaaacaaaacagaaaacaggttcaagaagggaggacaagttctctcttctacctagaaggagtgtcaaggaattcrtcgacgcattttaaaactgcctcagcaggcatggaagcacacagcacagtgtctggcccagagggacgctcgatcgctggtaggtgttaagacacggtccatgttctgttgaagccagatgccaggttgacttgcccaaggtcacacagtttggatgaaggggcctgcctggctgcaagcttgctttcttcaggatggagagaaccccctttccactaaactgggcttctgctcatcttcttgtaaccataaaccccagaatatgaacaagcaatagcaaagtccttcatctcggtatttcttagctcacctcacacagaatgaccatgagcaatgactggtcttttcaccataagaagtatttatggagcattatcaggggctaagtagatgatggattgggggacttggttggcctcagagttcttcatggaagaaatgaagctccctttacttccttgctctcttagtgtgctgc

SEQ ID NO: 556678 - DNA, 640 bp, Homo sapiens
gaattctaaagctgccatacactgaactaaaagctgtctcttggtacctttcactagatggccatggctctgactttggaactgttcccttaaagcattggaaggctgtcatcaagaaggatcctgagtgtgtattcccagatcttgtccctcctctactcaaatcctgaatctcatcaggatgaacaaagggtttctaggccccctttctctgccctctcaccttgagcttcttcccgcaccatcctccttccccttccctgagggatctctgctacaggcacacttgcctctcccagctccagcayacaccctggggaaccacttttgccagccatctgggctgattgcaccttcactgcccccagactcaaataccacaacatcaggcaggactccccaccaccctgtgtaagccagtcagagcctcccaccccccaccagcattctcttaccccatcgtggtttattgttctccataacatgaatcgccccctaagaaattacatgtatgtttgcttccgatctcctgcactacacatgagttccatgggggccgaacgtttgtctacttgattcactgctacaacagcacccagaacacagtacctggcacaaagtgggtgcagtgctctgtatg

SEQ ID NO: 556679 - DNA, 640 bp, Homo sapiens
gaattctaaagctgccatacactgaactaaaagctgtctcttggtacctttcactagatggccatggctctgactttggaactgttcccttaaagcattggaaggctgtcatcaagaaggatcctgagtgtgtattcccagatcttgtccctcctctactcaaatcctgaatctcatcaggatgaacaaagggtttctaggccccctttctctgccctctcaccttgagcttcttcccgcaccatcctccttccccttccctgagggatctctgctacaggcacacttgcctctcccagctccagcacacaccctggggaaccacttttgccagccatctgggctgattgcaccttcactgcccccagactcaaataycacaacatcaggcaggactccccaccaccctgtgtaagccagtcagagcctcccaccccccaccagcattctcttaccccatcgtggtttattgttctccataacatgaatcgccccctaagaaattacatgtatgtttgcttccgatctcctgcactacacatgagttccatgggggccgaacgtttgtctacttgattcactgctacaacagcacccagaacacagtacctggcacaaagtgggtgcagtgctctgtatg

SEQ ID NO: 556680 - DNA, 550 bp, Homo sapiens
aaaatgaaactatcatttttcctgactagyttagtattggaggtaaatagataactgcttgagataccttttggtctaggacgttataattctgtgtggtacattatagttttaagcgttgtacgttgtggattatgcctgcagatttatacatattaggggcaaatagagcaccaaatatttaatgatattcttgtttgcttacattcctaaagaagaatgtaattacatgttcaaaccaacaagttaacttgatttacattttccttctcactcacaatttggttgctatctagatttttttttaaaattcaaccctatgcccaaatatatttcaatagttccttgagtcactaagacaaaagattaagggaaaaaagtacacctaatagaatactttgaatattgaccagcaaagattgtatagtattttctgacacttaaggttatagattacattttaaaaaaattaaaacaaaaaagacaatactgtggtgtcagatagatagtattctttatggtatctgaaaagcaagcttattttatattg

SEQ ID NO: 556681 - DNA, 558 bp, Homo sapiens
aaaatgaaactatcatttttcctgactagcttagtattggaggtaaatagataactgcttgagataccttttggtctaggacgttataattctgtgtggtacattatagttttaagcgttgtacgttgtggattatgcctgcagatttatacatattaggggcaaatagagcaccaaatatttaatgatattcttgtttgcttacattcctaaaraagaatgtaattacatgttcaaaccaacaagttaacttgatttacattttccttctcactcacaatttggttgctatctagatttttttttaaaattcaaccctatgcccaaatatatttcaatagttccttgagtcactaagacaaaagattaagggaaaaaagtacacctaatagaatactttgaatattgaccagcaaagattgtatagtattttctgacacttaaggttatagattacattttaaaaaaattaaaacaaaaaagacaatactgtggtgtcagatagatagtattctttatggtatctgaaaagcaagcttattttatattgaattcttg

SEQ ID NO: 556682 - DNA, 483 bp, Homo sapiens
gccttttctttcttgtttgattgcctttgctagtatttccagtactatgttgaatagaaatgggcatccctgccttgtactggatcttagtggaatagttttcatttgtttcctgttgattatgatgttagttgtatgtttttcatgagtgacctttattatgttgaggaacttttcttgtatgcttaaactgtgaagagtttttattgagaaagratatttaactttgtcaaaggctttgtctgcatccattgagatgatcatggggtttttaaatctttcattctgttaatgtggtgtatcacattgattttgtgtgtgttaaactagccatgcataccaggaataaatctcacttgttggtgatgtcatcaacaaaaataaaacacttaggaataaatttgaaggaggtaaaacatttgtacactaaaaacaataaaacgttgaaataaagaggatgcaaataaatggaaaataccctgt

SEQ ID NO: 556683 - DNA, 613 bp, Homo sapiens
tatacacaatgactttttaatgcttaartaatatatgcttttatgtttagagctctgtattattaaccattgtattttgctttttaacagtctcagttcgtggctcagaaattcttatttaaatatcatgaccctgggagagcccagcatatcaaatgtaatttgtgcttttaacgaagagttatttcccaatttgctgtattaaataagatgtatacctctttttccgggcattgcattatttctaagttactgtgaaagaaaagtatataatgccatgtgaacagggtatgtaaagtattttatccttcaaaggtatgttagcaaaaaaggaggggggcagggaacaaagctaaacacagatgagaatagctagtgatgcccttgattttgttgtgcgtgctctggatatctttctcctttgttcctcaaggggtgtctggcaccagctttgatctgctgccttcacagtggtatctggtcagtagaacaagtttcaaccatgtgttttgcttgactcctacttaatatggtattggcagcggtggttttgatactgtgagtgatgagaagaggtggtggtgctggagttggtcttgagaggaataaggaa

SEQ ID NO: 556684 - DNA, 613 bp, Homo sapiens
tatacacaatgactttttaatgcttaaataatatatgcttttatgtttagagctctgtattattaaccattgtattttgctttttaacagtctcagttcgtggctcagaaattcttatttaaatatcatgaccctgggagagcccagcatatcaaatgtaatttgtgcttttaacgaagagttatttcccaatttgctgtattaaataagatgtatacctctttttccgggcattgcattatttctaagttactgtgaaagaaargtatataatgccatgtgaacagggtatgtaaagtattttatccttcaaaggtatgttagcaaaaaaggaggggggcagggaacaaagctaaacacagatgagaatagctagtgatgcccttgattttgttgtgcgtgctctggatatctttctcctttgttcctcaaggggtgtctggcaccagctttgatctgctgccttcacagtggtatctggtcagtagaacaagtttcaaccatgtgttttgcttgactcctacttaatatggtattggcagcggtggttttgatactgtgagtgatgagaagaggtggtggtgctggagttggtcttgagaggaataaggaa

SEQ ID NO: 556685 - DNA, 612 bp, Homo sapiens
cgtataaaaagtgaaagagtcctgtgatccaagagtgtttttttgatcctggatacacttctgctatggcaacaaccctaaagacatggcttaaggctaatcctgggctgtgatctcatacttttttccatgttttatttataaacatttcaggaagacagttgacgacagggtcatgtgcaggaggaagactgttgtgcaagcagactcagaaacaggaaagactaattaaagttcagtagcctttcccaggtgtatgttttctggacctcaggcataaaaagctggaccagttgcctccttttcccaaagaaatcaaggaaaaataaatgtgccaatgacatctacaaggcttactagaagcagaaaaaaagacaaactttctctgatagggtcatgtagaaaaccaayctaaacaagaatcactagtataagggcactttttaacccaactaatatggaaaattgtatagcttttttgatactgtatatcataaatttgaaatatatatttttaaatgccttgagttcaactcagttttttagttacttccatttaaataattttggaacttttacataattttatgtaacagcctcataaaaattccc

SEQ ID NO: 556686 - DNA, 584 bp, Homo sapiens
ctgcacagagcagaggggccctaggcccagtacacaaaagcattttttcctcctaggtctccaggcctgtggtggaaggggctgctatgaaggtgtctgacatgccctggagacattttccccattgtcttggtgattaacatttagccccttattactggcacaaacttctgcagctggcttgaatttttctctggaaaatgggcttttcttttctatcacacgtcaggctgcaaattttctgaacttttattctctgcttcctcttyaacactttgccacttagaagtttcttcttccagataccctaaatcatctccctcaagttcaaagctccacagatctctagggcaggggcaaaatgccaccagtccctttgcacagcaagagtgacctgtactccagttcccaacaagtttctcatattattattattgtccattttagtccaagctattcaacaagtctttaggaagttccaaactttccctcatcttcctgtcttctgagccctccaagtctctaggaattccaaactttcccacatttttctgtcttcttctgagccctctaaactgttccaa

SEQ ID NO: 556687 - DNA, 503 bp, Homo sapiens
caagagtgacctgtactccagttcccaacaagtttctcatattattattattgtccattttagtccaagctattcaacaagtctttaggaagttccaaactttccctcatcttcctgtcttctgagccctccaagtctctaggaattccaaactttcccacatttttctgtcttcttctgagccctctaaactgttccaacctctgcttgttacccagttccaaagtcgcttccacatttttgtggaatatatcttaagagcagggccccactctctatggtaccaatttactgtattagcctgttctcacactgctaataaagacataactgagagtgggcaatttacaaaggaaagagatttaatagactcacagttccataggrctgtgaaggcaacaggaaacttacaatcatggcagaaggggaagcaaacatgtcctttttcacatggaggtaggagagagaagtgctgagcaaaagtggggaaggccccttataaa

SEQ ID NO: 556688 - DNA, 652 bp, Homo sapiens
ctattactctgaaattatcagtagcaygatatccagaccacagtcttcataactccttaagtctccaaatctcttccaagtatactgccaatccttcagtgctcctctgttcttcaggggagcctgcttacaaaatggcagacatgctcacatgtctgtcagtgtttagagttgataatgcaagcacagcatttcaccacagccctggtggctgagttgcaaaattatttatggctttcccatttatggcatgctgctcagtttcccatgagttgctaggaaaaattcctgatagctactatgagccattgaaacctatgagacttcatttattatggcataatatacacattacctcacttgtgttagaccatatggagagctctctgttgaatttggcatagttcctggggtgaaacgggaacggattctgttcctagtcctcttcaattatgctgtatgttggatcaggcagccaacttcaacagatcatctgggcatagcaatcagtcctcaggacaacatcactggcttcacctatgccaatgaagaataataaatgtgacattgaagagtgtctgagtggcagagaatagcaagatcccaagagtggatcaatagggtgccctgctgaaagtgagtttgtgtgtgg

SEQ ID NO: 556689 - DNA, 411 bp, Homo sapiens
atgaaaaatgtcaaggttggataaggaacaaacagtgtctcccacagtgctgtgtaggtgtctttggccttcccacctggaaagttaagatcctcacagtttcctaagagggagagagataattttgtatttccactgagcttggcattggatctcagtaatagtttattaactcactaattcatgtaatagacattaacggaacacattttgtgccacgtactgtgctcagtattggggaagaagctgaataaggcatgatcytggcactcaggtggtagctgcctacagttaagtggaacagggtggctgactaaggggggagaatagagttattctaaaataaactgattttaggacattcatttttcaacaggagatgtgggacatgtggatttgggatatgaattc

SEQ ID NO: 556690 - DNA, 555 bp, Homo sapiens
tacttttcatgtctcaaactgaaggagtgtgcaacatgattaaagaagtagagttgggagacagagttcagatccaagtatgtctaaagctgtgtctactctctttaattctccactttgcttcccctcaaaatcgttgtcttccaagcaaacctcacatcatgcatctgcctaagacctacccgtgaaatccctcactttcaagcaagccactggtgatagaaagtcagaggataaatgctaatttagcataaatatattttgtaatatatgcttttacttttcaataaatcataaatactgttttttagaaaaatgatgtttctggaggagaaaaagaagataatcaatatcacttgtaacctagcatccaaatatatcaatattttctttgtgactttcttgaattttctatgcattatttctagtttttaagtttagcaacactacactccaccttttagataaagtatgtttgctataaacaatttcttacggttagaagaagtttgtttctgaaatttggaattccygatcttatatggcccctgatat

SEQ ID NO: 556691 - DNA, 499 bp, Homo sapiens
tctgacagatgggtgttaaagtctccaaacatattagttgattcatctatttctcaataaagttgtattagcttttgcctcatatatttkgacacttggctgttaggtacatacgcattaacaatcattatgtgctcttggagttttgattcctttaccattatataatgcctctctttacctctgataacttttttgctctaaaatgtgatctgtctgaaaataatgtagccactcccactttcttttgattactgttagcatgatatatttttctccattaatatttactttacttttaatctatatttgtctttatatttaaagtagtttttttttgtagataatatatatttaggtcttgtttttttttattcattcagacaatctctgttttttaactggtatatttagatgattgacatttaaagtgatatagttgaattagtatctactatattttttactgtattctgttacccttgttttctgtttctat

SEQ ID NO: 556692 - DNA, 499 bp, Homo sapiens
tctgacagatgggtgttaaagtctccaaacatattagttgattcatctatttctcaataaagttgtattagcttttgcctcatatatttggacacttggctgttaggtacatacgcattaacaatcattatgtgctcttggagttttgattcctttaccattatataatgcctctctttacctctgataacttttttgctctaaaatgtgatctgtctgaaaataatgtagccactcccactttcttttgattactgttagcatgatatatttttctccattaatatttactttacttttaatctatatttgtctttayatttaaagtagtttttttttgtagataatatatatttaggtcttgtttttttttattcattcagacaatctctgttttttaactggtatatttagatgattgacatttaaagtgatatagttgaattagtatctactatattttttactgtattctgttacccttgttttctgtttctat

SEQ ID NO: 556693 - DNA, 546 bp, Homo sapiens
gggtttcaccatgttgggcaggatgrttttgaactcctgacctctggtgatccacctgcctcagcctcccaaagtgctgggattataggcatgagccaccgcacctagccgatattgtttttatatctattctcttgtatttgtttgcatttcttcctgaaatgatggattttctccacccccagtcttctgcaacaaatgggtgttacctcctttaggaacctcttccattccccctcgagtaagttagatagaccccccacctttggtgtgatattaaaaatatttttgtgtatggattgggcattaaactgttgttataattatctgtttgaatatttcacataagcatatacaagaaaacattgtagttaaaaccaactttatatccagttcctagatcaatatgtagcaaatagtaacccacatagagtaggcacttacagaaatgcatattggataagggcattatttttattttatagaggagaaagctggggctcagatagattatacaacttgttgtaatggctatttgtgttgctt

SEQ ID NO: 556694 - DNA, 546 bp, Homo sapiens
gggtttcaccatgttgggcaggatgattttgaactcctgacctctggtgatccacctgcctcagcctcccaaagtgctgggattataggcatgagccaccgcacctagccgatattgtttttatatctattctcttgtatttgtttgcatttcttcctgaaatgatggattttctccacccccagtcttctgcaacaaatgggtgttacctcctttaggaacctcttccattccycctcgagtaagttagatagaccccccacctttggtgtgatattaaaaatatttttgtgtatggattgggcattaaactgttgttataattatctgtttgaatatttcacataagcatatacaagaaaacattgtagttaaaaccaactttatatccagttcctagatcaatatgtagcaaatagtaacccacatagagtaggcacttacagaaatgcatattggataagggcattatttttattttatagaggagaaagctggggctcagatagattatacaacttgttgtaatggctatttgtgttgctt

SEQ ID NO: 556695 - DNA, 625 bp, Homo sapiens
ctgtttctctgaggaactctaatatgttcactaagctttttctcttgtgtacaatgagttctatacatttactcacagttttattgaaaggattaaaatgacataatgtatgtcagtgtgataatatgtataatatatatatcacataatgatacgatatagcataatgtatggtattttaaaaaaatagtgaaagcaaaggttttgaaaaaattaagctcatttaagtgatgtagatagagttgctttaatatatgggtttcttatgtaataacccctgcaagtacatgaggtttaggtgaggaaagagagggccagatgtgtggcaagtattttcatgaacgcattaatgtgccctgaactgtgtttcagattagtgagatcttcagaataattgctggagggatagaagaaaatatcttgtaattatgtagttgcactacaaaaacaatcagaggcggatcccaatgctgctggaagatgtagcaaaacctgagtataactttggttcagtggagtggccaagatgctctccccacctctgcacaccctcttaaggaaggacatgatgcctaaatatgaattcaattcyaatcataagttcatgctcactgaaacttcctcc

SEQ ID NO: 556696 - DNA, 463 bp, Homo sapiens
tctgcaagtaatcaaaaaattggccgggtgtggtggtgtgcacctgtagtcccaactactcagaaggctgaggtgggaggatggcttgagctggggaggttgtggcttcagtgagccrttactgtgccactgcactccagcctggatgacagagcaagaccctgtctcaacaaaaaacaggaattttttttttttttttgagacggagttctctcgttgcccaggctggagtgcaatggcatgatctaggctcactgcaacctccgcctcccaggttcaagcgattctcctatcttagctgggattacaggcacacgccaccgtgcccagctaattttttgtatttagtagagacagggtttcactatgttggtcaggctggtcttgaactcctgacctcagcctcccaaagtgctgggattacaggtgtgagccaccatgcccggccaaaaaacaggaattc

SEQ ID NO: 556697 - DNA, 464 bp, Homo sapiens
atgaaaaaaaaaaacaatttaaaaaccaacccagcttctctctctctccgtgtgcatgtgtgtgtgtgtgtgtgtgtgtgtgtgtgtgtctatgggaaaggggtggttggatcctcactaggctgtactatttttctgagacagggtctctctctgttgccaggctggagtatagtggtacaatcatggctcactgcagcttcaaccttctagcctcaaacgatcttcccgccttggcctcccaaagtgctggaattacaggcatgagtcaccacactcagctactttcctayatcttagcatcgttcttcctataatgagtatgtgatgcttctgtaaattttaaaaaaggtcttcacttatttttaaagaaagaaatattgaacaagtgctatgctcattgctagagggaaaacagaaaatacaatttaaagataagaatttaaaaatcacaagtaattgta

SEQ ID NO: 556698 - DNA, 640 bp, Homo sapiens
tcctctgtgtgcaaattcctactttatatatgaagcacgtttaagatctcaaaatgtgttgaggctatttctactacaagaattgcaattcacaatccagcatgacagggcacaaagtccaacagtactgtaggctttctattaaaaaatactcatagtaaaataagggtcacaaacagcccaattgctcaaacttgaacaaaccactcaataatgaataacactgataaataaccatacaaaaccaataattataagaatcaaagatctcaacccaattagaaaatagtttaaaagatcatcttttaacatcaagataagaatggtgaagagactatttctattttaatgacataacccaatttttgttttatgttagattacttttcaaayctcatttaccattttgatcctaaagcatatgaaatagatttacaaaggaaaagtatgtcctattcagtttaatccaaccttttgtgctgggaattatagatcctgagtagaaaaaaaggtaaaattatgatgtacactggaaactaaaataaatgattttatattaaagattcaatttaggagtaatgtaggaatggggaaaggagaaagactaaattctcatcttctaaattcaagagaagattaa

SEQ ID NO: 556699 - DNA, 553 bp, Homo sapiens
aaatctaatacaaaaagtaaaacatgctctaaaacatgttaggataatcagtacatgtgtcacatttttcttaataaaagcaggcaagttaaactgggaaccaagagtatactcttcatctggcttttcatagtatgtgtgcatgcatgtatctatttatcttgactatgtataaatagatatccaggaataaagccactcagctcaatccatacccctacgcactggcagattcttctccatcccaacctaaagcaaatgacttgatgatgctcaaacagtggggaaggggaaaagtaatagaaaggcatgtattttattcaaactggcatrtgtttggcactttgccacaaagctgagtccttttcctagaacaactcagaagcctaattaatagggttaattcaatgtaatattcatgtgtagtctaaagattcttaccactgcatataaagcagatgtccatgttttaagaatattttctctaaacaaatgtgtcaagaaagcattaagagttcatgtgaccaagaataacgccattgtactatatgct

SEQ ID NO: 556700 - DNA, 583 bp, Homo sapiens
ataaataaaatgataaaaaatggagacattaatactagtatcatcastaaataatctacatagaaatgagataaaacttttctaagtattataaaagaaataaataaggaactaagaaaataatgggagttggggtctattctaaaaagggattggtcagagaaaagcttctctgaaaaaaaaaaaaggggggggagggaagcatttaaactgaggtttaaatcataagaaaaaggaaagtggtaaaaaaccattaaaaaaattgaaacttataagtgcaaaggtatggagagtctgccatttttaaagacatttttaaaaggcaatggtggctctatcactgtgcaaatgaaaaaaactagtgtaattaaacctactgaaaagacaaagattaccagagtagctaaaataattaaagtaaacccatctacgtattgcacaaaaggcatgcaaagtaaaattacaccaaaagttaaaaaaatgtagaaaatcatatgccagatgaattctaacaagaaaaaacctggtacaggaataacaacaaataaaacaacgaaatattttaaaacttaagttcatcaat

SEQ ID NO: 556701 - DNA, 554 bp, Homo sapiens
aaaatgcaaaaattagccaggtgtggtggcaggtacctgtaatcccagctactcagraggctgaggcaggaaaattgcttgaacttggaaggcagaggttgcagtgagccaagatggagccactgcactccagcctgggccacagaatgagactcaatcaatcagtcaatcagtgggagtctcccctgggcttttcactttctctgttttgcctgccaccatgtaagacatgcctgctttcccttctgccatgattgtaagtttcctgaggcctccctagccacgaagaactataagtcaattaaatttctttgttttataaattaatcagcctcaggtagtatctttatagcagtgtgaaaatagactaatgcagactctgtctcacacactctagccccagagctgaaaggttggctgggtctaggggtacatttgtgggctgttgtcagttttgttctgagccacactaactggccaatatatggctccagtccccacacgaatctggccactgagccaaacattctgagaacagacatgtgaagccacct

SEQ ID NO: 556702 - DNA, 546 bp, Homo sapiens
aaggcattttcaaacttctgatccacagagactgtgtgatgcaattaatgcttattatcgatttaagctagaaagttttggagtaattcataatacagcaatacataatgaattcagctatttggtagctttgttctctaagttttgggttccccttctgtaaaatggagataagtattttataatgtagttttgaagataaaatgagttaatagtaaagcctatcattgactgagtccatgtaaatactattacacgatcttgtactgtgctagcttgtgaattaacgagggtgttacagacaamagcctttggaactcaggccaacctacacaagcaatccctaaggattgggaaagggtggtgttttcagtgatggttgtggtcttcttgcattgtgtaaagtctgtttctaccaatgtggtctttcttaataggcattaaatttgaatgttatcttccacatgtgtagaaattccttcattgtgagaattcagaggggtggcatttagggcagttcgatccccttcattatgagaacaagga

SEQ ID NO: 556703 - DNA, 546 bp, Homo sapiens
aaggcattttcaaacttctgatccacagagactgtgtgatgcaattaatgcttattatcgatttaagctagaaagttttggagtaattcataatacagcaatacataatgaattcagctatttggtagctttgttctctaagttttgggttccccttctgtaaaatggagataagtattttataatgtagttttgaagataaaatgagttaatagtaaagcctatcattgactgagtccatgtaaatactattacacgatcttgtactgtgctagcttgtgaattaacgagggtgttacagacaacagcctttggaacwcaggccaacctacacaagcaatccctaaggattgggaaagggtggtgttttcagtgatggttgtggtcttcttgcattgtgtaaagtctgtttctaccaatgtggtctttcttaataggcattaaatttgaatgttatcttccacatgtgtagaaattccttcattgtgagaattcagaggggtggcatttagggcagttcgatccccttcattatgagaacaagga

SEQ ID NO: 556704 - DNA, 211 bp, Homo sapiens
agaactctgctctctttgaaaaatagcctacatttcaaatccagatcttaggatatgtcagcctgagaaacttcctttccttctggactcagaaatgctaacaggatcacagcctcacattgccatatctgccccccctattgaatatttagagcaaattctaatttcaaattcttatarttagaacaaagtatttaaatctaaaaataat

SEQ ID NO: 556705 - DNA, 618 bp, Homo sapiens
gttgaaactgactcagccagtgaggatgccagtgtcaagccctccaagatgttgggttcccagcatctctgtgcctctctaatgcatgaatgactgatgcatagaccaagggaggcagacactagctagtatcaacactatattaaacacaagtaaaaccagatttcttgttttaaataaattttttttattattatactttaagttttagggtacatgtgcacaatgtgcaggttagttacatatgtatacatgtgacatgctggtgtgctgcacccactaactcgtcatctagcattaggtatatctcccaatataggccaggtgcartggctcacgcctgcaatcccagcactttgggagaccaaggcaggtggatcgcttgagctcacgagtttgagaccagcctgggcaacatggagaaaccccatctctacaaaaaatacaaaaattaattgggcatggtgatgccctgagactaccctgcatgccctgatgcacacctgcagtctcagctacttgggtggctgaggtggaaggatggcttgaacctgggaggcagaagttgcagtgagccacgattgcaccactgcactccaggcttatagcctgggtgat

SEQ ID NO: 556706 - DNA, 623 bp, Homo sapiens
agttttctaggaattttacaaaatgtctggaacacgtattaataatgtatatacatataactcaaggttaaatatcatttttttccagttttaattttctattactttaaattctggggtacatgtgcaggatgtgtaggtttgttacataggtaaatgtgtgccatrggtggtttcctgtacctatcaacccatcacctagttattaagcccagcatgcattacctatgtttcctgatgttctccatccgcctaccccctcccaccgataggccccagtgtgtgttgttctcctcccggtgaccatgggttctcactgttcagctcccagttatgaatgagaacatgtgtttggttttctgttcctgcattagtttgctgagaataatggcttccagctatatccatgtccctgcaaagatataacctcattctttttcatggctgcacagtattccatggtgtatatgtaccacattttctttatccagtcttatcattgatgggcattgattccatgtctttgctgttgtgaataattccacaatgaacacacatgtgcatgtatctttataatagaattatttgtatttctttgggtatatatacacccagtaatgaga

SEQ ID NO: 556707 - DNA, 623 bp, Homo sapiens
agttttctaggaattttacaaaatgtctggaacacgtattaataatgtatatacatataactcaaggttaaatatcatttttttccagttttaattttctattactttaaattctggggtacatgtgcaggatgtgtaggtttgttacataggtaaatgtgtgccataggtggtttcctgtacctatcaacccatcacctagttattaagcccagcatgcattacctatgtttcctgatgttctccatccgcctaccccctcccacygataggccccagtgtgtgttgttctcctcccggtgaccatgggttctcactgttcagctcccagttatgaatgagaacatgtgtttggttttctgttcctgcattagtttgctgagaataatggcttccagctatatccatgtccctgcaaagatataacctcattctttttcatggctgcacagtattccatggtgtatatgtaccacattttctttatccagtcttatcattgatgggcattgattccatgtctttgctgttgtgaataattccacaatgaacacacatgtgcatgtatctttataatagaattatttgtatttctttgggtatatatacacccagtaatgaga

SEQ ID NO: 556708 - DNA, 584 bp, Homo sapiens
gatttggcacacaggccagagtttgccaatcgctgacctagaaaaatgtagccctatcttctcattgtgcagatggataaagcaagactcaggtgagagatgacttgcccaaggtcacacacctcggtaaagacagagctstaggggaaagcctaaaatgttaactctatcttctaaagctctctctaccataccacatggcccccctgtttcttctttcctgccttcttccccttcattacttgcttaacaccgggggtaccatatgcaagcaaacagtgcctgtatgcacacagctttcagcctactgctacaccaagaaaccattttttaaataagcttcaagaatcagcattaagtttgtgttggtttataaatgttaatattctaaaaccactgcaattacattattagaatggtgctgtcctgaggcatgcactacccttaatatgttttctttttgtaaatatgtaattatttgtggattattcaaataattgtgttcgttgaaaggaaattttttttaatgtaaataaggcatggagaaagaaattgctcactatcccattattcaaagataccca

SEQ ID NO: 556709 - DNA, 560 bp, Homo sapiens
caggaaactgattcttgccaacaacctgagaagcttggaagtggatgatccatccacggttgggctttcagatgagmtcccacctctggccaacgtcttcattacagcctcatgagaccgtgaagcagaggcccccagctaagccattcctgggctcctgacccacagaaactataagataataactatgtgttctttgaagcccctaaacgtggggtactttgctgtgttgcaatagaaaactaatggaatcacctaaggaacttgaacaaacacaataacaactaccaacatcatttaatgagcccaacttctggctcatcaaatacgaatttctaggggttggtccaagcagcaatttttttttttttttttttttttgagatggagtcttgctctgtcgcccaggctggagtgcagtggcgcgatcttgactcactgcaacctctgcctcctgggttcactccattctcctgcctcagcctcctgagtagctgggctacaggtgcctgccacaacacctggctagttttttgtatttttggtagagacagggtttc

SEQ ID NO: 556710 - DNA, 560 bp, Homo sapiens
caggaaactgattcttgccaacaacctgagaagcttggaagtggatgatccatccacggttgggctttcagatgagatcccacctctggccaacgtcttcattacagcctcatgagaccgtgaagcagaggcccccagctaagccattcctgggctcctgacccacagaaactataagataataactatgtgttctttgaagcccctaaacgtggggtactttgctrtgttgcaatagaaaactaatggaatcacctaaggaacttgaacaaacacaataacaactaccaacatcatttaatgagcccaacttctggctcatcaaatacgaatttctaggggttggtccaagcagcaatttttttttttttttttttttttgagatggagtcttgctctgtcgcccaggctggagtgcagtggcgcgatcttgactcactgcaacctctgcctcctgggttcactccattctcctgcctcagcctcctgagtagctgggctacaggtgcctgccacaacacctggctagttttttgtatttttggtagagacagggtttc

SEQ ID NO: 556711 - DNA, 560 bp, Homo sapiens
caggaaactgattcttgccaacaacctgagaagcttggaagtggatgatccatccacggttgggctttcagatgagatcccacctctggccaacgtcttcattacagcctcatgagaccgtgaagcagaggcccccagctaagccattcctgggctcctgacccacagaaactataagataataactatgtgttctttgaagcccctaaacgtggggtactttgctgtgttgcaatagaaaactaatggaatcacctaaggaacttgaacaaacacaataacaactaccaacatcatttaatgagcccaacttctggctcatcaaataygaatttctaggggttggtccaagcagcaatttttttttttttttttttttttgagatggagtcttgctctgtcgcccaggctggagtgcagtggcgcgatcttgactcactgcaacctctgcctcctgggttcactccattctcctgcctcagcctcctgagtagctgggctacaggtgcctgccacaacacctggctagttttttgtatttttggtagagacagggtttc

SEQ ID NO: 556712 - DNA, 469 bp, Homo sapiens
ccctgagggaatgatatgcgtggatggacatgtggaaggtggtcatagactcctgtcaygctcaactcaagttaacagggctgggccacctagaaagaacctttggttacaatagccttaagtctattgcagactcaaagccttttctacttgtttcactccttatacccaagttccagaatcaaggccactaaggcaaggattcttacgcccctcccctcctgggccaaccccacatcatttccctcctttcccatctggatcatcccaacagccttctaattgggccccttgttctttttcctgaactttctctaaggttgttaactaatgctttactttctgtttttagatttaacaagtatatcacccttgaaacaaaaataaaaggccaggcatggtggctcacacttgtaatctcagcactttgggagactgaggcaggaggattgcttgaggccatgagttt

SEQ ID NO: 556713 - DNA, 469 bp, Homo sapiens
ccctgagggaatgatatgcgtggatggacatgtggaaggtggtcatagactcctgtcatgctcaactcaagttaacagggctgggccacctagaaagaacctttggttacaatagccttaagtctattgcagactcaaagccttttctacttgtttcactccttatacccaagttccagaatcaaggccactaaggcaaggattcttacgcccctcccctcctgggccaaccccacrtcatttccctcctttcccatctggatcatcccaacagccttctaattgggccccttgttctttttcctgaactttctctaaggttgttaactaatgctttactttctgtttttagatttaacaagtatatcacccttgaaacaaaaataaaaggccaggcatggtggctcacacttgtaatctcagcactttgggagactgaggcaggaggattgcttgaggccatgagttt

SEQ ID NO: 556714 - DNA, 581 bp, Homo sapiens
aagactccctaacagttaatgtatttctaggcatagaccaaaagaaatccattgacaattctgggtccccttctatcccagttctccagcttttcattccatctgtgttttctcttactttctctgtatccccagtttctctcagctcaaacaccctgctattctgtgattcttctctctcgtycaatacccttcccattgaaaaagaaattcagcttatccagagatagcatcagccattgggattaaaatgcagtatatacgtttcaggtgatgtgctggaaagatcagcaaagatataaaatatccaagggaaaacaaaagaaaaaaaatggcaggcagtctaacaccggctaatagttaaataacaatttgatgtttagacataagaggctgaagttaggaaacttgaggttcacccatacattctgggcttcgaaatctgccatcagtaaaggggcacaatggtgtgaatttttagccaagcatcagttgaaccttgaatttcctgggtttttgttggaccgtatcacagtgaaacattatattcttttcccccaaatatatatctgatttccttt

SEQ ID NO: 556715 - DNA, 362 bp, Homo sapiens
atttttctttctgtggaagtacaaggaaactaaattcagatgagatgggccaaatgcaattccagagctgagatgaaaagttatggatagaggaaatgtaaagataggtttccagtactgtgacaagacaggaactgaaactgagccctatgggatatctggagtacctacagaatatcactacaacttgaatattgtcagaggctttaatgttataaaacaatcttcaaaagtttggctctaggccatctgagtttagaaatctgatgattctcagaagaatgaagatagttttaaaacaggcaaatttagaataagaaagctattcagagacttgraaactaaatagtcaatatgggatg

SEQ ID NO: 556716 - DNA, 585 bp, Homo sapiens
tcatacaggaaaataggcaaaataggcaaagaaggacctggctcaaggtccttctggggagaggtgcttggcagaatttggccacagtatcaattctaaactgcacactaaataaacataataaaagatgtgcgccaggaatagaaggccagcaggatgttacttttctgaaaatggcattggcaggggggctgtagggagggagcacagtccccttctttccccctcttacttgtcagccttgtggttcacgaaaacccaattggacccttgttttctttcctgggccagtaatgaatggcagtaattatccatgcagggctgtgtgtgagtcatgaggtagctctggctcccttctccttgcaattttgagctgtgtgtgtgtgtctgtgtgtgtgtttcacccgctactattgaggggtggaaaatagattacaattacattccggctggcttttgaagacttgatggacagctggagagaaatcttgcctgcagctgstgggatgagagggtggccaagaggtgggcgtggaaagaggaagagaggccctgtcagaagagggggaaacaatactaaatgaa

SEQ ID NO: 556717 - DNA, 620 bp, Homo sapiens
gtgtgagttcttttttttatttttcatttttcttttgtctactctgactttatattttcaaatagcctgtcttcaagctcactmattctttcttctgcttgatcaattctgctgttgagactctgatgcattctttagcatgtcagttgaatttttccatgccagaatgtctgcttgattgttttaaattatttcaatctctattaaatttatctgataggattctgaattccttctctgtgttatcttcaattttgttgagtttcctcaaagcagctattttgaattctctgcctgaaaggtcagatatttctgtctccccaggattggtccctggtaccttatttagtttgtttggttaggtcatgttttcctggatggtcttgacatttgtggatgtttctttgtggctaggcattaaagagttaggtatttactgtgttcttcacagtctgggcttgtttgtacttgtctttttaggaaggctttccaggtattcaaagggacatgagtgttgtgatctaagtttttggtcacagcagcaatatctgcatcaggggacaccccaagcccagtaacactgtggttcttgcagactcatataggtaccaccatggtgg

SEQ ID NO: 556718 - DNA, 620 bp, Homo sapiens
gtgtgagttcttttttttatttttcatttttcttttgtctactctgactttatattttcaaatagcctgtcttcaagctcactcattctttcttctgcttgatcaattctgctgttgagactctgatgcattctttagcatgtcagttgaatttttccatgccagaatgtctgcttgattgttttaaattatttcaatctctattaaatttatctgataggattctgaattccttctctgtgttatcttcaattttgttgagtttcctcaaagcagctattttgaattctctgcctgaaaggtcagatatttctgtctccccaggattggtccctggtaccttatttagtttgtttggttaggtcatgttttcctggatggtcttgacatttgtggatgtttctttgtggctaggcattaaagagttaggtatttactgtgttcttcacagtctgggcttgtttgtacttgtctttttaggaaggctttccaggtattcaaagggacatgagtgttgtgatctaagtttttggtcacagcagcartatctgcatcaggggacaccccaagcccagtaacactgtggttcttgcagactcatataggtaccaccatggtgg

SEQ ID NO: 556719 - DNA, 461 bp, Homo sapiens
tccttgatccctgctctaataagcaagagcagctcaaaagactctgaaaattttttcattcttcttcttgatacatttttttttttctgttcccttggactcctatcagtgtcacaagtgaggttgctttctggattctgactcaataatgtcaactctgatcaaaaacagaacttgtgaatatggtgcgaagtgcttcttaccttycaactttcagattgctggacttaggccaaacgaagatacaatccccttattagtgacctgcagatgtatattaaaaaataactcatataagaattacattaaaatctgtaagtaaaaaacctaggtacaattggaaaaactgctgaattaaaccaggaagaaaagtataccttgtggataatggtttttacatttaaagaaaaggaactaagagtttctgtggctattcatgacatttttcaagattattaaaa

SEQ ID NO: 556720 - DNA, 629 bp, Homo sapiens
agaagaaatatttataataattataagtgagagaggagacataaagtttgctctacttcactcaaatcagtaaaacatcaacattagtgggctttgataaattataaatatktaatataatacctatggaaatcagtaaaaatctatacacagagatacactcaaaaatattatagatagaatggaatcccaataaaaatgttcatataactgacagaaaaatagaacaaaaatgagaaatgataaatagaatcaataaacagaaaacaataaagtgtcaggtttaagccttaatatttcaataatttcatgaaatgtaaatggttgaaatgcaccaattaaaagatatataggtatagtagatatagagaacatgacccaactaaatgctatctacaagagccacttcaaatatagtgatatgggtaggctcaaagaaaatggatggaaaaagattcatcatgcaagtattaattttaaaaacaaagcaggaatggctatattaatgtcagataaagtagacttcagagcaaagaaaattatcagaggcagagagggacattatataatgacaaaaagatcagcccacaaacaaagacttggcagtcctaggtatgtaagcacccaag

SEQ ID NO: 556721 - DNA, 629 bp, Homo sapiens
agaagaaatatttataataattataagtgagagaggagacataaagtttgctctacttcactcaaatcagtaaaacatcaacattagtgggctttgataaattataaatatttaatataatacctatggaaatcagtaaaaatctatacacagagatacactcaaaaatattatagatagaatggaatcccaataaaaatgttcatataactgacagaaaaatagaacaaaaatgagaaatgataaatagaatcaataaacagaaaacaataaagtgtcaggtttaagccttaayatttcaataatttcatgaaatgtaaatggttgaaatgcaccaattaaaagatatataggtatagtagatatagagaacatgacccaactaaatgctatctacaagagccacttcaaatatagtgatatgggtaggctcaaagaaaatggatggaaaaagattcatcatgcaagtattaattttaaaaacaaagcaggaatggctatattaatgtcagataaagtagacttcagagcaaagaaaattatcagaggcagagagggacattatataatgacaaaaagatcagcccacaaacaaagacttggcagtcctaggtatgtaagcacccaag

SEQ ID NO: 556722 - DNA, 629 bp, Homo sapiens
agaagaaatatttataataattataagtgagagaggagacataaagtttgctctacttcactcaaatcagtaaaacatcaacattagtgggctttgataaattataaatatttaatataatacctatggaaatcagtaaaaatctatacacagagatacactcaaaaatattatagatagaatggaatcccaataaaaatgttcatataactgacagaaaaatagaacaaaaatgagaaatgataaatagaatcaataaacagaaaacaataaagtgtcaggtttaagccttaatatttcaataatttcatgaaatgtaaatggttgaaatgcaccaattaaaagatatataggtatagtagatatagagaacatgacccaactaaatgctatctacaagagccacttcaaatatagtgatatgggtaggctcaaagaaaatggatggaaaaagattcatcatgcaagtattaattttaaaaacaaagcaggaatggctatattaatgtcagataaagtagacttcagagcaaagaaaattatcagaggcagagagggacattatataatgacaaaaagatcagsccacaaacaaagacttggcagtcctaggtatgtaagcacccaag

SEQ ID NO: 556723 - DNA, 577 bp, Homo sapiens
attgtaattttatttgccaaaatasaagaaacttgtatctgtgaatgcatatggatggttaagaaaataattaaacaacagtggagactagtcgctcagactgctggctatggagccaaacaccttgagttcaactcctgagttcaagtgctagaaccatcattagatcaccaataggaaactgccttggtttcctcatctgtaatacaggaataatagtgacactttcctaataggatcactatgaggattaaattaaagaacaatgtaagagtgtttggcacacagtaagtaatttacacatatcagttaatattatcatcataattattataacatagtgaagaatatcatttcaaaaaagataatattgcttcctccataacatacaaaaatttctgaatagtttttaacatttttgcaatctgtttaactgcctcattatataaaccatgtaactaaatgtctgaaagtttcaacttagaaattcctttaataatttcaacaagtaaggaaacaatgtatactggatccttgaaaataatatcattaaaaaatattcatttgaaaataagcc

SEQ ID NO: 556724 - DNA, 582 bp, Homo sapiens
attttaaaatattccttattttaaaaatcgtaactcccaatttatgaagccattctagacaaagtctaattgaaaaatataactcaggattatgaggacagagtcagttttgttttatttattctattttttgacatttaaaaaatgtatcawaataaacaggcattaatttttcttctgaaaagaaattaagttccaaaataccatagtgcctgtattgattactttaaattctctctgctcaacagttggcctgctctttctctgctctcaacagttgatagccaaattggaataaaaaattaaaattactgtactaacttccccacataagtgggtataattgttaattttatatgtcaacttggctatccatgctatccacatatttggatattcacatatttggacatctagactggggggtcaaacaccagtctagttgccactttgaatgtatttttaagatggcatttaaatcagtagattttgagtaaagcacgttacctttcataatgtgggttggcctcatccagtcagttgaaggccttaagagaaaaagtggatcccaaggaagaggga

SEQ ID NO: 556725 - DNA, 386 bp, Homo sapiens
tacccccaccatacttcctcytattctcttactcccctgcaactagggcatcccttccttacccacttgagtcagatctatggggtcctggaccacacatcttcctcttgcttgatttttttccgattatgctaaagtacatctacaaatacatagaacatagagtatctgagcctttttaatgccagaaaatgtatttagcactcatacttatctgcgattcaaaggttaaagttcagcaatagtttcaaacaataatttttcctggagctctgaagatggtgtgtcaagtggctgatgagaagttgacagacaatctaattctgctttctttatttttggcaagcttttcctctttctcattagtttttaaaaattttcccttt

SEQ ID NO: 556726 - DNA, 509 bp, Homo sapiens
ctggaattcactggttttaccatgttccctatcatcctgaagcagctggattgatagaatggtggaatggccatttgaagtcacaattagctgactacacaactagccaactagctgacaacactttgcagggctggggcaaaattctccagaaggctgtgtatgccctgaatcagcatccaatatatggtactgtttctcccattgcaaggattcacggtccaggaatcaagggtggaagtgaaagtggcaccactcaccatcacccctagtgacccactagcaaaattcttgcttcctgttgccccgacattacgttctgctggcctagggatcttagttctagagggaggaatgctgccactakgagacataacaattccattaaactggatgttaacattgccacctggacactttgggatcccccacctctaagtctacaggctaagaagggagttacaatgttggctggggtgattgacctggactatcaagatgaaatcagt

SEQ ID NO: 556727 - DNA, 605 bp, Homo sapiens
gcgacctctactgacaaagtttagcattttgccagctgtcaaaggaaaatatttcaaggactcaactcagttttcacagagcaggcaatgaaggattgattgttttgtgtaggtgataagtgacagagtcagcttgctccctttcctgaatgtctagaagcctttagggagataggctatcatttatgcaattacatgagttgctagggaaagtcatatttatggaggcaaaatatttgttcttaattcaaatttaatatttctgaaaacaattaggtaatgggaaagctctatagttattcgatcttagtagatggaatacatagagaatagaggatgttctcaagggtaaaagcttgtgctcctgaaccaataatagcatccaaagaaaaacagattaatattctttacatctcatttctctaagatctcaggaaaattattgccatttacattctacatttgttgttgaaggctaagagggcctcattaggtttaccaaatccaaataattacagttagagayggtgtttttttctactagctgaagtgatgtgtgaaaatagcaaaaatattttcacagagaaattatgctctttaacagt

SEQ ID NO: 556728 - DNA, 584 bp, Homo sapiens
ctgcattccagcttgggtgacagagagacaccctctctcaggaaaaaaacaaacaaacaaaaacaaacaataacaacaacaacgacaaaaacaaaaaaactgtagtaggagcagaattcagaaagctttgtttcagagaggaaaatcagaaacagatgtaacattttcaaactacaggcatttttscattgtaacattaagacaaatataataatgtcacttcaactgcatttgaaattttcaagcaggtggtaagtcagttagccactaccatatcaccaatttcactaattctagcttcataagtcaatctttgcctgaggtaatagaccaaaaaggtaaagtctgatgggatacaccacaggacattcttgctctgcacaataccaaacgcaagtacaagtgacttgagcagtgaagagatgatccaagagaatgctaatagaaaaatcttgctaggtaatgcagccaaacaaaatcgtttcagtagacagattgagtacatgaaagaaaggaggtcataactaagagtccaggctgtgccaaccagcatcttaataaagaggagagagagagagacagga

SEQ ID NO: 556729 - DNA, 584 bp, Homo sapiens
ctgcattccagcttgggtgacagagagacaccctctctcaggaaaaaaacaaacaaacaaaaacaaacaataacaacaacaacgacaaaaacaaaaaaactgtagtaggagcagaattcagaaagctttgtttcagagaggaaaatcagaaacagatgtaacattttcaaactacaggcatttttgcattgtaacattaagacaaatataataatgtcacttcaactgcatttgaaattttcaagcaggtggtaagtcagttagccactaccrtatcaccaatttcactaattctagcttcataagtcaatctttgcctgaggtaatagaccaaaaaggtaaagtctgatgggatacaccacaggacattcttgctctgcacaataccaaacgcaagtacaagtgacttgagcagtgaagagatgatccaagagaatgctaatagaaaaatcttgctaggtaatgcagccaaacaaaatcgtttcagtagacagattgagtacatgaaagaaaggaggtcataactaagagtccaggctgtgccaaccagcatcttaataaagaggagagagagagagacagga

SEQ ID NO: 556730 - DNA, 584 bp, Homo sapiens
ctgcattccagcttgggtgacagagagacaccctctctcaggaaaaaaacaaacaaacaaaaacaaacaataacaacaacaacgacaaaaacaaaaaaactgtagtaggagcagaattcagaaagctttgtttcagagaggaaaatcagaaacagatgtaacattttcaaactacaggcatttttgcattgtaacattaagacaaatataataatgtcacttcaactgcatttgaaattttcaagcaggtggtaagtcagttagccactaccatatcaccaatttcactaattctagcttcataagtcaatctttgcctgaggtaatagaccaaaaaggtaaagtctgatgggatacaccacaggacattcttgctctgcacaataccaaacgcaagtacaagtgacttgagcagtgaagagatgayccaagagaatgctaatagaaaaatcttgctaggtaatgcagccaaacaaaatcgtttcagtagacagattgagtacatgaaagaaaggaggtcataactaagagtccaggctgtgccaaccagcatcttaataaagaggagagagagagagacagga

SEQ ID NO: 556731 - DNA, 566 bp, Homo sapiens
agaaatattcagccattatttcttcaaataatctttttttttgttcttttatttctctcttccccttctcagaatcccaaaatgcacatgttgatcagcttgtgggtgtcttacaagtccattaagttctgtttacttttcttgatttctttgtctttctgctcctaagacacaataattttagtttttctcttttcagactcacaagttctttctcttcctgttcaaatctgctattgtacttctgtagtaaatttttaaatttcaactattgaaatgttcagctccagattttttrtttctttaaaacaatatgttctatctttttgttgacattctcattttgttcatattcccttttttaaatttattttattacccttgcccatgccttcctttaactctttgaacatattgtagacaattgttttaaacatttgtctagtaatttcagtgtctggacttcctagaagatgatttctgtcagttaattttgcttcttggaatgggccaagtttttgtatttctttgtatatcttatgaattttgttgttgaaaattagaaa

SEQ ID NO: 556732 - DNA, 570 bp, Homo sapiens
tttatttctatgaataagtgagatgttaccagmttcttttctaatattgattctagaatttcacctaattggaacattttggaactataggtatataactcaacaccttagaatgtccatgaatatcatacgatatcactggagtgcagcttcagtagtgcagcattaaacaaattggcatattgaaaagattttgtttcttttgccttcacggtgttctaaatttttaagattattcacaaagaagacaagatgatttttgtttgaaaggcataaacatttaacacgtttcctttgtgaagccaagtttttattaagaatttaaatgaaagctctttttacatgagttcttatttaagagcagaaatgccctctgaaataaaaacaaaattaataaaattaatgaaaacacaaaaaatgtaactcaagtcacaatagaaaagtttgcttattatagcacatggaaggggactagataaaaaatttagaactgactttatagaatacactatttaaagagtgtcttttctggtctgtactctgccctgtaattagcaagatgttgaatta

SEQ ID NO: 556733 - DNA, 400 bp, Homo sapiens
agggaccaggtgtgaggtaactgaatcatgggggcaagtytttcccctgctggtttcatgatagtgaataagtttcatgagatatgatggttttaaaaaaaggaattcccctgcacaaggtctctctcattccctgctgccatccatgtaagacatgacttgctcttcctggccttccaccatgattgtgaggcttcctcagccacatggaactgtaagtccaattaaacctcttttttttttttttttttttttttttttttttttttttgtaaattgcccagtcttgggtttgcctttgtcagcagcatgcaaatggacgaatacaagtaccatatataatcatttccaaatacatgcatctttgagatttaccttttctacattttgaaattaaata

SEQ ID NO: 556734 - DNA, 558 bp, Homo sapiens
gctccacccacttcagcactggggagaaaccaaccttagcattcgtttcatcagagagataaaaaatggtaamctgctgttattttaatttgcaatttaaaaaattctgagtaaaactgagaatctaaatagatttattggccatttgtatctacttctttgtaagttgctagttttctatcttttttattgatttgtttgagcttttattagttaaaataatagacctttgtgaaaagatgaattattttttccctggattgactctccttagacttctaaacattacagtgtgtacttgttatccagaatatttttagtcacatatatctaacattttctagtatgtgaattttgtgtttattaggaagatctactcacccctgatgattaaaacaacccatgatttgttttctaaactgtttatagattgactgattgatctggatttttgttttgttttgtttttccatgtaatcagttactttcctttctcccctcctatgtccccttctaggagccacacttgagaaatgaattttctgtagcctgaggatt

SEQ ID NO: 556735 - DNA, 558 bp, Homo sapiens
gctccacccacttcagcactggggagaaaccaaccttagcattcgtttcatcagagagataaaaaatggtaacctgctgttattttaatttgcaatttaaaaaattctgagtaaaactgagaatctaaatagatttattggccatttgtatctacttctttgtaarttgctagttttctatcttttttattgatttgtttgagcttttattagttaaaataatagacctttgtgaaaagatgaattattttttccctggattgactctccttagacttctaaacattacagtgtgtacttgttatccagaatatttttagtcacatatatctaacattttctagtatgtgaattttgtgtttattaggaagatctactcacccctgatgattaaaacaacccatgatttgttttctaaactgtttatagattgactgattgatctggatttttgttttgttttgtttttccatgtaatcagttactttcctttctcccctcctatgtccccttctaggagccacacttgagaaatgaattttctgtagcctgaggatt

SEQ ID NO: 556736 - DNA, 515 bp, Homo sapiens
acacagagtccccactggcacagtggctcatgcctgtaatcccaacacttctagaggctgaggcgggtgtattgcttgagcccagaagtttgagagcagcctgggcaacatggtgaaaccctgtctctacaaaaaatttaaaaaattagccaggcatgagggtacacacctgtagtcccagctactcagggggctgaggcgggaggattgcttgagcctgggaagtggaggctkcagtgagcctaggtggtgccactgcactccaacctgggggacagaggagaccctgtctcaaaaaaaaaaaaaaaaaaatcccaacctgaaggatgaagcaactatgtagaaagttgctgaaagagcagtcctggcacagagaacaacagcaaaggtattgatgtggtttggctctgtgtccccacccaaatctcatgttgaactgtaatcctctatgttgagggagggacctggtgggaggtaattggatcatggaggcagatttcccccttgctggtctc

SEQ ID NO: 556737 - DNA, 563 bp, Homo sapiens
aaacactcttatcaagcaggatgttccaaggactcagagatcrattcccaggatccaaaccaagggctagtcctgccaataggtctttttgggggtggagttggggggaagagcaggcattgggaaacccaggcaggtaatctctggtgcttgtctaatccaagggttctttggaatgaattttcttatgacattattttggactattattgaaagaaaaaacggagatctgctgacactctgtgtcagagagagagagcagtttttaatggttgtgttaacttctatcacaatgtatcactatggaggagagggcttattggctgcactagacaccagaagtggtcttcaaaagttaggctagagggtagaattgaagattgtgcacaaacctcattattccaagccatacctctttctccatagtcctctgtatgattttactaagatgttttagattttctctttctttcgtttagacacactttcagttccttggagaccatgtgttatttatttcaatattcctaatattgaattgccatctggcacacagcagggtc

SEQ ID NO: 556738 - DNA, 579 bp, Homo sapiens
gcaataagaaatcatcataagktataaaactggtaatagtatgtacacagaaaaacacaaaatataataactatcatgtgtaacctactcttatcctaaatagaaagactaaacagtgaaccaatcagaataataactataacaacttttcaagacatagtagaaacaacaaaaagttaagaagcagagggaaacagttaaggcatagagtgtttattagttttctttttgctggtttctttgtttatgcaaagagtgttaagttgctatcaggttaaaataatgagctataagacagtacttgcaagctgcacagtaacctcaaaccaaaattatacaacaaatatacaaaaaataaaaagcaagaaactaaatattatcaacagaaaaaatcatctttactaaaggaagacaggaagaaagaaggaagagaagatcacaaaacaaccagaaaacaaacaaacaacaaaaaatggcagtatcaccaacacgagtaaggtgagtccttactcatcgataataacattgaatgtaaataaaccaaattatccaatcaaaagacatagagtgactgaatgg

SEQ ID NO: 556739 - DNA, 579 bp, Homo sapiens
caatagcaacatttagattcatgtgcacagcatctgctccctgcgagcttcatggagttttgccatgctcatgcaccacccagcccccatccaggcccacaggagaaccatcagaaggcttctccttccatcctgtactgctccttcctcaccattgattgccctatgccacaaattccagacacttcagggagtccaaactcagatattttattccttatcttactaggtcctctacattctccttgggctcatcttccctatgctgtggtccagaaagttcttccaggaagaaagtgagaagaacttgggacccaatttgtgtatttctccaatccaaagaattatagtgctgcgctccttgatattcaatctctcaaacagtgtactcccacattttgttctgttttgtattacagcaggagaataagtctggcracaattattccatcatggtgagaagcagaagtctcagaaattagattttttgacagattagattcaagtttttagaatactgccgacatataatagagactaagtcatggtttttgaataaatattttatattttattact

SEQ ID NO: 556740 - DNA, 585 bp, Homo sapiens
taccaccatgccccattacctccttccccatgctctggcaactactaatctactttctgtttctatggataggactattcagaatatatcagaatttccctttgttgggttatttccccctaaaatccatgcagaaaaggaaacaaggtgtttaataaaatagtaaaaataaagacaatttttagaaccaagacttattgaccaatgcaaaataatcagattcattatatgttttacatcaaaactatccaatatataaaactaaacagattttgtayggtattagtttttctcttcctagccaatatcattgttaaagtatttttaggaaatttctcatattcaagtccatacttggtctcatttttctttgtgtaaagagagataattataaatagaaattgacaagatatcctttacctagggccagagacagccactgagctatttgattctgtctaatgaccagccaatactgaataatccaaaagttcccactgaaagaaaaaaactatcagatcttttaaaagattctgtagttcgaaaaagagtgacttatttaaagacacagaaatgtatattcat

SEQ ID NO: 556741 - DNA, 585 bp, Homo sapiens
taccaccatgccccattacctccttccccatgctctggcaactactaatctactttctgtttctatggataggactattcagaatatatcagaatttccctttgttgggttatttccccctaaaatccatgcagaaaaggaaacaaggtgtttaataaaatagtaaaaataaagacaatttttagaaccaagacttattgaccaatgcaaaataatcagattcattatatgttttacatcaaaactatccaatatataaaactaaacagattttgtatggtattagtttttctcttcctagccaatatcattgttaaagtatttttaggaaatttctcatattcaagtccatacttggtctcatttttctttgtrtaaagagagataattataaatagaaattgacaagatatcctttacctagggccagagacagccactgagctatttgattctgtctaatgaccagccaatactgaataatccaaaagttcccactgaaagaaaaaaactatcagatcttttaaaagattctgtagttcgaaaaagagtgacttatttaaagacacagaaatgtatattcat

SEQ ID NO: 556742 - DNA, 634 bp, Homo sapiens
ttgggttatttccccctaaaatccatgcagaaaaggaaacaaggtgtttaataaaatagtaaaaataaagacaatttttagaaccaagacttattgaccaatgcaaaataatcagattcattatatgttttacatcaaaactatccaatatataaaactaaacagattttgtatggtattagtttttctcttcctagccaatatcattgttaaagtatttttaggaaatttctcatattcaagtccatacttggtctcatttttctttgtgtaaagagagataattataaatagaaattgacaagatatcctttacctagggccagagacagccactgagctatttgattctgtctaatgaccagccaatactgaataatccaaaagttcccactgaaagaaaaaaactatcagatcttttaaaagattctktagttcgaaaaagagtgacttatttaaagacacagaaatgtatattcattaaaacagctactttaaaaaaagaataagaaaacatattagaaacataatatttgtgttctcagtaaggttcaaaagagactatttgagttacaaatgagtagtaataaatatggggttatttgaccttatggggaattttaagtgaatttaa

SEQ ID NO: 556743 - DNA, 585 bp, Homo sapiens
taccaccatgccccattacctccttccccatgctctggcaactactaatctactttctgtttctatggataggactattcagaatatatcagaatttccctttgttgggttatttccccctaaaatccatgcagaaaaggaaacaaggtgtttaataaaatagtaaaaataaagacaatttttagaaccaagacttattgaccaatgcaaaataatcagattcattatatgttttacatcaaaactatccaatatataaaactaaacagattttgtatggtattagtttttctcttcctagccaatatcattgttaaagtatttttaggaaatttctcatattcaagtccatacttggtctcatttttctttgtgtaaagagagataattataaatagaaattgacaagatatcctttacctagggccagagacagccactgagctatttgattctgtctaatgaccagccaatactgaataatccaaaagttcccactgaaagaaaaaaactatcagatcttttaaaagattctgtagttcraaaaagagtgacttatttaaagacacagaaatgtatattcat

SEQ ID NO: 556744 - DNA, 578 bp, Homo sapiens
ctttcaaactctatcatggctttatcagctaagtttatgtaatattccatattctttattgtcattgcaacaagttcacagcatcttcaccaggagtagagtccatctcaagaaaagattttctttgctcatccataagaagcaactcttcatccattcaagttttattatgaggttgaagcaattcagtcgcatcctcaggctttgcttctaattctagctctctttctatttctagtacatctgcagttatttcttctactgaagtctttaactgctcaaagtcatccaagagggccggaaccatcttcttccaaactcctgttaatattgatatttttacctcctcccatgaattatgaatattcttaatggcatctagatggtgaaccctttccagaaagttttcaatttattttgcctatatttatcagaggaatcattatcttatggaagctatggtcttatgaaatgtatttattaaataataaaacttcaaagtcaaaattactctcttatatatgagctgcagaaatgacgttgtgtaagcaggcatwaaaacagcattaatctcctgt

SEQ ID NO: 556745 - DNA, 486 bp, Homo sapiens
tgtgagccaccaagcccagactagtcttgtgytcttataacgcagtatgtattcacactcctgtcttccatcagactagatatgcttggagggcagaaaacatattctacaatccctgagtatcctgctgctagcaaagtgccccagagaattaataaatgcttatagaaagaaaaatgaatacgtatgaaaagaaagtatttgattcaaaaagaataatttgaagggaaaagacagattcaagagcaagatcatctgaactgcgatgtgaacatgtaaacgtgggaatcagaatgattcatgctggggtggagtggccacagccaatgatatagtccatgctaagctccacaagtgtgaccatcttgaagtaataggatttttagtgatcgtaatgggatttcaaagtcagattctaattctgccaccactcacagcatgctttttggatcacaggatccctatgagctgtaggtgtctctgtgg

SEQ ID NO: 556746 - DNA, 645 bp, Homo sapiens
atttaatacatatatgcaaaacttacaccctgaaaattataaagcattgctgaaagaagtgcttaaaagacataaatcaagagatacaatatttttatatattgaaagaaagtgttaaaatgtcagttcttcccaaactgatttataaattaaacatagttccaatcaaaatttcagaagcttttttagaaattatcaaactacttctaaaatttatgtgaaaaataaaaatgaccacaagtagcaaaaatcattttgaacaaagaagatggagaattcacactagctgacttcaagccatatgawgcagctatggtatcggtgtaaggataaatattagattcctggaacagaatagagtccaaaaatgaacccacatttttatgttcaactgcgtctcagaaagggggccaaggttattcaaggaagaaagtattaccttttcaacaaaagatcctgggactactgtattttcatgcttataataaataagaaaatattgacttcataccacataccaaaattaactcaaaatgcattatacacctaagcataatcattataatataataaatatagaagaaaatatgaacaagtctttgcagctttggggcatgtaaaaacttcataaacaggacacaaaaa

SEQ ID NO: 556747 - DNA, 632 bp, Homo sapiens
gccatgtgattctctctgcaatgggatgagccttgtcagatgccagtgccatactcttggacttgtcagcatccagaatcatgagccaaattttcttaataaattccttagtctgtggcatttttcataaattacccagtatgttgtagcagcagaagaatggactaagattgccatcaagagtggagttgttggtataacaaatacttgagaatatgggaaagcgacttyggaactgggtaatgggtagaggctggaagaatttgaaggagaaggctggaaaaagcctagataaccatgaacaaagcattaagagtgattctggtgagggctcaaaagaagagaagagctatagggaaagtctgaatcatctcatagattatttaaactgtactgaaaactggagtaaaggtcatccttgttacaaggtagcaaagaccttggttgaattgtgcctgaatcctaagacttcactaaaggcagaacttaagtgattagctaaggtatctgggggaagaaatatctaagcagcaaagcattcagttgttgcatggttacttttaactgcctatggtgagatatgagaggaaagaaatatcttaaagataaatttatcattaaaaaagaaacag

SEQ ID NO: 556748 - DNA, 304 bp, Homo sapiens
gttgttgttgttttgtttgttgttgggttttttgttytgtttttttgtttggtttggtttgtttattttctgctcaagatttctttggctattcagggtcttttgtcattctacatgaatttgaggatttttttttttatttctatggagaacatcattggtattttgttagagattccattgaatgtatactttgcatggacattttgtttgtttgtttgttttttgagatggagtctagctgtgtcacccaggctgtagtgcagtggtacgatctcggctcactgcaacctctgcctcccgg

SEQ ID NO: 556749 - DNA, 634 bp, Homo sapiens
catcatgcagatttaggaagacagagattaaaggttaaagaggtctgagtggctagaatttataaaacagactaccagtgaaaggggagctgagagagagagaaagaaagagcaagctttagaatctacctagggacaccctcaatctaatctgcacctatgtgagaggaaaccacatgagcagagaaagaaccactggaaattagaaagtgcaacaattcacagagtctacacacagctgggaatagcaattcctcccatcagccagagttgaagacttttaagacatggagaaatctcagaagggtgacaccttagtagaagatctaaattagccctcagttaaaagttggtcaagacacactccaaaaaacttaaaagcaagcatttaactgtttccaagaacttatttcttcaccagaacaagttacaacacaatttaaagaaatacgtcaaaatccagcattcaacaacataatattcacaatgttagttatctaatcaatgaagctggaaaatctgcctcataatcatgagaaaatataatcaatagtgacattcataaatragagagatgacagaattggcagtgaaggacattaataaatatgaaaagaattataaatatgtgcct

SEQ ID NO: 556750 - DNA, 584 bp, Homo sapiens
tattatagtgatatcttaggatgctctctcaccttaacagattatgtaacttgacatgtattttagtgacaggtaggtatatttctctaggagagaaaaataaaagttagtatggaattttttttttacttgaaatctaatacatgttttttccagagagttgatcataattcctgggatataacaaagtcaacagcagcggcagcagacttacctgcatcatgtgcccacacccagctcgtggccctaatctacctttctaaaattctatagcaatatctcaccatgtattctttaggcccctactcatttggactaatttttggtgcccaaacatacctttcacttttttcctttcaaacgtgtactcatgcaaatccatctggaatctgtcttcccagawccctcctcaacaccttccagacctaattgccttcctctacctaggcctatttgggtttgttaatgccaaggacagtaccaggcccttattcaacacttcatatacctcagcacacaatagatcagtagaaatgtagaaagtcaaaccctctaagttacattccagaaaagtagcattcata

SEQ ID NO: 556751 - DNA, 553 bp, Homo sapiens
attatacaataataaatgacatatataatatatataatcataaaagacaaagaaggtcattatataatcataaaaagatcaattcagtgagaggatataacaatcctaaacatatatgtacctatatagaagaacccaaattgaaaaacaaatattaccagatctaaataaagacagacagcaatacagtaatagtgggaggacattcaccccaractcacagcactagataggtcactgagatggaaaattaacaatgaaaattaaactttagaacaaatggacctaaaagatgtttatggaacattctacctaacaactacaggatatacattatttttatcagaacttggaatattctccaatataaaccatgttaggcaacaaaacaagtcttaactcatttttaaaagtaatcaaaatcatatcaagtatcttctcagtccacagttggataaagctagaaatcaatacaaagaggaacactagaaattatacaaatacatgggaattaaacagaatgctcctgaataatcactgggtcaaggaagaa

SEQ ID NO: 556752 - DNA, 553 bp, Homo sapiens
attatacaataataaatgacatatataatatatataatcataaaagacaaagaaggtcattatataatcataaaaagatcaattcagtgagaggatataacaatcctaaacatatatgtacctatatagaagaacccaaattgaaaaacaaatattaccagatctaaataaagacagacagcaatacagtaatagtgggaggacattcaccccaaactcacagcactagataggtcactgagatggaaaattaacaatgaaaattaaactttagaacaaatggacctaaaagatgtttatggaacattctacctaacaactacaggatatacattatttttatcagaacttggaatattctccaatataaaccatgttaggcaacaaaacaagtcttaactcatttttaaaagtaatcaaaatcatatcaagtatcttctcagtccacagttggataaarctagaaatcaatacaaagaggaacactagaaattatacaaatacatgggaattaaacagaatgctcctgaataatcactgggtcaaggaagaa

SEQ ID NO: 556753 - DNA, 563 bp, Homo sapiens
tacaggtaggcagatgaatgaaaagaatgaaaaaagaggtagatgagagatagacatatagatgaataggggctatattttaactgctcacataatatttcaaagtctatttaaatgaagatacgagattaattagaatgttatctatatwcctcaaaaatgactcttcttcttgcaaaggtagattatggtattctaaaacttaaaaggactacagaaatcatcatgccaaccactttccagatgaggaaacttaggctaaaaagataaaagccaggatcacacagttggtgagtgccagaatgaaaccagatcctaaatgtcctgctatctagcaaagcagttctctacaatacaatcccaccttccttgataatactaagttgcttagcaaacaagatcttcataaatgttgcaaggataaatttcctttcagtctgcccgaagcaaataaccacaatttgcttagtattagtaaaactcagatcatctaggcattgtcaccccttcaagttgccctcagagtgggacagtcaacttggaacaaagtttgacttaacaca

SEQ ID NO: 556754 - DNA, 563 bp, Homo sapiens
tacaggtaggcagatgaatgaaaagaatgaaaaaagaggtagatgagagatagacatatagatgaataggggctatattttaactgctcacataatatttcaaagtctatttaaatgaagatacgagattaattagaatgttatctatattcctcaaaaatgactcttcttcttgcaaaggtagattatggtattctaaaacttaaaaggactacagaaatcatcatgccaaccactttccagatgagraaacttaggctaaaaagataaaagccaggatcacacagttggtgagtgccagaatgaaaccagatcctaaatgtcctgctatctagcaaagcagttctctacaatacaatcccaccttccttgataatactaagttgcttagcaaacaagatcttcataaatgttgcaaggataaatttcctttcagtctgcccgaagcaaataaccacaatttgcttagtattagtaaaactcagatcatctaggcattgtcaccccttcaagttgccctcagagtgggacagtcaacttggaacaaagtttgacttaacaca

SEQ ID NO: 556755 - DNA, 563 bp, Homo sapiens
tacaggtaggcagatgaatgaaaagaatgaaaaaagaggtagatgagagatagacatatagatgaataggggctatattttaactgctcacataatatttcaaagtctatttaaatgaagatacgagattaattagaatgttatctatattcctcaaaaatgactcttcttcttgcaaaggtagattatggtattctaaaacttaaaaggactacagaaatcatcatgccaaccactttccagatgaggaaacttargctaaaaagataaaagccaggatcacacagttggtgagtgccagaatgaaaccagatcctaaatgtcctgctatctagcaaagcagttctctacaatacaatcccaccttccttgataatactaagttgcttagcaaacaagatcttcataaatgttgcaaggataaatttcctttcagtctgcccgaagcaaataaccacaatttgcttagtattagtaaaactcagatcatctaggcattgtcaccccttcaagttgccctcagagtgggacagtcaacttggaacaaagtttgacttaacaca

SEQ ID NO: 556756 - DNA, 421 bp, Homo sapiens
taatttttttttctttataaattacccagtctctggtattttgttagagcaacacaaaacagactaagacaagtcctctatttacataattccatggtcactcaagtttgagattctgaaacaataggaacatctggatatctgggcctacaaaccaattttccataaacataaccatcaaaccctttgctagaataaggggtggggaatgctgcaaagattctcaaacttaagcatacatcaaaatcacccaaagagctttgttaaaaaaacaaacaaacaaacaaamaaaaaaaacctttatccaaattaaatttaaaggagttacttgagcaaagaaccaattgtgaatcaggcagtctcctgagccagagtaggctcagagactccagcgcagccacatagtggaagacagaaaaag

SEQ ID NO: 556757 - DNA, 551 bp, Homo sapiens
caaatatgttttccaaacttttagatttctcttcttccttgggaataccaactattcttaggtttacttgtttaacataatcctaaacttcctggagcctttgttcatttttttttattattctttattatttgtctttgtaggattggcttaattcaaaacccttgtcttcaagctttgaggttctttcttctacttgttcaattctattgctgagactttccaatggattttgcaattctctaagtgtgtccttcttttccagaagttgtgattgttttttatttaggctatcaatttcactggagatgtttccatttatattacttttttcatttccttaagatggacttcacccttctgtggtatctccttcactggcttaatagtcaaccttttgaattctgtttctagcaatttagagattttgtcttggtttggatccattcctgttgagctactgtgatcttttgggggtgttaaagaactytgttttgtcatattaccagaattgtttttctggtttcttctcattggggtagactatgtca

SEQ ID NO: 556758 - DNA, 567 bp, Homo sapiens
gctgggcatgctggctcatgcctgtagtcccagctacttaggaggctgaggcagaaggattgcttgaacccaggagtttgagaccagcttgggcaacataacataatgagaccttgtctctaaaaaaaagaagaaagagaagaagactattgagcgtttcagtgggcatttctatactcaacatataaaactcatgactgaccagccacagttgctcaagcctgtaatcccagcactttgggagtctgaagcaggtggatcacttgygggcaggagttcaagaccagcctggccaacatggcaagaccacatctctactaaaaatgcaaaatttagctgggtgtggtggtgcatgtctgtaatcccagctacttgggaggctgaggcatgagaatcacttgaacccaggaggcagaggttgcagtgagccgagattgcatgactgcattccagcctgggcaatagagcaagactctgtctcataaataaataaatacatacatgtatacaaactcatgactgactgtggctttttttttactcccatgtattctgtgagacagaaaa

SEQ ID NO: 556759 - DNA, 585 bp, Homo sapiens
gggaagggtcaatactgggtcaggaaaygagggcttggacaagcagtcctaaggctgaagtcagggaataattttcttctctctctgcattcagaattttggtttgatcaggactctgtggcagggagctgcctggagaggttccactaataggggttgagacatcccaggccacagaagggacagaccaagagagttctgagagcatctcaggaagattctaagatattctagtatctcctcatcaacagttatattttgctgaaggttaccatttggactttactgaactacatcccacccatgatatgacttggatgagcgagaggtgtggccctgtcccaaatgactgggacagtgatgcagcagtcgccatcaggacctagctgtgctgcgtgaggcagagatctctggagggtcctcagagatgataatggcagccaccactaccagccggaactaccttccagatcacccagcacctaggcctgcatgtgacataagattcacctgaggatctcgttaaatagccagttctgactcggtaggtctagagtggggtccaagagtccgaagttctagcaa

SEQ ID NO: 556760 - DNA, 452 bp, Homo sapiens
gtaaagaaaaacaatttgactgagacttggccatttagctaaaatctaaaagacctatttaatttaaagtataagtcaagcagagatcttatcttctgtccataaataataagaatgattgtttttcgctaagtggaaaaagtgagatgaggcaagaagttgaagaatgcctagccaggtagcatatgaagccyacaagtttccagctgtgggtctgatgaaaaataatgagacatctgatggaacttaggatcttatttgaaaaataagccatcaagtactttaactttctggtatttcaaaagtaaaaacgtatactaatcacttgtttttatttcacttatttgacactacacatctgtcttagtacaaactcatgtttatgcaatgagatttattagactgatagttcatatcttagccccttttcatagagaatcattgaaaaaaaa

SEQ ID NO: 556761 - DNA, 452 bp, Homo sapiens
gtaaagaaaaacaatttgactgagacttggccatttagctaaaatctaaaagacctatttaatttaaagtataagtcaagcagagatcttatcttctgtccataaataataagaatgattgtttttcgctaagtggaaaaagtgagatgaggcaagaagttgaagaatgcctagccaggtagcatatgaagcctacaagtttccagctgtgggtctgatgaaaaataatgagacatctgatggaacttaggatcttatttgaaaaataagccatcaagtactttaactttctggtatttcaaaagtaaaaacrtatactaatcacttgtttttatttcacttatttgacactacacatctgtcttagtacaaactcatgtttatgcaatgagatttattagactgatagttcatatcttagccccttttcatagagaatcattgaaaaaaaa

SEQ ID NO: 556762 - DNA, 590 bp, Homo sapiens
aacagtccatgcttgagtgataaatgtgtatatcaggaagtaaatctagtggaaaagaaaatctatccaccacttgcgctagcagktgggagactcatattgacagtaaggattcattttcttaattctgagtaactctgagtctttttctaaaaactcatcttcttttctctactacccgccaaaagggtggtattacctatttattaaaaacagccataccactttacacttacaagtcacttgttcatctttgaaactcaaacatcttacatttgcttaatgcagataccctaaggaaatgtaacttagcattaatgacaacaccaaaacacagaggctggtttctttaactgggtttactcagcaatctgaaatgaaacttttaggattttaggaagtagtaacatcatttattttatttctactatgtatctggcaccttattttatgtaaacataacaattgtataaggaaagtattttctccacttcagaataaaggaatctatggcccaaaattgcataacttgcaaaaagttattacatctatatattagtccattttcatggtgctgataaagacatatc

SEQ ID NO: 556763 - DNA, 576 bp, Homo sapiens
tggtgttaggacatgcgcctttttgggatgtgattaattccattgtggctcattgtgaaataggacacgggccacaatcacacaccaaatctgctggtaccttgattcttgggctttccaccctccagaactgtgagaaataaatttatgttatttataaactacctaattgatgatatttcattatagcaacctgaatgaactaaggaacataggaaaagatcctcaacatcactattagggaaatgcaaatcaaagtcacaatgagatttgaattcacatctatcaaggtggctaccatcaaaataaataaaataacaagtgttggtgaagatgtggagaaattggaacccttgtgcactgttggtggaaatgtaaaatggtgcagcgcagccacaatggaaaacaggtatctcaaaaaattaaaaacagaattaccatataatctaggaattccacttatggatatatatttagaatcctttttgttttgttttgttttgtttttatgatggagtatcactctgtcgcccaggctggagtgcagtggcrcaatctcggctcactgcaagctct

SEQ ID NO: 556764 - DNA, 609 bp, Homo sapiens
aagcatctcatggaggacagacagggcctgggccttctgcaactgrctgccatccacatctccagggggaacctgaagtctcttctgtccttgagacacaagaaagtggagattctgcacatttggcccagaagtgccaaggtgttcctgctaagtaggccacggttctgaggcaggtcaaagcccagagatccaacagggccacagtggcaaagcagcagggccaccagtagaacaagcagtaggaccattgggaaacgagggtgctgctggcctagctgagctggggtcgggatgaaccccgcactccaggttctctcaaggcattctttttatatgcatggcttatagctggaaacaaatagttttcaggattggccaagatggccgactggaacctgctagtgtgtgccactctcatggagagaaatggaaggggcaagtaaatacagcaccttcaactgaaacaaccacgtacacacattgagactcaagaaaacaacttgacccatggagaatagagcaaagtaaggcaggacaactgcccccccaggagtgacacagagccaggggagcctctcctgcccagggaagtggtgagtaagtgag

SEQ ID NO: 556765 - DNA, 609 bp, Homo sapiens
aagcatctcatggaggacagacagggcctgggccttctgcaactggctgccatccacatctccagggggaacctgaagtctcttctgtccttgagacacaagaaagtggagattctgcacatttggcccagaagtgccaaggtgttcctgctaagtaggccacggttctgaggcagktcaaagcccagagatccaacagggccacagtggcaaagcagcagggccaccagtagaacaagcagtaggaccattgggaaacgagggtgctgctggcctagctgagctggggtcgggatgaaccccgcactccaggttctctcaaggcattctttttatatgcatggcttatagctggaaacaaatagttttcaggattggccaagatggccgactggaacctgctagtgtgtgccactctcatggagagaaatggaaggggcaagtaaatacagcaccttcaactgaaacaaccacgtacacacattgagactcaagaaaacaacttgacccatggagaatagagcaaagtaaggcaggacaactgcccccccaggagtgacacagagccaggggagcctctcctgcccagggaagtggtgagtaagtgag

SEQ ID NO: 556766 - DNA, 595 bp, Homo sapiens
agcatctcatggaggacagacasagcctgggccttctgcaaatgactgccatccacatctccagggggaacctgaagtctcttctgtccttgagacacaagaaagtggagattctgcacatttggcccagaagtgccaaggtgttcctgctaagtaggccacggttctgaggcagttcaaagcccagagatccaacagggccacagtggcaaagcagcagggccaccagtagaacaagcagtaggaccattgggaaacgagggtgctgctggcctagctgagctggggtcgggatgaaccccgcactccaggttctctcaaggcattctttttatgcatggcttatagctggaaacaaatagttttcaggattggccaagatggccgactggaacctgctagtgtgtgccactctcatggagagaaatggaaggggcaagtaaatacagcaccttcaactgaaacaaccgggtgcacacattgagactcaagaaaacaacttgacccatggagaataaagcaaagtaaggcaggacaactgcccccccaggagtgacacagagccaggggagcctctcctgcccagggaagtggt

SEQ ID NO: 556767 - DNA, 595 bp, Homo sapiens
agcatctcatggaggacagacacrgcctgggccttctgcaaatgactgccatccacatctccagggggaacctgaagtctcttctgtccttgagacacaagaaagtggagattctgcacatttggcccagaagtgccaaggtgttcctgctaagtaggccacggttctgaggcagttcaaagcccagagatccaacagggccacagtggcaaagcagcagggccaccagtagaacaagcagtaggaccattgggaaacgagggtgctgctggcctagctgagctggggtcgggatgaaccccgcactccaggttctctcaaggcattctttttatgcatggcttatagctggaaacaaatagttttcaggattggccaagatggccgactggaacctgctagtgtgtgccactctcatggagagaaatggaaggggcaagtaaatacagcaccttcaactgaaacaaccgggtgcacacattgagactcaagaaaacaacttgacccatggagaataaagcaaagtaaggcaggacaactgcccccccaggagtgacacagagccaggggagcctctcctgcccagggaagtggt

SEQ ID NO: 556768 - DNA, 595 bp, Homo sapiens
agcatctcatggaggacagacacagcctgggccttctgcaaatgactgccatccacatctccagggggaacctgaagtctcttctgtccttgagacacaagaaagtggagattctgcacatttggcccagaagtgccaaggtgttcctgctaagtaggccacggttctgaggcagktcaaagcccagagatccaacagggccacagtggcaaagcagcagggccaccagtagaacaagcagtaggaccattgggaaacgagggtgctgctggcctagctgagctggggtcgggatgaaccccgcactccaggttctctcaaggcattctttttatgcatggcttatagctggaaacaaatagttttcaggattggccaagatggccgactggaacctgctagtgtgtgccactctcatggagagaaatggaaggggcaagtaaatacagcaccttcaactgaaacaaccgggtgcacacattgagactcaagaaaacaacttgacccatggagaataaagcaaagtaaggcaggacaactgcccccccaggagtgacacagagccaggggagcctctcctgcccagggaagtggt

SEQ ID NO: 556769 - DNA, 595 bp, Homo sapiens
agcatctcatggaggacagacacagcctgggccttctgcaaatgactgccatccacatctccagggggaacctgaagtctcttctgtccttgagacacaagaaagtggagattctgcacatttggcccagaagtgccaaggtgttcctgctaagtaggccacggttctgaggcagttcaaagcccagagatccaacagggccacagtggcaaagcagcagggccaccagtagaacaagcagtaggaccattgggaaacgagggtgctgctggcctagctgagctggggtcgggatgaaccccgcactccaggttctctcaaggcattctttttatgcatggcttatagctggaaacaaatagttttcaggattggccaagatggccgactggaacctgctagtgtgtgccactctcatggagagaaatggaaggggcaagtaaatacagcaccttcaactgaaacaaccgggtgcacacattgagactcaagaaaacaacttgacccatggagaataragcaaagtaaggcaggacaactgcccccccaggagtgacacagagccaggggagcctctcctgcccagggaagtggt

SEQ ID NO: 556770 - DNA, 465 bp, Homo sapiens
aaatcccatgggcaaaggtattaatttaagattctttattgcatgtctggtaacaaggacataggaatgaatgtagtcacttataaacagaggagacaatgagatgaggacataaccttgtcctgcagaccctcaacattcaaaggtagagcagagaaggagaatatgtaaaggagcctgaggtaaagttgccagtgcaattagaaagagaaatgggaaagaatgagggagagtctaatgaggggaagacagtggtactttcagggaaggtgagggctgagctgtcctactgaacctggaaacagactccactgatgaccttaggaggatctggtttagtagaatgaatgggatagaaacacgattggagtaagttgaagaggaaacacaaaaaagagaaattaagaatactgcgtatagaaaattatttggggaagttygtttgtcaagtggaaaaaggaaata

SEQ ID NO: 556771 - DNA, 622 bp, Homo sapiens
tttcttgcaaaacccagcatctcagcaaaagctgctgttagcacttcaaatttatcataacttaaagggagacacaagaggtacagttatgagagtacaatggagccctaaagtaaaattagtccacaaagatctagaatatcatcatctaaattttttgaaagaaaagtaagttaagtatctaccatttataacaaaatgctccttttagagtcttaggagacckaattccaccccccaatgcatgagctgacaacatcatgatcaaacatatgcagggttagtgtttataatacctgatgcaggtgtgatggtcacatttttaaaattgtattgtagacttgcaggtggccagataattttttattcatggtcgtttattcatttttctggagatgtttccaataaaaagtgaattagagttatgttgcacttttcattttcaaagaacatttgaatccatgatcccacttgacctacaaaattgtgattttaaatcagagaaggcaaatattatcatatctgttttatagcagaagaggttgatgcttataaacctgccccaggtcatacagctagtaaaagataaaaccaggtcttacgacttcaagtctaaaatgta

SEQ ID NO: 556772 - DNA, 570 bp, Homo sapiens
ccaatgtccagaagagtttttcctaggtttattttttttaagtattttagtagtttgaggtcttacatttaagtctttaattcatcttgagttgtatatgctgagagatagggatctagttttattcttctaaatacaacaatcccattttcccagcaccatttattgaatagggtgtccttttcttttcttttcttttctttttttgagacagggtctggttctgtcgcacaggtgctggagtgcagtgacgcaatcacagctcattgcagggctcatgctatccctggagggagcacctcagcatcctaagtagctgggaccactcaggcatgtgccactacatccagctaattttttaaattgtttgtagtgatggggcctcattakgttgcccaagctggtcttgaactcctgggctcaagtgatcttcctgtctagacctccccaagtcctgatattacaggcatgagccaccatcctcaggcggttcattcttcttttccattaatctatttttataccagtaccatgctgtgttggttactatagccttgtacgatttgaagt

SEQ ID NO: 556773 - DNA, 593 bp, Homo sapiens
  misc_feature 377, 378, 379, 380, 381, 382, 383, 384, 385, 386, 387, 388,389, 390, 391, 392, 393, 394, 395, 396, 397, 398, 399, 400,401, 402, 403, 404, 405, 406, 407, 408, 409, 410, 411, 412,413, 414, 415, 416, 417, 418, 419, 420, 421, 422, 423: n = A,T,C or G
  misc_feature 424, 425, 426, 427, 428, 429, 430, 431, 432, 433, 434, 435,436, 437, 438, 439, 440, 441, 442, 443, 444, 445, 446, 447,448, 449, 450, 451, 452, 453, 454, 455, 456, 457, 458, 459,460, 461, 462, 463, 464, 465, 466, 467, 468, 469, 470: n = A,T,C or G
  misc_feature 471, 472, 473, 474, 475, 476: n = A,T,C or G
ggaatttctgaatccttgagtgtcaacatttttagctttacttgattttgccaacttacagttgtactatactgtgttcttactaactttatagaagaatgttcatttcacaacatacttacatagtgtccatacagtgtatagtgtgtgtgtatatagtgtgtatgtatatatatacaggataaacatacatagtatatatatttgggcatttaacccaaaatgtaataatcctaatttttttattcttwtcttttttgcccttatcttttagcttgtctcttaaaatatatatatatatatataactacatttttgaaaaattccatctgtgactccattgtctattatcaaacaaatgtaacttgtctactttnnnnnnnnnnnnnnnnnnnnnnnnnnnnnnnnnnnnnnnnnnnnnnnnnnnnnnnnnnnnnnnnnnnnnnnnnnnnnnnnnnnnnnnnnnnnnnnnnnnncctatttcctgccttctattgaattatttaaatagtcatgattcccttttattcctcactattggtttcaatatttttgttatcttaatggatataacattatttttctgcagtcaa

SEQ ID NO: 556774 - DNA, 583 bp, Homo sapiens
tttcttgaatgggccatagtagcaagctggagtggtcccgttgtatagtgcaaaatgtggacacaggtaattccacctgaaatgtacctctccaacactttcctcaatctgaatggaacacacgttctctacctattgcctaaggatgagtgggattcatccttttggactcatctaaaatgtacttttctcaaggaagcagtctctgacactgttcctcctgctccctgtcaacccagaatgtgaagctgtcttcctatgtgaacttccaatatcccttacttctgttgcctttgaaatgtttattatctttgtggttaatttgtttaatttctaacttttctactagattgtaagctccaagaaggcaaggacagtgttacaatgctgttgttttttgattttttaataatagacattcttactgatgtgacatggtgtctcattgtggtttggatttgcatttctctgataattagtgatgctgagcatttttttcatatgtttgttggctacttgtacatcttcttttgaaaagtgtcagttcaygtccttttcccattttttaatggagttgtttttt

SEQ ID NO: 556775 - DNA, 509 bp, Homo sapiens
ctactatttctgagaataagaaaattgtaattaacaactcatattttatcattctaaggacctgggtttgaatcccatttctaccacctgtaagccatgtaatttttccatgctttaaattttgagtaattagctgtttcatctcttaaatgggaataatagggccgggcatggtggctyacacctgtaatccaaacactttggaaggccaaggcaggcagatcatttaaagtcaggagttcgagaccagcctggccatcatgatgaatcctcatctctactaaaaatacaaaaattagctgcacatagtgatgtgcgtctgtaatcccagctacttgggtggcttgaggtgagaggatcacttgaacctgggaggcggaggtcgcagtgagccaagattgcgccactgcagcccagtccgggtgacagtgagactccatctcaagaaataaaaataaaaattaaaaattaattaattagttaatttaataggaataataatagtgatt

SEQ ID NO: 556776 - DNA, 487 bp, Homo sapiens
ccaacataaaacaaaatttatagtaattataagaagttcttttatactaaaaattaagttgtaattatgatagaaataatctgtaaaaggtatttttagcaaaatttattaatacgggtagcaataataatacccaattatatatgcatattgtttgtattttagaacctgtgacaaatgaaaatggttttcctagataagaacgaaactgtgttgggtggctaacaagattgaaactcatctgactttgagaaataaatcaatttggtttgtttatttacaatcrttatttttccttttaccaatacctaagttatttcactgtaaaactttcatagaagaatttcaggaaaggcttgtatttacgtgttatagatgaggtacaccacagtgatttagatcagcagtccccaaccgttttggcaccagggaccagtttcatggaagacaatttttccacagatcaggggtgggcagagtttggggg

SEQ ID NO: 556777 - DNA, 499 bp, Homo sapiens
cttgagaattctgaaaaataaaaaagaaaagaagaaaataatgacatatttatcttcagagttctgaaacccagtatggacaaatgtatgaagaactatatttattattttgtagatcttggaatagtcatgttcaacaaaagggggcagaatcatgtgaattttaaagcctgagctccagagtaagacttagaacaagtgccagttgggcccgttattagctctgttattttcagcaagttaaactctctagatcttagtttcttcatctgtaacatgaggatgatattaggatgataccacagaagattgtgtaaggcttacaaagaatcgtctacataaagcacttatcctagtaagaggtgaagccagctgggtttctgggtcarttggggacaacttttgtgtctagctaaaggattgcaaatgcaccaatcagcactctgtgtctagctaaaggattgtaaatgcaccaatcagcactctataaaaatgcacc

SEQ ID NO: 556778 - DNA, 550 bp, Homo sapiens
actgaacaattccacttctaggtgtttaccttagagaaatgaaaacttatgttcacacaaaaacccatttgcaaatgtttagagcagctttactcataattgtsaaaaactggaaacaatttaaatgtgcttcaaccaatgaatggctaatcaaactggtacatacctgaaatggaatattaattagccatatgaagtaaactattgacacacagaatagtgtgtgtcaatagtttacttcttatagctaattaataagctattagctataagatgcatgaactgcaaatgtactttgctaaatgaaggaagccagataagagtagcacaatcatttggaagatctgggacactcactgtttaccatctacatactggtattgcagcattttatcagtaataatgcacattccattgtatgtcatttgaacattggccctactataatgtttaatttattaacaatatagtagtttccctctttgttgggaacaagccccccaaaatctggccatatactggccccaaaactggccataaacaaaatctc

SEQ ID NO: 556779 - DNA, 550 bp, Homo sapiens
actgaacaattccacttctaggtgtttaccttagagaaatgaaaacttatgttcacacaaaaacccatttgcaaatgtttagagcagctttactcataattgtgaaaaactggaaacaatttaaatgtscttcaaccaatgaatggctaatcaaactggtacatacctgaaatggaatattaattagccatatgaagtaaactattgacacacagaatagtgtgtgtcaatagtttacttcttatagctaattaataagctattagctataagatgcatgaactgcaaatgtactttgctaaatgaaggaagccagataagagtagcacaatcatttggaagatctgggacactcactgtttaccatctacatactggtattgcagcattttatcagtaataatgcacattccattgtatgtcatttgaacattggccctactataatgtttaatttattaacaatatagtagtttccctctttgttgggaacaagccccccaaaatctggccatatactggccccaaaactggccataaacaaaatctc

SEQ ID NO: 556780 - DNA, 550 bp, Homo sapiens
actgaacaattccacttctaggtgtttaccttagagaaatgaaaacttatgttcacacaaaaacccatttgcaaatgtttagagcagctttactcataattgtgaaaaactggaaacaatttaaatgtgcttcaaccaatgaatggctaatcaaactggtacatacctgaaatggaatattaattagccatatgaagtaaactattgacacacagaatagtgtgtgtcaatagtttacttcttatagctaattaataagctattagctataagatgcatgaactgcaaatgtactttgctaaatgaaggaagccagataagagtagcacaatcatttggaagatctgggacactcactgtttaccatctacatactggtattgcagcattttatcagtaataatgcacattccattgtatgtcatttgaacattggccctactataatgtttaatttattaacawtatagtagtttccctctttgttgggaacaagccccccaaaatctggccatatactggccccaaaactggccataaacaaaatctc

SEQ ID NO: 556781 - DNA, 335 bp, Homo sapiens
gttatatttcatcctcccccactgattacagtgcttggactaggattgatttaatagtaaatgattgatttttgcagttcacatatttagaaaatgaagttttcctctttatcaagcagtgaatctatagatttctaagacctactatctgtgttattggttcatgacacataagtaatgtgacatgctgactgaattatgacataagctaggaattgtcccataaggaattctgttcttcaaatcaatgtcatacatcttcaaattgatgtcatacaactaagcatcacaatgaatagatkggataaaaagtcatctttctgatgagtaaaaat

SEQ ID NO: 556782 - DNA, 650 bp, Homo sapiens
  misc_feature 524: n = A,T,C or G
tgtctaatttatgatgcaagaaaacagaacttttaccatggttcctggaaacatagtccttaggccccaagtttaggcaagcatctcagtttaaattccttacttcacctgatcttaaggccttgttccttttttatttagtctttaagcttaaaactatggaataatggaggacaataaccttcaactccctaagagctatcttagtgctaggtcagggctttccatgtggtttctcacactttcccccttgctgatactcttctgtattttattatgtgttacattttgtgatttatatttgtattacatttatcacagttttattatatctattcaataactcttcaacaggatatatttcaagaagtattagtgttctgttctgctttaactgggagtgtttctccagtttctactcccttttatcaggttaattcaaatattttgtcaacatgtatttagtttttaagtttttactcctctcctcaagaatattttaagcatgttattttttccgggtntggacccccaggagcacgtttggggtccaccttttcttttatcatttctcctccggagttaaagagcatagtttaactctcctttaatctrtatatttcttgagcgcagccacattgtgacagctg

SEQ ID NO: 556783 - DNA, 596 bp, Homo sapiens
catatgcttcatgttgtgaatttaccttagtatagtcaccagtgctctctttatggacacttagttattttcaggcttttgctgtaagatcacagtgcatagacttatgcatattattttgaacacatacacaaccacacatggtataatttcacatagcacatcttcaatttcaaatatttattcaactagtttaataaagtactattttttcttacccatagcttatatttggaaagaaaactacctgggaaaatactttctaccctgccataaaccctggacacttaggagaaagatggaagacactgggatcaaagcaaatcgaggaaaaaattcaagtgaagagactggaaattaagagagtccatactggatgatttttcagtaaagaattgcgcaatacaaagggtgaggtgagttaatttgtttattttatttgaaaaaagaagaaaagaatttgaggcagtttatttcawtaattgattgggaggcaattttaggtaaatttaatatctagcaaaatagaatagatgtagttgaaatcaaaactacatttttatgcttcagtgagtcatgctaaatgccatataaaa

SEQ ID NO: 556784 - DNA, 587 bp, Homo sapiens
aaaatactgtttaggtaagaatgcttaatatcattcatatttcttagagtgtaagttcagcaataatttggttcatttgagattaatatcattgtcggagatcacaaggaaccaaaaaaaacaaaaaaaamaaaagtaaaatggtgcttttcaaaataatcaaaatcaaatttaaaatctaccatcctagatttagaaaacaaatttatacttagttaaaattttacattgttttaatattaaattattaaattataatttcttttgacaataaaatacattttagtaaagtttaattcatggggatcccattagaaggggaaaaactttgttagctagaaaattaatgttaaatgtattttaaattatcattcaaaaacatattgtagtatgatatggcacctgatatctttttccccagtattgtcactgggtatgttaagattgatgagagcaggctgggaaactcctaaggtaccaacaatcagtaatagtctccaaaggcaggactacacaacacaagagaaggtagaaatttcacataagttgcatacttacattaaactgtacaacttggtaagcattat

SEQ ID NO: 556785 - DNA, 589 bp, Homo sapiens
ttttccatctacattcgtaagaaatactggtctgtaattttttgtgtgtgatgtctttagtttggataccaggttaatatcaccctcatagaataagttaggaaatgttctytcctcatctgtattttgaaagactttatgaaggattggtgttaattcttctttaagtatttggtagattcaccagtgaggctgcctgctggtcttcagcttttcttagtggaaagttttttgattactacctcaatctctttacttgacataggtctgtctattcagattttctgtttttttctcaagtcagattcagtagttcatatctttctggtaatgtgtctttcatccagcttatccaattattagcatatattgtttatatgtataatcctttttattcatattataatcctatttatgtctctaagaacaatagtaatgtcccctctcatttctagttttaataatttggtcttctgtatttttgcagtgcagtggctcatacctgtcatcctagcactttgggaggctgcggtgggaggattgcttgaccccaggagttcaaggccagccagggcaacatactgagagc

SEQ ID NO: 556786 - DNA, 589 bp, Homo sapiens
ttttccatctacattcgtaagaaatactggtctgtaattttttgtgtgtgatgtctttagtttggataccaggttaatatcaccctcatagaataagttaggaaatgttctctcctcatctgtattttgaaagactttatgaaggattggtgttaattcttctttaagtatttggtagattcaccagtgaggctgcctgctggtcttcagcttttcttagtggaaagttttttgattactacctcaatctctttacttgacataggtctgtctattcagattttctgtttttttctcaagtcagattcagtagttcatatctttctggtaatgtgtctttcatccagcttatccaattattagcatatattgtttatatgtataatcctttttattcatattataatcctwtttatgtctctaagaacaatagtaatgtcccctctcatttctagttttaataatttggtcttctgtatttttgcagtgcagtggctcatacctgtcatcctagcactttgggaggctgcggtgggaggattgcttgaccccaggagttcaaggccagccagggcaacatactgagagc

SEQ ID NO: 556787 - DNA, 589 bp, Homo sapiens
ttttccatctacattcgtaagaaatactggtctgtaattttttgtgtgtgatgtctttagtttggataccaggttaatatcaccctcatagaataagttaggaaatgttctctcctcatctgtattttgaaagactttatgaaggattggtgttaattcttctttaagtatttggtagattcaccagtgaggctgcctgctggtcttcagcttttcttagtggaaagttttttgattactacctcaatctctttacttgacataggtctgtctattcagattttctgtttttttctcaagtcagattcagtagttcatatctttctggtaatgtgtctttcatccagcttatccaattattagcatatattgtttatatgtataatcctttttattcatattataatcctatttatgtctctaagaacaatagtaatgtcccctctcatttctagttttaataatttggtcttctgtatttttgcagtgcagtggctcayacctgtcatcctagcactttgggaggctgcggtgggaggattgcttgaccccaggagttcaaggccagccagggcaacatactgagagc

SEQ ID NO: 556788 - DNA, 330 bp, Homo sapiens
ccccttgaatgtctactccattatcaaataaattaaaattgtttagagaaagcacttttgggacgtctgggagagagacgaagtttgcatgcagtttggaakcaaactgaacattcttactcgggattaaacccattgacgtgcaggatcctcatctgtttgacgatagtgcttttcccagactcaccagcccctgcaaacaaacagaaagaacgctgtgatctgtgtccggatatcgctgccatctctcaccactagccgggtctgagcaatcctcctcccccagcacggggatttcctacacgcgggttcctggctggaggagctcgc

SEQ ID NO: 556789 - DNA, 507 bp, Homo sapiens
gagggtacaggtttcggtccctgtccaaagggggcatgcttcagtcaggagaaggcaggttcctgtcaggaggggacagatcccagtactgagggggcaggtccctgtcaggaggggacaggtttcagtcaggtgggggcgggtttctgtcaggggggcaggtcccagtcgggatggggcagatttcagtcaggagtgtgcaggtgcctgtcatgaggggaccagttttattcaggaggggacaggtttcaggcaggaggggacaggtccctgtcaggaagtggcaggtttcagtcaggagggggcagctttctgtcaggagagggcaggtctctgtcaagagggggcaggtccccatagagggctgtgtcccagcagccaagtgaaagaagcttttttgtaagggtgtgttgggctgtgtcagcgtctgtcaaaagattgcgtatgttgaagaaaaatgaaatcaactttggatttattrgggttcatgtcattgggtgagatggt

SEQ ID NO: 556790 - DNA, 396 bp, Homo sapiens
ttcccgctgtggctctccagcgtagtacccaccttacatgaactatttccctatggacgtgggcaaggtccaccttgggcacctgggactaagaagaggatcaccaccagggggcagcatctcaccaggcactcacctgagctctcctgagcaggccttttagcagagaaagagccagggttgcagcttccaagtcaacctcgggagggtcaggagtcccacgtgtttagcattggggttttaagagggaaagtagaataaattcctctgggcatctcaacaaatcagcccaagccaaccaggttttgtaagagcagtcktgtgaaacatcaacgaagattaggttagaattaatgcaggtatgaacttcagctcaaaataatgtaatattttaat

SEQ ID NO: 556791 - DNA, 421 bp, Homo sapiens
gaatgctaaaaactataaaacattgatgggaaaagactgaagaaacaaatggatggagcattatcttgtgctcatggattagaagacttaatattgtttaactatctacacaacccaaagtgatctttacattcaatgcaattcttgttacaattccagtagcattcttcacagaaacagaattaaagcaatcctataaaatttgcatggaaccacaaatgacyccaaacagccaaagcaatcttaagaaaggagaacaaaatatgaggcattacacttcctgatttcaaattatattacaaagttataataattaaaacattatagtactggaataaaaacagacaaattggccaaacaaacagaatacagagcccagaaatgaactcaggcatagatgatcaactaactttcaacaagg

SEQ ID NO: 556792 - DNA, 559 bp, Homo sapiens
attcatttattagtccatctgtctgtccatccataaccacctatccatttatccatccattaatccatccatccatccgttcattagtccatccatctgtccattcatccataacaactcaaccatctattcttctatctatccattaatttactcattcatccatctgcccatttattagttcatccatctgtccattcatccataaccactcatccatctrtttatccagtcatccacccacccattaatacattcattcatctattcattcattagtttatccatctttccattcatccataaccacacatccatttattcatcatccatccctccagctatccatccattaatgcattcattcattcacctttccattcattagtccatctatctgttcattgattcataaccactcatccatctattctttcttccattcattaattcattcatccatctgtccattcatccataactactcatccattttccagtcagccatccatcaatgtatccattcattagtccatctgtccattcatccataaccact

SEQ ID NO: 556793 - DNA, 392 bp, Homo sapiens
ttcattcacaagtcagacaatttactaaagcaaacaaaatcaagtcactaccccaacttaaagccattcaatggcttcccactacccttggccttaaaatcaaaatctttaacaaatcttacaggcctttccacagtttggctcttctttagcctcaactcacatgagacaagtggacactctttgaacatcaaactatctcaggccttgatacattctttctaccactttctccccatccctaacttccttttaataggtgagataatggagtggacttaaacattgagaaaatgtttgaaaaagtttgctatggtttaaatgttcaccccttccaaaatttatgttgaaatttaattgccartgtattgagaggtggggcctaatggtgg

SEQ ID NO: 556794 - DNA, 579 bp, Homo sapiens
acaggtgtgtgctaccacacccggctaattttcatatttttagtaaagacggggttgcaccatgttggccaggctggtctcaaactcctgacttcaggtgatctgcccgcctctgcctcccaaagtgctgggattacaggcatgaagccatggtgccctgcccaggaaaacaattttaaatgttcttaatcaaaagcaaaagtgattgagaaaagcacatctgcagcaatcaatggcaggatttacctacaaatttacttcaggcaacaattaacatgtggatttatagttacaacatcaagctagccaagcaagacccctactccaaaaaaaaaaaaaatctgccctagaattagagttcgctttggtgcttattattgctatattgctacttctggctccccagactctaaacatgggtttctgaaagtgtggtacaaagattrtctgcaaagcaaccaactctataaatcactgcaaacactaaggatgggagacagtggaaggggactctctaaaagccagaaagcattttttgctactacaaaagaacactgaacttgaaaatcagggttttag

SEQ ID NO: 556795 - DNA, 435 bp, Homo sapiens
tctgtacttcccttataaagtatttttatgttaaaaattttcaaagttaatgtgtgaggaagtaactagctactttagttagttagatttctcttccctgaagaaaattactataatggttacttttgctaaaatgcaattactgtcactgtaacaatcaatcatattttttatwtaagaaactttaacaacttttgaatgcattaagaaaagtaaatgaaaaagactcagtgtgaaataagactagacacccaaaccaccccctgcgacccgacatttgacaagaaaacaaatcttagctacctcttttgcaatacattttattgccttatctaagatcactgtgaaagttaaactgtagtagtaagcatgtttctcagagcatcattgaaaaatgctgtgtatattcaacaactattagctatattgtttctg

SEQ ID NO: 556796 - DNA, 570 bp, Homo sapiens
tcactaagcttaatcatttttaagcttttgatttaaagcgggtgatttaaagtgagagatatgcaactcttctttttacttaaacactttagaggccattgtaggattactaattgacccaattttaatattttgttttagggaatatagagacctgaggagagggagagaggtggaggaatgcccagttggcatagcagttagaacacacacaatgctyattaattatatttgccatcatatgtgggtgtggtttgtggcatcccaaaacaattacaatagtaacatcaaagatcacagatcacagacaactgtaattgatacaataataatgagaaagtttgaaatattgcaagaattatcaaaaggtaacagacaggaagtgagcaaatgtgtttgggaaaaaggaaactgataaacttccttcacacagggttgccaccaaccttcaatttgcagaaacacaatatacataaagcacaataaagcgaagtgcaataaaatgaggtgtgcctgtactacctacccattcaaacactgtatttttgttccttttcaaatgataattgc

SEQ ID NO: 556797 - DNA, 548 bp, Homo sapiens
ctgtcaacaacaagataccaaaaacttggtggcttaaaamaacgaaaagtttttttctcttggttccaggtaatagaagtctgaaatcaaggcttcagcaggccatgctctctctgaaggctctgtgagatgattctgccttgtcactgacgggcttcatgttttttagcttgtagatgtatcactctaatctatatctccgtcttcacatggcattctccctgtgagtctgtttctgttttctctctaaggacatcagtcgtaggattagggcccatcctaatccagtgtgacctcatattctctaattatatctgcaaagaccgtatttctaaataaggtcacattctgaggttcttggtgggcatgaatttttttgggaacactattagactcaatatactacctcggagtttttgaaaaggatttaatgagataattcatgtaaagtgtttaatgaagcactttggtaagtgataattgcatacaagtattagatactgatatcatcatcactgcttctgttatttgacaaattttcttgatgt

SEQ ID NO: 556798 - DNA, 548 bp, Homo sapiens
ctgtcaacaacaagataccaaaaacttggtggcttaaaaaaacgaaaagtttttttctcttggttccaggtaatagaagtctgaaatcaaggcttcagcaggccatgctctctctgaaggctctgtgagatgattctgccttgtcactgacgggcttcatgttttttagcttgtagatgtatcactctaatctatatctcygtcttcacatggcattctccctgtgagtctgtttctgttttctctctaaggacatcagtcgtaggattagggcccatcctaatccagtgtgacctcatattctctaattatatctgcaaagaccgtatttctaaataaggtcacattctgaggttcttggtgggcatgaatttttttgggaacactattagactcaatatactacctcggagtttttgaaaaggatttaatgagataattcatgtaaagtgtttaatgaagcactttggtaagtgataattgcatacaagtattagatactgatatcatcatcactgcttctgttatttgacaaattttcttgatgt

SEQ ID NO: 556799 - DNA, 548 bp, Homo sapiens
ctgtcaacaacaagataccaaaaacttggtggcttaaaaaaacgaaaagtttttttctcttggttccaggtaatagaagtctgaaatcaaggcttcagcaggccatgctctctctgaaggctctgtgagatgattctgccttgtcactgacgggcttcatgttttttagcttgtagatgtatcactctaatctatatctccgtcttcacatggcattctccctgtgagtctgtttctgttttctctctaaggacatcagtcgtaggattagggcccatcctaatccagtgtgacctcatattctctaattatatctgcaaagaccgtatttctaaataaggtcacattctgaggttcttggtgggcatgaatttttttgggaacactattagactcaatatactacctcggagtttttraaaaggatttaatgagataattcatgtaaagtgtttaatgaagcactttggtaagtgataattgcatacaagtattagatactgatatcatcatcactgcttctgttatttgacaaattttcttgatgt

SEQ ID NO: 556800 - DNA, 611 bp, Homo sapiens
actgggaagaaaaagaggtttaattggacttacagttccacatggctggggaggcctcagaatcacaacaggaggcaaaaggcacttgttatatggcggcgacaagagaaaaatgaggaagatgcaaaagcagaaaccctaataaaaccatcagatctcatgagacttattcactatcacaagactagcatgggggaaaccgcctctgtgattcatattatctcccactgggtccctcccacaacatgtgggaattgtgatagtatgattcaagatgagattcaggtggggacacacaacaaaaccatatcaatgttccaaatactgtatggaataaatatgtcctaaatattgcatggcacatagtttcactaaaagttattttttctatactcagatttaactaggtatcctgtaattcatctggcmaccccatccccagagccaagtcatcaatggcactaacgtaaattaatttcatataaatatttataccaagtgcaccaaatttaaacaaaaatatttggtcaatgtaacttgtcaagagccatagaaaaacatctatttcaaatatcttttgacaggatggatggactgagtatttcaaaatg

SEQ ID NO: 556801 - DNA, 431 bp, Homo sapiens
tggggcctccagccacccctgccggtattctctgaccaacagagatttgaaaacttcctaagacagagctcccagatggaggggcaggccaccatatttgccattagggtggcgtagtcgttccagcctttgggctttggagagcccaagccaaccgggggtaaaagcagtaccccagcacagcacagctgctctacaaaagcgttgccagactgcgtttttaaagggtccccaatcccactcctcctgactgggtgagacatcccaagcagggtctcyaggcacttcacacagttgccttcaggatgacaacagatcattacctcctgggatggagctctcagaggaaggggcaggctgtttcacagacctcactgtgatacctccaggtactggaaaatctgaggcaactagactgcaatgggccccca

SEQ ID NO: 556802 - DNA, 670 bp, Homo sapiens
ctggtcacagttatagcaggggggtcatccagtagccaatgtcagcagcaaacaatgccaatgccaatgctagagaaatgagaggtacaaaccattcatctagcatttgctggcatcagaaaaaatatcctcactagtcaagttctgcagcataattttagcttcaaagctatgcactttgttttatcctgcctgcccattttttaagccttttctctagtgttccaaatgactctgtgaactactcaatatcctttcaacaaacttcttttccacttgaatcatccagagttaatttctattgctggcaatactaactctgatggaaaaataaaataataaatgcactctaacacagaataacagaaataatgctccacctagttaacaaggattttacaaacaagtagaagttatttggtcttctttttaaaaatacgttcttaaaaataacatttttgacaccatgaattccacctgtgttttcaaactatttttcactattaacattatgttttaaaggagatacgttttcaaaagatccactggaaaaaattagacttctcctataataatttacacagtgagtggctgagattctaaaggaatatcataaaattatgataatattaaataaaagcaaatactmtcataactttcaaggaaacat

SEQ ID NO: 556803 - DNA, 616 bp, Homo sapiens
tcaggtggatggcagccaggttccataaataactctcggttatcattgttccaaaactcaagacttttaaaaggcactacctaccctaaaggtccagtccttaatgacatgatttgtatgacacttgagcaatagcctgaggctgccaaatcaggtaagaaggactttcccataataatatcaacctactctaagtagatttcagttggatcatgatatatcaacatatgagtgatacatgcagggcactcactttggtttttttgaaaatatgtttaagttcatttatgaaatatttttgagaaataattttgtgtttagagatataataagctctaagagaaatatatgctcatagatattcatgcctagtggtacttaccttctactttaaaattatttgcctttctttctgacccatgagacatagctcaaaagtaataacaagycttactctgcctaccatcacttctgatatggtttggctgtgttcccaccaaatgtcatcttgaattgtagctcccataaatctcacgtgttgtgagaggggcccagtagtagataattgaataatgggggtggttttccccacactgttcttgtggtagtgagtaag

SEQ ID NO: 556804 - DNA, 643 bp, Homo sapiens
tcttacagaaaatataaagagaaagagaaaataggcgagaaagaatacagaatctaggaattcaacccagaaagtmgaatatcacattaagaaggcttttcagaaaaaaaaaaaaaaaaaaggacaaagaaatgggagaaaaatataattaaggaagaaaacattcaaaaaattttctagagcataaagttgcaattttccgaattgaaagactccactgagtgctctgcactgtgaatgtaagaagcgtcatataaggcacattatagtggaagtctgaagtacaattatgaaaagatcctaaaggttttcaaagagaaaaaagctagatacattcaaagaatctggggttagaatgatcaaatttatcaataaaaaaatactggaagctagaagacaacagaggaatgccttctacattaggggagaaacctagaatttatataaaaccaaatatcaattatatgagaaggtagaatatagacataatcaggcatgcaaggtctcatgatttctctcccatgctgtttttctcagctagtgactaaagaattgctttggcaaaaatagaggacagaaataaggaaaagacatggaatcccaaaatgtgggattaaatgtaggaatcaaaagaattcaaagg

SEQ ID NO: 556805 - DNA, 501 bp, Homo sapiens
ttgcttgggctaagttcatttttactctctctaatcttactcatctgaaataaatctcaagtcctagaaacaggtaacttcctttggatcaaatcattctgaatgtttcccttgtctccccccttcaacctgctgtcagatttgtgagggacagaatcccagtctcattctcatttaaattctcataacagatgtggaaatgctttataactgtaatgaattgaacatatgtcttaggtgacaattctccatcaatctctcatgtttctccacatccaggaattgacaggtatttcacgaaagtgaagataaataatgtttccctccctggaatatttcaggaaaataaagacctctccttcccttctctggggtgtgtgtgtrtgtgtgtgtgtgtgtgtgtgtgtgtgtgtgtgtgtgtccccagagaggaggatgagcaggcttgctagagatgcctttatatgattgagagtttcttgggctcaccattctcagctg

SEQ ID NO: 556806 - DNA, 501 bp, Homo sapiens
ttgcttgggctaagttcatttttactctctctaatcttactcatctgaaataaatctcaagtcctagaaacaggtaacttcctttggatcaaatcattctgaatgtttcccttgtctccccccttcaacctgctgtcagatttgtgagggacagaatcccagtctcattctcatttaaattctcataacagatgtggaaatgctttataactgtaatgaattgaacatatgtcttaggtgacaattctccatcaatctctcatgtttctccacatccaggaattgacaggtatttcacgaaagtgaagataaataatgtttccctccctggaatatttcaggaaaataaagacctctccttcccttctctggggtgtgtgtgtgtgtgtgtgtgtgtgtgtgtgtgtgtgtgtgtgtgtgtccccagagrggaggatgagcaggcttgctagagatgcctttatatgattgagagtttcttgggctcaccattctcagctg

SEQ ID NO: 556807 - DNA, 512 bp, Homo sapiens
gttacattgacaataaggaagttaatgaaattctgagaggtaaccacaataaaaacttatcatattaaaatggtgtcaggaccagcaatcaggatatccccattgctagtgaatgaagttaaaccctcaccttataccatatgaacaacttaacttaaaatcactgatctaaatgtaaaagataaaactataaattttaagaaaacataggcataaatattcagaaccatggatttggcagtattttcttaaatatgataccaaaagcacaagtaacaaaaaaaataaaagataattcggactttatcaactttaaaaactcttgtgcttcaaaggctactattaagaaagtgaaaacacaacsctcaaaatgggagatactatcatttagaattatatatctaataaggtcttgtatctaaaatataagaacaattataactcaataataaaaagactaacaactatttaaaaattagcaaaggatatgaatagacacttctccaaagaat

SEQ ID NO: 556808 - DNA, 451 bp, Homo sapiens
cagcccttggagagcagagctgcctactgctccccagaaaccatattaagcctagctccccacccaggctttccgaggcatgagcttcccaaggctctgggtcccactagcttgcctcttggcttttccttcctctcttgtcccatttggacctggtaatataggttctgggcaatctacttcctgaccaactgggacatctggaatgcagcccccagaaccacccccagaccccacaaggcattgccaatgctcagtgcccaccccaggccaaggcttgaaattgtcaatgaccaaaacaaaggacaggttgtcagcactttgtgtactcttccaagcccacatgggaaagtcaactcaacaagttttctataccacctacaactgagcaccacagaagttaaatataatcaaggaaaaaggagaatawtgtggagaaaaaaagtggtat

SEQ ID NO: 556809 - DNA, 435 bp, Homo sapiens
ttcttttgaaggcctcacctggaagtggcayacatcactttccctcacattgtcatggagaggacacgccatacctcactgcaagagagtctgagaaatgtataatagtttagccttgtgtctggttacaatcacattactctaggggaagcagggactagattctcatagagagcttccattatctgccctagtactcaataaacacaaactattgtggctattttttcttgttagatagccagtgggtacttgctggatgcttgaaggattcagtggaaataagaaagaataaagaaagaaaatggatgttgcagggcagaaacaacaagaaacgagaatgagtgacaatggagagcgctgtgtaaagggaggtacacacagtgccagagttagagggggcaacccatgtccgccgtgaggaaacactacagc

SEQ ID NO: 556810 - DNA, 610 bp, Homo sapiens
agataatgtcctcacccttttggggcttatgatccatagaagactaaaagacaaagcaaaagcagttcaacatgataaatgtttgataaatgttgtgggtttagcacagggattcttaaccaggaaaccagttctgggaaggaataccagattcacctatagaccattttcacagtttactattctgcttttctttccacccttcttctgctgattktttctctgatacatttctaatctagacattgttttctgaatgacagcaatagcttttgatacctattttttgatacctattatttgatacctattattagggaaaaggaattttcctctctaatttcccaaatggatggctaatacattttagttacaataaaactcaaactagagatttacttagactggagtgagcatatggatgaaatgggatgtaatgttgaacttgaagcatgtagaggtttactgagacagcttcacttagaaagggaaggacaacagggacaaagtcacaaaagagaagcagccagaacagaactacattatggagaacacggaaaactaggcccttaggacaaaggtgacaaattaaagacctcagacaaccatc

SEQ ID NO: 556811 - DNA, 406 bp, Homo sapiens
attagaactgttggcggatcttttagttctcccccttctgcaaacctgagaggattggaatccttctatctttgatgatagccatggccattaggcttggctttggttaatgaattatgagtagacataatttgtgtgacttccagaaaaaaaagtatttaatagcaattacgtgttttgktatgttcctctctccctggtgactggcaaagtcccagatggtggaagctccgccatcttgagttcctgtgtgactgaggtgagatgagcatgttgcatgagcaataagtaaaacaagcaatgttttagccacttgaattttggaagtgtttttactgtggcacaacataatacagcctgaatgttctaacttcaaactagatagcaacaaataaaagaaatatgt

SEQ ID NO: 556812 - DNA, 588 bp, Homo sapiens
atagccaaatagccccaggaamctctccttctttgattcaattggttgtggatgcttttctccagggctggattcacaggtgggccacctgcacccctacgcagctgtcccatgctagctggtgccctgtggttagaaaggccccgcttggtttaatgctgtccctgtctagaattgctcaatactttttaacaaggggccccatgttttcatttagcactggccttgtaaattatctatgcttctcactctgagtcaggtctggctgggatagtgcctaactccaatggcaaagtagacatcatgtggtgaagtctcccaagagtcatcacatttctgcctcctctagtattcatttatataagccacccagcaattcatggcaatgactcatggaaaaagggtgaagtctcccaagagccatcacatttctgcctcctctagtattcatttatataagccacccagcaattgatggcaatgactcatggaaaaagggaaaattcatttccccaggatacaatctgacaccaaacttcctgagctcagcttgaaatttagctggaacaaagaaaagcacaaagatct

SEQ ID NO: 556813 - DNA, 470 bp, Homo sapiens
attttaacttccaaaagcatatattctcaggtttggaaggcacactaaaatttattaggtccaattcctcataagacacagtggctgactttccttgtgtagtttattatgaagtaccatttccaaactaactatcctagcagcgtcagctgccagctaacagcaagagctctgagggcatcactgaacagatagcaccttatgagttattatgattcaaaaatctcccttgctgttggatttaccaacacgtaggcttttatttcttcccattacatctgtttagccacagaaagcatcgggccatactcactgcagaagataagacttcctcagaatcttattygtttagtgcactcaattttacttcactgtctcatcacttgagagactggttaaggcaagaaacccatttcttaacattttttttgttttcaaacatttgaaaagcaacaccaaaacgtatgcag

SEQ ID NO: 556814 - DNA, 369 bp, Homo sapiens
accccacatttctcttccacactgccctagcagaggttctctatraggaccccacccctgtagcaaacttctgcctggatatcaaggtgtttccatacatcctctgaaatctaggcagaggctcccaaatcccaagtcttgacttctgtgcacttgcaggctcaacaccaggtggaagctgccaaggtttgggaattgcaccctctgaagtcatggcctgagctctatgttggcccctttcagccatggctggagcagctgggatgcagggtaccaagtccctaggctgcacacagcagaggaaccctgggcctggcccactaaacaatttttttcctcctaggcctccaggtctgtgatgggaggggc

SEQ ID NO: 556815 - DNA, 369 bp, Homo sapiens
accccacatttctcttccacactgccctagcagaggttctctataaggaccccayccctgtagcaaacttctgcctggatatcaaggtgtttccatacatcctctgaaatctaggcagaggctcccaaatcccaagtcttgacttctgtgcacttgcaggctcaacaccaggtggaagctgccaaggtttgggaattgcaccctctgaagtcatggcctgagctctatgttggcccctttcagccatggctggagcagctgggatgcagggtaccaagtccctaggctgcacacagcagaggaaccctgggcctggcccactaaacaatttttttcctcctaggcctccaggtctgtgatgggaggggc

SEQ ID NO: 556816 - DNA, 369 bp, Homo sapiens
accccacatttctcttccacactgccctagcagaggttctctataaggaccccacccctgtagcaaacttctgcctggatatcaaggtgtttccatacatcctctgaaatctaggcagaggctcccaaatcccaagtcttgacttctgtgcacttgcaggctcaacaccaggtggaagctgccaaggtttgggaattgcaccctctgaagtcatggcctgagctctatgttggcccctttcagccayggctggagcagctgggatgcagggtaccaagtccctaggctgcacacagcagaggaaccctgggcctggcccactaaacaatttttttcctcctaggcctccaggtctgtgatgggaggggc

SEQ ID NO: 556817 - DNA, 617 bp, Homo sapiens
gggaaggccagccactgttgtaaggacactcagatggcccatggagaggcccatgtggagagaaactgagtcagcattacatgagtgaaccatcttggaagcagatctagcctcattcaagccttcagatgactgcagccctgacatctttagagatcttgaaacaaaaccagctaagccactctcacacttctgactcagagaaactatttataggaatcccacagaaatgttgagaaaattctattcacagaacactaaaaggttcagaaaccataaaaacaaaaaaacacttttggacctccaaattctataggcaggaagcaggtagagaagactactcaccacccagctaaggcactcccagtttattgacgcayataattgtgtgagataataacttttttattgttttaaacctttacttcttgggtaatttgttacatcacaacagataattcatattcttgtactgtgacatctgatatattccagacttgcaggaaactaacagtaaaaaggatccccaaatttaggaaaacactgtttttacagtagccttgataacaagtagccaccagaactagttttaaacatgttcaatcaacaactgccta

SEQ ID NO: 556818 - DNA, 566 bp, Homo sapiens
ttgatgattatggtaatgagtgatgtgattataagatcccctccataggacattttgtccatgaataaaatgtctttatcctgtgggagaaaatgtttctcagcttgaaataatttatttttgtcatcagtgggttataaactgtgccttargcttctggtgtgcaaaagtatctttgagtcaaatgcctgtctaaagagatttcttttaaaaaaaagagagagagaatgaatcctccatttgtaccacgtgatcctatcttatcagtcatctagactgtgttaccagttcagatcctttactgttgggtgaattgagtttaaaggtagataaaacaaagctatagttacactacgtaaactgatctggaaaaaaaattaacaggcagtttacctaccatgacactgtacatagtccttgtgttcatttttctcaggtctagaaaccatatgtaattcatactcagcataaatgtgtgaatttttaaatagcccttgtaattaaatcggggcttaacagcaacacagaatcaaaagttcatgatgcttgttatttaagtctcagat

SEQ ID NO: 556819 - DNA, 566 bp, Homo sapiens
ttgatgattatggtaatgagtgatgtgattataagatcccctccataggacattttgtccatgaataaaatgtctttatcctgtgggagaaaatgtttctcagcttgaaataatttatttttgtcatcagtgggttataaactgtgccttaggcttctggtgtgcaaaagtatctttgagtcaaatgcctgtctaaagagatttcttttaaaaaaaagagagagagaatgaatcctccatttgtwccacgtgatcctatcttatcagtcatctagactgtgttaccagttcagatcctttactgttgggtgaattgagtttaaaggtagataaaacaaagctatagttacactacgtaaactgatctggaaaaaaaattaacaggcagtttacctaccatgacactgtacatagtccttgtgttcatttttctcaggtctagaaaccatatgtaattcatactcagcataaatgtgtgaatttttaaatagcccttgtaattaaatcggggcttaacagcaacacagaatcaaaagttcatgatgcttgttatttaagtctcagat

SEQ ID NO: 556820 - DNA, 633 bp, Homo sapiens
ctgttactccttgatagcagtagaaggatcacttcaaattagagttggagagagtctgatttacagaatgacagtcttaaagcatttaaaatgaagattatttggcaattacctaggaaagattaaatatgtagtaatagttttattagtgtttgcattacaggatttactgctgtttgtgtatttggtcacatgttccttttttccaatcaaatatttgtgttttaatatgacaaaaagtgatcaattataaatttgattaaaataaaatttctaaaatgaattctaacatttccttcctatgaataagtacttgwtaaatctttaaaatcacatataaagacctatttccaaacaataggatttctttttccattacatatgatgatacgcctggccagagcagccacatgtcattgtttattcatttatgcgagatttacatttcatagatgtccatgagcccttttatccttaaataaacagttttataaaaagatgtattacttgtaagtctatatcatgaaaagaactttttccttttttgatctggcctcctcctaccctcacttccgtcatttaaaaaaaaaatttaaaaagaaagggtcagaggaaatagctggggttggaagg

SEQ ID NO: 556821 - DNA, 503 bp, Homo sapiens
cataacctatgtgcataagatggactgaacccctcttccttctcctctgtcttcactcctatgcagatctccagacccttctacccatcctaaaatggtggaactcatgacccatcaagaaaggatcctcagggagtggcttcttgtgggtcagcttcaaagtgtcaggaaaagaaactcactcctgtttaggagccccctaaatatgcggaatgtggtacaaagagccccaggctggtgatgccgtttggctgtgtctccacccaaatctcatcttgaattgtagctcccatgattcccacatgttgtrggaaagaccctgtgggagatatttcaatcatgggggtgatttcccccatatttgtctcatggtagtgaataagtctcatgatatctgatggttttataaggggaaacccctttcacttggttctcgctctctctttgcctgctgccatgtaagaagtgcctttcgccttcagccatgattgtgagtcctcccc

SEQ ID NO: 556822 - DNA, 598 bp, Homo sapiens
aatcatgggggtgatttcccccatatttgtctcatggtagtgaataagtctcatgatatctgatggttttataaggggaaacccctttcacttggttctcgctctctctttgcctgctgccatgtaagaagtgcctttcgccttcagccatgattgtgagtcctccccaaccacgtggaactgtgagtccattaaacccctctcctttataaattacccagtctcggtatgtctttatcagcagcatgraaacagactaatacagctggcctccacagcccccctgttgccagctcccgctgtgatcttgggcaagtgactttctccttctactcccaattccctcttggctccttgccagttccaatgctcccagattctaatctcccactgtccaaatcttgggaatggacactgaaatacatttcttgttacctacgaattacggtttgctttcattctcctcttcaatcccagtcttctctatttgctgcacagagttcagaaatgcattgtttccaatgcagaagctcacgccagtgcactggggctgctaaaaacaccccgagggcccacccctcccagggcgatgccagac

SEQ ID NO: 556823 - DNA, 478 bp, Homo sapiens
ttgaaaaaattttttcttcttcaaaatatgtacaattgctcaatcggaggcagttcaaaggcaccgagaatagcagcaaagtatctgagcctcccatttagcgcctagcagatataaatcttgcccagttctgtttgttccaggctgctcagcagcctcttccctgagtcactcactcaagagtgacatgagtcatcatcctggggtcaaggaccacacgrcattctgggtctgtgagatcccataaagggcagggcaccgaggggtctccaggaagacatggaggatcaggaactgtctcctaggccctaggcttggctctgcctccccacatgggtgactttagagagtcactaagcctgagaagtaggtggatttctgggcccttctaacttgtactttggaggaatctctttagtggtgcacaggagcctgcttgttccagctcataagagtctaatgtaattttcaagaattc

SEQ ID NO: 556824 - DNA, 486 bp, Homo sapiens
aggtccacttgaaaaaattttttcttcttcaaaatatgtacaattgctcaatcggaggcagttcaaaggcaccgagaatagcagcaaagtatctgagcctcccatttagcgcctagcagatataaatcttgcccagttctgtttgttccaggctgctcagcagcctcttccctgagtcactcactcaagagtgacatgagtcatcatcctggggtcaaggaccacacggcattctgggtctgtgagatcccataaagggcagggcaccgaggggtctccaggaagacatggaggatcaggaactgtctcctaggccctaggcttggctctgcctccccacatgggtgactttagagagtcactaagcctgagaagtaggtggatttctgggcccttctaacttgtactttggaggaatctctttagtggtgcacaggagcctgcttgttccagctcataagagtmtaatgtaattttcaagaattc

SEQ ID NO: 556825 - DNA, 450 bp, Homo sapiens
gcccatcaatgacagactggataaagaaaatgtggtacctatacaccatraaataccatgaagccatgtaaagtaaagagattatgtcttttgcaaggacatggatggagttggaggccattatcttcagcaaactaacccagaaaaagaaaaccaaacattgcatgttctcacttataaggggctggatgatgagaacacgtggacatgcagagtggaacaacacacaccggggcctgatggggagtggaggcgttgggagagagagtaccaggaagaatagctaatggacgctggtcttaatacctaggtgatggaatgatctgtgcagcaaatcactatgcacacgtttacctatgtaacaaacctgcacatccttcatatgtacccctgaacttaaaataaaagttgaggaaaataatcaacgtttaaacagaaaaaaaaatttaa

SEQ ID NO: 556826 - DNA, 530 bp, Homo sapiens
accaactaagaaacgtacgagtgcttgcctctgcctagaagaaaaggagaggaagattctggtggggaggggaaacctttcttatctgctaccctgagcgtgccctgacaccccaaactggcaacagattggggcytttgctccagctgtctgttctgttatgctcccaaaccaagcatgcctgccccttttgttgttatggctttaatgctgatcatcacaaagaaacagactgccgaggcaaagattaaaagccggtgaaatcacaaaggtcacagaatctcagcagttgtctcgaggctggggccttgatccacagctctgggcccccctcccaagacagtcatgagcagcctcctggactttcgctcttaggcacagattcaaagggtgcaactcgcaaaatatgccctgatactattctaaaaaacattttgaatagtttttatttttcccagttataaaacacgtgcactttgaagaaaagcaaataggaaatcaaggaaaatataaagaataaatttaaatta

SEQ ID NO: 556827 - DNA, 530 bp, Homo sapiens
accaactaagaaacgtacgagtgcttgcctctgcctagaagaaaaggagaggaagattctggtggggaggggaaacctttcttatctgctaccctgagcgtgccctgacaccccaaactggcaacagattggggcctttgctccagctgtctgttctgttatgctcccaaaccaagcatgcytgccccttttgttgttatggctttaatgctgatcatcacaaagaaacagactgccgaggcaaagattaaaagccggtgaaatcacaaaggtcacagaatctcagcagttgtctcgaggctggggccttgatccacagctctgggcccccctcccaagacagtcatgagcagcctcctggactttcgctcttaggcacagattcaaagggtgcaactcgcaaaatatgccctgatactattctaaaaaacattttgaatagtttttatttttcccagttataaaacacgtgcactttgaagaaaagcaaataggaaatcaaggaaaatataaagaataaatttaaatta

SEQ ID NO: 556828 - DNA, 530 bp, Homo sapiens
accaactaagaaacgtacgagtgcttgcctctgcctagaagaaaaggagaggaagattctggtggggaggggaaacctttcttatctgctaccctgagcgtgccctgacaccccaaactggcaacagattggggcctttgctccagctgtctgttctgttatgctcccaaaccaagcatgcctgcccyttttgttgttatggctttaatgctgatcatcacaaagaaacagactgccgaggcaaagattaaaagccggtgaaatcacaaaggtcacagaatctcagcagttgtctcgaggctggggccttgatccacagctctgggcccccctcccaagacagtcatgagcagcctcctggactttcgctcttaggcacagattcaaagggtgcaactcgcaaaatatgccctgatactattctaaaaaacattttgaatagtttttatttttcccagttataaaacacgtgcactttgaagaaaagcaaataggaaatcaaggaaaatataaagaataaatttaaatta

SEQ ID NO: 556829 - DNA, 654 bp, Homo sapiens
ccatttcactccagcttgggtgacagtgacagcctgtctcaaaaaaaaaaatgcaattgaacaagtatgtgataaaagcatcttcaaagctacatgataggctaatgtacgtctacagtattattgtttcagtcactgacttcaccgtacatgaaactgtttgctcagcttattttgagcactctaagaatatccacacaatttgttttgcttggagcaaaactaagaaaacccacaccctgaaacctctcatctgcctctaacacatactatctctaacctcactgcagtccacataagacagtttcatttactccacaaagcacatgaaaatgttaatagataccagggggcaaatgaatgtgccaagagaatttcctgatgtcaaagaaaattagggattccaaggcagctgaactctggcctttcagggcccacaccaaggaaggaggagatatttttggtcaagaagtccaatctgcttgagcctattaattccactgttgaccaaatggatcaagcacaattcaggattatttcaacaaaccctcttggcaggtaaacattttctgcagactgtggctctttctagctctggcaaaatgaattgtmtaaacaccactgcggtcatgttgatataaatcaaacactgaa

SEQ ID NO: 556830 - DNA, 557 bp, Homo sapiens
acccctgtccttactgttccttctgcctggtaggcctgacctaagttctttccatgactggctcctccttatcattcaagtcacaggcagatgtcacaggcctttcctgcctacctaatctaaargactcccactgcccagtcaccatcacagcatcctgtttaacgacattcatgccattgatcattatgtggaatgctcatattatttgtttagtttgtctaaactagaagctttttaagggcagaagggctttcactactctacttccagagcttagtaagtgttcagtaaatatttgctagataaaaggagggaaaggaggagagaaggaaagagacaagagaaggagggagggaaggaagaaaggaggggatttagttaggaacttcagttgctctccatctataagtaatcaatatacattataagatttagcaagcccactagctgaggaatacgaaactacattagtatcttaaaaatataatgaaagagacacctgaaataaaattttaaaagcacgtaattttaaactcagcgatgacataacctat

SEQ ID NO: 556831 - DNA, 557 bp, Homo sapiens
acccctgtccttactgttccttctgcctggtaggcctgacctaagttctttccatgactggctcctccttatcattcaagtcacaggcagatgtcacaggcctttcctgcctacctaatctaaaggacycccactgcccagtcaccatcacagcatcctgtttaacgacattcatgccattgatcattatgtggaatgctcatattatttgtttagtttgtctaaactagaagctttttaagggcagaagggctttcactactctacttccagagcttagtaagtgttcagtaaatatttgctagataaaaggagggaaaggaggagagaaggaaagagacaagagaaggagggagggaaggaagaaaggaggggatttagttaggaacttcagttgctctccatctataagtaatcaatatacattataagatttagcaagcccactagctgaggaatacgaaactacattagtatcttaaaaatataatgaaagagacacctgaaataaaattttaaaagcacgtaattttaaactcagcgatgacataacctat

SEQ ID NO: 556832 - DNA, 562 bp, Homo sapiens
aaccaagtgctgttcagtaataaatttctaaaaaytttccaaactccatagagttgaatgtcatgcctgctctactccttggctaggaaaattataaaactggtttcttttttaaaaaattaagtttaaaatgtagttattcttcataattaaatcattcaagcatgccctaaaaatttgcaatacttgaggaagcgaaaggtttgggaaaattacagaaaaacaccattacctgaaaaaggtaacttcttatgtaaaattttaaacctgcttccatcttgttaggctaatatcttcaaatcatccacacgcgtctggaaaataagacatttacaatattttaaaatgggttaagaatttttacttgtttttcagttgtttttttttttttttttttttgccacccaactcttttgtaaagttgaaagtaacactagaacaagagtaaaaagaaaaacaaaaactgaaataaaactatttctagaaaaacatcgggaaccattatgtttacttcatttccagaactacgcataataaataggttctgcaaataagtaatttc

SEQ ID NO: 556833 - DNA, 472 bp, Homo sapiens
ttcaggtacaccaatcagaagtagatttggtcttttcacatagtcccatatttcttggaggtttttttcatttctttttattcttttttctctaaacttctcttcttacttcatttcattaatttgatcttccatcactgatacactttcttccagttgatcaaatcagmaatttagacaggaacataatgaaaattaattcattactttgataactctgtaatagtttcttcctcagaagaagcaacgtggaatattaccaggagtacagtaaatattattagtgtgaagtgattgatcagtctagtcaaaaaacagagcttagagtaatcatgcaagactctgggaaaatgtgatacgttaccatcagagacatttcccaaaccttagcaattataccactagctcttccacatcctagtaataagaaagaaatgacaagtgccatagaaaattcataatgcaaaattac

SEQ ID NO: 556834 - DNA, 472 bp, Homo sapiens
ttcaggtacaccaatcagaagtagatttggtcttttcacatagtcccatatttcttggaggtttttttcatttctttttattcttttttctctaaacttctcttcttacttcatttcattaatttgatcttccatcactgatacactttcttccagttgatcaaatcagaaatttagacaggaacataatgaaaattaattcattactttgataactctgtaatagtttcttcctcagaagaagcaacgtggaatattaccaggagtacagtaaatattattagtgtgaagtgattgatcagtctagtcaaaaaacagagcttagagtaatcatgcaagactctgggaaaatgtgatacgtyaccatcagagacatttcccaaaccttagcaattataccactagctcttccacatcctagtaataagaaagaaatgacaagtgccatagaaaattcataatgcaaaattac

SEQ ID NO: 556835 - DNA, 571 bp, Homo sapiens
gacttacagttccacataactatggaggcctcccagtcatggcaaaaggcaactaggaacaagagatgtcttatatgaatggcagcagacaagctttctgacagcttgtgcagggaaagtcctctttrtaaaaccatcagatctcatgagacttactcaccatcatgggaacagcaggagagagacttgcccccatgattcaattaccttccaccaggtccctcctacaacacgtgggaattcaagatgagatctgagtagggacacagccaaaccatatcagatttgagtaagcatttctctaaacatgacataaaaatgaccaatatgtgtataaaaatgctcaaaatcactaatcatcagaggaatgcaaaataaaaccacaattaaatgttatctcacacctattagactggctattatcaaaaagacaaatgacaacaagtgttggtgaggatgtggagaacagagaacccttgcacactgttactagtaatgtaaattagtacagctattatggaaaacagcatgaagcgttctcaaaaattaaagctatcatatgacccagcca

SEQ ID NO: 556836 - DNA, 582 bp, Homo sapiens
tctgtttaacaaagcacatcttgcaccgcccttaatccatttaaccctgagttgacacagcacatgtttcagagagcacggggttgggggtaaggttatagattaacagcatctcaaggcagaaggatttttcttagtacagaacaaaatggagtctcctatgtctacttctttctacacagacacagtaacaatctgatctctctttcttttccccacagtcaatgacattggggccagagaaagggagattgtacacaacaacagtttgaaacatagaatgtacaaaacctcctgtcacagccaacaccaacagaaggatgcaaacctgtcaattcatgatggtcaaatagtgcagtggcttacagatgtccacatagygatcacaggccatcatcatcagaatgaagatctcagtaccaccaaacaagtgttctataaatagctggcccatgcaagctcggaaggaaatagtctttttatcaatgagtaactctacaatcagtttgggagaaatggtagtggaatatgcagcatctatacatgacagacaggcaagtcagaaatacactggggagccca

SEQ ID NO: 556837 - DNA, 582 bp, Homo sapiens
tctgtttaacaaagcacatcttgcaccgcccttaatccatttaaccctgagttgacacagcacatgtttcagagagcacggggttgggggtaaggttatagattaacagcatctcaaggcagaaggatttttcttagtacagaacaaaatggagtctcctatgtctacttctttctacacagacacagtaacaatctgatctctctttcttttccccacagtcaatgacattggggccagagaaagggagattgtacacaacaacagtttgaaacatagaatgtacaaaacctcctgtcacagccaacaccaacagaaggatgcaaacctgtcaattcatgatggtcaaatagtgcagtggcttacagatgtccacatagtgatcacaggccatcatcatcagaatgaagatctcagtaccaccaaacaagtgttctataaatagctggcccatgcaagctcggaaggaaatagtctttttatcaatgagtaactctacaatcagtttgggagaaatggtagtggaatatgcagcatctatamatgacagacaggcaagtcagaaatacactggggagccca

SEQ ID NO: 556838 - DNA, 530 bp, Homo sapiens
aggtattttaaatgtttattttttaggagttttgtagtttttattcatgtaaggatcttccttatctattcctaagtgtttatgttttcagatttcatcacagatttttaattttaaaaaaaattctgtcattgttgctagtatatataaaataaattraattttttatttgacagttgagtcctatcaacttgctaaatttacttcttattcctacaaagttattctgtagggttttctgaaacactatcatgttgtttacaagcaaggatagctcattgcttggaaagagaaggggtgtttccgtttctttttgtgtcatttttagaaggttgttcttatagttttaggtctaatgtttaagtctttaatccatcttgaattaatttttgtttaaggtgtaaggaagggatctagtttcagctttctacatatggctagccagttttcccagcaccatttattaaatagggaatcctttcccctttgcttgtttttctcaggtttgtcaaagatcagatagttgtaga

SEQ ID NO: 556839 - DNA, 574 bp, Homo sapiens
ttctgcctcttgccttcccartgaaatcctcggcccctttggtagtagagcagtgacccttgtcttgtgccttgaatcctcggagcactgatcacaatgcttagcatttgcagagctggggctctggagcctgagagtcttgactaagcctactgccatttattaatatgcatctaacaagttgagtggacagacattcaccaatgtcagcatggaaagcttaggaatagaaatatttaaagtacttccgcaatactaaaaaattgtggatatttacataataaacatgatatctcttaaaattggcatatctttgttggagcacataatagtaatgataaatgttgactaaattattttttttcccttgggacagcacacccttgcaaacattacaattccctgtttttctttgattgatgcaactgaaacaccaatgttaaagaaaggatccactaaatttgttactttgttttttattcccactaaaatttgcatattgattcattcacgtcatgttttagccctaggattttgggccccatcttaacatagagctacctggcagcaaaga

SEQ ID NO: 556840 - DNA, 547 bp, Homo sapiens
attggtttatggttcttcagtctgtacaagtatgacacctacatagttcagctttcagagaggcttcaggaagctttaactcatggctgaaggtgaaatgggaccaggcatgtcacatggcgaaagcaggatcaagagagagtgtacgggaaggggagatgccacacacttttaaatgatcaggtcttgtgtgaactcagagtgagaactcacttatcaccaagggaatggcccaggccattcatgagggatctgcccccatgatccaaataccttccatcagtccctacctccaacattgaggattacagtttaacgtgagctttgggcaggacatccaaactatatcaaaggttatttgaaatcagacagaaacttaatagcagatgtggatgaatgtgtccctaacacatgcagtgaacttakgaagttagtaggtttgagttgcgtgcatgtgtgaattttgtgtatttctcagttacttggttcaaatgggtgcagtttcctgcattcatctcatgtttcttacaaagaaaattgtgggtgg

SEQ ID NO: 556841 - DNA, 354 bp, Homo sapiens
gacttaaataccaaggcttcaaactataaaattactaaaaaaaaacatcagagaaactctccaggacatttctctgggcaaagatttcttgagtagtaccctataaggacagacaaccaaagcaaaaatggacagatgggatcacatcaagttaaaaagtttccgcatagcaaagaaactaataaacaaagtgaagagacaaccaacataatggaggaaaatatctgcaaactatctgatgtggtctggctctgtgtctcaaatcttatcttgagttgtaatcctaattrtaatccccatgtgttgggtgagggaccttgtaggaggtgattaaaccattggaatgattccccc

SEQ ID NO: 556842 - DNA, 567 bp, Homo sapiens
ttgggaggccaaggcgggcagattgcttgagcccaggagttagagaccagcccgggcaacatgatggaaccctgtctctatgaaaaatacaaaaattagctggcacagtggtgcatgcctatagtcccaactacatgggaggctgaggcaggagaattgcttgagtccggaaggaggagtttgcagtgagctgagatggtgccattgcacttcagcctgagtgacagagcaggaccctgtctcaaaataataataataataataataatagtaataataataataataatawgtcccttgaataaataaaaggttaaaacaaatgagaatatttatttgaaaaaaaaggaaatcccatggaaaagtaagttaaagccacccataattccaacttttaaaaataatggtataaaataagaaattaatagtccctaatttacccctcagaaagaactgctgttaacaattcgacacgattccttccttctttttccttctctttataaacatgtttatttatacgtatgtacacacacataaatatattagcaaaataattttaacagt

SEQ ID NO: 556843 - DNA, 518 bp, Homo sapiens
agacccagagccagcaaatacgatatggagttttattagggacttacctacagggcagagaatctggtggcagcagtctggacaggacaaccaccttacatatagaaatggtccagcggcagcaggctggacaagataactgcacagcctagtggtggctggctgggcaggaaaatcacaactgctttcaaaaagactgtagtttctacatcacttaacagcctcccyttaatgacctccacgtggcaactttcatttaacctagagctcagagcctcaatctcctgtacagctcttgttctatgggacgggatgggggctcagatgttcctcatgggcaaggaatgaatctgtgggttggttacgtctggattccctggctcagaacgcacattcaggtgtttctgccagacaaggtcattctaagggtatgcttaaattattgctataaggggcacttaccctacacccaccctaatccaggataaactcattttaactaattaaatctgtaaaga

SEQ ID NO: 556844 - DNA, 518 bp, Homo sapiens
agacccagagccagcaaatacgatatggagttttattagggacttacctacagggcagagaatctggtggcagcagtctggacaggacaaccaccttacatatagaaatggtccagcggcagcaggctggacaagataactgcacagcctagtggtggctggctgggcaggaaaatcacaactgctttcaaaaagactgtagtttctacatcacttaacagcctccccttaatgacctccacgtggcaactttcatttaacytagagctcagagcctcaatctcctgtacagctcttgttctatgggacgggatgggggctcagatgttcctcatgggcaaggaatgaatctgtgggttggttacgtctggattccctggctcagaacgcacattcaggtgtttctgccagacaaggtcattctaagggtatgcttaaattattgctataaggggcacttaccctacacccaccctaatccaggataaactcattttaactaattaaatctgtaaaga

SEQ ID NO: 556845 - DNA, 518 bp, Homo sapiens
agacccagagccagcaaatacgatatggagttttattagggacttacctacagggcagagaatctggtggcagcagtctggacaggacaaccaccttacatatagaaatggtccagcggcagcaggctggacaagataactgcacagcctagtggtggctggctgggcaggaaaatcacaactgctttcaaaaagactgtagtttctacatcacttaacagcctccccttaatgacctccacgtggcaactttcatttaacctagagctcagagcctcaatctcctgtacagctcttgttctatgggacgggatgggggctcagatgttcctcatgggcaaggaatgaatctgtgrgttggttacgtctggattccctggctcagaacgcacattcaggtgtttctgccagacaaggtcattctaagggtatgcttaaattattgctataaggggcacttaccctacacccaccctaatccaggataaactcattttaactaattaaatctgtaaaga

SEQ ID NO: 556846 - DNA, 580 bp, Homo sapiens
tgagaaggaatttagctaggagaaccaaatgttgtcccatacactgggttaaaaagaaccagttatgaactacaaatgcagttgactttggccctgagctctatagggaaaagtagggagaaaaaatagtaacgaatcagcagcacaagcaatatttgcttgtgagttcttccagtcatgggcgtgaatgagtaattctgtcctgggatcctattgcctttgctttgtgccccaaggtatagagtttggaaaaataccagtgctggtggttcttctgtttcggggaataaagaaaaggaataccccattgggagtgctgttctttgaaaactgcagcttacctgagccctttgttgagatggaggccagaatgagtctgaaacagctggtggggaatccaaccacagggatcactcagaccaggacaacactgaagtcaagtttgctatggatgtccagaatgccaaaagagagggcagtctggaggccttttttcttgggggagttattcactcatttatcttctttttattaagtacctaccatgyaccaggcactgttctaagcagtgtggtgcaag

SEQ ID NO: 556847 - DNA, 574 bp, Homo sapiens
aattaaacaaatcacatttaattggacaaaatctgattattcagtggatagttgggatggccactaaaagagggataaaaaataagagcctatttcactctcaacaccttaacatacactcagtggaaaaaagaaggaaaatattttgtgtaatttaaagtacagagrgtaacttttctagagagcacacataacccagaaaccatgacgaaggaaatggatgaaactgactacataaaaattaaaaatgcattaatggtaaagacacacacatacacacacacaacaaactatttaaaaatccaacatttttgacaaagatataattctattgttgtagaaataactctttaaaattccacatctaatgtatcaataaaacttgttggctctattgccaccacatatttagcacctgagcatttcttatcaccttacactgcggccctgagtctgtaaccatcacatcttacctagattatttcaatggccttctaattgatctatctctgcccttgtttacttccaagtgattctcaaatagcagctaatgtaatccagttaaaactataac

SEQ ID NO: 556848 - DNA, 574 bp, Homo sapiens
aattaaacaaatcacatttaattggacaaaatctgattattcagtggatagttgggatggccactaaaagagggataaaaaataagagcctatttcactctcaacaccttaacatacactcagtggaaaaaagaaggaaaatattttgtgtaatttaaagtacagagggtaacttttctagagagcacacataacccagaaaccatgacgaaggaaatggatgaaactgactacataaaaattaaaaatgcattaatggtaaagacacacacatacacacacacaacaaactatttaaaaatccaacatttttgacaaagatataattctattgttgtagaaataactctttaaaattccacatctaatrtatcaataaaacttgttggctctattgccaccacatatttagcacctgagcatttcttatcaccttacactgcggccctgagtctgtaaccatcacatcttacctagattatttcaatggccttctaattgatctatctctgcccttgtttacttccaagtgattctcaaatagcagctaatgtaatccagttaaaactataac

SEQ ID NO: 556849 - DNA, 574 bp, Homo sapiens
aattaaacaaatcacatttaattggacaaaatctgattattcagtggatagttgggatggccactaaaagagggataaaaaataagagcctatttcactctcaacaccttaacatacactcagtggaaaaaagaaggaaaatattttgtgtaatttaaagtacagagggtaacttttctagagagcacacataacccagaaaccatgacgaaggaaatggatgaaactgactacataaaaattaaaaatgcattaatggtaaagacacacacatacacacacacaacaaactatttaaaaatccaacatttttgacaaagatataattctattgttgtagaaataactctttaaaattccacatctaatgtatcaataaaacttgttggctctattgccaccacatatttagcacctgagcatttcttatcaccttacactgcggccctgagtctgtaaccatcacatcttacctagattatttcaatggccttctaattgatctatctctgcccttgyttacttccaagtgattctcaaatagcagctaatgtaatccagttaaaactataac

SEQ ID NO: 556850 - DNA, 593 bp, Homo sapiens
atataaatacagaggcttggcatcaattttaagttagagttcctctgttaagtcctgaaaatgtatttgctcatgatgagtgatagattcttgtatctctagctatattttgggaataagttaaatacccacttttgattctttttgaggcatagacttggatgccttgcttttaatctatgaattggagaggactaccctcatttaccacttcccctggagaaccagaaaccccactctccctgccaaaagactcaaattaactatttacagataatgaaactatatcccttaatttaaaatmaataactaacaatctcaagggcttactgggaaaaaaaatgcttgacgctcttccagcacgttgtctgtatctttggctactctagttcaattgtagttaattggtctctttgctggttgttttcccacaaacactgaaaaatccttaatggaaggggctgcacctccgtatacacccctagcactgggcacagtgtgtggctcgtggtgacactggaatatcgagagacttgagacaggattaggttgttactgaaaaagtcaagacaagtgataaaaggataaagcag

SEQ ID NO: 556851 - DNA, 408 bp, Homo sapiens
gaattcaaaaccagcctggccaacatagtgaaactccatctctactaaaaatacaaaaattaaccgggtgtggcctgtaatcccasctactcgggaggctgaggcaggagaatctcttgaacccgggaggcagaggatgcagtgagcacagatagcaccactgcactccagcctgtgcgactctatcttggaaataataataataataatctcccatggttcttaagtatgtaagccaatgggatcttttatggtggctgagaagagactgtcccttcagaactaagggttctctatcccttagacctaaagttctctacaactgcactcactttaactaggagtcccttagagtgcccttagccttacagaccagctgtgaccaactggactgggaagcacccctaa

SEQ ID NO: 556852 - DNA, 408 bp, Homo sapiens
gaattcaaaaccagcctggccaacatagtgaaactccatctctactaaaaatacaaaaattaaccgggtgtggcctgtaatcccagctactcgggaggctgaggcaggagaatctcttgaacccgggaggcagaggatgcagtgagcacagatagcaccactgcactccagcctgtgcgactctatcttggaaataataataataataatctcccatggttcttaagyatgtaagccaatgggatcttttatggtggctgagaagagactgtcccttcagaactaagggttctctatcccttagacctaaagttctctacaactgcactcactttaactaggagtcccttagagtgcccttagccttacagaccagctgtgaccaactggactgggaagcacccctaa

SEQ ID NO: 556853 - DNA, 425 bp, Homo sapiens
agaattctaccagaaagctttataataattaagcagaaatgtgagtcacttgaactgaatattatggaagtttcactagagatttctttcttctctgaatggcaaatataataaaggcctaaaaataaatgacagtaatctgcaaagctttcttcctctctaacagaattggtcagattgtcccccttggggcttgaggtatacgtgtcatgcacactgccattcaagggttatggtgctttatatttgtttctagtgtgatggtatgagyagagtcaagatattttccagccaggtatcacacagggtcgattcaaggagactgctttctgaaaggaaaagagaaggctctttctggatgcagtctggccatcctcaaagcacagagtttcatagagcaaagcaagccacagagaatacagccc

SEQ ID NO: 556854 - DNA, 624 bp, Homo sapiens
tatttattcatttttaaaattaatttttttattttaatggaattaggggtacawgtgtagttgtgttacatggatatacttcacagtggtgaaatctgggcttttaatgtacccaacacccaaataatgtatattgtacccaataggtggtattttaccccttatccccccttaccatttggagtcttcaatgtctattattccattttgtatgtctgtgtgcacccactgtttaactcccatttataagtaagaacatgtattctttactttttgtttctcagtcattttaggataatgactttcagttccatctatgttgctgcaaaagacatgatttcatttgttttttatggatgagtagtattccttggtagacatatatcacatttttaattcaatcacgcactgatgggcacttaggttggtttccatgactttgctattgtgaatagtgctgtgataaacatccgagcgcatgtgtctttgtaatataatgatttattttccttgggtagatacctggtagtgggattgctggatcaaaggttagctctatttttagttctttgagaaatctccatactattttccatagaggtactgatttacattcccaccaac

SEQ ID NO: 556855 - DNA, 477 bp, Homo sapiens
atatacatagcagcattatttataatagcctaaaacagaaaacaacactgtattagtctgttctcacaccgctaataaagacatatccaagactaggtaatttagaaaggaaagaggtttaattgactcacagttcagcatggctggggagacctcaggaaacttacagtcatggtggatggggaagcaaacacatccttcttgacatggcagcattaaggagaagaatgagagtgaagcaaagggagaaaccccttataaaaccattagatcttgtgagaacttactatcatgagaatagcatgggggaaaccgaccctatgattcaaytacctcgcaccaggtccctcccatgacatgtggagattatggaaactacaattcaagatcagacttgggttgggacacagccaaatcatataatttcacccctggcccctcccaaatctcatgtcctcacatttcaaaacacaatca

SEQ ID NO: 556856 - DNA, 474 bp, Homo sapiens
cactttacagttcatcttgaacaaggcagaggttagggacactgaccctccacacagttgaaaattcacgtattactttagaatactccaaaacttaagtagcctaatgttgcctgaaagccatgctgaaaactgaaacagtcaactgacacatattttatatgtttatatatacacatatatataaaatgtactgttttcttagaataaagtaagctagagaaacaaaawagattactaagaaaatcataaggaagagaaaatgtatttactattcattaaatggaagtggatcattatgaaggtgtgcatcctcaccaacttcacatagaataggctgaagagggggagtggggaaggggttgaccttgacattgggaggtggcagaggagcaagaagtggaggagcttgaaggaagtcaggagaggcaagcacacttagtgtaactttacagaaatacatcgttatttctg

SEQ ID NO: 556857 - DNA, 534 bp, Homo sapiens
gggctgggagtggtggctcacacctgtaatcccagcactttgggaggccgaggcgggtggatcatgaggtcaggagatcgagaccatcctggcgaacatggtgaaaccctgtctctactaaaaatacaaaaagaaaaaattagccgggcatggtggtgggtgcctgtagtcccagctactggggagggtaaggcaggagaatggcatgaacccgggaggcagagcttgcagtgagccgagattgcgccactgcactttagcctaagaaaaggaaggaaggaaggaaggaaggaaggaaggaaaaatcagtcactcactcaggtttagtttcaaaagccaaaacagtgataatattgaattttttccagccactcagtagtacccagagaattttgatacaaataactgactttgaccccatgtttagtaggttttttttttgtttgtttgtttgttttttttttttgtctttcttctccacactctcttaggackgttgtagcttgtaatgttagtgaattgtaattgtttatt

SEQ ID NO: 556858 - DNA, 594 bp, Homo sapiens
cgtctctactaaaaatacaaaattagctgggcatggtggcgcttgcctgtaatcccagctgcttgggaggctgaggygggagaatcacttgaacccggaggtggaggttgcagtgagatgagatcacgtcattgcactccagcctgagagacaagagcaaaactttctctcaaaacaaaacaaaacaaaaaacaccagcaaaacccctatttgaaaccatggttaattctgagtaggctgattatagaaactcatttttctaattgaacttttaattttgtatattgtatttgcaacttttaatttaaggaaaattaatgagtacatgaatagaaaaccctgctcaaaaaaagcctgttgagtcagttttacaggatgatttgaacaatgagagactcagcatgtattagtctgttagggctaccacaacgaaataccactggctgggtggcttagacagcagacatttattttctcacagtttctagatgctggaagcccaagctcaggatgtcagtagggttggtttcttctgaggcctctctccttggcttgcagatggctgtcttctccctgtgtcctcactcagccttt

SEQ ID NO: 556859 - DNA, 484 bp, Homo sapiens
acccttttaagcagcaatagcagttttaaataaagtatagcaaaaaatttacaagcttggacacattatcttgaacrtacatatcttgaacatattaacctctcttaactgtagctttcacatctctaaaatacagtaattcttatttcttacaattgatatgagggctaaatgaagaaaatccatgtagagcagcttacgcatatcttagggccaggagtccttttcttgttcaccaacgtatatctgaaactagcatgactacatatagtaaatgtataatgaaaatttgttggtaaataatcttctttcctacaaaataaaaacatatttcaaattatttttccagaatctattgtcatttcagattctcttctaattgtgacatctctgcagtatcatgatatatgtgagctatttgactgcaattttttgagctcctcttgatataaatgtagccattctgtgcattgggataatattt

SEQ ID NO: 556860 - DNA, 484 bp, Homo sapiens
acccttttaagcagcaatagcagttttaaataaagtatagcaaaaaatttacaagcttggacacattatcttgaacatacatatcttgaacatattaacctctcttaactgtagctttcacatctctaaaatacagtaattcttatttcttacaattgatatgagggctaaatgaagaaaatccatgtagagcagcttacgcatatcttagggccaggagtccttttcttgttcaccaacgtatatctgaaactagcatgactacatatagtaaatgtataatgaaaatttgttggtaaataatcttctttcctacaaaataaaaacatatttcaaattatttttccagaatctattgtcatttcagattctcttctaattgtgacatctctgcagtatcatgatatatgtgagctatttgactgcaattttttgagctcctcttgayataaatgtagccattctgtgcattgggataatattt

SEQ ID NO: 556861 - DNA, 598 bp, Homo sapiens
atgggctttcttaactgctttcctgttgaactctggcaagcctaaagtgtgtcagaaaaatgttttaactccatyccatttctgcttggctagagaaagcttttaatcactggaaagctcacattttgtaaatgtgggttgtaaaagtagtttctttaagagaagaagaatgtcattgctttctaaatatgaaaaaattatatggcttggatacatttggcagtttgtatcaacacacccatctctggaaagtgcttattattgtatgaatactgtgccttatccgaggttcaatgtgtagattcaatgcgtatcagaatgttgtgtataacattactgagtgtaatctttttaaaaagagctaatagaagtactaaatatttgagtttcaaatacttatattaatgtctatgatagcaatatctgagggtgcaacttataatgagaggccaattaagcatgttaccatttttgaagggtacagacttaatatcttgccaacagagcacaattttacccttcctgtttcttccttagatattatgtggttactgatcttgatgtatttaaaaattatttttaccttgtattttcttat

SEQ ID NO: 556862 - DNA, 642 bp, Homo sapiens
gatggcataaccctgtagtcccagcaattcaggaggctgaggcaaggaaatcgcttgagcccaggaggtcaagactgcagtaagccatgattgcgccactgcactccagcctaggtgacagagtgagaccctgtctcaaaaaaaagaaaaaaagtttttactgtggggaggtaagggtattgtctgggaaatgagaataagggaggcttattgggtgttggaaatgtgctatatcatgatctgggtggagtttaccaagggcatacatatataaaaatttattgagatttataatggactataaagatttatgtaccttactgcctgttatacctcaataaaatgtcttcagccaggtgtggtggctcatgcctgtaatcccagcactttgggaggccaaggtggttgaatcacaaggtcaggagttcaagaccagcctggccaagatggtgaaacccygtctctactaaaaatacaaaaattagccaggcgtggtggtgcatgcctgtaatcccagctacttgggaagctgaggcagagaattgcttgaacccaggaggcggagtttgcagtgagccaacatcacaccattgcactccagcctgggcaacagagcgagactctgtttcaaaaaaaaaaaaa

SEQ ID NO: 556863 - DNA, 592 bp, Homo sapiens
gaagagggagaacacacctattgtaccattgttgtacgttccttgatcttgtcatctcactggtttcccacttcctcacagtctgtgaataccaccttaataaactattgcaggcctattttggaggtctaaaattataattaattaattaattaattaattttctatcttccctactgagccctaagttagtattctcaaagtctggtccattaactacctgcaggagaatctcctggggaagttattaaatctctgcagcctcatgctcaatcccagacctatcacagtagaatgcctccagtaagtgtcaggaatctgtatgtttaacatgacctccacctgattcttatgtccacttaagttgaaggctactcctgcagtctccctttgtgtgtcacttattggtttgcctttaaaaataagttgccttggccaggcacggtggcgcatgcctgtaatcccagcaawtttggaggccaatgcaggtgaatcacctgaggtcaggagttcgaaaccagcctggctaacatggtgaaaccccatctctactaaaaatacaaaattagccaggtgtggtggcgcatgcctg

SEQ ID NO: 556864 - DNA, 472 bp, Homo sapiens
ggcaaggttttttatttcactgcagcaaccaatgatgaaatgcaatatggtcagattaaaggtagcacataactacccttttgtagtagtaatgcctttggtgaacccacacatgctatcggtcatttaaatccataacctggagctgagcagagccccatcaaagtcttctttacatgccccacctgccctggggtggtgcatacatcatttgaagcaaagcttagtgacagctgcagaaatgtactcagtgaagctaaaatagactgcaatctagaataatagtgatggmaatatctggacattcatatttaaatgaatgaaatgattaccctaaatccagagctgatttgcagctggtacacatcagcactaccacactggctgttggtcagttttagaagcaccactcaccccaagtgcctcttttcctaatacctgaccatcttagtcccttccccagagcccctga

SEQ ID NO: 556865 - DNA, 593 bp, Homo sapiens
ttgggggcgggttcccccgatatttcacgatccatgatatcaaccatcttaaaggataagatgtgaatcagtgaggcagtgaaatcatcagcattggttaaatccattatcatcacaaagagaagaggtgggctgcttgataacatggaaaaattacttgtcatgtggatggaaaaccagatacagagatgcataccgcttagcctactgatgacttaggctagggtaagaagtgtgttctataagttcaaagagtacaccaatgatcctacatatatacaaatgtttatagcaagacatggccagttccaacacttgaaaatgcatcataattttcataatatgaaggtctgtggtgaggcagcaagtcctgatattgaaggtaacaaagcttttgggaagagccacatagggtaagtgtggatgagaagtatttaccagcacaaatatttaaagtcaatgaaatgagcttattctgaaagtatacaccagagcatacatacattcaccacgagtccaatgccagggtctacggcattcaaaggctgtgtaacactgctttsgggtgttacaggaaaggctttaatttaggg

SEQ ID NO: 556866 - DNA, 261 bp, Homo sapiens
ttgcttgaaaaatgttgatattgagagaaacctttattgatcactagtgggttttattagcacaaatgaattatttaacacaaacatagacaatagtaataataataataataacaatactgttggttttacagttccacrtaccaagaacttccgggcattcttatcatgctttataagcttgtgaatttagcacgaatctggttgacaagagtcagtgatggaaaggtagtatcaaaaacctccagtgtagcattccaa

SEQ ID NO: 556867 - DNA, 572 bp, Homo sapiens
atctcttcacttttcttggcatttaatacaccagtatttgtggcaatgtttaattcaaacaactatattttttttctgtttgacagagaattagaagctaaataggaactggttgctactgctttcttctatcaactattcacatttattgtcagttgactgaaaaaatagatctattattttattatgcttctstgtctgaatctaacggaatatactctttttgttgcccttagaaattcctcccagtcttcatggagcccaagtgctcctgacacagatcataatgttccatgctactcttctgtgttaatccttggattgactttcacttccttttttatttccttccttatttgtaatcaagatattcataaagaaggaaatcctacaaagaataggagaggggaagggaagtccactctgcaatttgtgaattattaggcccttagtaattcacaaattggataattacgccttgtacaaaagttgactcacatttcccttgaaaaatctttttttttcttagtcaaattcgttttgtgccacttttccaacattaacttccccaa

SEQ ID NO: 556868 - DNA, 449 bp, Homo sapiens
gtgaaaaacttgccactaaaataataaatgtgatacatcatatcagaagctttatttttgaattcactaatgtatttttgagttgttggaagcaaatgaacagttttgtgcattcctcacattttcaaactacattaaaaaacaagaaacacaactggactggatgtgtatttaataattgatatgcatcacaatcacattggctttcttcactgtaaagggataattataattagaataaatatggtaaaccatttaatgaatgtagattggacagatatttaaatattttggaaaaataaaattctatggtagtcatattaaatctttaagtattttttattcctacataccaaatacagaatttttcctaaaaatctatagagcaataaacactactggtgttatataagctctgacrttattaaaaataaaagcccaatggacct

SEQ ID NO: 556869 - DNA, 405 bp, Homo sapiens
taataccttcagactcagcaaccccaacctaatcaccccttgacagagagaaagaataagcatgagtcctaactcaacattgagccttaaaaactacatttgtaccttacttctactgcttaccaattatgtaatccaaacaaaacacataacctcgaggctacctagtttctcctctaacaaattaaaataataattatgccytcttttctggttattttaagaatactctgggaaaatatatgtaaggtaccacaaatcacagttcctagatcatgacatatagccttccttctttggttcctctttttatccccagcacaaagcaccattgtcagctcatagggagtgttaaatatagtaaatatacatgagtaaaactatctgtgtgctgtattcagtgta

SEQ ID NO: 556870 - DNA, 595 bp, Homo sapiens
ggcgcgcacctgtagtttcagctacttgggaggctgaggcaggagaatcgcttgaacctgggaggggaaggtttttttgagccawgatcatgctactgcactccagcctatgggcacagcgaaattctgtttcaaaaaaaaaaaaaatatatatatatatatacacacacacacacacactgtatataattatataaacttttaatttatataacatttaatttatgtaaatataaaaatttatatttatataaattttataaattttcatatataattataacatatatattatgtatatataattcaattaccacaggaataatttaaatgcaggccaataagtaatacctaggatactaaaatatattggggggtagcatatagggtcaagatagcaaatataaataatgagacaatagtgagccttgattattttctatgttgtttttggctcatttattcaaacattttattcattttataaacaaaacttcactgaatatttttaagcatattttctgagatattgttgctaaatagttacatcccttgtcactgtgtgaagatgcagcttaatgacactttaaaatgg

SEQ ID NO: 556871 - DNA, 595 bp, Homo sapiens
ggcgcgcacctgtagtttcagctacttgggaggctgaggcaggagaatcgcttgaacctgggaggggaaggtttttttgagccatgatcatgctactgcactccagcctakgggcacagcgaaattctgtttcaaaaaaaaaaaaaatatatatatatatatacacacacacacacacactgtatataattatataaacttttaatttatataacatttaatttatgtaaatataaaaatttatatttatataaattttataaattttcatatataattataacatatatattatgtatatataattcaattaccacaggaataatttaaatgcaggccaataagtaatacctaggatactaaaatatattggggggtagcatatagggtcaagatagcaaatataaataatgagacaatagtgagccttgattattttctatgttgtttttggctcatttattcaaacattttattcattttataaacaaaacttcactgaatatttttaagcatattttctgagatattgttgctaaatagttacatcccttgtcactgtgtgaagatgcagcttaatgacactttaaaatgg

SEQ ID NO: 556872 - DNA, 595 bp, Homo sapiens
ggcgcgcacctgtagtttcagctacttgggaggctgaggcaggagaatcgcttgaacctgggaggggaaggtttttttgagccatgatcatgctactgcactccagcctatgggcasagcgaaattctgtttcaaaaaaaaaaaaaatatatatatatatatacacacacacacacacactgtatataattatataaacttttaatttatataacatttaatttatgtaaatataaaaatttatatttatataaattttataaattttcatatataattataacatatatattatgtatatataattcaattaccacaggaataatttaaatgcaggccaataagtaatacctaggatactaaaatatattggggggtagcatatagggtcaagatagcaaatataaataatgagacaatagtgagccttgattattttctatgttgtttttggctcatttattcaaacattttattcattttataaacaaaacttcactgaatatttttaagcatattttctgagatattgttgctaaatagttacatcccttgtcactgtgtgaagatgcagcttaatgacactttaaaatgg

SEQ ID NO: 556873 - DNA, 598 bp, Homo sapiens
ggtcccacttctaccattgctattcagtmtaatactggaagtcctagtcagagcaattaggcaagaaaaagaagtgacacccaaactggaaataagaaagtaatataatgcctgtttgcagatgacataattttatatataaaaaaccctaaagactccataaaaaactgttagaactaataaacaaatacaataaaaaggacataaaaccaacatgcaaaaattagtagcattttatacaccaataacaaactatctgaaaagaaatgaggaaaccaattttatttgcaacagctacaaaagtaataaaatacataggaataaatttaaccaaggaaaggaagatatcaaggaataaatttaacaaagaaaaaactataaaacattgatgaaagaaatagaaaaggacacaaataaatggaaatatatatcatgttcatagattgaaaaagttaatattgttaaaatattaacactacctaaagtgatctacagatttaatgcaattcttatcagaatgttaatattatgtaaatagaataaactacattattttaatttaatattaaattaaattatgtaattttaatattacata

SEQ ID NO: 556874 - DNA, 570 bp, Homo sapiens
caaaatgagaataatattaatagaagagcttttcataaggcatgtgaggattacatgagttagcacatgtaaaaaaacataaaacatgsctggcatatcccaaaggtgtggtaaacaggagctcacaccatgagtgattgaggactatgtgctcaatgagtgaatcccatcctttctgtaaggggcagtcagtagtagtaggaagagtgtgggttttaaggaaagacctgagtttgcatatcacctccagtttgtgtttaactttaaataaattctagacttcccataccctcagtgtcctcatctgttaaatgggaacactttctctaccttcgaggctgactgtgaggactaaatggaagtatgtattttaaaggctcaacacagtgcctagcacataatcagcttctgaacatgtgagctcctgacacagcccagctcaaaacaggagccagggtctccccagggtttttagaggcaagcactgtttcatttattcctagtgtttgctttattgctgccaacctagtcttcacagttcctggggtttgggtcatcaaagccatttta

SEQ ID NO: 556875 - DNA, 570 bp, Homo sapiens
caaaatgagaataatattaatagaagagcttttcataaggcatgtgaggattacatgagttagcacatgtaaaaaaacataaaacatgcctggcatatcccaaaggtgtggtaaacaggagctcacaccatgagtgattgaggactatgtgctcaatgagtgaatcccatcctttctgtaaggggcagtcagtagtagtaggaagagygtgggttttaaggaaagacctgagtttgcatatcacctccagtttgtgtttaactttaaataaattctagacttcccataccctcagtgtcctcatctgttaaatgggaacactttctctaccttcgaggctgactgtgaggactaaatggaagtatgtattttaaaggctcaacacagtgcctagcacataatcagcttctgaacatgtgagctcctgacacagcccagctcaaaacaggagccagggtctccccagggtttttagaggcaagcactgtttcatttattcctagtgtttgctttattgctgccaacctagtcttcacagttcctggggtttgggtcatcaaagccatttta

SEQ ID NO: 556876 - DNA, 542 bp, Homo sapiens
tatatacatatatatatatatatatatatatatatatwtttttttttttttttttttcttttttgagacggagtctcgctctgtcgcccaggctggagtgcagtggtgtgatcttagctcactgcaagctctgcctcccaggttcatgccattctcctgcctcagcctcccgagtagctgggactacaggcgcccgccaccacgcccagctaattttttgtatgtttagtagagacagggtttcaccatgttagccaggatggtctcgatctcctgacctcgtgatccacccacctcggcctcccaaagtgctgggattacaggcataagccaccgcacctggcctctgttctatattttattgattgctaatgttatctttttatttccttccttttaattactttggctttgatttgctcttcttttagcttaaaggaaaacagggctcattgattgtaaacatttttttctttgctaatattaaagctatcaatttgcctccatacaatatttatctctatccccattttgatgtgcat

SEQ ID NO: 556877 - DNA, 542 bp, Homo sapiens
tatatacatatatatatatatatatatatatatatatttttttttttttttttttttcttttttgagacggagtctcgctctgtcgcccaggctggagtgcagtggtgtgatcttagctcactgcaagctctgcctcccaggttcatgccattctcctgcctcagcctcccgagtagctgggactacaggygcccgccaccacgcccagctaattttttgtatgtttagtagagacagggtttcaccatgttagccaggatggtctcgatctcctgacctcgtgatccacccacctcggcctcccaaagtgctgggattacaggcataagccaccgcacctggcctctgttctatattttattgattgctaatgttatctttttatttccttccttttaattactttggctttgatttgctcttcttttagcttaaaggaaaacagggctcattgattgtaaacatttttttctttgctaatattaaagctatcaatttgcctccatacaatatttatctctatccccattttgatgtgcat

SEQ ID NO: 556878 - DNA, 378 bp, Homo sapiens
acatatttggggaaataataggggaaaacttccctggctttgctakagacctagacatgcaaatacgaggagcacaaagaacacatgggaaattcatcacaaaaagatcatcacctaggcacattgtcaccaggttatccaaagttaagacaaaggaaagaattttaagatctgtgagacaaaagtaccaagtaacctataaaggaaaacctgtcagattaacagcagatttctcagcagaatccttacaagacagaagggattggggccctatcttcagccccctcaaacaaaacaattatcagccaagaattttgtatccagtgaaaatacgcatcatatatgaaggaaagatacagtctttttcagacaaacaaa

SEQ ID NO: 556879 - DNA, 369 bp, Homo sapiens
gaattctataagcttgtaaaacatatttggggaaataataggggaaaacttccctggctttgctagagacctagacatgcaaatacgaggagcacaaagaacacatgggaaattcatcacaaaaagatcatcacctaggcacattgtcaccaggttatccaaagttaagacaaaggaaagaattttaagatctgtgagacaaaagtaccragtaacctataaaggaaaacctgtcagattaacagcagatttctcagcagaatccttacaagacagaagggattggggccctatcttcagccccctcaaacaaaacaattatcagccaagaattttgtatccagtgaaaatacgcatcatatatgaagg

SEQ ID NO: 556880 - DNA, 394 bp, Homo sapiens
acaccgtgcatgcagtccctcacaagtgytggcagccactgtgcatacggacagcctgcccaagggaagaaatgggagatgtaatgcagccttggaagcatgccaacatatgactccccaaatcaaaggtcaaaccacgtacttgattttcttaagttgcccacttggccctcttccaagcgtacttcctttcattcctgccctgaaacttttattttctttccttttatttttatttatttatttatttttgagatggagtcgcactctgtctcccaggctggagtgcattggcacaatcttggctcactgcaacctcaggctcctgggttcaagcgattctcctgcctcagtctcctgagtgctgggagtacaagtgtacaccacatgccca

SEQ ID NO: 556881 - DNA, 415 bp, Homo sapiens
tatattccatgaactcctgtccccaaggacagatggcatttttcccctgccagagaagcagcactgggagacatttagtgtaaagcacmtgagaaatagtaagggaatcaattggtaaagctttctaaacaagcacagactctaaggctcagagtgacttgcctacctcctaaaaattgatttagtaagcccccctgaaaaaatgtaggtgacagcacagtgcccacaccaaaaatgtcttattaacagcatcttgagtctgccaggccttggaaggttgtttgttcgttaggtcccacagagcttccttatcctcattggacggaaacgcccctggtagttcatagcctccttgcttctccctaaactcaaatataggattcatatcttggatccttaatgacaaccgaggcaa

SEQ ID NO: 556882 - DNA, 619 bp, Homo sapiens
aggtcaaaggatacaaagtagcagaatgtatsatgagcaagtctagagatctaatgtaaaatgactacagctaaaaaactgtattgtattagaaatttctgttaaataagtagattttacctgctcttgtcatcaaaaaactatgtgagacaatagatatgtcaatttgctttactatattaaccattttactgtctgtatgactccccaaacaccatactgtaaacttcaactatacacaataaaatttatttttttaaaaaagattaatacaccaggtgtagtggctcacgcctgtaatcccagcactttgggaggccgaggtgggaagattacttgaggtcaggagtttgagactagcctggccaacatagtgaaaacccacctctactgaaaaaacaaaacaaaaattagccaggtgtggtggtgtatgcctgtaatcctagctacttgggaggccaaggcacgagaatctcttgaacccaggaggtgaaggttgcaatgagccaagattttgccactggactccaccctgggtgacacagtgagcgagactccatctcaagaaaaaaagataataaatgtagctctgtaaaaaccaaaaatttctgcatggcaa

SEQ ID NO: 556883 - DNA, 485 bp, Homo sapiens
acccatcaaccattttgcacatgacatcagtaacatttgaatggaacagttgtctaatgctytacgcagtaatatgattaattccacagaggggttgtttagttccagcttgtcccaacactgtgtatgtagtatgcaaagtgacatttaaacagaatttccatcagtagcagagtattctcagccctgaagtccatcatctgctatatcctagctttaagttcctgtcagattttctctgcactagatatacatcttgatccagcaggattgaaaaaaaaaaaaaaaaaaaaaaaaaaccaaaaaaaaaaaaccaattcccaagctcattaactatctaaggatcttaaaaaacactagggcaggaaaaattgaaaataaatgttaaatccaaatgtccttaaaaaaaaaactggctaaaaaaataaaataatattcatgcaatccagggctactttgcaccattcagtcattaaggggctaag

SEQ ID NO: 556884 - DNA, 485 bp, Homo sapiens
acccatcaaccattttgcacatgacatcagtaacatttgaatggaacagttgtctaatgctctacgcagtaatatgattaattccacagaggggttgtttagttccagcttgtcccaacactgtgtatgtagtatgcaaagtgacatttaaacagaatttccatcagtagcagagtattytcagccctgaagtccatcatctgctatatcctagctttaagttcctgtcagattttctctgcactagatatacatcttgatccagcaggattgaaaaaaaaaaaaaaaaaaaaaaaaaaccaaaaaaaaaaaaccaattcccaagctcattaactatctaaggatcttaaaaaacactagggcaggaaaaattgaaaataaatgttaaatccaaatgtccttaaaaaaaaaactggctaaaaaaataaaataatattcatgcaatccagggctactttgcaccattcagtcattaaggggctaag

SEQ ID NO: 556885 - DNA, 485 bp, Homo sapiens
acccatcaaccattttgcacatgacatcagtaacatttgaatggaacagttgtctaatgctctacgcagtaatatgattaattccacagaggggttgtttagttccagcttgtcccaacactgtgtatgtagtatgcaaagtgacatttaaacagaatttccatcagtagcagagtattctcagccctgaagtccatcatctgctatatcctagctttaagttcctgtcagattttytctgcactagatatacatcttgatccagcaggattgaaaaaaaaaaaaaaaaaaaaaaaaaaccaaaaaaaaaaaaccaattcccaagctcattaactatctaaggatcttaaaaaacactagggcaggaaaaattgaaaataaatgttaaatccaaatgtccttaaaaaaaaaactggctaaaaaaataaaataatattcatgcaatccagggctactttgcaccattcagtcattaaggggctaag

SEQ ID NO: 556886 - DNA, 485 bp, Homo sapiens
acccatcaaccattttgcacatgacatcagtaacatttgaatggaacagttgtctaatgctctacgcagtaatatgattaattccacagaggggttgtttagttccagcttgtcccaacactgtgtatgtagtatgcaaagtgacatttaaacagaatttccatcagtagcagagtattctcagccctgaagtccatcatctgctatatcctagctttaagttcctgtcagattttctctgcactagatatacatcttgatccagcaggattgaaaaaaaaaaaaaaaaaaaaaaaaaacmaaaaaaaaaaaaccaattcccaagctcattaactatctaaggatcttaaaaaacactagggcaggaaaaattgaaaataaatgttaaatccaaatgtccttaaaaaaaaaactggctaaaaaaataaaataatattcatgcaatccagggctactttgcaccattcagtcattaaggggctaag

SEQ ID NO: 556887 - DNA, 695 bp, Homo sapiens
cagttctccatagtggctatactaattacatttccagcaacactgtatgaggctgccctttttycccatcctcatcagtatttgctattgcttgtcttttggatagaaaccattttaacttgggtgagatgatatctcatagtagttttgatttgcgtttttctgacaataaatgatgttgagcattttatcatatacctgtgtgccatttgtatgtcttcttttaagaaatgtctactcagattttttagcccatttttaattggattgttagatttttttcctatttagttgtttgagctccttgtacattgtttattaatcccttctacaagtcgttactgaatgtcagcactactaaatgttaagaggtggcatgatagagtagaaagaaaatttgatttggaatagttaacactggtttaaagtcttggctttcccacttcatagctgtgtgacttgggcatttaacctgcagcttcttcacctctgtgctagaatcataactgctctggctacttcaaagggttgacaagagaataaaatatagatgtaaatgtgctttcttatcctgttaaacgttacgaaaattatctgttaccattagagaagcaaggtaaaaaattttggtttctagcttatgatctagttagggaaaaaatttgtacaagaaatattcaaagagcaaaactatt

SEQ ID NO: 556888 - DNA, 464 bp, Homo sapiens
tctagttctcctggtgcacacattaatacaatttgtagtctttctctccagttaatctgccatttgtgagttaatttttcagtgaaccttctgaaggtgaaggggaagtttcccttgaccactacactatttctttaatgattaccctacactttataatgtgcatgcctgtctcaaagtattcttttacttcaggtctattaatgatgaatgtccttagtttttgtgtmccaaaatgatttcactttagcgtcatatttgaagagtgttttcacagtgtaaaaatctaggttaagcttcttttctttcactatttaaaaaatatcagtctatccatcataatctggattacattatttatctattgagaaataaggtgcattattatcacttatttgactctaattttttttctggtttctttgtatattttttcttgtcttgttctgttttattattatgat

SEQ ID NO: 556889 - DNA, 579 bp, Homo sapiens
caccccttcgctcatgccttgcctaatgtatctcttcattcgtctgtgyatctatattttttataatatcctttgtaaattagtgcacataaataaagtacttctctgtgttttatgaagcagctagcaaattttcatacctaaggagggattgtgagcgcaaattatagtcagttggtcagaagtacaggacaccccctaaaacttgggattgtcatctgaaggggggtcagtctagtgtgacagggccattaagctatgagatctgatgctatcgctaggcacactgtgtcagaattacattgaattgaattataggacacctagctggtgtccagaaagtgagaattgcttgatttggaaaaaaaccccacacaattaggtgactagaagtgaagtgttctgcaagtactgagagtagtgagagttgtaaaaatgtgtgtgtgtgtttttctttagaatatccctagatccctagacctaaggatgagaattattttaattgaccatttgagaaatgcaaatcaaaactacagtgagatattatctcatctcagttatattaacttttatccaaaa

SEQ ID NO: 556890 - DNA, 531 bp, Homo sapiens
catgctcatttctgaacaactgagtaaggaaaacacagtaaacgtcattatagaattttatatgacagaagcaacaagctagatgtaattagcaatatacctacattttcacatcattatgttaaatgaataacaaggttagaatagcaaaataccatttatgtatatttaaatatatgtaatatacatataaaactacatatattacaaggacacatatttttacaaatacataaataggtgtttgactaaatgtcagtggggagcagagtatatttatgtataaaagcaatataattaacaataataaatataaaaaataagaagggcattacgttaatagcagtaatgttctgctcactaataaaaattattgactcaaytatttgtaattgtgccataaaaataaatgaaggaagaaggatagggagggaaggaaagagagctgtagcatagtctataccaaaaggtagatggcaaagcaaaagaaggttttattttcatgatttattgatatagttgttgctattt

SEQ ID NO: 556891 - DNA, 531 bp, Homo sapiens
catgctcatttctgaacaactgagtaaggaaaacacagtaaacgtcattatagaattttatatgacagaagcaacaagctagatgtaattagcaatatacctacattttcacatcattatgttaaatgaataacaaggttagaatagcaaaataccatttatgtatatttaaatatatgtaatatacatataaaactacatatattacaaggacacatatttttacaaatacataaataggtgtttgactaaatgtcagtggggagcagagtatatttatgtataaaagcaatataattaacaataataaatataaaaaataagaagggcattacgttaatagcagtaatgttctgctcactaataaaaattattgactcaattatttgtaattgtgccataaaaataaatgaaggaagaaggatagggagggaaggaaagagagctgtagcatagtctataccaaaaggtagatggcaaagcaaawgaaggttttattttcatgatttattgatatagttgttgctattt

SEQ ID NO: 556892 - DNA, 632 bp, Homo sapiens
tggttttcattcttttaatcaaatccctgagagtccctttccaaagggtaaaataataggcctcattaatttccaattgcactttataactgtgtacatagtaagtatatacaaaaatttattagaatgaatataatcatttagcaagatacaatgtgttataagttattgtacagcatttaaatatatattccattagtacaaaataattcaatatatgaaaatataaaattaatagcatatctaaatatcagaaacaaacaggcaaaataatccaagattaaaaaaacactgcttataattgcatcaaaatgtcaaataacaataagaacaactacaaatagtgagaaaaactttataaattytaaaacatcacagaataaactaaaggagacctacataggctgggcgcggcggctcatgcctgtagtcccagcgttttgagaggctgaggcagctggatcacctgaggtcaggagttcaagaccagcctggccaacatgatgaaaccctgtctctattaaaatacaaaaattagctgggcgtggtgccaggtgcctgtaatcccatttactcgggaggccgagtcaggagaatcctttgagtctggtaggcagaggtttcagtgagcc

SEQ ID NO: 556893 - DNA, 632 bp, Homo sapiens
tggttttcattcttttaatcaaatccctgagagtccctttccaaagggtaaaataataggcctcattaatttccaattgcactttataactgtgtacatagtaagtatatacaaaaatttattagaatgaatataatcatttagcaagatacaatgtgttataagttattgtacagcatttaaatatatattccattagtacaaaataattcaatatatgaaaatataaaattaatagcatatctaaatatcagaaacaaacaggcaaaataatccaagattaaaaaaacactgcttataattgcatcaaaatgtcaaataacaataagaacaactacaaatagtgagaaaaactttataaattctaaaacatcacagaataaactaaaggagacctacataggctgggcgcggcggctcaygcctgtagtcccagcgttttgagaggctgaggcagctggatcacctgaggtcaggagttcaagaccagcctggccaacatgatgaaaccctgtctctattaaaatacaaaaattagctgggcgtggtgccaggtgcctgtaatcccatttactcgggaggccgagtcaggagaatcctttgagtctggtaggcagaggtttcagtgagcc

SEQ ID NO: 556894 - DNA, 632 bp, Homo sapiens
tggttttcattcttttaatcaaatccctgagagtccctttccaaagggtaaaataataggcctcattaatttccaattgcactttataactgtgtacatagtaagtatatacaaaaatttattagaatgaatataatcatttagcaagatacaatgtgttataagttattgtacagcatttaaatatatattccattagtacaaaataattcaatatatgaaaatataaaattaatagcatatctaaatatcagaaacaaacaggcaaaataatccaagattaaaaaaacactgcttataattgcatcaaaatgtcaaataacaataagaacaactacaaatagtgagaaaaactttataaattctaaaacatcacagaataaactaaaggagacctacataggctgggcgcggcggctcatgcctgtagtcccagcgttttgagaggctgaggcagctggatcacctgaggtcaggagttcaagaccagcctggccaacatgatgaaaccctgtctctattaaaatacaaaaattagctgggcgtggtgccaggtgcctgtartcccatttactcgggaggccgagtcaggagaatcctttgagtctggtaggcagaggtttcagtgagcc

SEQ ID NO: 556895 - DNA, 496 bp, Homo sapiens
aacatagtaaaaaaaaaaaaaatgcaataaatgaagaaaaatgttgacagaagtcttcatgtactgctagtaaatactgatgaataaataattaattgcatagtaggagaaaaacttcatagaaaaatgaatacaatgaattattcaagtaaaattggaagtgtctctgatggttaagaaaaaaacacaaacaagtgaattacaagcagaagagaataatatctgtaaaatctgggtggctattataccatggtgtttctatgaataaacygcagatagaaagatagaggaaaaaaacttgtatactttttttctttgaagttaaaaatttcagctttattcaggagtcttacttgagaaatgtcaattatcagcattgtttttattagaatcttaattttggaaggagtttagaaatatgtttacttctgttcttgtattcatttaaaaagttatgctttgaatatatcaatagcattcttccgaattatattac

SEQ ID NO: 556896 - DNA, 527 bp, Homo sapiens
tgattactaaacaagtttattcctccaaatctcaagtgttactgtcactcaacctcttctttcccatcatgcattcttccaatgccttcctgtctgttctccccagatctcacttccacagccgtggctactattctcaacttattcttaataaattatcttacttcctcatcaactcaattatctcttactcattacttcaatttargcttcttgttcatccacactattatgtgacctattttgtcagaatatagtcaattctcattcttctttctttataaacctagttcatttgttttctatgcttgctataacaaatcactgcaaatttagtagcttaaaacagtacaagcctcttaaaaagaccacatttcccttaggctcatctgaaatcagttaccctgggcctaaaaaatctctgcaacatgtgcttcatattctgctctaattattagattaagatcatttaataaggattatttaggattatttaatcaattttacaagcagaatttaggacctac

SEQ ID NO: 556897 - DNA, 502 bp, Homo sapiens
atccaaaatatgtgtacacatgtatacwcatacatatacatatacttatacatatacatatacatatgctttttgcactaatggttaaatagtatttcattgaatgaatgggccaaatttaataagccagtttcctacctatctatataattagacatttaaatttagacatttaaaatttttccaatcattggttaataaagtcaatggacacaggtatatacacaaatatgatggttctttattagcacagtaattttcattctaacatgttttcaaatttttgattattgctaatcttataggcacaaaacactaaatgactccagtttaacttaaatttaccttataaaatgagttttaatatttcttcatgtgtttaaatatttgccacttattgttcatattattcattgttccagtaaattgcaaatgtattccttctttcacttgttacttattgaataactatcatgagtcaggtcctattgtaggtactgag

SEQ ID NO: 556898 - DNA, 502 bp, Homo sapiens
atccaaaatatgtgtacacatgtatacayatacatatacatatacttatacatatacatatacatatgctttttgcactaatggttaaatagtatttcattgaatgaatgggccaaatttaataagccagtttcctacctatctatataattagacatttaaatttagacatttaaaatttttccaatcattggttaataaagtcaatggacacaggtatatacacaaatatgatggttctttattagcacagtaattttcattctaacatgttttcaaatttttgattattgctaatcttataggcacaaaacactaaatgactccagtttaacttaaatttaccttataaaatgagttttaatatttcttcatgtgtttaaatatttgccacttattgttcatattattcattgttccagtaaattgcaaatgtattccttctttcacttgttacttattgaataactatcatgagtcaggtcctattgtaggtactgag

SEQ ID NO: 556899 - DNA, 604 bp, Homo sapiens
ttgacccaccagtgagtcaaagatttcaagtaatgtttatttttyattatatttttcttcttggggtaactataacacaataaaaaagaattcataaaaattataatgtattaatccattatcatgctgctatatagaactgttgaggactgggtaatttataaagaaaagaggtttaattgactcacagctttacatggcaggggaggcctcaggaaacttactatcatggcgaaggcatctcttcacagtgtggcaggagagagaatgagtgtcgagcaaagagggaagcctcttatagggccatccgatctcttgagaactcactcactgtcatgagaacagcatgggggaaaccatccccatgattcaattatctccacctggtcccacccttgacatgtggggattattacaattcaagagaagattttgggtgaggacatggagtcagaccacatcacctatgaattttttttttttttttttttttgctattttaggttctacttttaattccttctacataaaagtttcacaccttttaactcagcacattctcaacttctcccatgttagtatctaacatgggtcagtccttgct

SEQ ID NO: 556900 - DNA, 604 bp, Homo sapiens
ttgacccaccagtgagtcaaagatttcaagtaatgtttattttttattatatttttcttcttggggtaactataacacaataaaaaagaattcataaaaattataatgtattaatccattatcatgctgctatatagaactgttgaggactgggtaatttataaagaaaagaggtttaattgactcacagctttacatggcwggggaggcctcaggaaacttactatcatggcgaaggcatctcttcacagtgtggcaggagagagaatgagtgtcgagcaaagagggaagcctcttatagggccatccgatctcttgagaactcactcactgtcatgagaacagcatgggggaaaccatccccatgattcaattatctccacctggtcccacccttgacatgtggggattattacaattcaagagaagattttgggtgaggacatggagtcagaccacatcacctatgaattttttttttttttttttttttgctattttaggttctacttttaattccttctacataaaagtttcacaccttttaactcagcacattctcaacttctcccatgttagtatctaacatgggtcagtccttgct

SEQ ID NO: 556901 - DNA, 471 bp, Homo sapiens
ttgttaaattgagattctctaactttgatgtgggcatttagtgctataaatttccctctcaacattgccttagctgtgtccccagattctggtatgttgtatctttgttatagttactttcaaataatgtcttgatttctgccttaatttcattgtttacccaaaagtaattcaagagtagattatttcgtttccaagtaattgtatggttttgagtaaatttcttagtcctgatttctaatttgattatgctgtgatctacgaaatagattgttaggatttcagttttttccatttagctgaaaagggttttttttttttttttttttttttttttttttttttttggagacagagtctcgctctgtcacccaggctggagtgcagtggtgctgtctcrgctcattgcaagctctgcctcctgggttaatgccattctcctgcctcagcctccagagtagctgggactac

SEQ ID NO: 556902 - DNA, 471 bp, Homo sapiens
ttgttaaattgagattctctaactttgatgtgggcatttagtgctataaatttccctctcaacattgccttagctgtgtccccagattctggtatgttgtatctttgttatagttactttcaaataatgtcttgatttctgccttaatttcattgtttacccaaaagtaattcaagagtagattatttcgtttccaagtaattgtatggttttgagtaaatttcttagtcctgatttctaatttgattatgctgtgatctacgaaatagattgttaggatttcagttttttccatttagctgaaaagggttttttttttttttttttttttttttttttttttttttggagacagagtctcgctctgtcacccaggctggagtgcagtggtgctgtctcgrctcattgcaagctctgcctcctgggttaatgccattctcctgcctcagcctccagagtagctgggactac

SEQ ID NO: 556903 - DNA, 517 bp, Homo sapiens
gtctaatgttttaatatcaatatgtttttcaaaataattctattactttatatattttatttagtattatatataatgtatatgtatatatgatataatcccacctaatctgtgacttgtcttttcattttattaatagtgtctttggagtgccagaaactgataaaacccactctatcaattttttaattgtgtgattcaagcctttcatgtcctgtctgtgaaatctttgcctaccacaaggtcagaaagattttacactatattttcttctagaaatagaactatgaagttctatttcttatgttttggcatataatcaatatctagttaattattatrtatggcattagggaagggtcagttttactttttaaatatagatattgttcagccccagtttttgagaaattattcttttcttatttatcatggtgcatgttcatggatgtacatgtacacatatacagtataaatgttctcactgagtatttatatattttattgatatatattt

SEQ ID NO: 556904 - DNA, 491 bp, Homo sapiens
aacgtttgtttcttttgaggaaaacattatataagtgatcaagttagtggmgaagagagccaacttgagtggatttcaaacagtaagaaaattaaatgctctgttactgctccccaacttttaaatgcagactttatagtcttttattttaactctgtttgtggagacacaggtaaagaatatttctctattcaagataaacaacaatgcagtgataaacaaaagccaaccctaggtgttagtgttaggagttagtggggagtgatagagactacacagaaatgggagtgccctttctaaatgagaggagccgccacatagaaaacaaacctggcactaccatccccctcttcatttcctaaaaaaaagaacattaatttttatgtgagatatcccaatatttaaattttgatttacatttaataagggaaaaggaaaaaaataagaaagagaagggaaaaaagaaaacaaagaaggccaggtgcaatggc

SEQ ID NO: 556905 - DNA, 405 bp, Homo sapiens
tgtggatatctaatttttccagcaccagttattaaagaaactgtcctttctcagtatgtgctcctggtagctttgtcaaaaatgagttgactttagatatgtgaatttatttctgggttctctattctgagtctcttccactggtctatgtgtctgtttttatgtcagtaccatgctgctttgattgctatgactttgtggtatattatgaggttaggtagtgtgatgcctctagttttcttatttttactcaaaattgccttgaatcttcaggatctttmgtggttccatatgaactgtaggatttttttttctatttctgtgaaaaatatcactgatattttgatagggattgcatttaatttataaatcacttgattaagatggacattttaacaatattaa

SEQ ID NO: 556906 - DNA, 576 bp, Homo sapiens
gtctatcctttcaaaaaaccaactttgatttcgttgatcttttgtgtggatttttgcatcttagtttcatttagttctgcttttattttagttatttcttgtcttctgatagctttggggttggttggttcttgttttcatagttactcgaggtgcaatattgtattattaatttgaggtctaacttcttgttacaggcatttagcattataaactttcctcttttcactattttgactgtatcccagagagttttggtatgttttgtctctgtttgcattaagtttaaagaactttttgatttctgcctttattccattgtttacccaaaagtgattcaggagtaagttgtttaatgtctatgcaattgtgtggttttgagagacatcttatttcttggtattcatttctagttttattgcactgtgttctgaaattatgattggtaygatttctgttttttaaaatttattgagatttgttttatggatgggcatgtggttgattgtagagtattctgtgtgcagatgagaagaatgtatattttgtggttattgcatggagaattctgtagat

SEQ ID NO: 556907 - DNA, 582 bp, Homo sapiens
tgtggtgttattcccaagagtgtacaagaaagctkatggtggtagggataatgcgtcttaaaaataaggcttcgtttggacagctctgaaagcaatctgcttgtatcagcctaaacctaaaaatactccattttcagggcaatctgtttcagaagcttttgtccccccgccctccacttcatttgataccataccctttggtgtcagccttacaacattgcaagttgctagtataatatgtttttccttctttagcacaaactggagtgatatatttgatccaccctacatagtccaatggataaaataacattcataacattcttcataattaattaaaaaaccaaacagttcctttcaatatcaaggatataaaactgattgctttagattgcatgagaaccacttgccatttactatctatccaaaatggctgaaactaaagcccattcatgtggcttatatatgcctgtgttggatagaatgaggcctggaatttttttttttttttttttttttttttgataataagtggaagaaaaacagaacactggttatagaaacatactgccaggttaaatg

SEQ ID NO: 556908 - DNA, 526 bp, Homo sapiens
atgccctcctgaatcataaagctagttgtgataaattggtgaactgagagcctacacagtagtattaattctgttctaatttctgcctaactgtggagtctcatcacatagtcttaaaagattattgctatgaaatattcttatacatgtaacccataacccctgcagttgccattggttgtcttacctaataatcaattgctccgcttcataatatttaaattggcatctccattttccaaaaggcataaatactagtatagttttttagttaagccagaagaaagtccacttcattttttattttattttatttatatatttttttgagacagagtctcactctgtcgcccaggctagagtgcagtggcgtgatctcggctcactgcaacctctgcctcccaagtttaagcaattctcctgtcttagtctcccgagtagytgggactacatgcacccgctaccacgcctggctaattttttttgtatttttagtagggacagggtttcacagtgttagccagga

SEQ ID NO: 556909 - DNA, 581 bp, Homo sapiens
aacaattatctttcttacaactgaaacaactgagatagtgaagtttcctcatacgtttgctgaaaaataatttctggaatagtcttctatttgaaaaaaagtcattttagaggtaaaaaatgaaattttgtgaaatgcatgcttttataacatttatctattttgtatgctttcttgtgaaacaactgtaagataattttgagcaaaataagagattaaactaagaaaaacaggaagatatgaggtcagaaaacagaaggtcaatcacagaagtgagaggtaaaactatttgctggaatgagggtgacaataatgttaagatgacatttctgtagcaggtgcaataagtcatacttgaccaggaagatggtgaattccarggaagttatatttagtggtgggctggtgaatgcttattaacttacaatccagggggaaaaacccctaaaatgaatgacccattttggaacattttctaatatctatgctgtaaatatttctagcagggaagaaaacatatcatagaactgctgattttggaagaaatacacacaatcagctcccaatatctagttaaaccc

SEQ ID NO: 556910 - DNA, 595 bp, Homo sapiens
tgaacatttaagaaatctggatatttttctgaattaagaatatttttcagctggagccaaatgtctaagttattcactatcatcatttacacaatgtaatagaagccttactcaaacccagatagttccctttttcacactaacatgtacattctattgtctgccgaatctggatatgaaaagtgaagagaagctaaaatattaatcccatctaactaagaaggctaatgtaaaactagtaaaaaatataagaatatctttttgttccttgtacagtattatctatagcaaccaataaattatagtgcatatcaaaktaaactctaaatatgaacaaattaaagtatgtatgtttgtgatgaagaattacttttgtttttttcacaatttaccactttaatattaaaatgcaagacttgtaaacctttatttttgtttatgtacaagatgctaaaaaatatataaagttatggatttcagtacttaacctgtgcatcaccagccccaaagggccgtaagtatatgaaatatagcagctgggaacaggatgaaggtgtctatttttcaaatactttatgttaaaatatatttgtta

SEQ ID NO: 556911 - DNA, 520 bp, Homo sapiens
tttttagtattccaagtttccccttyggagtaatttgttgtttaaggaaagaaagtagtcctttgaatgttagattaaaaatgtgtattctatttgaattaattctctttgagtactttaaataatataagcaaaaatcttaaggaaaggatactgaattcacgtgctagtgttctgatccatataagaaccaaccctagactaatatattctctactgattttgatttttatatcattttaaaccctaagacaatgtattattattattaattattttatttatttatttattttgagatggagtctgtctgtcactcaggctggagtgcagtggtgtaatctcagctcattgtagcctcagcctcctgagtagctgggattacaggcacccaccaccatgcctggctaatttttgtatttttagtagagatggggtttcaccatcttggccaggctggtcttgaatcctgaccttttgatccaccctcctcggcctcccaaagtgctgggattacagg

SEQ ID NO: 556912 - DNA, 357 bp, Homo sapiens
ttatataaaatacaatggaaaagaataagataaaagtgtttcaagaaaagatgaaacagagagaaacaaatcctcataaacagaattgcattcctgaaaatgggaagagataatgaaactcccaaatgttcagtgatatgaaggaggaaaagatttctaaaataargaactaaatctgtacatggaaagatattccaagaaaaactatagagaatgaaatatatctttgtaaagttagtgaatgtcaacaatgactaaacaagggtttctgtggacacaatggtaggaggaagtcacctctgaggggcgcaacctcacagaccactgagttttccagggcagcaatcactgccagaa

SEQ ID NO: 556913 - DNA, 547 bp, Homo sapiens
actatgtgcatattcaagaaggtaaaggaagtcaaagtttttaaagaaaaaatgaggaggattggattataattttgaaataattatccttgcctgcaaagatcaataacaatatagtctaaggttgtactagaacttgatcagtctaaggttgtactagaacttgctgggtagatgatcttgaagtattttttgtttaaggtggtaatggcttttgtttagggttgtggcttttaragtcttttgtgatagttcttattgtcaggcatttgtgcatcagaactctctcttcacagccatctctgggtttattaatcagtttttttctcaacaccaatgatatggtttggctctgtgtcctcacgcaaatctcatgtagaattataatccccatatctcaagggaggtgcctggtggggcttaactggatcatgggagcagatttccctattgctgttctcatgataggagggacttttcatgagatctgatggtttaaaagtgtatggcatttcccttcactctcactccctctcctgctctgcca

SEQ ID NO: 556914 - DNA, 595 bp, Homo sapiens
tacctaatgctaaatgatgagttaatgggtgcagcacaccagcatggcacatatatacatatgtaactgacctgcacattgtgcrcatgtaccctaaaacttaaagtataataataataaaataaaattaaaaaattaaaaaaatatatgtttggctgatatcagttcagattattcgatactcccacattctcccaaatctggaaggtcaatgtttatagatgcattttaaaatacatctattataggagtataaaaacttctcccaaaataaatactgacttaaactgacaaccaacaatttcttttattgtttgtctgttgcttgctctatgatgctagacagtgcaaaggccattatatgtattttgttctttcatatttacaatgagagtaacatttggttacatttcatatatatttttaatagtttctaaaagttatttttataataatatattaggtcttgtgttcaaatatgtgtgtgtatgtgtacaacattaacaatgcacattaatattgatgataaaggaacttcttactttgtgcatgcaaaaaagattaagcccttattttataatattgcttaagacaa

SEQ ID NO: 556915 - DNA, 595 bp, Homo sapiens
tacctaatgctaaatgatgagttaatgggtgcagcacaccagcatggcacatatatacatatgtaactgacctgcacattgtgcacatgtaccctaaaacttaaagtataataataataaaataaaattaaaaaattaaaaaaatatatgtttggctgatatcagttcagattattcgatactcccacattctcccaaatctggaaggtcaatgtttatagatgcattttaaaatacatctattataggagtatamaaacttctcccaaaataaatactgacttaaactgacaaccaacaatttcttttattgtttgtctgttgcttgctctatgatgctagacagtgcaaaggccattatatgtattttgttctttcatatttacaatgagagtaacatttggttacatttcatatatatttttaatagtttctaaaagttatttttataataatatattaggtcttgtgttcaaatatgtgtgtgtatgtgtacaacattaacaatgcacattaatattgatgataaaggaacttcttactttgtgcatgcaaaaaagattaagcccttattttataatattgcttaagacaa

SEQ ID NO: 556916 - DNA, 595 bp, Homo sapiens
tacctaatgctaaatgatgagttaatgggtgcagcacaccagcatggcacatatatacatatgtaactgacctgcacattgtgcacatgtaccctaaaacttaaagtataataataataaaataaaattaaaaaattaaaaaaatatatgtttggctgatatcagttcagattattcgatactcccacattctcccaaatctggaaggtcaatgtttatagatgcattttaaaatacatctattataggagtataaaaacttctcccaaaataaatactgacttaaactgacaaccaacaatttcttttattgtttgtctgttgcttgctctatgatgctagacagtgcaaaggccattatatgtattttgttctttcatatttacaatgagagtaacatttggttacatttcatatatatttttaatagtttctaaaagttatttttataataatatattaggtcttgtgttcaaatatgtgtgtgtatgtgtacaacattaacaatgcacattaatattgatgataaargaacttcttactttgtgcatgcaaaaaagattaagcccttattttataatattgcttaagacaa

SEQ ID NO: 556917 - DNA, 582 bp, Homo sapiens
acaaaaaaccaaacaccgcatattctcactcataggtgggaattgaacagtgagaacacatggacacaggaaggggaacatgacactctggggactgttgtggggtggggggaggggggatggatagctttaggagatacacctaatgctaattgacgagttaatgggtgcagcacaccagcatggcacatgtatacatatgtaactaacctgcacattgtgcacatrtaccctaaaacttaaagtataataacaataaaataaaaaaaaagaaggaaaggaaagttcactttaaagagatacaagagggtgcctgaaggtcaaagagagcatttaatcttgattctagaactttacagcctcacctatttctgactgcatgcacagtgccctccttaccctcgggaattgagcatgtacagtgtatttaggtaattctatgcatgcccatctgaggctttcctccctttttccagtggagtgcacgcagaaggtcttctgcataaatggttacttcaccattttgtctcaatgcacatgcccaggaagtttcttctccctggcatctgtattcaattaaca

SEQ ID NO: 556918 - DNA, 582 bp, Homo sapiens
acaaaaaaccaaacaccgcatattctcactcataggtgggaattgaacagtgagaacacatggacacaggaaggggaacatgacactctggggactgttgtggggtggggggaggggggatggatagctttaggagatacacctaatgctaattgacgagttaatgggtgcagcacaccagcatggcacatgtatacatatgtaactaacctgcacattgtgcacatataccctaaaacttaaagtataataacaataaaataaaaaaaaagaaggaaaggaaagttcactttaaagagatacaagagggtgcctgaaggtcaaagagagcatttaatcttgattctagaactttacagcctcacctatttctgactgcatgcacagtgccctccttaccctygggaattgagcatgtacagtgtatttaggtaattctatgcatgcccatctgaggctttcctccctttttccagtggagtgcacgcagaaggtcttctgcataaatggttacttcaccattttgtctcaatgcacatgcccaggaagtttcttctccctggcatctgtattcaattaaca

SEQ ID NO: 556919 - DNA, 493 bp, Homo sapiens
cagcaatctttgctgttctgcagcctccactggtgatacccagctgaacagggtctggagtggacctccagcaaactgcagcagacctacagaagarggtcctgactgttagaagaaaaacttacagacagaaagccctaacatcaacatcaacaaaaaggaaccccatacatagaaactccatccaaaggtcatcagcctccaagatcaaaagtaggtaaatccacaaagatgaggaaaaacctgcataaaaatgctgaaaattccaaaaaccagaatgtctcttcttctccaaatgatcgcaactcctgtccagaagggcacaaaactggatggagaatgagattgatgaactgacagaagtaggcttcaggtcgtgggtaatagaagactccttggagctaaaggagaatgttctaacccaatgcaaggaaactaagaaccttgataaaaggttacaggaactgctaactagaacaaccagtttagagag

SEQ ID NO: 556920 - DNA, 587 bp, Homo sapiens
ggtggttgaattgacatctaaaaaatagtgtagtcagatattgcaggataaatgatttggtgttgatgttgtcggctgtggagaacaggaactctggtccttgtggtgcatgtgacttctgaggatggggtttctcaagaggaggcctttaggcaagcagtaaattctattttttctcaggtttaataagataagtagacgtagggagctttctgggaagaggtycagggtggagttggttctctctctctctctctctctgtctcttcccttttgtgtttaaaggaagactccagaaagcacaagagaaggtataagaagagagtataaggaaacttgactcagggcaaagaaagcattgattagaaatggattcaaaatccaggagatgattagtgttgggtcaggcatgttcatttttatatcttctgtgtaagtcctcttagattagcttgatttaaatgcttttcctttttgttcttataaaaaacggcacctaccttcatcaatatgttgatcacagtcagaggtgaaattaagtttttgggcctgatgcacgtacaagatgagggccccactttaagaaa

SEQ ID NO: 556921 - DNA, 533 bp, Homo sapiens
gtttcaaaactgttctgtctaaagaaatgttcaactgtgttagttgaggacacacatcagaaactagtttctgagaatgcttctgtctagttgttatgggaagatatttccttttccaacgtaggcctgaaagcgctccaaatgtccacttccatrtactaaaaaaagagtgtttcaaacctgctctaccaaagggaatgttctactctgtgacttgaatgcaaacatcccaaagaagtttctgagaatgcttctgtctagatttgatctgaagacaatcccgtttccaacgaaatcctcaaggctaggcaaatatcctcttgcagattccagaaaaagagtgtttcaaaactgctccttcaaaacggtggttcaattctcttagttgagtacacacatctcaaataagtttctgagaatgcttctgcctagttgttacgggaagatatttccctttccaacataggcctgaaagcgctccaaatgtccacttccagatactacaaaaagagtgtttcaaacctgctctacca

SEQ ID NO: 556922 - DNA, 533 bp, Homo sapiens
gtttcaaaactgttctgtctaaagaaatgttcaactgtgttagttgaggacacacatcagaaactagtttctgagaatgcttctgtctagttgttatgggaagatatttccttttccaacgtaggcctgaaagcgctccaaatgtccacttccatgtactaaaaaaagagtgtttcaaacctgctctaccaaagggaatgttctactctgtgacttgaatgcaaacatcccaaagaagtttctgagaatgcttctgtctagatttgatctgaagacaatcccgtttccaacgaaatcctcaaggctaggcaaatatcctcttgcagattccagaaaaagagtgtttcaaaactgctccttcaaaacggtggttcaattctcttagttgagtacacacatctcaaataagtttctgagaatgcttctgcctagttgttacgggaagatatttccctttccaacatrggcctgaaagcgctccaaatgtccacttccagatactacaaaaagagtgtttcaaacctgctctacca

SEQ ID NO: 556923 - DNA, 583 bp, Homo sapiens
gtttcaaaactgctccttcaaaacggtggttcaattctcttagttgagtacacacatctcaaataagtttctgagaatgcttctgcctagttgttacgggaagatatttccctttccaacataggcctgaaagcgctccaaatgtccacttccagatactacaaaaagagtgtttcaaacctgctctaccaaagggaatgttctrctctgtgacttgaatgcaaacatcccaaagaagtttctgagaatgcttctgtctagattttacctgaagacaatcccgtttcccacgaaatcctcaaagctatgcaaatatcctcttgcagattctacaaaaagagtgtttcaaaactgctctatgaaaagaaaggttcaactctgtcagtagagggcacacatcacaaacaagtttctgagaatgcttgtgtctagttgttatgggaagatatttcctttttcaacataggcctgaaagcgctccaaatgtccacttccagatactacaaaaggagtgattccaacctgctctatgatagggaatgttcaactctgtgtcctgaatacaaacatcacaaagatgttt

SEQ ID NO: 556924 - DNA, 607 bp, Homo sapiens
gaattcccgcttccaacgaaatcctcaaaactagccaaatatccacttgcagattccacaaaaagagcatttcaaaactgctctatcaaaagaaaggttcaactttgttagttgagtagatacagcataaacaagtttctgagaatgcttctgtccagtttttatgggaagatatttcctttttcaccttagccctgaaakcgctccaaaagtccagttccagatactacaaaaggagtgtttcaggactgctctatgaaagggagtgttcaacttttgacttgaatgcaaacatcagaaagcagtttctcagaacgctgctgtgtgctttttatatgtattcccgcttccagcgaaatccccaaagctagccaaatatccacttgcagattccagaaaaagagtgtttcaaaactgctccttcaaaacggtggttcaattctcttagttgagtacacacatctcaaataagtttctgagaatgcttctgtctagttgttatgggaagatatttccttttccaacataggcctgaaagcgctccaaatgtccacttccagatactacaaaaggagtgattcaaacctgctctatgatagggaatgtt

SEQ ID NO: 556925 - DNA, 607 bp, Homo sapiens
gaattcccgcttccaacgaaatcctcaaaactagccaaatatccacttgcagattccacaaaaagagcatttcaaaactgctctatcaaaagaaaggttcaactttgttagttgagtagatacagcataaacaagtttctgagaatgcttctgtccagtttttatgggaagatatttcctttttcaccttagccctgaaagcgctccaaaagtccagttccagatactacaaaaggrgtgtttcaggactgctctatgaaagggagtgttcaacttttgacttgaatgcaaacatcagaaagcagtttctcagaacgctgctgtgtgctttttatatgtattcccgcttccagcgaaatccccaaagctagccaaatatccacttgcagattccagaaaaagagtgtttcaaaactgctccttcaaaacggtggttcaattctcttagttgagtacacacatctcaaataagtttctgagaatgcttctgtctagttgttatgggaagatatttccttttccaacataggcctgaaagcgctccaaatgtccacttccagatactacaaaaggagtgattcaaacctgctctatgatagggaatgtt

SEQ ID NO: 556926 - DNA, 642 bp, Homo sapiens
ccacttgcagattccacaaaaagagcatttcaaaactgctctatcaaaagaaaggttcaactttgttagttgagtagatacagcataaacaagtttctgagaatgcttctgtccagtttttatgggaagatatttcctttttcaccttagccctgaaagcgctccaaaagtccagttccagatactacaaaaggagtgtttcargactgctctatgaaagggagtgttcaacttttgacttgaatgcaaacatcagaaagcagtttctcagaacgctgctgtgtgctttttatatgtattcccgcttccagcgaaatccccaaagctagccaaatatccacttgcagattccagaaaaagagtgtttcaaaactgctccttcaaaacggtggttcaattctcttagttgagtacacacatctcaaataagtttctgagaatgcttctgtctagttgttatgggaagatatttccttttccaacataggcctgaaagcgctccaaatgtccacttccagatactacaaaaggagtgattcaaacctgctctatgatagggaatgttcaactctgtgtcctgaatacaaacatcacaaagatgtttctcagaacgctgcagtctgcaatttgtatgaattcccg

SEQ ID NO: 556927 - DNA, 607 bp, Homo sapiens
gaattcccgcttccaacgaaatcctcaaaactagccaaatatccacttgcagattccacaaaaagagcatttcaaaactgctctatcaaaagaaaggttcaactttgttagttgagtagatacagcataaacaagtttctgagaatgcttctgtccagtttttatgggaagatatttcctttttcaccttagccctgaaagcgctccaaaagtccagttccagatactacaaaaggagtgtttcaggactgctctatgaaagggagtgttcaacttttgacttgaatgcaaacatcagaaagcagtttctcagaacgctgctgtgtgctttttatatgtattcccgcttccagcgaaatccccaaagctagccaaatatccacttgcagattccagaaaaagagwgtttcaaaactgctccttcaaaacggtggttcaattctcttagttgagtacacacatctcaaataagtttctgagaatgcttctgtctagttgttatgggaagatatttccttttccaacataggcctgaaagcgctccaaatgtccacttccagatactacaaaaggagtgattcaaacctgctctatgatagggaatgtt

SEQ ID NO: 556928 - DNA, 522 bp, Homo sapiens
cctagccttgaggatttcgttggaaacgggattgtcttcagatcaaatctagacagaagcattctcagaaacttctttgggatgtttgcattcaagtcacagagtagaacattccctttggtagagcaggtttgaaacactctttttttagtatatggaagtggacatttggagcrctttcaggcctacgttggaaaaggaaatatcttcccataacaactagacagaagcattctcagaaactagtttctgatgtgtgtcctcaactaacacagttgaacatttctttagacagaacagttttgaaacactctttttgtggaatctgcaagtggctatttggctagatttgaggatttcgttggaaacgggattacatataaaaagcagacagcagcattctcagaaagttctttgtgatgattgcattcaagtcacagaattgaacattccctttcacagagcaggtttgaaacactctttttgtagtgtgtgtaagtggacatttggagcactttccgg

SEQ ID NO: 556929 - DNA, 647 bp, Homo sapiens
gaattgaacattccctttcacagagcaggtttgaaacactctttttgtagtgtgtgtaagtggacatttggagcacttwccggcctaaggtgaaaaaggaaatatcttcccataaaaactagacagaagcattctcagaaacttactcgtgatgtgtgtcctcaactaaaggagtagaaccttccttttcatagagaagttttgaaacgctctttttgtggaatctgcaagtggatatttggctagttttgaggatttcgttggaagcgggaattcatacaaattgcagactgcagcgttctgagaaacatctttgtgatgtttgtattcaggacacagagttgaacattccctatcatagagcaggtttgaatcactccttttgtagtatctggaagtggacatttggagcgctttcaggcctatgttggaaaaggaaatatcttcccataacaactagacagaagcattctcagaaacttatttgagatgtgtgtactcaactaagagaattgaaccaccgttttgaaggagcagttttgaaacactctttttctggaatctgcaagtggatatttggctagctttggggatttcgctggaagcggaatacatataaaaagcacacagcagcgttgtgagaaact

SEQ ID NO: 556930 - DNA, 647 bp, Homo sapiens
gaattgaacattccctttcacagagcaggtttgaaacactctttttgtagtgtgtgtaagtggacatttggagcactttccggcctaaggtgaaaaaggaaatatcttcccataaaaactagacagaagcattctcagaaacttactcgtgatgtgtgtcctcaactaaaggagtagaaccttycttttcatagagaagttttgaaacgctctttttgtggaatctgcaagtggatatttggctagttttgaggatttcgttggaagcgggaattcatacaaattgcagactgcagcgttctgagaaacatctttgtgatgtttgtattcaggacacagagttgaacattccctatcatagagcaggtttgaatcactccttttgtagtatctggaagtggacatttggagcgctttcaggcctatgttggaaaaggaaatatcttcccataacaactagacagaagcattctcagaaacttatttgagatgtgtgtactcaactaagagaattgaaccaccgttttgaaggagcagttttgaaacactctttttctggaatctgcaagtggatatttggctagctttggggatttcgctggaagcggaatacatataaaaagcacacagcagcgttgtgagaaact

SEQ ID NO: 556931 - DNA, 666 bp, Homo sapiens
ggaattcatacaaattgcagactgcagcgttctgagaaacatctttgtgatgtttgtattcaggacacagagttgaacattccctatcatagagcaggtttgaatcactccttttgtagtatctggaagtggacatttggagcgctttcaggcctatgttggaaaaggaaatatcttcccataacaactagacagaagcattctcagaaacttatttgagatgtgtgtactcaactaagagaattgaaccaccgttttgaaggagcagttttgaaacwctctttttctggaatctgcaagtggatatttggctagctttggggatttcgctggaagcggaatacatataaaaagcacacagcagcgttgtgagaaactgctttctgatgtttgcattcaagtcaaaagttgaacactccctttcatagagcagtcctgaaacactccttttgtagtatctggaactggacttttggagcgctttcagggctaaggtgaaaaaggaaatatcttcccataaaaactggacagaagcattctcagaaacttgtttatgctgtatctactcaactaacaaagttgaacctttcttttgatagagcagttttgaaatggtctttttgtggaatctgcaagtggatatttggctagttttgaggatttcgt

SEQ ID NO: 556932 - DNA, 462 bp, Homo sapiens
ggaattcatacaaattgcagactgcagcgttctgagaaacatctttgtgatgtttgtattcaggacacagagttgaacattccctatcatagagcaggtttgaatcactccttttgtagtatctggaagtggacatttggagcgctttcaggcctatgttggaaaaggaaatatcttcccataacaactagacagaagcattctcagaaacttatttgagatgtgtgtactcaactaagagaattgaaccaccgttttgaaggagcagttttgaaacactctttttctggaatctgcaagtggatatttggctagctttggggatttcgctggaagcggaatacatataaaaagcacacagcagcgttstgagaaactgctttctgatgtttgcattcaagtcaaaagttgaacactccctttcatagagcagtcctgaaacactccttttgtagtatctgg

SEQ ID NO: 556933 - DNA, 531 bp, Homo sapiens
tcaggcctatgttggaaaaggaaatatcttcccataacaactagacagaagcattctcagaaacttatttgagatgtgtgtactcaactaagagaattgaaccaccgttttgaaggagcagttttgaaacactctttttctggaatctgcaagtggatatttggctagctttggggatttcgctggaagcggaatacatataaaaagcacacagcagcgttgtgagaaactgctttctgatgtttgcattcaagtcaaaagttgaacactccctttcatagagcagtcytgaaacactccttttgtagtatctggaactggacttttggagcgctttcagggctaaggtgaaaaaggaaatatcttcccataaaaactggacagaagcattctcagaaacttgtttatgctgtatctactcaactaacaaagttgaacctttcttttgatagagcagttttgaaatggtctttttgtggaatctgcaagtggatatttggctagttttgaggatttcgttggaagcgggaa

SEQ ID NO: 556934 - DNA, 531 bp, Homo sapiens
tcaggcctatgttggaaaaggaaatatcttcccataacaactagacagaagcattctcagaaacttatttgagatgtgtgtactcaactaagagaattgaaccaccgttttgaaggagcagttttgaaacactctttttctggaatctgcaagtggatatttggctagctttggggatttcgctggaagcggaatacatataaaaagcacacagcagcgttgtgagaaactgctttctgatgtttgcattcaagtcaaaagttgaacactccctttcatagagcagtcctgaaacacyccttttgtagtatctggaactggacttttggagcgctttcagggctaaggtgaaaaaggaaatatcttcccataaaaactggacagaagcattctcagaaacttgtttatgctgtatctactcaactaacaaagttgaacctttcttttgatagagcagttttgaaatggtctttttgtggaatctgcaagtggatatttggctagttttgaggatttcgttggaagcgggaa

SEQ ID NO: 556935 - DNA, 531 bp, Homo sapiens
tcaggcctatgttggaaaaggaaatatcttcccataacaactagacagaagcattctcagaaacttatttgagatgtgtgtactcaactaagagaattgaaccaccgttttgaaggagcagttttgaaacactctttttctggaatctgcaagtggatatttggctagctttggggatttcgctggaagcggaatacatataaaaagcacacagcagcgttgtgagaaactgctttctgatgtttgcattcaagtcaaaagttgaacactccctttcatagagcagtcctgaaacactccttttgtagtatctggaactggacttttggagcgmtttcagggctaaggtgaaaaaggaaatatcttcccataaaaactggacagaagcattctcagaaacttgtttatgctgtatctactcaactaacaaagttgaacctttcttttgatagagcagttttgaaatggtctttttgtggaatctgcaagtggatatttggctagttttgaggatttcgttggaagcgggaa

SEQ ID NO: 556936 - DNA, 540 bp, Homo sapiens
gtgtgtactcaactaagagaattgaaccaccgttttgaaggagcagttttgaaacactctttttctggaatctgcaagtggatatttggctagctttggggatttcgctggaagcggaatacatataaaaagcacacagcagcgttgtgagaaactgctttctgatgtttgcattcaagtcaaaagttgaacactccctttcatagagcagtcctgaaacactccttttgtagtatctggaactggacttttggagcgctttcagggctaaggtgaaaaaggaaatatcttcccataaaaactggacagaagcattctcagaaacttgtttatgctgtatctactcaactaacaaagttgaacctttcttttgatagagcagttttgaaatgstctttttgtggaatctgcaagtggatatttggctagttttgaggatttcgttggaagcgggaattcatacaaattgcagactgcagcgttctgagaaacatctttgtgatgtttgtattcaggacacagagttgaacattccctatc

SEQ ID NO: 556937 - DNA, 466 bp, Homo sapiens
aacactccttttgtagtatctggaactggacttttggagcgctttcagggctaaggtgaaaaaggaaatatcttcccataaaaactggacagaagcattctcagaaacttgtttatgctgtatctactcaactaacaaagttgaacctttcttttgatagagcagttttgaaatggtctttttgtggaatctgcaagtggatatttggctagttttgaggatttcgttggaagcgggaattcatacaaattgcagactgcagcgttctgagaaacatctttgtgatgtttgtattcaggacacagagttgaacattccctatcatagagcaggttggaatcactccttttgtagtatctggaagtggacatttggagcgctttcaggcctatkttgaaaaaggaaatatcttcccataacaactagacacaagcattctcagaaacttgtttgtgatgtgtgccct

SEQ ID NO: 556938 - DNA, 466 bp, Homo sapiens
aacactccttttgtagtatctggaactggacttttggagcgctttcagggctaaggtgaaaaaggaaatatcttcccataaaaactggacagaagcattctcagaaacttgtttatgctgtatctactcaactaacaaagttgaacctttcttttgatagagcagttttgaaatggtctttttgtggaatctgcaagtggatatttggctagttttgaggatttcgttggaagcgggaattcatacaaattgcagactgcagcgttctgagaaacatctttgtgatgtttgtattcaggacacagagttgaacattccctatcatagagcaggttggaatcactccttttgtagtatctggaagtggacatttggagcgctttcaggcctatgttgaaaarggaaatatcttcccataacaactagacacaagcattctcagaaacttgtttgtgatgtgtgccct

SEQ ID NO: 556939 - DNA, 466 bp, Homo sapiens
aacactccttttgtagtatctggaactggacttttggagcgctttcagggctaaggtgaaaaaggaaatatcttcccataaaaactggacagaagcattctcagaaacttgtttatgctgtatctactcaactaacaaagttgaacctttcttttgatagagcagttttgaaatggtctttttgtggaatctgcaagtggatatttggctagttttgaggatttcgttggaagcgggaattcatacaaattgcagactgcagcgttctgagaaacatctttgtgatgtttgtattcaggacacagagttgaacattccctatcatagagcaggttggaatcactccttttgtagtatctggaagtggacatttggagcgctttcaggcctatgttgaaaaaggaaatatcttcccrtaacaactagacacaagcattctcagaaacttgtttgtgatgtgtgccct

SEQ ID NO: 556940 - DNA, 463 bp, Homo sapiens
gggaattcatacaaattgcagactgcagcgttctgagaaacatctttgtgatgtttgtattcaggacacagagttgaacattccctatcatagagcaggtttgaatcactccttttgtagtatctggaagtggacatttggagcgctttcaggcctatgttggaaaaggaaatatcttcccataacaactagacagaagcattctcagaaacttatttgagatgtgtgtactcaactaagagaattgaaccaccgttttgaaggagcagttttgaaacactctttttctggaatctgcaagtggatatttggctagctttggggatttcgctggaagcgggaatacatataaaaagcacacagcagcgttgtgagaaactgctttctgwtgtttgcattcaagtcaaaagttgaacactccctttcatagagcagtcctgaaacactccttttgtagtatctg

SEQ ID NO: 556941 - DNA, 567 bp, Homo sapiens
tcactctctcacccaggctggaatgcagtggtgtgatctctgctcactgcaacctccgcctccctggttcacgccattctcctgcctcagcctcccgagtagctgggactacgggcgcccaccascacgcccagctaatttttaaaattttttttagtagagacggggtttcaccgtgttagccaggatggtctcgatctcctgacctcgtgatctgcctgccttggcctcccaaagtgctgggattacaggcgtaccgtgcccagcctaaagaagattttaatctatgcattgaaagagcccactgagtacaaaggcaaactgaccctagaaggctaaattctaaacatatcctagaaaaagtatcaaattttaaacataaagaaaaatcctcagtgattcacaatcacttctctatgagaattaaactggcaccatattttcgacaacgcaaatagaggaacagcgcatcatttttgtaaatggcattgaaacaaccagatagccatttagtaaaagatataaatacaaccatcaacacatccttaccagcataaattctaaata

SEQ ID NO: 556942 - DNA, 465 bp, Homo sapiens
ctctaacctgtatcccccttttaagagatgagatttcrttctgtcacccaggctggagtgccatgatgccatcacagctcactgcatcctccacctcccaggctcgctagtagctgggactacaggtgtgccacaacatccagctaatttttaaattttttgtagggatggagtctccctatgttggcaaggttggtcttaaactcttgagctcaggtgatctgtccttcttggcctcccaaaatgctgggattataggcctgagctgctgtgcctggcctaaccagtacccgttggtccatgcatcatgaactccttagagttcctgtaaaagggctgtgcgcactctgcctaggtcccctggcttcccatattctttttgcttgaaatacttgcattgttctctcttctcattcttttaccttccagcatctattaaatcttcaatacttccatctgatttcc

SEQ ID NO: 556943 - DNA, 465 bp, Homo sapiens
ctctaacctgtatcccccttttaagagatgagatttcgttctgtcacccaggctggagtgccatgatgccatcacagctcactgcatcctccacctcccaggctcgctagtagctgggactacaggtgtgccacaacatccagctaatttttaaattttttgtagggatggagtctccctatgttggcaaggttggtcttaaactcttgagctcaggtgatcygtccttcttggcctcccaaaatgctgggattataggcctgagctgctgtgcctggcctaaccagtacccgttggtccatgcatcatgaactccttagagttcctgtaaaagggctgtgcgcactctgcctaggtcccctggcttcccatattctttttgcttgaaatacttgcattgttctctcttctcattcttttaccttccagcatctattaaatcttcaatacttccatctgatttcc

SEQ ID NO: 556944 - DNA, 587 bp, Homo sapiens
aaaaaataaaatgaatttattcaagcacgcagaggcaaaggcagaagatcccaattacccagtgtaatctgatgtcaactacatagtgcttctcatgccataatttttttatttgacatcaattgcaacaatataacacctattaaatctaagaaaaacaaaatacaaaatcaaaatcattcaaagtagaagccctattttatatttttgtgtatttgttttgttaactttttcttgtatatttatggaaaacaatgcaatattttcacctatgtgtacattgcaaaatgattcaatcacattaacatatctatttctgttatcagactcaatacatatacaattacattttaataaagataatyataataaacataatgaagaagtcaaaaaaaagaaaaacaaactgaacacattcattgaaagtgtgtgcactggcaacaaacacggactgaacttttcctgttgaggacacataataagcagctggcagatcagccttagttgataaccatacattgaaaatcactgtgttgcagtatttaattctgtatctaccatactctggctgatgacatttgtaaaga

SEQ ID NO: 556945 - DNA, 587 bp, Homo sapiens
aaaaaataaaatgaatttattcaagcacgcagaggcaaaggcagaagatcccaattacccagtgtaatctgatgtcaactacatagtgcttctcatgccataatttttttatttgacatcaattgcaacaatataacacctattaaatctaagaaaaacaaaatacaaaatcaaaatcattcaaagtagaagccctattttatatttttgtgtatttgttttgttaactttttcttgtatatttatggaaaacaatgcaatattttcacctatgtgtacattgcaaaatgattcaatcacattaacatatctatttctgttatcagactcaatacatatacaattacattttaataaagataatcataataaacataatgaagaagtcaaaaaaaagaaaaacaaactgaacacattcattgaaagtgtgtgcactggcaacaaacacggactgaacttttcctgttgaggacacataataagcagctggcagatcagccttagttgataaccatacattgaaaatcactgtgttgcagwatttaattctgtatctaccatactctggctgatgacatttgtaaaga

SEQ ID NO: 556946 - DNA, 604 bp, Homo sapiens
  misc_feature 1, 2, 3, 4, 5, 6, 7, 8, 9, 10, 11, 12, 13, 14, 15, 16, 17,18, 19, 20, 21, 22, 23, 24, 25, 26, 27, 28, 29, 30, 31,32, 33, 34, 35, 36, 37, 38: n = A,T,C or G
nnnnnnnnnnnnnnnnnnnnnnnnnnnnnnnnnnnnnnataataccttaaagtcatgctgctttcctccagcccactttctctcatactcctcacaatcactattttaaatattcttcaaactctatttaatgtgctcataaattgccattaaagcctcttctcctattttaaatgttcagagaagaggattctctgatatttagattttttatacaacatattctttagagaagagcttgaggtgtaaaattgctgatccctgtagaatctcctggcttcctgtcaaccaaatttctcaacttactagaggcaaaaaacttgattggtcttttgtaggttaccccatgacttaaagaagacgttaagagtttargaatggcagtgattgagaaagtaagatgagagggattttaaagaactgatgatatacttcaaggtctacccatgttctcttcttcttgtaatctgtgcaccatccctagccaatctctggaatgctcatagtttgaaatagctgctttagttgtgagaaagaaaagagcaatccctgacatctatcagctgatatctattctgctctaacaactagattacaatgttcc

SEQ ID NO: 556947 - DNA, 420 bp, Homo sapiens
ggtttccaaaccccaattcttgacttctatacactcacaggctcaacaccatgtggawgctgccgaggcttggggcctacaccttctgaagccatggcccaagctctatgttggcacctttcagccatggctggagtgtctgggacgcaagggaccaagtccctagactgaacacagcacaggggcccagggcccagcccataaaaccatttttcctcctagccttctgggcctgtgatgggaggggcttctctgaagacctctgacatgccctggagacatttcccccattgtcttggggattaacatttggcttcttgttacttatgcaaatttctgcagcctgcttgaatttctcctccaaaaattggattttctgttctatcacattgttggactgcaaattttctgaacatttat

SEQ ID NO: 556948 - DNA, 420 bp, Homo sapiens
ggtttccaaaccccaattcttgacttctatacactcacaggctcaacaccatgtggatgctgccgaggcttggggcytacaccttctgaagccatggcccaagctctatgttggcacctttcagccatggctggagtgtctgggacgcaagggaccaagtccctagactgaacacagcacaggggcccagggcccagcccataaaaccatttttcctcctagccttctgggcctgtgatgggaggggcttctctgaagacctctgacatgccctggagacatttcccccattgtcttggggattaacatttggcttcttgttacttatgcaaatttctgcagcctgcttgaatttctcctccaaaaattggattttctgttctatcacattgttggactgcaaattttctgaacatttat

SEQ ID NO: 556949 - DNA, 641 bp, Homo sapiens
ctattaagattgtaagtttctccttctgtaaatattggcattttgtgtcttttgaaaaatgtgtccattttttaagctatcaaatttgtggacatagagttacttacaatatttcttcatcatccctttgaagtccatgggattagcagtaatgaccctacttttattcctgttacagataattttcttcttctctattttcttcttggttagggtggctaaaggtttattaattttatttatcttttcaaaataccagcttttgggtttgttcattttctrtagcatttttatgttttcaattttcctgatttctgctctaatgattataatttattttattctgtttgctttcatagtaaactactcttttttctctagtgttttaaggtggaaacagattatagatattaaacctttcttcttttccaatatataaatataatgttataatttttcttctaagcagtgcttttgctgttttctacaaatttcaataaactgtattttccttttaatctattttgaataatttttatatgtctcttaaggctcatttttgacccattctttagtagtgttgattaatatccaaatatttggtgttcttcctttttctgttattgatttctagtttgatt

SEQ ID NO: 556950 - DNA, 641 bp, Homo sapiens
ctattaagattgtaagtttctccttctgtaaatattggcattttgtgtcttttgaaaaatgtgtccattttttaagctatcaaatttgtggacatagagttacttacaatatttcttcatcatccctttgaagtccatgggattagcagtaatgaccctacttttattcctgttacagataattttcttcttctctattttcttcttggttagggtggctaaaggtttattaattttatttatcttttcaaaataccagcttttgggtttgttcattttctatagcatttttatgttttcaattttcctgatttctgctctaatgattataatttattttattctgtttgctttcatagtaaactactcttttttctctagtgttttaaggtggaaacagattatagatattaaacctttcttcttttccaatatataaatataatgttataatttttcttctaagcagtgcttttgctgttttctacaaatttcaataaactgtattttcmttttaatctattttgaataatttttatatgtctcttaaggctcatttttgacccattctttagtagtgttgattaatatccaaatatttggtgttcttcctttttctgttattgatttctagtttgatt

SEQ ID NO: 556951 - DNA, 411 bp, Homo sapiens
gaattcctaggctcaagtgatacccttgcctcaacatcctgagtagtgaatagctgggcctacaggcatacaccactgcacctagtcattttaccaattttttttttttttttttttttttgacacggattcttgctctgttgcccaggctggagtgcggtggcgcgatctcggctcactacaagctccacctcccgagttcaagcaattctcctgcgtcagcctccygggtagctgggactacaggcgcccaccaccacacccggctaaatttttattattattattatttgtatttttagtagaggcagggtttcaccatgttagccaggatggtctcgatctcctgacctcgtgatccgcccgcctcggcctcccaaagtgctgggattacaggcatgagccaccgcg

SEQ ID NO: 556952 - DNA, 411 bp, Homo sapiens
gaattcctaggctcaagtgatacccttgcctcaacatcctgagtagtgaatagctgggcctacaggcatacaccactgcacctagtcattttaccaattttttttttttttttttttttttgacacggattcttgctctgttgcccaggctggagtgcggtggcgcgatctcggctcactacaagctccacctcccgagttcaagcaattctcctgcgtcagcctcccgggtagmtgggactacaggcgcccaccaccacacccggctaaatttttattattattattatttgtatttttagtagaggcagggtttcaccatgttagccaggatggtctcgatctcctgacctcgtgatccgcccgcctcggcctcccaaagtgctgggattacaggcatgagccaccgcg

SEQ ID NO: 556953 - DNA, 590 bp, Homo sapiens
ttatttccccttttcaagataaaaagattccgccatggtgtgtgtgtgtatatatatatcccatggtgtgtgtgtgtgtgtgtgtgtgtgtgtgtgtgtgtgtatgtatatatgaaagtgaaaggaggcaaaagtgaaaatttaaaaggagtggatatcttggagagggccaaggtagaaagaaatagatcatcatcatcatcaagtttggtcttcaggtagaggtagagaatgttgagagaagattgtaccatcatcttccttttgcaaaacacttttttccagtgacatgctttttttgtgtgttagtttgttttgttttgttttgttttgttttgttttgttttgttttacaatattgacagagaccagggartcttcgtttggtgatttatctgggagcttacatctactacaattgaagcttaagaattttaataattttcttttttttagtgttttcaagggtggaggcaagttgttttgctaaattaattagattaggagtgggcatggttttccgttctgtgtgagctcttttaaaagctgggaaaattttgacagaaggctattcacaaacatggaattaa

SEQ ID NO: 556954 - DNA, 501 bp, Homo sapiens
gaaagaatgagccaacagcagctagtgctaggggactctttttgtaagaatcttacatgattatttatgaaggggcytgagggagtgttacttgcgagtatgtttttgaaggatcctttggtcactatcatgtgcacattatagtacacacttcgcatgtctcattagcatttacaggctccacccaggggtgtatttttacctttataatgagcaaaaggctactctaaggtgaggttttggaggagtgtgcatgcttatcagtggagaaaatccctaacataattatctttggctaggttctttatcagtccccttcagggccagagaagcctaaacacaaggctagatgtaaccagtgtagccattgtcctttttgctatcagtgagcagcattgattatcagtgggcagcatctccaggacttctttagccagggggctcccttgcctacttgcttctggctatctgcctactctaacacttccccaaactaaaatt

SEQ ID NO: 556955 - DNA, 501 bp, Homo sapiens
gaaagaatgagccaacagcagctagtgctaggggactctttttgtaagaatcttacatgattatttatgaaggggcctgagggagtgttacttgcgagtatgtttttgaaggatcctttggtcactatcatgtgcacattatagtacacacttcgcatgtctcattagcatttacaggctccacccaggggtgtatttttacctttataatgagcaaaaggctactctaaggtgaggttttggaggagtgtgcatgcttatcagtggagaaaatccctaacataattatctttggctaggttctttatcagtccccttcagggccagagaagcytaaacacaaggctagatgtaaccagtgtagccattgtcctttttgctatcagtgagcagcattgattatcagtgggcagcatctccaggacttctttagccagggggctcccttgcctacttgcttctggctatctgcctactctaacacttccccaaactaaaatt

SEQ ID NO: 556956 - DNA, 345 bp, Homo sapiens
aatccaatgaggcaataattcaatcttaaagctccaaaaaatctcttttgcttccatgtctcacatccaggacacattgatgcaagaggtgggctctcacatcgttgggtagctccacccctgtggttttgcagcatacagcaaagcccmcaccacccccccaccccctccacccctgactgttttcaagggctgatgttgagtgtctgcagctttttcaggtgcatggtacagactttcagggatctaccattctggcatctggaggacagtggactgtttctcacagctccactaggcagtgccccagtggggactctgtgtgggagctctgacctcacattt

SEQ ID NO: 556957 - DNA, 558 bp, Homo sapiens
atataaatgtgtattaatacacacacacatayacacaaacttaacatataaactcataccctgataaaagaggaacttataactctgtttcataaaatgggatcatatcataaaattacctgaagcactgaatataaagtgatttaaaactcataagattatctctcatgtgccaaatctcagaatacatgatagactatacagaatataagaacaggagaaattgctgtgattaagttgtatgaattgtaggattattattctaaccataacacctaacaaaacttatttgactcaatctaacaagacttattggttgattttgaaggaaagctgtttaatgaattgcaatacagaatttaattaagaaaataattaaaactacaagtttaacctaacaggaaactttaagattactacataatgttaccagggaacattatacagataattttatgtgccacaaagatcaagattgcaatcatgagtcaagaagagaactggatcaccaagatagcacaactgccaatggttctcactttcattgtgatggttcaa

SEQ ID NO: 556958 - DNA, 575 bp, Homo sapiens
catcccatattaggttgctttccttcctttttttcatttcccatcattctaatggttcttcctagaatcaacgcctaacctyccatataaaccacttacactcaaagcctttgagttaaacaagttaaagaggactctggaatgctctacttctcagacattttattatattctagtatgctatatatcaacaagaggaagacctagaaaaacttgtcaatcttattcaaccatagcacattttttcagcaattaccttttgtatcttgaggaagagggcctctttggagaatactttttggaaacattgagaaaaagaaccaccatgacagatacaaattttctaaattagatcaagctctttgtaactgaatacctaattaaaatttatagacataaataggtgtaatctatgtaagaaccaaaatcgtcttcccccattcagtttaggcactgacaactgaaatcataccttactgtctatattaatattacttttatattcatcaacatgtctttattctcccagggccatcttcctccagcaagtggtgtgattgttgactataggaact

SEQ ID NO: 556959 - DNA, 420 bp, Homo sapiens
aatagaggagagggaaatacttccaaactcattctacaaggccagtatcatcctgataccaaaaccagacaaagacacatcaaaaaaagaaaactacaggccaatacctctaaagaatatttttgcaaaaatcctcaacaaaatatgagcaagctaattcagcaatacactaaaaagattattcattcatcatgatgaagtaagatttatcccagggatgcaagaatggtcaaacatacgcaaaccaatcaatgtgatataacacatcatatcaacagaatgaaagacaaaaaccatgtgatcatttcaatygatgctgagaaagcattagatagaattcaacatctcttcatgataaaaaccctccaaaaactggaaatagaaggaacatacctcaacataataaaagccatatatgac

SEQ ID NO: 556960 - DNA, 512 bp, Homo sapiens
ctcagcctccataactgtgtgaatcaattccttataataaactaatttctctatctctgtttttctacatctctgtatccatacgtcctactgattctgtctctctggagagccctgattaatcctgaccaattgacataagcaaacagagagattatcaatcaaactgtgtctggaattggtgggttcttggtctcactgacttaaagaatgaagccgcggaccctcgcggtgagtgttacagctcttaaggtggcgcrtctggagtttgtttcttctgatgttaagatgtgtttggagtttcttccttctggtgggttcatggtctcgctggctcaggagtgaagctgcagaccttcgcggtgagtgttacagctcttaaggcagcgcgtctggagttgttcgttcctcccggtgggcttgtggtctctctggcttcaggagtgaagctgcagatcttcgcggtgagtgttacagctcataaaggcagtgtggacccaaagagtgagcag

SEQ ID NO: 556961 - DNA, 501 bp, Homo sapiens
ctgtgggttgtctctttgctctgttgcttgtttcttttgctgtgcagaagccttttcagcttgatataatctcatttgtcaatggcagcttggttggcctgtgttctggaggttcttacacaaaaatctttgcccagaccaatatcttggagagtttccccaatgttttcttccagtagtttcatgtcttagatttaagtctttaatctattttggttagttctgttgtatacggtaagaaataggggtctagtttcattcttttgcatatggttatccagttttcccagcaccatttattgaagagactgtcctttacctaaggtatgttcttggtgcctttgtcaaaaatgagttggctgtaaatgtgtggatttatatctgggttccctattttattccactggtgtatgtgtttgtttttatgccagtactatgctgatttggttactatagctttgtartacattttgaagtcaggtaatgtgatgcctccagctt

SEQ ID NO: 556962 - DNA, 476 bp, Homo sapiens
ctttttttttttatttgttttgagtccgagtctcgctctgtcatccaggctggagtgcaatggcatgatctcggttcactgcaacctctgcctcccgggttcaagcaattctcctgccttggcgtcctgagtagctgggattacaggtgcctgccaccacgcctggctaatttttatattttttgtagagatggttttcaccatgttggccaggctggtctctttggccaggctggctttgaactcctgacctcatgatccacctgcctcggcctcccaaagtgctgggattacaggtatgagttaccgtgccyggccaagaacatttttcataattatctttttatctttttattttttccccaaccctgtcagtcactaagccctcttatgtgaaaagaaaacagtccataatgtttttgcttctttgtgagaacttcccaagactgctctgggacagtcccctaaaatggatg

SEQ ID NO: 556963 - DNA, 476 bp, Homo sapiens
ctttttttttttatttgttttgagtccgagtctcgctctgtcatccaggctggagtgcaatggcatgatctcggttcactgcaacctctgcctcccgggttcaagcaattctcctgccttggcgtcctgagtagctgggattacaggtgcctgccaccacgcctggctaatttttatattttttgtagagatggttttcaccatgttggccaggctggtctctttggccaggctggctttgaactcctgacctcatgatccacctgcctcggcctcccaaagtgctgggattacaggtatgagttaccgtgcccggccaagaacatttttyataattatctttttatctttttattttttccccaaccctgtcagtcactaagccctcttatgtgaaaagaaaacagtccataatgtttttgcttctttgtgagaacttcccaagactgctctgggacagtcccctaaaatggatg

SEQ ID NO: 556964 - DNA, 476 bp, Homo sapiens
ctttttttttttatttgttttgagtccgagtctcgctctgtcatccaggctggagtgcaatggcatgatctcggttcactgcaacctctgcctcccgggttcaagcaattctcctgccttggcgtcctgagtagctgggattacaggtgcctgccaccacgcctggctaatttttatattttttgtagagatggttttcaccatgttggccaggctggtctctttggccaggctggctttgaactcctgacctcatgatccacctgcctcggcctcccaaagtgctgggattacaggtatgagttaccgtgcccggccaagaacatttttcataattawctttttatctttttattttttccccaaccctgtcagtcactaagccctcttatgtgaaaagaaaacagtccataatgtttttgcttctttgtgagaacttcccaagactgctctgggacagtcccctaaaatggatg

SEQ ID NO: 556965 - DNA, 522 bp, Homo sapiens
tgtattcaacaaataggaatgttaagcattacattcctattttgcagatgaggaagctatacaagataagtattgcttatttacaaagttagttgaaaaagcagttgtttcaacttttggcaccggtttggattaactactgtcttgatttctttttccccagtagttttatagtacttgccttttaggttaaaagttgtggttttgagtgtgtcaattttcaaattgtatcctaacaactatattttagtcaatctgagattcctaagaacttcatcacttcacaaaattgcattcctggttctttcctcatatgtgtaccacactttaaatatagaggaattgacagtatgataatcactaaaatgaaaatgaagaaataaaatagaaattcttaacaacttaaaggtagtaatcaytaaattttaatttgaaaatgtcctaagaacaaccatataccagtatgcacattttaatgtcatatatggtaatagggccattagcttaatggagtattaaggt
